United States Patent Application Publication US 2011/0014706 A2 - sequence listing, part 31

SEQ ID NO: 71088 - DNA, 564 bp, Arabidopsis thaliana landsberg
aggttcgtgttgaatgttttgttgatcaatattttcaggcttttatcaatgttccttggtggtcccttgtgttttatactgtgattggtccgttcatgacaccaagatcaaagagcaagcttgtgtttgctggtccttcgcgttcagctgaaaccctattcaagtaacattgagtccgtttgttttgtttcttgaaaccatttatgtttagtctcttaactctgtttgaaaaatgtggactatagatacatatcacccgagcaagttccagtacaatatggtggattgagtgttgatccttgcgactgcaatccagacttttcgttggaagattcagcctctgagatcactgttaagcccggaacaaaacaaactgttgagatcataatctatgaggttagagcattcacatatttaactctgtcattatgtgaaaggtgacatccaaggttggttagtcatgatatttattacaactctatgaatgttcgatttcaagtttttttttgttggcgtagaaatgtgtactcgtgtgggagatatggtaactggatgggagtgagc

SEQ ID NO: 71089 - DNA, 384 bp, Arabidopsis thaliana landsberg
  unsure (1)..(384): unsure at all n locations
aacacgccagagacgagacaagcaatagaaaactanaagcagccacagccccaaggggaacgggagaaacaaaaacccggaaccccccacacacccaaaggacaaaagaaggccccgcggcaacaaaacacggccgaaaccaaagaccgaccgnnccccgcaaaaaacggcggaaagagcgggcacggagcaagacaaggggcagccacagaggggacccacggacaggacaacaccccaaaacgaaccccccccacagcgaggcacgacccaaccgcagaccagccgaaaaaaggaagcgagggcccacccgacgacaagaccaggaacggaaaacagaacggaacagaccaccccacagccggcgggcacacggcaaacaac

SEQ ID NO: 71090 - DNA, 177 bp, Arabidopsis thaliana landsberg
  unsure (1)..(177): unsure at all n locations
aaaaagaagcaccccgcaaagacacgaaagaaggccacggaagcacggcaggaaaacaacngggaggaagagcccgagccaacaagacaaaacgagaggggcaacccaggccaacggcgaccacggaagacgaaaaggccagcaaacgacgcggaaaaagccacaggaacgggccaa

SEQ ID NO: 71091 - DNA, 532 bp, Arabidopsis thaliana landsberg
  unsure (1)..(532): unsure at all n locations
aatatatcgaaaatatatgtaacggcctatctaagagatcctgtcattaagatttgatttggtggtatatcaaaaggattgtgcttttccttatgaataatctataaaaagtataaaatcataggattgatttttgttcattagtatttttttttctatgtttttattcaatactagtattcatcattcataaaaaaaacataaaacagtgctagaagcctagaagaggaaaaaaatcttaataaatcaaattttattaatagattaatttgtaagtctcattaggaaagatataacatctgtaggactgtaacaatatcataattttttgaaattatcaagtttgacacaaagttttgaaattattaaaatcatctaactaagttttcaacaaagaccaactatttttcattacactaattaaggaaaagaaagctggcactgagcgttagttacacgcgcccacgcgctacagcgatgtcctaaatccccattatattcatatttgtcgngctcaaacgatcgacaaatc

SEQ ID NO: 71092 - DNA, 349 bp, Arabidopsis thaliana landsberg
agaagaaaggaggaagggggagaaaaaaaaacccaaaccccccccaagacagaaacaaaaggaaaggaaaacagagacgacgagaaccaaacaacaacagcgccgacaccgcacccgccaaggcgcagcaacacacaaccaagcacgacacacaacaccacacccaccgggaagggcgccacacaaaaacacccaagggacaacaccaaacacaacgcggaaccagaacacccgcacagggcaacaccagaacaccagaaggaacagaccaaagggcgaaaggaacacagaaggaacgggaacagcgaaagccacccagaagaagaacggacaaaaagccacaagaagc

SEQ ID NO: 71093 - DNA, 168 bp, Arabidopsis thaliana landsberg
  unsure (1)..(168): unsure at all n locations
aaaggggcgagtttctcaaggccaccaccccggaacaactnggattggagccgggcgggcctttcgcaccctatacgggtacgaaccgaaaacaacggaaaaagttggagtcaaacgccaaccactcccaacggaaataggatagactaccgacacgagccacagcac

SEQ ID NO: 71094 - DNA, 381 bp, Arabidopsis thaliana landsberg
tctagaggatcccccgcacgtcgattaagagggaaaatgggcttaaattggctgcatttgctaaaactcggcccaaagaaaagtatagatatattaagtagtccgtttctttaaagtcggctttagattcacacagtgtcgatttgtcaagtaacggcgtcaaaagcgaaacggcaacgtttggtaggtgagacacgtggatcagatagtgttttgtctcctaatccaatctctttcaaagcatacataataaatgcatatatataagcacacattaaacggagttaaactcatcatacattactgactaaaagaagcaaaatcttgagtagaaacaaattttcctgtatctctctctcttgtaatctccgacgaagaaac

SEQ ID NO: 71095 - DNA, 280 bp, Arabidopsis thaliana landsberg
gaaaaacaggcaacggggaaagaggcgccacggccccaacgcccaaaggcgaaacagaacaccagaacagaacgggcaaaagacgccaaaccaaacaaaaggaacgccacaaaaaaaaccccgcacacaaaaaaaaaaagcagacaacaacccagaaacaacgaccgaacagcgccaaaagaacacagggacaccccccagagcacaagcccgagcggaaacaaaacacagccagcccccgcgcccaaaaacatagcacacaacagacaacaacacgcag

SEQ ID NO: 71096 - DNA, 155 bp, Arabidopsis thaliana landsberg
  unsure (1)..(155): unsure at all n locations
gccggaaacaccggcgaccccagagccgaccaggccacaagagacgaagaccacgcaaggcgcgcngaacaagaaacccaagaccacaaaccggaaacgccaggnacaacatgacacaccacgagaacacacccagcgagcagccagaggcaaaa

SEQ ID NO: 71097 - DNA, 1199 bp, Arabidopsis thaliana landsberg
catgatcatgttattttcgtttgtttattgatcagctaacagagcaaacgttgtcaaagaaagagaaaggtacactctgttataatttgcgcatgaacatatatgaacatttctatgatacattgtgatctagacataagtattttttgcctgatattctcattttggttttatgttttattgcaaaacagaagaggctgttcgaagagcaaatgctttggagaaggatgatttatattccttaaggtaatgaaccttttccttctttatttgtttgtgatgatcgctttttaacagtgattttaggtaattaagtttagttacctagcatgatttacaagaacagtagtcaataatgtacctgggtgttttatgttaaaatcccaccgttaaaatactatatgatgttccagttaccaatttttgactatgtcaatcatctccttgttaagtactcttgagggtgttcttacttgttgaaataatctctttggaggctattttgtgctgtccatgttattgatcatcttttggtgggtctgatacaggaaagtctcgagacaagaatacttaaagaagagagaacaaaagaaactggatgaactaaggtacatgacataaagatttttgcagttttctatcttttatggatctatcttctataattgatttctcccatttttattcttttctccatagggatgagatagaagatgaacaatatcttttcggaggtgaaaagctcacagaaacggagcttcgtgagtttaggtaattgttacatctttcttgtatcaaggcggttgttgccattgccaacatctatttgatgcagcatgcttcttttgatgaggaataaacattttcaattgtatatgaatagtgcatttttaaaaaatttatttttgcaattgaaaagttagatggttgtattcatatttaagaaagtatgtttagttatagttgattgagcttgggttgatctgttatctttgataggtacaagaaagagctttatgacctcgtgaagaaaagaacacaagatgaagataacgtcgaggaggtaacgttttcatcttgctggacccttctcccacttggttatgtagaatatctatatatctaacgcctctcccttttactcctacctctcggagttcagtatagaattccagatgcttatgatcaagagggaggtg

SEQ ID NO: 71098 - DNA, 387 bp, Arabidopsis thaliana landsberg
gagacaatctgtttttactattgcatttttctttttctacttcttatgggttagacacaaagtaagggtaaagggggaacatgctgtatcacagattaagcgaatgctacataacaagacatctttttaagtccattgtgacctgtttagttcatagagtccatttatcatttattttcctcactatacagtccacatggcacagtttctgatactacactcatatctattctgcttttttctacaatcatagtatttattatgcttttaaatgccttaattaatcccttaatgccgcttattaagataagaaccatactaccatattgcaaacttttaatcttaaaactaccgctttacattccttagattttacagcgatctttt

SEQ ID NO: 71099 - DNA, 672 bp, Arabidopsis thaliana landsberg
acggaccccctcaaacgctggtagagctggcagacaggtgcaattttgctgaccctgaccgcctgttaaatgcttagttacagcgtgcatcaaaagaggacaggcattatttcgcacattcactgggtcatgcaactgcacttacttttcaaagtaaccatagaaataataacaaacccggctatctgtgccattgcgtctgtctggcggtggaggagggtgtatccccagctccgctatctggcatattaataaataatctcacgagtacgcaattctggggtttttagggtctgcccagatgcccttcccatccaatccgactttcgggactcttcatcatagaattcaccggtcaccatcttctttgcgctgccaaagctgacatcctgacctttcgcaacctaattgtttctgattgtagaacctttcctctcagatactgagcacctgactccagccgtggcatttgggcggacgcttaacgccattttgccgtcgtagtggcaaccccacgtacgacatcttcgccaccaacggttacctactggactatatcaccagtcgagccgcacgcaacaggcatgagtgtataccagtacccggtatcataaacttggattgcaagcggggggcgttgatcttgtgaggacaccatggattcatcaatgc

SEQ ID NO: 71100 - DNA, 522 bp, Arabidopsis thaliana landsberg
  unsure (1)..(522): unsure at all n locations
ccacatctatattttcaatagatctttttacacattaaatgttcatatcttgaaaacgaaatatactatgttagaaacaactcatgccaaattgagaaaactggaataatatatcagcggtttgcaagtaaaatttcgttgcataataaaaccggagtataactttcacgcgaaaatccattttaaaatcaaaatgctggaaaatttacgaacatagattcgggattcaaaaagatctcttactagatcctaagatcatgatgcctacatattcacaacgtatacaaaattaataccatgagccatggggattttctactttcataaaggataactagaagatggagctagtagtatatgttttttatggtaattgacatttatgcctagttcattgtgttttttcgtaatgaactgcgaatattttggtgattctttggcataaactaatctaaagcaaagaagaaaataagagttaactaaaattccattgtcttccatttgccttcgntaatgccatgt

SEQ ID NO: 71101 - DNA, 100 bp, Arabidopsis thaliana landsberg
tttttttttttttcactctgcatacgaagaaacaaatttacttttttaacacagttcaacacgtcaatgggcttagtgtagttaactttacacactccaa

SEQ ID NO: 71102 - DNA, 373 bp, Arabidopsis thaliana landsberg
tggccattggtgagatcttcaacttcgagaatctcaaccctccgtttcatcttcctttgcagttttaatgcaacatcggatggtcgaaaccgtccgcaaaggattacttgacgttcctttttgttgatcatgtgtgtatcaacttcttcataaaaaagtatccaaaacatgtgttagtattgaattttctataaatccaccacgactaaacctacataaaatggtgcatatagtaacatcgataaaatttaacgatgtctttctaaaattttcagattttccactcaaaaaatcctccttgaactttaaatcttattttcataacatccttctttgctcatttcatccacatattattttatataaccaatat

SEQ ID NO: 71103 - DNA, 437 bp, Arabidopsis thaliana landsberg
accaggcggaggggcgacccgaggacgaactaacaacgcgcgggggggtcccgttgagaacgaagggcccgacgacacgggcgggagaactccaatccataaacgcgcgcccgctgtaagagaatgagatacaaaaccaacggaccccgaaacaggaaccaaaggagcaagagcaattggcacccgtaccggcgagggggaaaaagaggaccatacgggggggccggcgggggtaaaacagtacgaacaatggaactgaacaacaacaatgctaaagcccacggggggggaaccggaactggaggagaaggcgaacggactcgcgaaggaaacgaaccccacatggaaaagaaagaacccggagccaacaacgaacaaaaccctgcggaaaccaaagcggccccagccccaggccagaagaaagaaccgccggagcc

SEQ ID NO: 71104 - DNA, 672 bp, Arabidopsis thaliana landsberg
gatggccccgttgtgcccttcggacggttccggcttaatttcgttcgcaaggatcgcatcgaaaacaatgtgttccctaggttggccttcgcgggtcacgcgaacacatttcgccactgggcgaccatagtcacgaggctggcttcgatccgtgcctagcaggctgttgagaatgtcgatttcaaagctgcagcgatagagtttttctatcgcagcaggtgcatgtccgtttgggtgaagacccttttccaggttccgggcgcacgcctcccgtcgcggctcacgttggcgatggattccaccactcgccaatgccgccgagtcggatcaggttgtatgccgcaaacgtccacgtcacccaaccacgcaccttgggcagcgataccagcggcaacttgtccagcccgccaacagtcttgatccagccaaaaccctgctcgatgcgcttgcgtacctgaagactcatcgcgtaccccttgccgcgcgccttgcgcgcatcgatggcgctacgccggcccgaggtgttgcgcgcgatgtgtggcttgattccgcgctgctccagcgccgccacgaagtcgggcgtgtcgtagcccttgtccgcacccaacgtggcgcctcggcgcacgccggccgcgcccagcagatcgagtgcaccattacgctctcccgtgc

SEQ ID NO: 71105 - DNA, 433 bp, Arabidopsis thaliana landsberg
  unsure (1)..(433): unsure at all n locations
tggtatacattaactgtcgaggcctggaactcctgtatggcataggacacatacttctaggtttattgcgaagatttcacattacccccctttagatattgttggacaaaaatactgaaaagggtgaggggagcgatgtaactctgttacagttgaccaatgataaacgatcaaacgcttcaataaataagagatgccctctagccgactggcatattgtgacgagatactagaatatgataagggacacacgcgccgatactannnnnnnnnnnnnnnnnnnnnnnnnnnnnnnnnnnnnnnnnnnnnnnnnnnnnnnnnnnnnnnnnnnnnnnnnnnnnnnnnnnnnnnnnnnnnnnnnnnnnnnnnnnnnnnnnnnnnnnnnnnnnnnnnnnnnnnnnnnnnnnnnnnnnnnnnnnnnnnnnacatatat

SEQ ID NO: 71106 - DNA, 547 bp, Arabidopsis thaliana landsberg
tttcatcgtaaatatttgccaaatataaaactactgaactgttataactcgatttctaaagtaatttcaaagcgtattaaaaaaaaactactgaattaaaaagtaatataggaaatttatagttagaaagcaatacgaaagtgatggggtttttaattgtttttgaaaacatatattgcaatagttgtattttttttttttttggtcgtccatcccgtatttgatttccaaattggaaaattactaagtgtatcagaatccaataatacaaaacaaacaaagtctcgacaaaaaaaaaacaaaaaaaacaaagtccaacatagatccaaaataaagcattacggagcaaaaactagctgacctcgtaagaacacgtacaataacacgtgttgttttgcaagttggaggtggaaagacacgaaatgactcatccaccagagctgaaacatcggctgaatccaatttttccgatgaaaattaccaccaattctagctgcttattccgtttcatcataccaccacttttagctaaatttttcgagggcgt

SEQ ID NO: 71107 - DNA, 513 bp, Arabidopsis thaliana landsberg
  unsure (1)..(513): unsure at all n locations
caaagatattctcattgctggtgcggcactgcctatcgacgataatgccgttattggtgacgatgcctgcgtcccgggctaggctgatttctggcactatcccgaccccgactaccacggcatcgcaatccaccagtgatccgtcatcgagttcgacctgcgtcacccgcccgtcaagcaccttcatcgcgttcacgccgcgtccgnnnnnnnnnnnnnnnnnnnnnnnnnnnnnnnnnnnnnncagccattgcccgaactgcggcccgagcgcgcgaatcataggcgcggcaagcggttcgatcgcggtcactcggcaccccagcttgaccgcgctggccgcgacttcagccccgatcacacccatgccgatgatgacgatccgggcgccgtccctgaggtccgtcgccatccgggtggcatcgtcccgggtgcgcaagtaatgcacgttggcggcgtcggcaccctccatgttgagcttgcgggcggaaccaccggtggtcagcaggatgc

SEQ ID NO: 71108 - DNA, 380 bp, Arabidopsis thaliana landsberg
  unsure (1)..(380): unsure at all n locations
tatgggatgtcaannnnnnnnnnnnnnnnnnntgatgaaaggtactcatatttttcaacgaataattctcttttaagagtccaaatatacatattactcatataacttagagaaacactggagagatatcatgggggaacagaggaaccgaccgagtaggaaaggtgtaggtcctaaaatgtcaccagcgaattgcgggataagcataggcgactccaaggcagaatgcgaagtggaattagattgaaggtaccgtagcagacaccgacccagaacaaggggcagagggattctataataactgacggatacaaaaagtactgtagatactctgtacccgaagggagctgtattcatgtgacacaaaattcgtatacact

SEQ ID NO: 71109 - DNA, 444 bp, Arabidopsis thaliana landsberg
  unsure (1)..(444): unsure at all n locations
acccgggccaacccgggcgagaccaacgactacacaactactacgacgacgccggaccgggggaaaagggggagaaaaacacccgcccccgccgagaacaganaaagacaaaaaggcggcgcaagcgcgacaaaagaaacacagaaagcgaccacccgaggcacagggcacacccggcggacacccagaaacgagcagaccgacaaacccggcgaagcggaaagcagacaacccccggaaccgaacgggccaacaggcgccacggagacaaaggcgngaaaacgccaacagcgaagaagacgcagaaagcgaaagcaacgccaagacacggcaagccaaaccgggggaaaggggaacagcccagacaaaagcagccgaacgacgaacggaccgacgccaagggagcgacagagaccaagnagggcaacgcaagaggaaacgaac

SEQ ID NO: 71110 - DNA, 535 bp, Arabidopsis thaliana landsberg
ataaagggtataccattgcccttagatttgtagccaagtaccgggagcaggtgggtgggccggtggcccgcctcaggaaagaaatgtgaggtcgttggatcctgatccggtgaatgctgactgaccacccgttttttgtggtcaattcttacaacttcatccattttttcccttgccatatttatttatgaagtacatttccttaacttattgttaagtagatgaaacagcttttacctgtcgcactcttcgtttttgcctggcccaataccaatcctgtacaggcgcaatccattgatcattgggaaactatagtccaggccaaccaaaactggaaatacctggtacccatcagtgccgtacctgccagctggaataccgtaagttttgatgacagttcctgggggaccggccccggtggattctgttatggtgatggtgacgattcaaccattatttcaagcacttttgtcggtgtatatgcgcaagacctttacggtggccgatccctccaattattgcaggccgtttaaat

SEQ ID NO: 71111 - DNA, 522 bp, Arabidopsis thaliana landsberg
aggtcggcctgggccgaggcgacctgggcctgctaggcctgcacctgcgcggtaaggtgttgtcattcccgcagatggtcgagacctgacggttgacctgatcgagctgggcctgcgcggcggccagggccagtttggcgtcagtgtcgtcgagggtcagcagcacatcgcccttcttcaccggcttggtgtcgtagatatcgacctgcgcgaccggcgcggcgatctgggcggtgatggtggcggacgacgcatcgacataggcgttgtcggtggagacggtcttgccgccgaacagcagttcatagccgccccagaccagggcgatggcgacgacggcgccgccgaacatcaggaacaggcggccgcgattggaggaggctttaggagccggagccggattgggggaggtttcttgatcggacatgggtttgacttttcagaaaaatcttattcggactgatagccgccgcccagagcggcgatgaatttgatgcggttgtcgtaggcctgcgccttgag

SEQ ID NO: 71112 - DNA, 164 bp, Arabidopsis thaliana landsberg
ttctcctgaggagaagttcggtttcaaagctccggagctttcagtatgagcccgccatgcttatgtgcgtgggaggatccatatttgagggacacgcgctgatcaccacactgaactacttatgtggcaggcagcctctacagtccaggcacaatcaacgcttt

SEQ ID NO: 71113 - DNA, 547 bp, Arabidopsis thaliana landsberg
tgactacacactatatgggtgtttcctttctgtcaaaagcaaagtcttaccgaccgccccagagataagtatccaagaggggatctgctgggtggtaagtaagatgtgtggttcaaaataatcgtgaaaggttggcgaaattaattacatgtcacaatcgatttgcgagaataatacatttaaaactcaaaacacgtacaacggtacatgctcttactaataactcaagatgttgttttttgctattggaagtcacgtgaattcttttatatttatgtttgaattatgaaaattttggtgtcatactctatcaagaaaagtttttttttttaatagaaaagaagaagaaaataatttggtgttatattttgattcttttacattagggtttaatgtgacaaatttgtttagttttcatcttttgttttaggtaaatgagttgaatcatatatgttttattcaactttcgaccccaaacaaaaaaaaatgttttgttcaacttttttttttaattcttccaacttttccagaacctgaattgaatgaa

SEQ ID NO: 71114 - DNA, 482 bp, Arabidopsis thaliana landsberg
  unsure (1)..(482): unsure at all n locations
ggataccgccttcttgccggtcggcgtttttgcggttgccgacttgccgcttgtttcaaccttgcctgtcgtaccaccacgctgggcgagggtcgtctttttcgtggctgccttgcccgcgctcttggctcgcggcatggcgactgtggactttttggtcttggcagctttggtgttggccacggattctccctcctcgcccgacggcaatggtttggtgccagcaccgcgacgcagcaagcattgtcggccggcggccagctgttatagcctgttacttaaacaccggcaacccctgcatgcaacgtcccgtgccatttgtcacggaccgctttacgtgacccatgacgcgcctgatcctgttcctgctggcttgctacaagtggctgctgagccccctgctgggcaaacagtgccgtttcgagcccacctgttccagntacgcacgcattgtcgtgtcccgtttcgggccgtggcgcgga

SEQ ID NO: 71115 - DNA, 555 bp, Arabidopsis thaliana landsberg
aagtcaaggaatattagcaggagcaagcaaaacaagcactacctaaggcatttagatatgcatgctttgggcctttggggggtttgaatattgaattgttcgcctatattgtataaagaggcatgtattagaagtctggttatagctataaaattacccttattaaaaacttcctcacaccagcaaagttttcaaatctaagataaatacactttactttgatataagcaaaatatcctatagaatcaaaactaaatgataaagctaacattacaaagcaatatttaaactaaaaggtatcaacctccaacaattttaaacaaaaatcaaaatgacttgacacggaactgaaaatgggtcatgtgtacgtgagaccgtccgtgtaggaagtattagtttttattgtcgagaagtaatggagaagattgtaatcggaacttttaaagatgatcaaagtgaaaaaagagaagtaaagcaaaagctctcgactttctctgttcccatggaagcatatcagtacttcatgttcatccatcgctacaaatactactttca

SEQ ID NO: 71116 - DNA, 417 bp, Arabidopsis thaliana landsberg
aggctaggagccacgcccacccaaaacaagaagaggagcctgatgaagctcatgtaggagaacatgaccgtgccgaaagtattagaagactcttgaaggctgggagaaagcttatactttatccaaactcatactctacattgatcggaatcatctgggctactttacatttcaggtgggaaaacaaagctctcttagttttaacactgcaatcatatcttttgtgatcaatcatattacacatgtcaagattgaaccttgatcatcttacatatacagacactgacttttctctttttcaaaatgatgagcgataacataatgaagagtttcccctataataagctttctgtttgatcatgatatgcatctacaaattcatatatttaatattctaaaatcgaaaagtgatagcca

SEQ ID NO: 71117 - DNA, 579 bp, Arabidopsis thaliana landsberg
tcctattagtttagaaatataggaatgctaatgcaaactttaattctcacaatcacataccccactacgttccagagtagacaaaggaaaaccatcttctgctttccatattctagctgatccatcagttgatgttgtagctaagaactctgagtcaagactacaaaaaaatatacaaatatgagaaagatgcacacaatgggtttcgtttcacaatctccattaattactatttgtgttgtataacccaattctcagctctatacagaagaccattttttactacctcaattacagttttgcattacaaataatataaaaggggggatggtggctgagaagattccagtatttacctaaaatccatgtcccggatggatttgtgtgcctttggctcatccaaaattacacttaggtttggccactccataattctaagacatccatcctgaaaataacttgtagtaagctacaactaaattgtcgcaacagtgaaagaaaaaaatcccttatattgcagttgcttaccactcccccaacagctaatttagacccatcaaagctgaaggccatacactt

SEQ ID NO: 71118 - DNA, 631 bp, Arabidopsis thaliana landsberg
ccccccgttaggattaggtttgtatttgtttggatatgaaatatcacgtgtgtgcagaactgatagagtacgtcaagtgatagcaaataactggaaaacgagacacgtatggcacgtgtcgacgagcctacacgaaaactcatgaaaggaggcgttcacgatgtacgtgtctagattcacaaaactataaatagaagcaactttactgttccaaatctatagttgaatagttgtcgctttatatattaaggatctgtagtttttaactgattaatacgttcgatgaaaaaaataatacatatctcttttatttggagccacataatctttttctttttccatttcttgttttacatttctataaacttgtgacaattattttgacagatgtttacgaaataaacaaacaaacaaaaagaaggaaggagattccgaacaaaaatatgtaggggatcggagagagcaaatgagtcgctgagtgcaaagagacgggtaagaactaagaacatgacatagagaggacaacagaaacactgtgtagggtatttatcaacaaaaaaaaaaaaaaaaaatgaataacccttttgattctaatttctcaatgttaattgaatttggcagctccgcgagt

SEQ ID NO: 71119 - DNA, 1150 bp, Arabidopsis thaliana landsberg
atcctcctccactgagtaagcagcaaaacaatggctgaatcaaagagacttgagaggcttaaagcaatgagaagtttattgaagagtgagatggagaaatctgaaaccttttcattggttcttaacaagactggatccaagattgaagagatcaaccataagttgtcgtctttagaagctgatcttaaagttgagagatggaaggcttctcctttctctgatcatatccgtcacaccattgctccaatatccgccgtcctgagagtctttgctacggttcaagagcttgagagatctctcgtgtcctctgatggagaccatggatatgtttcggatgttaatacgtcttggagaagcgatgaagcttctctccagtagctgtgttcttgctcttaactggctagaagatacgatcgagtacctaaccgaaaagggaatgcctgaagatcatccttgcggtttgcggttcaagacttccatagagcttctccgggaattgcaaacgaccgagtctcgtgcttatctcaaaggaggtattctttacacagcgctgaagaatcttgaaacagaattcaagcggattctccaagagaagccggttttctcagaagacaacttgagaaagttgcaggctatcatcaagagattacatgctcacacgcggttaacaagctgcgtaccagtttacatcaaagtccgcaccaaggtcattcagaaacggtttgagattagttatctggagaaaacaatcacagaagctgataatgtacatgatattgaaggcgatatagatcaatggagattgcatatggagatagctgtgaaagagatatacgagtttgagagtaagctctgctatgacgtatttgaagatattggagaagatgttcccttgcgttgctttggagaaatagcttcaaattcagtgatccttcagcttctcagatttggatcaagaatcagcaaatgcaagagagagccaccaaagctgatcaagctcttagattgtttctctacaatggacaactttcggatagagtttaacaggctatttcgaggggaacaatgttcagagatacgcagagttacacggaaactaatcaacaatctcgttaagggtgtctccgagatcttctggaggaccttgtca

SEQ ID NO: 71120 - DNA, 553 bp, Arabidopsis thaliana landsberg
  unsure (1)..(553): unsure at all n locations
ttcatccaacaagactttagtcccaatctttttctagacactcctaagtggggctaatctatgagtgaccgggtgaaataagtttttgacatactcacaaatgtcctacaagcaacacattgaggaccatccacttatgtgatatacatgtgactgtctctattgttgtatccttgtgctttttataagtaatgtcccactatcaatatataaaacacacttcaatcaaactctaattctctaaaacgctaatcgtaacatgccaaacacagtgcatattagcggctgctcctattagataagattctgtgtcctgtgagagaggaaaaaaaaaagcccatgaaactataaactactgtcaaagtctgtgaattcagacttttatcacatgttttcccaattattgtcattccctttttatttttactttcaagtccagagtacaaccctttggatcgattcttgtctccataactaaaaaataaataattntgttgatattcccattcgaatntctttaatattgggttatttattnntcgtcgttttaatt

SEQ ID NO: 71121 - DNA, 577 bp, Arabidopsis thaliana landsberg
  unsure (1)..(577): unsure at all n locations
aattttggatcatgattggactaattctaagatgttttagatgggagttatagtcatacattcatataaaattatatggacaatgtcaaacatagtggaacattttttggtccgaacggttcgagtttgagtcagattgtctgattaatacatacaaaatcaactaataaatactgtgaaaagagttgtataattttcacagaaaatannnnnnnnnnnnnnnnnnnnnnnnnnnnnnnnnnnnnnngtatttctaatagattgttggtgcatttggaatatgtgatctttcttctttttttttttgataaaaggatttaatatatgttctttagtcttccaatcattgatttgtaagaatattaggattcaataatgattgaataaactaatagcctaataaccgccgaccattgtctcgatagattctaataatagtgggttgagatttggcattggattatgtttcttttttagttccatataacagttttctcacaatgatcatttatttctggatataataatgtcttgaatgcttaaaagagttatgaaaggaggattcataccaaacaaa

SEQ ID NO: 71122 - DNA, 1036 bp, Arabidopsis thaliana landsberg
acagtgatgtcatgtgagaccactttctttgttctgtttatttctgccagtttttgtgttaaacgctctcaaatcaagggcttcatctgatgcaggtcatttctgaattcagtttttgagctattgttgagagtttgggcagtttcccgagatcataaggtgagtccctgatctcttttagcattatactccactttacgttttaatagtattgcgcgtttcagtttaaaaatattattcaagagattaccaaggtaagaacatggttcgtaaatgttcacagactattattttataacaaagacaatgaagaaagatggtatgtaactttattaagataaaaataagaaatgaaagtttgttttcgggtttttctttcctcttcccccagtaatgtatctttgaaattcataatatggagagatacatctctagaagatattgctagttagttattcacttgctctccagacatgtctcgtgactttaaagtgtgcctcttctgctgaataaggtacgagtatcaactgtagacgctctgggtcaaatggtcggtcttatcacgcggacacaactgaaatcagcattaccaaggcttattccagcaatacttgaactgtaagttctattttttattctatgtttcgttctactcaagctttacttctcaaaggcccagcgaatagtatattcgttgtctgcttcatatattactccacaaataaagctttgctacgttagaaagaagtatgtacaaagacatgagatgcttttcgtgtaaatttgtcttctttttttttttaattctaattgtagtgatcattcattcctttcatttcaatttttaggtataagaaagatcatgatgatgctcttttggcgacatgtagtcttcacaaccttttaaatgcctcgttactttctgagtctggtcctccactgcttgattttgaggtactggtggttccatcattttttgttgctaaggtgcctctttatctacagacatctggcacattgttttttcggatgtgat

SEQ ID NO: 71123 - DNA, 335 bp, Arabidopsis thaliana landsberg
  unsure (1)..(335): unsure at all n locations
caaacagaaagaatggaccaggcacattctancataacatacacncacaaagaacgggcanaaagagagaaccataccgngagacccacatgcggccacggaacgnaaagaaggggcccagaacgcaccacaacagaacacacagngccacgccaagggcaccctatcncgagacaaccgcngagccccaggacgaaaaaaagngaacaaccccagacccgaacgggncgacacaaaaagacaacaagaaagaagaacaaacaaacacgacagaacagaaaacaaaacaagngcctatagcaaaaaaaaaaaagaggcgnggcgacagccgggcc

SEQ ID NO: 71124 - DNA, 238 bp, Arabidopsis thaliana landsberg
accacagaacccgaaaaccgggaaaaaatcgaaagtcggatggaaaaaaacataacaactctatccatagttaaatcttatttttgcttgtcatctctatccatagttaaatcttatttcctacttatgattaaatgtccttaaactactcatgttacgatcgatgatgcatgcgtgtgaacttaccttaatggatatacgcggagaaaacaaagactgccccaaaaaccacctcttt

SEQ ID NO: 71125 - DNA, 4517 bp, Arabidopsis thaliana landsberg
cttcttagatcagcaggctttatcgggaatttgagctgcaaatcacaaacatatatccattcatagcaatggtatattaaatttagtagactactgagaactctaatcatcatcacgagtatattaccaataggactggacctagtaacgaatttcatgctttcttttttcataaaccgacatgttatttcggattttaaaatcatcaagcaggagtgaaatttacctgttggaagagctcagtgattagaagagtatggctcaagacttttcttgtcttcataatacgaacaatggctgcatcgatctgtaagagaagggtgtgatggggaaaaccattttgtcaaaatcttttcttgtttaagaagccaaagttgtaagaacgatttaagaaattagtatcgtaaaggaaaatggagagcagaaaccaacctggtattgtcggtcctggaatactctttccgttgtacttgtgttctcctctactgtctctttcatctggatcgcatttacctgcacccaggaacaaaagaaagaattggttcactataagctacatacaaaacagtatcacaagattctaggatactttaagtgaagagaccaagaaaaaaaccaacgtaccttaatgcgatacagcggagctgcaaactcatcattaaattcaaattcatcaccgtcttctacatctcttcccttaggattctgcaaaaatatttacacaataaggcttatccttatggaaaaaggcaaagccataatctcggcagtttctgcattagctgaaaagagagttaacagagtccagattttggccaaaccttctgcaggacacggactttcccacaagcaagcgactgcaaagtcctcctcagctccttgtcctctatgctggtggaatctttaatgtcttcaaagctaagtttcattgcatcgttaaataacattaacacaacagcctgagacaaaaagaaaagagcaattgattaacactgtaacctcgggaagacaggaaagagcttaaaagggggggaaaaaaaaatttgactgacctgaaacagggaaacagccagctcctttttacctttggagaaatctgcctttaaaacacagtggcctaatgaattttgccacattaacctcctaccactgtactgctttaaatagaactctttgaagatatcctacgaaacatacagatagcttagaaaaagcttgtaagaaaacgtccaacgaggaagcaaaaaaaaatacataagaagaacttttagtaaaacctgatagacatttagttcatgaggaagcttaacatccataggcggatatgttggccagtacctgtattatagacgggaagttaacaagctttatatatgtcatgatatccgcattccagcagttatatcctggataaaattgatacattgtacataccctgttgttaaaacgtggacactcatctcaattcccgatggcagttttgttctggcctgggaagattgtttgaatgactcgttgatttcctttgacaattcaccatcctggagaaaatttcaataaaacggagagttcaagctcattaggattattgtaaatgtacacaagttcattaaaataagtatggagcaggatcatccgccaatcctgtcttagattggattaacaatgaatatgtataccggggtatatcgtaaaacgtatcagaatataagatcattaagtttgttccttagtaagcgttaaacgaccgacgtcttttttgaatatagagaaggagaagaaaggataccttgaacatcccttcgagcttgtttgtaaactggctaccacactcagtcttaagctgtaggtaaaaccaaggttgggatcagtgggtgagaactacagatatagaaaacaaactgtgggaaagggaaacacccagaatataaatcagtttttaaccttagagatcatggatttctcagcatcgattgaagcactctttcccaacaggagtctcttcgcaagatcctttttgtaaaatgcttcgaacacatctttaccctttgataaataataaaaatccatcagcaaaaccgatatccagaagatcaaatagctggtttacagaccatgcactggcctcgaagcagtgatttacagtgacaaacacagtactaaatgtaagaaattagagataacctggataaatctgaacaaaaccaagactttttcaagaacactctccaattcttcttcagaagtacccttattcccagcacggagcttctcgtccaaaaacttggcaataagctcagctggccggttctgtaaaaaagattatcagcataaaatgtatattatttgggatgcttgctaaatcagagtatttggtatccaaagtgatatatattagcaaacaacactactgtaatcaggtccagtgcccacaagaagcttgatctcaaaattatgtttgaaaatagtattcactgcccaaagatgtctccaaatcatagcaatacagtgcttaatcagtaacgaaatctatagattattataaaatataaatttctcgatttcacaattgtaatttaaggttgacatttccacaataatcagtatgttgcttttacatgaaagtaaaattattagcaagagactcaggcaataatcaagaaaatcactatttgatacctgtcgaagattaatcagatgctcaaacgaatctttgattgtgttaccaaatgattcgttcttgtaaaagctctcttcccatattatgtcaagagaagccttgaagtccaacagtgattgtaccatatctttgtctttctcttcatccataacaatcttctgcccagttttccgaacatatgaacttagcgcctgcctcagagactcaagtgcattgaccctagaaaacaaggtttgcatcctctgaaggtcctccgtacgacgtccatccattaatgttgtaaaaccctgaagatgttcagaaataaagtaagactacgacaaactaaaattggataatatgcaagccaacacaagaataataggagattggaaccttttcaagaacaacaagtatatgacgttcgagaagttgcctttcaacagttgtgatcaatggtttcctggttactgcatctatgtagagtatgcatctctcattctcttcatgcaaccttccctgcaccaatcaccagtagaaaccttagaaagactattaacctgtagtgcagctaatcataaggaaactatatgaagtcatgcaaggcacctcaacatgcttcaggtactccggaacgtaagactgctgcatgtatttcattccttcagcggcataaaattcagaggtcccttcaaggaaaggtttctcaaagctttccatataaattcccagtgcagtaaacatcttcaaaagatggcttagtagagtcctattaacagcttctgctaacctgcaggaccaatatcatgcaagaaagttcagcagattcagatgaaaacattatccaatatataaatgacatacactagtcctgatttgccttgaaattttacctataacaagttatcactgctagacaggaatagttcatagaccatccaaacttaccatattcactcaaaagccagaaaagtaagttgaggtaaagtggttttatgaaattatattctcaatgtgataaatcaaccctcgtttaattttggaagaccagaaggttaaaaatttacctttctttttcaatcatacttaagagacctttaaccgtcctctgctcaacttcaggggccagagaaagatgcttccggaaaagctgcaaacccatctcccataatgaacgtacatttggattctgtatcacatacttcctatccagagtcaaggctatactacgaatcatgagcatctggtcacaaaagtcttgccagcatttctcaacacgtgacaagaaaacagtcagatcagtgttctgcccaactaaagattgcaaagctgcagagatgtgttcttcacactccttctcaatctggtcatatagctttccatccaacttatgcaagcaaaggttatcaacagcctgaaaaaacaatcacaatctcatcagcacgacatttacacatacgaataagaaaggaagtaagtaaatttgcacgtaacctaacctggtaaaggctctcgaggtcaaacgaaattttttttttgaggaatatagctctgatagctgactgcaacttctcccatgtattctcctcaaagtttgttggtagagttggtttggcttcacatatataatacaaatggtacaatcagaaccctaattatgaaaacacttttatcttcaatttgctagccagtcacagtaaagatgattctcaagatgttttctaatggcacaaattaggtttggtgagagctaagccaactagattgtgcacaacaaagattccggatcttaagtacctagatcaggctagacaaagagattccaacttagaagaaatacaaaaacccaaatcactca

SEQ ID NO: 71126 - DNA, 420 bp, Arabidopsis thaliana landsberg
acaccgatcattcccatcataagctcttttaaacccgagctgctttcgccaccacaaggcagtcctaatcctagtccatgagggactattgcgtccatagaagttgaagtggatgaaactatccctaacccgtgaagcaatgaacctcctgaagaagctgctcccatttgagctgctttttgaagtaaagcggttgctgacatcgcgggctgagcgtggaaccggtttgacccaagaaaggatgatccatgacttgttgaaagacccaaagagataggttcaatggacgaagatgacgcgaaaagactcttcgaagaagaacgatgttgtgtatatacttggagaagccgaggaagattcgaataagcctgcgaaacaccggtggttggaacaacatttaaacttggtcgggtttggagc

SEQ ID NO: 71127 - DNA, 586 bp, Arabidopsis thaliana landsberg
aaaattgcagttgcacgatcatgcgtttaccatacatctaaatgccaggggaatagatgaaattaaagacaacataacattaatttgaacaaaaaaaagttacacgaaatatatttaccacgtttgctacagcgtaaatgaagggggaaatataaaaattcaggatcgctaatcacgttgatacgacatgaagagtatgaaatatctataaaccatagataatttatttgcatcattgcatggtttggaagattatcaaggagcaaagagagcaacagcatttgccattattgtaaagttttatgggaccagttttatttatgttttttttttcttcatacttttgctgctactgaactatcaatttcgtttggaaaatattatacagtagtagctttaagcatttaattttgaaatatatttgtctgaataattatatagatttgattcaataaatggcgtgatcgaggaatgtggtcctccaagagacacacactatgtaattttctcagcctttcctttttggaccatttaatttttcatgtaaattggaccactcatctcgtattatccccatctattctag

SEQ ID NO: 71128 - DNA, 521 bp, Arabidopsis thaliana landsberg
  unsure (1)..(521): unsure at all n locations
gcgctgcaggccggaaaatacgtcttccttgctgccggtattgaccttcatatctctgaatatggctaccaggctgggcttgtgggtacgctctgcaatgagatgtagtgtctctgccgctgccgatttccggttcggtatattggctttcagccgattttccagctcagtaaagagcaatttcatgtggacattgttggaacgggctgggaaatgctcttctatctccgaagaaaacaaggtaagccctacggcatccctttgctnnnnnnnnnnnnnnnnnnnnnnnnnnnnnnnnnnnnnnnnnnnnnnnnnnntattaaaatgccctnnnnnnnnnnnnnnnnnnnnnnnnnnnnnnnnnnnnnnnnnnnnnnnnnnnnnaggttcttcttcatatttcttgacaaacagcttatccgtgcggccgaaaagcttccaatctatatgccgggtactgtctccctggctatacaggcggngctccgcaaactctacggagaaaccatggaagggctctt

SEQ ID NO: 71129 - DNA, 432 bp, Arabidopsis thaliana landsberg
  unsure (1)..(432): unsure at all n locations
aaaccgggcccccccccccctccaaagagggctattngaatatctcaaaaacatcattgtcgagcttgagagacttagccaacagctgagagcataataaaaaattagaaaagttcgtaacttgagattatcattattaaaaagaagagaggtgtgttttgccttttgaaacctggaaatgttctttcttcttgagtgcagtaagaaaagccaccagatcatgtttgcgccgctttgaaggatcacttaagctccaagattctagctgtgtgtcataaaaatctaaaaactgctttcaagctccgatttcaccttctagacctagctccggcgctaccttcaccagctttactaaaacctacttgaacccccatagatttgaccagaattgagtagaacgaaggacaaccttcgaatccatgaatttctagg

SEQ ID NO: 71130 - DNA, 384 bp, Arabidopsis thaliana landsberg
  unsure (1)..(384): unsure at all n locations
agacggagacgacgaaggccccacaaccatccggccgaggatcccacaatacatacgaaccagcgagaacgggagcagggcgcagacacagcccaaaacacccaacacagagcgggggccaagaacaggaaaaaaggacgcccacacacaaaacaggcacacgacagacgccccacaacccgcggagagcccacaagccccgccgacacagaaaacacaaaaacacacgacagacccacaccccagaggccggcaaacaaaacaaaagccggggaaaaaaacnccacaacgcgcacaacgaacgagaccggacaaacgcccaaacacaaaggagaaccgcgcaaaaaccacacacccaagcaaaaaaggggagagaagaacaac

SEQ ID NO: 71131 - DNA, 264 bp, Arabidopsis thaliana landsberg
gcggacggtaatggcgaagacagtaggggtggacaagtggctcttcggagtggtgctgctgctggtgctgtttggactggtgatggtgttttccgcctcggcggtaatggccaagtcgcaatttgggtcggcgtattacttcatgattcggcagtcgatctgggcggggtttggcatttggtggccctggtgctgctgatgcggatcgactaaccgccactataacaatcccgaggttcgttctttcccgatagtcgctgtgac

SEQ ID NO: 71132 - DNA, 598 bp, Arabidopsis thaliana landsberg
tacaaaaactctactccccccccaagcttggttcgacctcctcctcctactactcctgaggataaacttgccctcattgcttgaactctcattatttaataatcatatccactttatctgccctaatgacggttaaataattgcacttgagctttaatgtattctctgtgctatgtgtttttgtatgtgagcttttatgttggtaacaatatctaccttttcttatcttctgagttaaccagctacaaaatattcctcctggcttatatacactatatatcttcatttttgtttcctacgtacattgtagaagaaggtcatgtcatggtcttcttgacattcttttctttgttggatgcctattttaagtggtagctctttgatctttcgatcaacatttaatgaatatatgcgatgcctctttttctcgctttctttgtttgggccaaaaaacgtgatgcccttttaagtggtgggccttttattgacactgaagcctaatgtacatcaggtccgccgttaataatgaaacccgtcctaacttgtgggaaccattcctatatcaattaggaaatggtttttcctttttcccctttaa

SEQ ID NO: 71133 - DNA, 480 bp, Arabidopsis thaliana landsberg
  unsure (1)..(480): unsure at all n locations
cacgtatatacacacacatcatatcataaaactatgagatttttttcttcgcataagctacttccccagttgagagaacactgagtggcccattcttccaaaattccccaaaatatcactcaagttgttattctaaaccattatactgttttctttgactaaaagagcaaattttgattacaatcaaatgtttttgaccagtcaaaagaaacataggttggcccatatccctgacttctcataatcttacaaatgcatcccaatgtgatcagtacctttctttatcatactaatattgcataactatctcccactaaaattaaactctacctttaataacgaaatcacattgatataaatagccgacaaaagtaaaaatgcacatttaagatcgatgccattgtacctcagatcaatttggaattttaatagaaagcaaaccacagntagacatttccattatgccctttttcgtaatat

SEQ ID NO: 71134 - DNA, 173 bp, Arabidopsis thaliana landsberg
ccaaaattaacaaatctctcaattcccttctaaactattcaataaccacactcttaaccattaacaataacaaatacaaaaactactataacctttttaaccttcataacactctaatcctttttatacaacatttacacaatccaccacaacctcaacaacaacaaacacac

SEQ ID NO: 71135 - DNA, 260 bp, Arabidopsis thaliana landsberg
  unsure (1)..(260): unsure at all n locations
ctctggtcattgtctatttaggaggaaacgactcaatggcgcctcactcgcctggtctaggacctcatgtaccacttactgaatatgttgatatcntgaagaagatcgctcttcatcttcaggtttatactttctttataattgttagatttattatttatctcctgtcagtcacgtcgaaaagccattgcaatttttttattacgggcttgatagcctggatcagagcctttcagacttcacccgaatcatatatttta

SEQ ID NO: 71136 - DNA, 1369 bp, Arabidopsis thaliana landsberg
  unsure (1)..(1369): unsure at all n locations
tacgacgtttacgatctttctaacaatctcatcttcaccgtggacggtggcatttggaacatccgccgtaaacgtgtcctccgtgacgccgccggaattcctcttctctccatgcgtactaaggtcacacaaacatcactaatcacatctatttatctacgaaaatcattctgtcgtattgttgatgatcatcacatgttaattgtgttatataaactttagttcggttttaaaaattttaatggaacgactcattaaatatttcttaatacaaggtcgattatacgaaacgtttttaaatggcaatttggctgcataacctaattttgcccacatatagaacctagcttaacccatcaaggtagtattgcctaatttcattaatcagaaaattggtagatgtcaatagacgggctgagtggtaaatggcctaaaaccaaatctttttgccaacttttctccttagtttgttgcttaacagtctcaaattattagtatccagcaatggaatgactaattgattaatcggttcgattaaccatatcggcaatgacaaaatgatcaaatttttaactgtagaacgtaaaacaatgaaaatttgatttgacactcaaaagagttaaaacatatgtagtcaatagaatgtctagatatgtttagaagtatttgtgacttgaaagcataatttatgctctcgtgagaagaaaaaaagttgaatccatctcatgaccaattggccacattcacgagtaaggactaggttttctgaaagtaacaaatgaaccatgtttcagggactagtaccaatgcgatgcaattgggaagtatacaaaggagatagcacagaatctgataatcttcttttctcagcaagggaaccaaatctattatccttcaaaacatcacttgatgtcactttaccgccggaccaatcttcaacggtcataagtagtgtcgagccagattttcaaacatttggtcgttatatcggctcttctttcaaactcttcgaaccaattcacaatactctacttgctgaggtatgtcattcattattcctaccttctttggtttattcgataattaaaatattatacggtaaattatgtcacattttagcttattcctctagctaaccaccagttgcacccatatatagcttcttgttcgaaggaccaacattataattattttactacgttaaaagaaaatgatgaatgagagcttaaattatgcaggtgtttcatgatttcacatggngaggactcataaaagggagttacagcttcaaagtgagagtttatccatatgtggatttcgcatttgtcgtgcgttacttgaatcacagatgatacttncaattacgtag

SEQ ID NO: 71137 - DNA, 2010 bp, Arabidopsis thaliana landsberg
ggaccttccttgttgcttcccactcccaattctttctctttcattatttttaactctttctttaatatttgcgtccacgattgcatttaatcaattcaatactacttctttttccattgaagacaaactatgtagtaaaatcctaaagccacaatatccaaatcagaaaacttagataaacagaactcttatgtatcaaatcctataatccacaataaccaaataaagttgtcacgcattgatattattacaaaatgaggtacataatcaacttgtttatcaaatcatggctaattcacaaaaagatatgggccatacgttatggttatcatcttttgccaacaaatgcacaacttctcgtactaaacaactttaatcatcaaaagatcccaaaagcacttttttatttcaattataacataagcaaacgttacatcaaacgcaacgggacaacaagtcgatttgggtttccccatacttgctcccactaaaaaacacaaacccacacgaattttcagacaaacaacttaaaaaaaaaaaaaaactagcgacagccaaacgcgaccgtagccccagaagcccacaccgcgtttaaaacagcaacaaaatcctttttaacccatacaacaaacaaaccaaccacacacagacacgtaagcagcctttatttagttattctcctgacgtggctgttacttactttaccaaactctttcaaatcgccagaaccaaaccgggtacgggtttaccagcccgacccgagaattggctttcccacacggaggaacaatgcgacggaggcgcaatctcagcggagcgtcgtccagcaacaacgttaccgatccgtgtgacggtgagagaagtgttagagtactccctcacctgtgtgattatcccattcgctacagtccaagcgtggatccaagaaatcgatgtcgcggcgtcgcagccttccgcgattacggtagatccgaaggaaacgacggagagaggtacgaattcgaaggaggaagaagacggagagacacctccggtgagtacgcgcatcaaaaactggtgcggcggaggaccgtggaaccaatactccagatctggggttaagatctggtgcacagatttgacgtcgcgagatctcagggcttcatacagtttcagaaccacgtctcggttcttaatctctgattccgccagagtatccagttcttggcgagtttctgaaatcgaaatgagttatcagaaaaaggactcgatttgttgaagaagaagaagatgaagcgattcttgagggattttgaaaaatggtactgatgattctgggatttatatagaggcttggggttgggatctgattctctgtaacgcatactatttttaaggtttttggatatttagcttaatctgacacgtgttaccatgttattgggttaaactaaattgtgggacctgaagataaagggctttgaaagttgagccagctaatgtttgaccccaccgtcgtcgtattaggtgaatatttaataggttaattgaatttgcttatggtaattggtaagtcaaaatatctattgactttagatatctatgaaattttatcacttatgtaagattttttcttgactttaagtttaaactataaatttatgagaaaatggaattgaaagtcaaaagttctagctatgttcaattaaaaacacttctaaatctattaaaataaaatgtggaatcaaaagtttcttgaatctattgaaaaagcatttagagaataacaccaattttaattagtatcaagaaattatttagcaaactacacataattttgatacagaataatgatccattaatacatagttttctctacatcttaaaattacttaaaacccactaaccaataaatctctaacttatttttcaataatgactttccacttgaaagaattaattagttcttaataattttctatgctcatattattggaagaaatattttaaaaaatcttcacgaatcattat

SEQ ID NO: 71138 - DNA, 419 bp, Arabidopsis thaliana landsberg
acttgttctttaagaaaagtgtgtatatgattgctcttgttttaaaaaactcagacaccaaaattttattaagattgatacacgtacctaccgaaatattaggatctttaatttcttttatacatatgtacataaattttcgcaattgcaattaattcggttatgataaagacagagacaaagacagtgtgtaatttgtgtgaacgctagctatttcgttttgcttttgcgtacattctgtccaaatccttgctttaattcaaatctttgcgtataaaattgtgtttcgatagaagaatcctttaaacatggacaaatgaatgcactataatggcttatatattggcgtgtatcaccagccaaattgcgaataacgatggcaattatggtggtaatgactgataaaggtgggggatttt

SEQ ID NO: 71139 - DNA, 653 bp, Arabidopsis thaliana landsberg
atgcacccgtccgtcctgcaccagcggcgaggacaaccagaaatcccacgggtctggcgtgatgccgtccgtcttgggcataccgtaaccgccggagacaccgaatcgggcttcgccgccggttttgaattgccacagagccttgccggaggctgcatcgagcgcggtcaggcagccatcgcggctcaaggcatacagcttgccattggcgacggcgggcgtggagccgatgccgccctcggcatgataaagccagacctgtttgtgcgtcgtcagatcgaaggcgtacagattgccgttttcagcggcgatatagagcagattgccggccacgaccggcgaagcgctgacttcggaagccagacggtgccgccagacgggtttcagattggcgatatccgtgggtatggctgatacaaggcccgtgtgccgggcgtcgcccatgaacatcggccaatcttgcgatgacatggcctgcgcgccagcaggcatggcgacagtggcggcgatcagcgcgccggcaagcagcagatatttcatgaagtccctcccgtttgcctaagccatatcgccgggaggacgttacgtcaacttacgcggtaacggcgaactggccgttcttgcggaagcgccacagataggtcggcacgatc

SEQ ID NO: 71140 - DNA, 470 bp, Arabidopsis thaliana landsberg
  unsure (1)..(470): unsure at all n locations
aggatatctggcacgcttgctcaccctcgagatcgttctccaatgtcagttggtttaagctgtccacctgagccattttagggtcttttggctcagctaccgataggcatctatagttcacaagtcagatacatattggcgggtgtgtgcgtgctgtacaaatctcaccttgtaatccaccgtcttaatgtcgacaaaaccagcctctttaagcccttccacctgtagcttgcctacaaaaaagggacggccaagggccctgccaccttttttgcacatcttgtcgcaaactttcaagacaggctctagttcgtcagggccatcgtcactgagcagacggaccgtagcctcgcacgactctacccaaccaccnnnnnnnnnnnnnnnnnnnnnnnnnnnnnagagggcatgccagtcagtcatccgcccgaagaggttacgaactcggttgaaaacataatgattatctc

SEQ ID NO: 71141 - DNA, 379 bp, Arabidopsis thaliana landsberg
aagaggcggcgatactgcgcgtgtgatatactcgtttcacctacctttagcgcacagcgggggcgggttttgcgtgtatggacaacaaagaagacaagatcgtcatcaaaggagcgcgtacccacaacctcaagaacgtgagtgttgagataccgcgcggcaagatggtcgtgttctcgggcctctctggctccgggaagtcttcgctcgcattcgacacgatcttcgcagagggccagcgcaagtacgtcgaatcgctctccgcatacgcgcgtcaattcctccgccagatgcagaaaccggatgtagacgaaatcaccggcctttctcccgctatttccatcgatcagaagagcaggagcatcacccgcgatcgacg

SEQ ID NO: 71142 - DNA, 447 bp, Arabidopsis thaliana landsberg
  unsure (1)..(447): unsure at all n locations
aaggatcgaaccgtccggcaggaccgtcttcgaacgctcgagaagaacggcatccatgttggcatttnnnnnnnnnnnnnnnnnnnnnnnnnnnnnnnnnnnnnccgaccggagacgacccaggtcagattgccggcaactccactggcctctcctccgtcatggtcgggcttgacccgactatccatgccccgggtgttgcgtggatcctcggggcgagcccgaggatgacggagtgcgtgaggcgagggtgccggccaaggaaaaaccccggccgtttccagccggggttccgtaaagcgctaaacccgcgaaaggactacttcgtggcggcttcgtagcgttcgaggacatagtcccagttgatcaggctgtcgacgaaggcttcgaggtacttcgggcgggcgttgcggtagtcgatgtagttggagtgttcccacacgtcga

SEQ ID NO: 71143 - DNA, 430 bp, Arabidopsis thaliana landsberg
caaacccattggctacacccgtcttatgcgagagagccatgatatttttagccttgaccaggagccgagaacacatgggatcactttgagttatgcccgctcatccattgacataacccatgcgctctccatcaagcgcgacgttggcagaatgtgtgcagatacaaacctccttacaagacacatcaatctattgactcatgaaggccgctcggagggttggatggagctaggaattaacataatcatgaggtccctactgatccatttgagacgaactctttgacgtcatttctatattatgctaaccatccagctgttctatgggcactacgacatattcatcaagcctcgtgtgcttaatcatacccacttgctcagatggtactggctgctaaatgcagagcttctgtccccttgagatgagcct

SEQ ID NO: 71144 - DNA, 411 bp, Arabidopsis thaliana landsberg
  unsure (1)..(411): unsure at all n locations
tgaccttcctcaggaagaaatccaagagcacgaaccgcaggatgaggatcctgaataacgcatccgcaccaatttatcactcttggggttccattcccatctctcttatcagttccaactacgagctccagttcttggccctaacaaaccaacaagagattaaataaacacgtagacctaaaattatttgtgtcaagaaactcaagaaaaggatacgaactacttttgtcacagactcaggtgataaagaagaaacaaataaataataagatgtttcaagaaaaatgagttaatggcgtcacctgtctaaggattgctagannnnnnnnnnnnnnnnnnnnnnnnnnnnnnnnnnnnnnnnnnnnnnnnnnnnnnnnnnnnnnggagcacgtaactggcatcttattgact

SEQ ID NO: 71145 - DNA, 255 bp, Arabidopsis thaliana landsberg
  unsure (1)..(255): unsure at all n locations
tgctggcggccatccaggagaaacccaacggggccagtgcctcaagagctcgggctggagtgccatgggttcttaacagtgtggtccatgcatcagatcctaaccgtgtgatccattttgaagcgagtgtgtgctgtttgcatgctggagaggaactatcctactatacaggcctgtctaacttcataacaaaccatgcgaacaccagggaggaacaccacctagcngggtgatacgtggacacagggcttcgct

SEQ ID NO: 71146 - DNA, 123 bp, Arabidopsis thaliana landsberg
ggccgccgtttggcggtgtacaaattaaggccaggactggttccacttcaaaaaggctacgtgccatagggaagctacttcatacacccactgcccaaccgttgcgaaccgcaaccgagcctt

SEQ ID NO: 71147 - DNA, 579 bp, Arabidopsis thaliana landsberg
  unsure (1)..(579): unsure at all n locations
ccgtgacgatacgattatcgacgttcaagtcgccctcnnnnnnnnnnnnnnnnnnnntgttgtggcacttgtcgagaacgcgccagacagcagggcccagattcagcgtgtgtggcaatagctggaacacgacatatcggttgctggagcgatagccgtgccaacgcaaggcggccaggcacaacgcgtgggcggcgttataggccaggtcgaaccgactttcgatggatagcgttgtattcagagcatcgcgtagccgcgcatgccccgaacgaatcaggccttcaatctctcgcttgtccggcggctcggcccgcaatggcttgccagggccacataggttttcaaacgctgatgtcactgtctccccctaatatccagatcttgggttgttccatgacacgagtcaggaatgattcctgattggcaatgcgtttgtgaaactcatctctcgacagaatcgtgggattgatggggcgaccgaggatcgcgcttgtttcttccaaggctgcgaagagttctccgtagttgagttcctcgctaatcaccatcagatcaatgtcgctgctggcagtatct

SEQ ID NO: 71148 - DNA, 445 bp, Arabidopsis thaliana landsberg
acctaatctctcaggccgcgcagatggacacggtttgcgtccttaacgacatgatctacaacgccaacccggtgattatcatcatatttctccccttatttgacagcttcctatacccatggttgcgccgacgaggcattatcctcaacgcggtgacacggatctcgctcggtttcgttctagaggccctcgccatggcctacgccgccatcgtgcagaagctaatttatgcccaagggccctgctacgaatttcccctacaatgcgcagcctcacagggtggcgccattccgaatcacatcagcgtggctgtacagatccctgtctacgtgttggaagcgttctccgagatcttcgcgaccccggcaggatacgagatggccttcctcctgtcacctaagagcatgaagtccattctgcaggccatgttctcgctgacaaatgc

SEQ ID NO: 71149 - DNA, 499 bp, Arabidopsis thaliana landsberg
  unsure (1)..(499): unsure at all n locations
aggataccttgattcttgtcaggatgaacttgtcttgcctaattatttattatatcagtcataccaaagacacacagatctatgtcacaactcaaaaagaaaaaagagagaaaaactaaccttgatgtaataagccttgcgaatctcttcctcagaagcagagggagtgacaccaagaacatcataatacactgtttccttcaccatgatcagacaaagatgtggaaggagtttcaggaaaagatgtgttgataatcgagtagataagaaaagaaacgcttggtttggtgtgtgtgaagcttttaggagatgtggggaagaagaagttcacaaaagtgttctttcttgatcttgatctgcttcaagaagctgaaaaagaaaagagattggctttacagtgatgatctgcacttttctaataaactaattgcgccgcttttgagcggnggactacaacaacactctctctttttaactgactacttagtgctttttatca

SEQ ID NO: 71150 - DNA, 699 bp, Arabidopsis thaliana landsberg
ctggaacatctatgttacgtaccaggagcggctggaggggactggaccgttcatgatgtgtagaagagattgaagaatccgaaggtatgaagacttatgatgtggttgctctgcatttttaagtcatggatttggttaagaaagaatgagagagagagagagagaaagagacagagttgaaagcagaatattgggtaagtgggacaagaagggagagatggcacatgcaacgactagtgggaactgaaatcattatacatcttcctcttactcaaatcattcttgaaaattacaattttaattatatacatattaatatatgcgtgtgtaattctcaagttgaaattctttatgaatgttattttcatttttctgattatccaagagatttcggatcctagggacatacattcctttggaccgaaactagcatttcaaggaaacacgacttttcattcatttggcgggatcatacgttactggaccaagtgctactcggtgaatgataatgtttataagtacttcacattgatttatgggtcctttaatttggtactcaacacatcttccttatatgtatatagctattatttattcgctttaataactttttcactttaagactccttttttcgtgggaaacaacttgaattagacatttagactcctttatatcatcgacctataactatgccaggc

SEQ ID NO: 71151 - DNA, 1574 bp, Arabidopsis thaliana landsberg
catgatgttggaaagaagttgtagtaggaaaagggcttctgcagatctgagaagtaactgtttaatacactccatagccctcacctgcaggagggtaagactaattaatgacttcagacttccacaacagaccaattaaagaggacgaaagaaataatagtttataagaattcgacaaattatacctctgtggcagccaattcagcaggactatatggcaatcgctgtcttttatttgctgactcgcctccgttggaatatgctccaaacaagttcctaaccatattcctctcagtagctcccaactctgaaccagtaccatacaaaatagagccagttacatctcctaacccagcaacacatccataaagcccccttctctggttccttctagatcttaagaatttctccaacgatcgaatcttgctttccagcacatgcatagcactggcagaaagacgacaaatcacaactccgtcctcagacatggtgtcagaactagttttttttgacatcacgggaagttcccataggggaaacagtaaccttgatgtgcaaaggcagagcccttcgtgagcacctgagaaaatgggctcggcttcttgaacaacttggcccatgctgaaacctccaggtgctgttctagtatttgacaatccactactgccatcaaattgtggcattcctacaattctcggatcctcaaaagcctcagctgctttatcggcaacaatgttactaattaaatcttcaaaatttattatccgggcagctaacatcaagcacatggcagctgcttcgcctactccaaagcgggtgaaaaaatcttctagaagggaccttggagagttggattccagaagtcttctcaagatatcaacaggcctattgaaaacaagttccatcatacccatggtggtaaaaacaacaatctttctccttggcaaaatatgctgggttgaaagatcacttctcgcccagagttttccacatgccttttcataagattctccggagacttcgacaccacagtattctagttctgaatataatgattgaatagtagcagcagtatcaggagaggggagcacatctgctacaaaaagcatacggccttcaataggaagggaagacacaacttctcgtaaagcccgagaactccttgaacttggccctgaactgctgccagcctgagagtgcacgcttgaatctctgctaacaacaagaagagaagacatagcaggtggcgatgaatctgaaaggacaagagttccaacagaatagtatgctgtttcaatcttcatagataggtcgtcgttctgagttctaccggctacagatgcggccccaaaacccagtccaacaccaacacccaatggaggagatggcctggttgaaaccactttcagacagtttggagtctggcggtggttgttgaaaccactgaagctaatagtactaccacttccacttgaggaggtggaaagatacatcctcctgccatctgataatgctgcaacaaggtgcaaccattttgattccaacatggacaatggtgaaatactgactatgga

SEQ ID NO: 71152 - DNA, 2429 bp, Arabidopsis thaliana landsberg
caagcaaccctaggacgtgtggttactggtctgtgagtccatggaaaagagatggaacattaatggtttcactaaaccacgaagggtgaattatgtcagttttttaatataaaaaacttcaataaatgattaatacaactattactaaacctaacggatataattaaacaatcaaatgttgaattttgaaattgcatatagaatataaaaacatacacgttcatttgtatgtgattacacctagatgcatgcatcaaggtcatatacttatatgatttgttatcaaatgtgaaaattgtttataaggtggtaagacagggttattacaaattctcattattgttggtttttacttttcagctagccactcttttagaaaaattcatccaaaaccaaaactattcaccagcccacaagtttatacaaggtcttgagtcataagttttctctctacatacgacaaattcaagaaaaatttaacatatgagattttaccatatgctgaaacgcagttaatgtgtatgacaaattaagagtaaaatgattttaagtttagactctaaactgtacatgtttttaaaataatccagtgtgccaatgagtagaagaaaatgataaatgtacttaatatttattttattaaaaaataagtaatttcttatatatttttattaaaataatatcgtttctataaatataataattaccaaatttataactataatcttacaatcaatttgaaaatattttgttttcgaatttttaaaaaaatttaaaaataatttgaaacgaattaacccgacccggggaaggcaacaacaaagttcgacccgacttgtttagccggaaaggaaaggcaaattagcattttccgagagaaaccctgtcccgtccgtattaaacccttgcgactatctcttttactgtgtccaggcagacaccttttgttttccttctccctcacttcttcttctccaatcggaattttgaacttctctttcttattcccgctctcttggttttgcgagggagccaaaatcgatttagggttttggttttctcgctcccaagaacttcactagggttctctgtttaaaaatccgcgtattttattgtggttttggattcgttccagtgttgtttattcttccaataagatgtcacaagacgatgagattgtgatgcgtgatgtgacgagcgcgggaatttgtattggtgaccgcattggccgagaagccgcatcgcagctcgatctagaagaagctcttgaagcttctagatacgctagtcatccatattctactcatcccagagaggttagcttcaggaacgattctacctccttcaattagctacttttctttcgattgttgctattgggttctcgatttgatgggagattttagctcaattatagttagggttagagcagctcgagctttgtcttataggtgttttggctttgttgcagtggccgccgttgattgaggttggtgagacttgggaattgccttctgtactcattgagaggtataatacagccggcggggaagggacggccttatgtggaatctttccagagattcgacgggcttgggcatccgtcgataattctttgtttctgtggcgttttgacaaaaggtaaccttttccttttagttaagaggggaatgtagaacttagaagcttgagattgccttactttcgtagttgtcctttcttttgataaatgtgatgtcaaattagggatgggcagtgtcctgagtatagtggggaggaacaggcaatttgtgcggttggtctagcgaaatgtagacctggagtttttgttgaagctattcaatatcttctggtgctggcaactcctgttgaggtgactctttttcaatgatgcaatctgatcacaactttctttagtttttttttgtgtgtactgtatctgatttcttataaaactttacttctcatcagttggttcttgttggagtgtgctgcactgaaggacctgatggtagagatccttatgctgaaatttcagtacaacctctgcccgactatacaatatcatcagatggagtgacaatgacatgcgttacatgtaccaataaagggcgtattttcatggctggacgtgatggtcacatatatgagctgctatatacaactggctctggctggaataaacgttgtcgtaaagtgtgccttactgcaggcgtaggtagtatgatctcaaggtacacacattctctatgtccttctattttatctcttctctctgctgtttgaatctgaaatctgagataaaccaagctttctgatagttttttaaacatttatccccaattctgttggttttaggtgggttgttccaaatgtattcaagtttggtgctgtagatcctgttgtagagatggttgttgataatgaaa

SEQ ID NO: 71153 - DNA, 284 bp, Arabidopsis thaliana landsberg
aaaaaggctttgaagtttaagttgtacacactcattcacacatattttgcagttactatatgtatattaatcatattgggggttatgcccacattcagtaatcgatcatctgaatctgtgtatatacactttaatttccattataatcacttatgatatcggatttcaactattttgattacaatatacgcaattgtttttttttttcttttaagaacggtgacagccaaacaatttttggggaatagtgtgtcaaagtactatctatacacatgaatatagtt

SEQ ID NO: 71154 - DNA, 486 bp, Arabidopsis thaliana landsberg
ttaagaatggctgttgactacattagtggtagtttataatgagccaggacagacttttatgcggaatagaaaaggctagaaatatcttaatgttatattatcattgtttattttgataataatacatcattataaatttaagcttatatgtttattagatattgatacaaaagcatggtttggtttggcaatgtcaagcgttccattcactttagatcagtgtattgtattgttattctcttgtacatcgggaactgcagaacctcaatttcccaagtaatttgggtattttactaatgaaaagtagtaacgtatgatattccggaattacaaagttttttcttctaattacttttgagttttgactaatatatcatcatctttttatttgatatgtagcctagaattacaaagaacagagaccttgagtatgaactgtgaagaatagtcaaaattatttagtcctcgctaatccagttatgatgc

SEQ ID NO: 71155 - DNA, 712 bp, Arabidopsis thaliana landsberg
cctataagttcactttaacaacaacatattttaaaaaaaaaaatgtctgtcataagttcatgggtaattcaaactcaaatttattataactgatggtgagtaagacgaatcgtattgttaaccaatagtagtgtaaaatacatgcacggtaatgactataaatataaaactaaacttaatatgtcttgtgtgacgtatacttccgcaaaataataaagtagtttggaaattttactgatttttcaaattgatttcatttatagtttgtaaagaaaataatttcatacaacacatattaatgacaaaaagttatctacgtaagaaagaaaaggggtgaaggagtaacatggcgttcatgtgctcacagcctcacactgaccctaatgtcacgatcaaacaacatcaccaacgaagaacgacaacattcactgtggaaataaaactattcaattgatttgatttaccagccaatagaatttagaaaaaaacataaacaaaatataatagttagtaataaataaaatgaaaaacaatatggtcccatatgctcatggtcatcttgtttcaatcacgtattctcacgatccatcctgtgtcacagaacatgcaaaccaacacctaacaaataaaatgcatgactacgtacctctacgtctatttatttttctttactaaccgttttctttccatccttttgatcgtcgacaataaa

SEQ ID NO: 71156 - DNA, 545 bp, Arabidopsis thaliana landsberg
  unsure (1)..(545): unsure at all n locations
ttccacaccacaatcactcatattccttcccaaatttcaaacacaattctcccaaattcaagtgtaacagatcaaaaccattggttaaattcgatttagaccaaattcggtggttatttgttccttaagaatgtctagggtctaagtaacgagatattaccagctctttggcgcgtttagcgcgccgtcgaacggagcggatgaggaagacannnnnnnnnnnnnnnnnnnnnnnnnnngtggccaattggagaggagtaggatcatcggaagtggcgaaaatggagttagtagacgaaaacggagacgtggacgacgtaggaagctcaattggaccatcttcttccacctccgccacatcggcgatttcttttacggcggataatcggattataccgggacggatcctggtaaaggaagagagcgaatggattggagagataagacgcgttggacggagacggttagggagagagaagagacattggtggctctgcaacacttacattttcttagccgtcgaaagattttatctcaccattaat

SEQ ID NO: 71157 - DNA, 459 bp, Arabidopsis thaliana landsberg
cgcgcaaaagggtcaattgtactattgtatattgaagaaagtataatagttttcattattgatgatacgctgcatgtaaagcgccgcttcccgtgcatggtaatctccccacatcgaagattcgccattagggatgaggcttccttgaggaatatggtcccagccattggggcgatgatagatagagtgcaatatcagtccctcatgattgggatcagtgctaagataaggctcatcaaagagagtatccagcaccgttagccccacctgccagtagcgatcgccgttttgtgcatctcctttctgctgtaaaagccttcccagccgcagaagtccctgggatgcaatagctgcggcagaactgtctaccggctcaaaatcgttgtaaggatctgcaggtttatcaaggtagttgtttatcttatataactggggcgctcccgtatcccaataagggat

SEQ ID NO: 71158 - DNA, 574 bp, Arabidopsis thaliana landsberg
  unsure (1)..(574): unsure at all n locations
ggaccagannnnnnnnnnnnnnnnnnnnnnnnnnnnnnnnnnnnnnnnnnnnnnnnnnnnnnnnnnnnnnnnnnnnnnnnnnnnnnnnnnnnngtccagcggcagcgaactgaactgcgcttgcgcagcaccggcgaccatacaacctgctattgcgagaaataaggttttcatataaatgaggttaggtgtaatgtttagccaatggctattagctgtcagctgttggcttttccttctggctttccgctgccagcgccatcttttccttcagcattcttgcttcggcctccctggtaaggtacacaatacttacgtttaattcaaagcctatgagcagaattaacgaattaatgtagacgagcaccatgatgatgatcacggttccgatagagccatataccttattgtagctgctgaaattattgacccagtaagagaacaggataatggtggcgagggtaagcgtggtggccaggatggcgccgggggaagtgagcttccacctctttttgagcgagggggcatatttgtagatgagtgcaataccgtaatacagcagcgccacgataat

SEQ ID NO: 71159 - DNA, 598 bp, Arabidopsis thaliana landsberg
gaaactttcgtgttaaccaaaaagcgccctcatactactgaggacttatgagcctgttgactcaagtataagaacgggagttgaggccaggtctcccatcttccctaccaccacaaactcatattcaaccacaagaatccatatcattcaatgctcttctcgcccatcaccctggccgccctgtgcggcatcgtgggagctctcgggaatcgcgtcccacacccaccatcccctgagcctatcagtcttagaaaactgccactccctcctcttgccccaagcaacgaaactggagcatgcaccttgcaaatcaacccttccggaacaggttgtcttgcaaacggcgtgttcgggacgtttcaatccggcgcttttcttccggacggcaaacacgtcctcgcccaggtcatctatcaaggagcccccgccgctccggacccagccagcatctacgagggcctccaggtcattgtggtcaaggctgacggctccgtcttccccaacggcgacgcgtggaagtgtgtcacctgcggtatacccgaagaccaacgtgttggcatccataccgacttgttcgattatcctcaagcctcagcga

SEQ ID NO: 71160 - DNA, 589 bp, Arabidopsis thaliana landsberg
attattattgcacgggggtggcgagttcggatgatcttgctttaaacaatatccatacggtttttacgatgtggatggggagttactttggggattggaacaatgagagcaactttttgcgagcggcgcttggttctggagatgtgctgacttcgacctactcaggatttccgagcacgtggtatttcccgatggggcttggggaatcggtggggtatagcgttttgcaaagccagaacaacaatacgaacgggctttatgcgccgtgggaccagggctcgcaccaggtgcatattgcgctgcatggtgatccgacacttcgaatgttccccgtcaaaccggcccaaaatttaagcgcgtcggcgcaacccggccagatgaacctttcatggagcccatccgacgacagtggaatcgtgggttatcatgtttatcgggcgagttccgaagatgggccgttcacgcgggtgactgcatctccagtttctggaaataattacaccgattcacctgtgccggggagttatgtttacatggttcgggcgatcaagcttgagcagactggcagtgggcagttttataatccgag

SEQ ID NO: 71161 - DNA, 540 bp, Arabidopsis thaliana landsberg
acaccgatagaaagatgtacattataaactataaagcataagaaaaactccccaaagtaaaaaaagaaacagtaactcaagagatggtattggtgattgtggaggtgacctagaaacccgttattgatacaaagatttgactcttcctttcttaagcacaatatcacggcttattggcctatccttatcctgagtttgaagatgtgtgatgctgcgcaagcagaacattacccgttcagtgtctcttcttactcttcttcatttcacgcgttccaatcaaaagtgttgaaaccattcactgctcctaaaagttggtttcctaaatcctgttgaccgtttggatcccgcaccatcatcccaactcttccgttcatgagactattgttaccgtttatattattgattccgtttgctgccatggattgaccaatcccaccaccaaacccaccagcacctccaatatttgtgttgttgttgttgttcacttggccaatctactgtaaaacaccagaactatttacattagcttgacccttccca

SEQ ID NO: 71162 - DNA, 405 bp, Arabidopsis thaliana landsberg
ctgggcaagcgctgtttccaatgcacggctgaaacttacaagcctttcattagtggatagtgagacttcgtcatcctttgactattatgcatgcaaactctctataactaattcgctcgatacaatctgggatacaacatatggacacactatctcttgaccactgcgcgtgtccggagcttccactaattccaggagaataagattctgaactgaagttcataagaccataggggtcaccctctaattcattcttcttgacttcaggctatgcaagtaaatgattgaatggaatgtgaaccgcatagattgctcagttgcaccaggatgatagaatcacaaaaattttacctggagggaaatggttaacaattgaagaaagctcatgtgatgcgtaaatatctt

SEQ ID NO: 71163 - DNA, 514 bp, Arabidopsis thaliana landsberg
gtacaatcaaaacatagtaattcactattttatttacagacacatgggcccaactcatacggcccaattaccataaacctctcttttaaagagtgggttccacagtggtaaactctttgaatatccattggactgattgcatctggaccgttcatctacattaattattggggatttccgctttaaagcatcagtttacttattacgtttaggattagattaccaataacgatctttatagctttacgccgatttccgataaaaccataccattcagaatatgacctctcgtatcttttgagggattatacttaatctttctacatttattttgttggatgctcatacaatgattctgtgtggctgaaaattacacagacattactctatttattagtgcattacacatgattatttagaaaacgtatattgtcgtcatctgaaatgagagattctacgaaatttgtgaatacttgagaacgtctccattcaaatgttctatgagcaacatgac

SEQ ID NO: 71164 - DNA, 631 bp, Arabidopsis thaliana landsberg
ctgctcgcctgaggcgggcttcgagggtatggcccgctcggcgaccggcaaaaatcgaccgcccgcgtcgtcgcaaattcgagaccggacgggtgcgtccgtcaccaacgtgtcacactctgctgtcatgcgccggcgccgggggagcgatgtgcagaccgaaagcccaggtgcagcggtgggacgcgggcgattggagatcttttatgagtgccggtcgtgggggagcctcgagccgaatcccggctcatgacggatgttccggtgttgcctcacccgctgtgctcctcgatgcctgagatcggcgaccgaatcagcgcgctccgcggcgtccgcacggtgaccggcgcgccggtcgatgtccacctcggtcccaccgggctggtcaccgagctgcgttcggcggcgcgtccgcccgaggcgccggagccttcggagttggtgctgaccgattggctggtgctgccggcggcggccgaaccccacgcgcacctggacaaggcactgagctggaccggcagcggtgccaggtacggcgatctccatcaggcgatccgctcctggcacgactacgcggcgacaatgaccgagcaggacgttgccgaccgagccgggcgagccgtgcggacct

SEQ ID NO: 71165 - DNA, 774 bp, Arabidopsis thaliana landsberg
gggtactgctggcattggggttttcaaaaataaatccacgtgcatccaatccctctccataatctatttgcatccctaataaatataatccgtgggctacattcataatcaccggaaccccttggatttgatattccatatcttcatcagtttgttgatctaatcctaatacatagctcaggccggaacaacctcccccctttacaccaatacgcaggtgcaattgctcattttcatttccttccagcaccttttttatttcattcagcgcattatctgtaaatgtaacaggaccagctgtcacgttatcaagtattttcatggtcattcttttttcttccgagcagcaatagaatcagttcctttttgattcccttcttctccctttttgttatttgatttttttatatcaccattaccttcctgcacctcggtatcgggctcctcttcattctttttttggataaactgagcaatatcacctccagattcttgatgcaccgcttcttccctctttttgataaagttagtataacttccaaactgactcatcaactgataaccctgattggtaattgacaactgcccggaatgaccaaaaccgattaccgggctcaccaaacccgtactgagtaaaatatcccaaaggcgatcaactccctgattcgtaaatttaatttgagaagaaatcagaatatcctcttttaaagaagccggttgtttgtctccgttattgtacagtttacttaaaactaaacccgttaaagcaacatc

SEQ ID NO: 71166 - DNA, 412 bp, Arabidopsis thaliana landsberg
gtgctatacagccttggtcactgattgactcttgatgtgagctcccacgtcgattgcgtggtcctcctctagatagctcagttcagaagcgtccaggtaaccatctatccactgctcggtggagctggcccgctccaacaggtcctgagcgctatttaggtaccattcgatgctactgtgactggtcttgaactgctcggtgacagttactacgtgagactgttggatatgctctggtgtagaccatgctatgcaatagttcattgtcccatcgataaatcagatcgccggcaaactgttcttgagatgggcggtgttggtacggaatgactaactgataatgactaacgggttgcactgccactaccgagtggtactggctatggatttgactacttgtgagtagatgaca

SEQ ID NO: 71167 - DNA, 205 bp, Arabidopsis thaliana landsberg
  unsure (1)..(205): unsure at all n locations
ggaaagaacagcaagtgttaccttttgcaaaacagcaaagcgttttatgtcaggggctgggggtaatggacaaattnatcgatccaaattctgatattagctgcatagatagaggttaacatttgagttaaaacttgacaattcagttaaaacatgaccagacgagcttgaattctttacatcccagtgtctagggtggaagggc

SEQ ID NO: 71168 - DNA, 564 bp, Arabidopsis thaliana landsberg
  unsure (1)..(564): unsure at all n locations
cgtgagtcctggatactgcctgttcccagcgttacaccgttgaactgaacgttgggacgctgcatgtaatatgtaccattcacgaacgagcacgaggccgggcttccgtcctgccaggcagcaacggttgaatgaaaagttgtggcagattggttgaaaacagaattgaccgtataaccaacggaattgaatgagcaggtattgaccacgaggttggacacaccgtcccagtaaaagggagtnnnnnnnnnnnnnnnnnnnnnnnnnnnnnnnnnnnnnaaagtcccggtgttcaatactgtagtaaaaggctgggtctggtgacggtttttgccactgcagaaaaccaccttgaattcannnnnnnnnnnnnnnnnnnnnnnnnagctccatttggtcgggttacctgggtcatcggtcagggtgtcatgcgaaagattaatggaagtggacccgccattgtagatctccacccagtctggatgatctacgtcttcatcggcaatggtctgggaattgcggatactggcctctgtgatcaccaactgtgctggtgaaaagtgc

SEQ ID NO: 71169 - DNA, 573 bp, Arabidopsis thaliana landsberg
  unsure (1)..(573): unsure at all n locations
gcgtcacgctgcctggagtcggctacgccaagctgaacgccgcctacgcggacggcggtcccaatctgctgttgcgcacgttgcagacccaggtcttcccgggcctgcacgtcaaccatgtggtcgtcttcagcttcgtcggcttcgccaagctggtcgacgctatcggttgcgtctacaccgatgtcgaccaccgctactacaacaacagtgcgcagaccgactactccagcattgacatcgagcccggctatcagaagctctgcggtgacaacggcgcccccgacagcgcattggccttcgtgcgcttccgccacacggactcagatgaggtccggaacgcccgtcagcaggacttcatccgctgggccaaggaccaatactcgacctcccagctgatcagcnnnnnnnnnnnnnnnnnnnnnnnnnnnnnnnnnnnnnnnnnnncggacagatcgctgcaaagtgtggacggcctcctggacctcttcgacnnnnnnnnnnnnnnnnnnnnnnnnnagctcaggaccgttcagttccccgaggccttcggcccgtgcgtcgctggacaga

SEQ ID NO: 71170 - DNA, 131 bp, Arabidopsis thaliana landsberg
ctcgccgctctacgggaatcgcttttgctttcttttgctctggctactaagatgtttcagttcgccagggtgtctcttgcccgccctgggattcagcagcagttcaaaagggtaacctattcgggaatctc

SEQ ID NO: 71171 - DNA, 555 bp, Arabidopsis thaliana landsberg
aacgatgctatctgatcaacatgagataacgtgtttcaacaggaggaagtgggtagctccatcgtttactaaatctacattatcttatactttttaatcctatatcacaatagtatctctctaacatatactatatataaagatagaaacaatgtataaaaatagagaagaacaactgaacaaatcgagggacttttttttgtgtaatatagatatgtttaaatttgagacattaatagttttataagttttttaaaaaaactgatattcgatttaggcatgtacatgtattattcatttattctggtgggcatactagtggtactaaatcattgctgaattacagtttaaatatggacatgcatatgtgggttatactggaacaaaattctttgcggataaaaggagaaatttagaaagaatatacatgagctgagattatacttagaatggtcacataaaagtgacgatcatagttttatactatctattatgattgaattttgttgactctgaatcagcaccatactaacagtcgactaagagagaatacag

SEQ ID NO: 71172 - DNA, 410 bp, Arabidopsis thaliana landsberg
  unsure (1)..(410): unsure at all n locations
ataannnnnnnnnnnnnnnnnttttattcatttaaaggctttaattttctcattttctctatagttttttttcatttttgaaaagatataaactttaatattttatagatagcgatgcaaaaggtttgtgcatgcacttaattattagcacgaagtttagagatgcaaagctgagtgtgacttctttgaatgtagagttagaaatatatatagatggagagtgcaattggttggaaggattgtttcaacaaacaacaatgtataatttatatgtatattaaatgttagtatgtataaataaactggtttgcacacatgactaagcacgtcctctagagaattttttgtacgataatctatcactggcatgcaaatgttcctcctttgatgtaacacaaaaataaaaataa

SEQ ID NO: 71173 - DNA, 432 bp, Arabidopsis thaliana landsberg
  unsure (1)..(432): unsure at all n locations
tcaaagcttaagtccagttcttgcgcaaatgcctttcgcacgcgcgcggcaatatacgcaatgtagtaggctcggcgataaaagtatcgcatgttcgtgtaggccttttcttggaatagtgacgagggcatctggacgaccatannnnnnnnnnnnnnnnnnnnnnnnnnnnnnnnnnnnnnnnnnnnntagcttcccacaacattgcactgtgacggcggcgaataagagaccttgtatggggcgtcttttgcgggctttgggtcgggatatggaatgacgatgcgatgctctttttcgaattttaccgtggcctcggagatctggaaatgtcacgttaggattgcttggcagctacatgtagtctagactctcgcaaaactcactggcttggggtcatggggctcaattccatcgaatataccctttagt

SEQ ID NO: 71174 - DNA, 359 bp, Arabidopsis thaliana landsberg
  unsure (1)..(359): unsure at all n locations
ctgatcatttttccatcaggcaccaatgcagcaatctctgcatcgataatctccgcgattttcgcaacatcttgattcgttatgtcgagctctgacaccatctcaaccgctacactccatgcagtatcaatagccgtctcaaacgggaagtaaatgttccttatccgtcctacattacccaaaactcgaaagcgtgttacgtttttaagaccgatgattttaaaactatcgaaaaagattgaaactataccttcagcatcagatattctaagtctcaagaatatcccatcatcaccgtttctcttccctttaatcgaaatgtcgacatgatcttcatcatncgtagcgaaaagatcgat

SEQ ID NO: 71175 - DNA, 536 bp, Arabidopsis thaliana landsberg
gggcacacacgctctgttacgtgaatcttaatggtcaaaaatgatgaaccgagcttgtgtgtgggttatctagaaaccaggtatgtaaagccggctcaaccgctcatttgccttgactattatgatttcaaagtccacgataagcatctgatcagccacgacacgacccacatagagtgtttagctcacatgcatagggacatttgatatctaataacgatcaattatatatcaggaacaaaaagagaagtcctaatgaatttaaactttctcaaatcgagccaaaggagatcttgactaacctaaacaatcccaaatttgagttcattttccggaatagatccactgttattcagctttgaaagttatgtcaacaaatgatgaagatttttgtatgaaatctatttttcttataaaaataaagttttggcgacgatatacaagccttttttgacactctatagaccaaatagtgtgggaaaatgtccaactgcacagagaagttgcataagtaaattgtgactcatatcaaattg

SEQ ID NO: 71176 - DNA, 4083 bp, Arabidopsis thaliana landsberg
ggtaacagatatagaacggaaacttacttgatggtggcccctccttttccaattatacctccacaagaactgttaggaaccacaagtctaattcttctcctaggctcaacctcattaccatcttcagcatgaagctagtaaacaaatagaaaagttaaaattgatttcattgtgacatactatataaactaaataaacgcaactgtgacatgaaatacaaatttgtcaaaaaagattacctcactgtgcaatttttcaaggataagttccagtccattgacaacttctttgattgatcccgatatcataataattctgtcagtcgtccccgggaaaaactcttgattccgtgaaagctgaatccttgccccggactttgcctgaaattcagtgatggtcgagccacctttcccaatgacggaaccagctgccgcattggatacaagaaagcgaatgtgtgttggcttctcagcagaatctgaaaagagcaaaacacattagatagtcaaatagatagcatggttcactaaaccgcatcagtattgagctaatcgttgaattgaaacagcgtaattgaaccatccttggaaaatgaatctatcacacaggaaatattctcacaagttttcatcagcaaaaaaagacattaatcacacatgtccgttgacatatcatagagtacttaaacgagatccaattcacgaatgtgacgaaataccgaaacaattgattcagagtcgaaggaaaatgcaacgacggagacaaaaaaacaaaagaccagatcggatcgaaaataccagcttcggaagaatcatgcggttcaggggatctcttcgccagctcttccggtgaacctgccgcatatgactcagtagactccattgctgctacagaagataaacggcattaaccaatcgacattatcaattcaatgaagagaaataagaacgaaatcggagagagaggaagagataagactcgttcatcgaaatctgagattgagaaggaaaaattccaaagtttacctgtcttcacacaattcgaatctgctccctccgtcgtcgtcgtcacttggcgccggtggttaaatgaatctgagcaaaactaagtctcaatcgtcgtatcggtgcttcctcggcttcttcgtctttgtcgccgagcggtttgtgaagtgaatgaaggtggctctggtgtccttcgtctatctatccactagcctcccttattctattattttttatttttcctaaatttaattttattgaccgcctctctatttcctttttaatttttttttcctctttcacaatcatctcactttttatttgttaaaatatcaaatcaactcaactacaaaatgtgttaacatcaaaatgtgctacgaaataaaacataattagaaaataaaacaccaaaattatcatttttctacaattttaaagcaatagaatgaacatgataataataaaataaaaatggcaatatgtgttctgtttttttctctattttcttattttagaatttgatttgattgatttatttacatagtttgctagatcttgaattgcagtaaatatatgtttatcaaattgtacggtagagttgacgaagacgatagatacgattaatggtaatgcatgtttatgatttgaatcggtcgatttaataatgtaagttcaatattattataaggtgattttggttttttagcccggcaataatgggaagtggctctttagccaaaataaattatgggaagtggcaacctgtgttttcttcacgactacagattcattggtaaaaccttcaataaaataatcatgttattttgtgaactttaaaattagtaatcaaattcctcacacaatattattttcaataattagataactctttttcgcattttcttaattaattttgtactctttaattaggaaaaaaactaattattttaatcaaaaatactgacaagtgttatggatccaaccgagtctggttacatgacattttcatatttacttactcaaattgcgaaggttattcgttgttggcccaatatatacatttcacgggctctttttgggcttgctttcaatattcagcgtattttaactgtagcgaacgaaacaacgtcagcaggctaacatgcgcagtcgaagcaggtggtgatggtggtgccacctcccaaatcttcgtcgtcccaataatcttatcacgtttctctcactctctctccttcgcttgtgtgtttaagctaagccgttagtcgttaaacatctcatatcctaaaacgccgtcgttttagctatggcgttgagctcagctacgcttagacttacctctctgtcgttctcggcgaagaagacgaatcgaaaccctagaaatccagctctctccttcaccatcactagctcatcgtcctttgacgaatcacccaaaccttcttctctcgccacttcctcttctacgtcacctattcgcgtctcctctagttctacccccaaagctcgattcatcgctcgtcagaaacaatccgtctccgttcgtcagctacagcgacctctaagtaacttcagcgcgattctctctgatctaaatttctgtttcctgtggatgattaaatctggatcggattgtttgattttgaatttgctttttgtttatggtttgcagttgagtatatgagcttacctgcgagtcagtactcggtgcttgatgcggagaggattgagagagttgatgataacacgtttagatgttatgtttatacgtttaaattcttcaactttgaagtctgccctgttttgcttgtcagggttgaagagcagcctaatggctgctgcatcaagctcttgtcctgcaaggtaattcttcttttgttcttttggaaatgattgaatttgcaaacaaagagaggaacttgtggcgtttagacatatgtcaaatcaaatccagttatgatttgttaagactgtgatgatttttgtattttcttgtgccatatagcttgagggatctcctgttgtggttgctcaaaatgacaaatttgatggtaagcatatccctgtatacgcttcactttgttaacccgttttgaaagtactgccatgttgtcaagttttgtgtactgaaattatttaaatttagtgatggttgtgtgggcttaacatttattattttctagtcatgcagcttctatggtgaaccgggtatcatgtgatagcactcaggagggctcatcagagcaacaaattacttcagatgcagtcattgaggtagctaagttcttcattttttttccttttgcttagttaatcagtgcattgctgtggtatctctgacttacttggcgattgtaggtcaatatcgagattccttttgcatttagagtcttcccagtgggagcaatagaggcgactgggacacaagttcttgatcaaattcttaaactcatgctacctcgatttttgtcacaggtatgcaggaaaacagatttgtattattacgttttaattgcttattctgcatcaacgaggtccgttaagcgatcatgtatttctctatggcactatggttttttagatagcaagatcgtcctgcttgagaggattaggctgacatctgaggtttcctgttgatatttgagaagatcttttatatttgagctgtttgatgaggcaatataacatgttttgggcgttatttatgttggtaaagcacatgttgaaccaggactcaggtttcagattagcctaggcttctatggtttcctctgtaaaactggcttgttgattctttatatttatgtgctcctccttctgcatatatgaacataaatacattccattgcctgcaaaatcatcccaacattaatcttatcatgctcttttattcattttgcagctctcgaaagactatcatgcatgggctttgggagacacttcaaggcaacctcttgggaccggtgagatctgatagtaaagcaaaagctaccgtacgtacctggttcaacgatcctgtgccttctcgagttcaaataggggatgatagcaaaatttcgatctttttaatgtggtattcggg

SEQ ID NO: 71177 - DNA, 692 bp, Arabidopsis thaliana landsberg
gtcactttcccccaacaatgcctcattattttctatttagaaacattttttgtatttttggacaaaaaatgtctaccttcgagagcaaggcacttagtgtaggaggaacatagaaagagaggaagagaggtgccgatgtggtgtggctgacggtgtgagttacaacaagaacattatttcttatacaatgacatgagataacatttgtccatgtattcacagctatctagctactatgttataactcataaggttaattgaacgctaaaatgctaatgcaacacgtcccttaatttaatgtacgaaacagtttctgaaacttttctccaactttctcgacacttacaaatgtttgagaacttcaacaagttcttaaaagtttcacatgtagttttctgaaaactatagttcacttttttcattgttaaatgaacaaaattatttttgatctatcactagccatatattttttcgatcctaaactctataatctaaactctaaccacatattcttaacaaccaccacacaagtaaacttgtctccatcgcctcatctctctttgttaaggctttttggaatttttgttcatatataagatttttaaaaattagttataatagcacataaaaagcctttagatataggttaaagattcaaaagattacttgcctttttatatatcaacattttt

SEQ ID NO: 71178 - DNA, 3081 bp, Arabidopsis thaliana landsberg
caggtcgactctagaggatcccccgcttccaaagacgtaaccattaaccacgaaaccggcgtgtccgtacgtattttccgaccaactaatctaccatccaatgataacgccgtggctcgtctcccaatcattatccatctccacggctccggttggatcctttacccggccaattctgccgcaaatgaccgttgttgctctcaaatgaccagtgagttaacagtgattgttgtctccgtacactatcgtttgcctccggagcatagactcccagctcaatacgacgacgcattagatgctctgctttgggtcaaacaacaagtcgttgactcaaccaacggcgagccgtggcttaaggactacgccgatttctcacggtgttacatatgcggttcgagtaacggcgctaacatcgctttccaattggcactgagatcgttagaccacgatttaacgccgttacaaatcgacggttgcgtgttttaccaaccgctttttggcggtaaaacgaggacaaaatcggagcttaagaatttcgccgacccggtaatgccggttcctgcggttgacgccatgtgggaactatctttgccggtaggtgttgatcgggatcataggtactgtaatccattgggttacttgccgcaaaaggagaaagttggacggcttggacggtgtttggtgatcggttacggcggagacacgtcgttggatcgacaacaagatttcgtgaatttgttggttgcagctggagttagggttgaagcaaggtttgacgacgccggtttccatagcatcgagctggtcgatccacgacgagccgtcgctcttcttaatatgattagagattttataagttgattattcttttcaagttttcatctaagcattctataaccgttaattttctcattttctattttgtatacatatgacattttacattgaacgttgttacatagcacaaatgttacttcttttgtgttttttgataaaatgttaacattgttactttttattgtattcatttttacaattccacaattccgtaatttcacaaatttactaattgaaatccatttcattctcaatcatacttaagtaacctactgtagttgaattttaagtccaacttgtgatcagctttaaaaacaaaagtcataacatcggacggtcaggatatcatgtgtgaggctgtatcctttaaataataaaatagaggacacacacgagatccgttaaaggttaaaccttgaagaaagaaagatctctcggtggtggtcattcaacattgaaagatcttcgacttggcaaaagtgtttcactttcgctctaaaaacttcatcttcactttctctcctcctccatggcggacggtggggctgaccctccagctccaccatcatcgataaacgccggtgaatttctcttgtctattttgcacggaagtccttcgccgtcgtcacaaggttctcagcatcatcagtcattcgctctcgatccagccatcgcagccattggtcctaccgtcaataatccttttcctccgtcgaattggcaatctaacggtcatcgacccagtaatcataaccctccttcttggccactcgccttttcacctcctcataatctttcccccaatttcttagggtttcctcaatttccgcctagccctttcacgacgaaccaattcgacggtaatcaaagagtatctccagaagatgcttatagattagggtttcctggaactacaaatcctgctattcagtccatggtacagcaacagcagcagcagcagctaccgccgccgcaatcagagactcggaagcttgtttttggttctttctcgggagatgctactcaaagccttaatgggttacataacgggaacttgaagtatgattctaatcaacacgaacagctcatgaggcatccccaatctactctctcgaattctaacatggatccaaacttgtctcatcatcggaatcatgatctccatgaacagaggggaggtcacagcggaagaggaaactggggtcatattgggaataacggcaggggtttaaagtctactcctcctcctcctcctcctggattttcgagtaaccaaagaggatgggatatgagtttaggaagtaaggatgacgatagagggatgggtaggaatcatgatcaagcaatgggcgagcattctaaagtttggaatcaaagtgttgatttttctgctgaggctaatagattaaggggattgtctatccagaacgagagcaagttcaatcttagtcaacaaatagatcatcctggaccacctaagggtgcaagtctacattctgtatcagcagctgatgctgcggattccttttcgatgttgaacaaggaagctcgtcgtggaggtgaacgtagagaggaattggggcagctcagtaaggcaaagagggaaggcaatgcaaactctgacgagattgaggattttggagaagatattgttaagtctttattgcttgaagatgaaactggtgagaaggatgccaatgatgggaagaaggatagcaagacttctcgcgagaaggtacgtttcagtttttgtgtaagcttgtgatataggatatacctaatgacttgttgggaacattcagtgatggtgtttagctcgtgtaatcaattcttgaactagaaaggatgttttttttagattggaaagattgtttaaatcagggttttgttatcaggaatcgagagtggacaatcggggtcaacggctgcttggccaaaaggcaagaatggttaaaatgtatatggcatgtcgaaatgacatccacaggtatgatgctacattcattgcaatctacaagtccctgattcccgcagaagaggagctggagaagcagagacaactaatggcacatctagagaatctagttgccaaagaatggcctcatgcaaagttgtatctttacgggtcctgtgctaacgcttttggtttcccgaagagcgacatcgacgtttgccttacaataaaaggtgatgatatccaccaattttagatgttgttaaagctggcagaggatcgtggaatca

SEQ ID NO: 71179 - DNA, 2083 bp, Arabidopsis thaliana landsberg
  unsure (1)..(2083): unsure at all n locations
cccgcacagtttaccacttatcattggctcatcatcaagaacacaaactgccccagatattccagtctggtaataacttttcttagttaattctccattaatcagcatcataagaaagaacacttgcagaatataaaaataagttttaacctgttgtgcacgtcgttctagttgagcagtgcgtatcctacgtgcaatacccgagaccctctctcttgcgaaggaatcctcaaggacagaatcacccccaacagcacgtattgcagctgccatggctgctgcctccctgctaccagcattaggaatagatggaataagggacgcttcaatttccttccatttgcgctcttccttctccaaaagagctttccttctttctttacctctcccttcttcttcacgtctctgcataaggctttcctcttccatctctttctctctcagataactaaaatttacaacacaaaagaaaatgataggcaacagtctaagagttcagcttcgtcaaaccacataattataagaaacatatacctctcttgaataatttcgaattgtcttctatcctctggcttccatttactgatttttctggcacttaaatccgagaacccaatgctatctaagaagagccgcaaccgtacctcatcctacaacattgtaataatcccgtgttagacatacatagagaagaatatatgaaaatttagaatcaggattcacctgaactctctccgccttagctgtcaaacctaacaatagtagtaaataaccaccaaatttgtcccacatatacacccattctgtatcaattgcctcttccagtgccaaaactcttgcatgggcacacatgtctcttctataatctacatttgtaggtggttcatgacggaatcctttcctgcattgcattntgtagaagattgatccagcaactctttcttcgttcctgagacgatcccttaatttcatgacatcatctctaggaagcacaaagttccctgctttatcacgcattgcagagggatccccaaccagaagagctgcagagctggcggacctttggggagctgaatacgtgccggatagagcatttcttgtctgtaattaacaagttgcaaagacggaataaatcatacatcccatggagctccatattacgtgaatgtgttgaaataaggccaataatagaatatcaatatgattttcaagagacacatcagagtgtaacttactttcgtggcagatcgagagatagcttgcactatagtatccttgctaagaaagcgtacagcaacctccatcatctgaagaacatcagaaggaattagcaaagtgatttaaatgaaccactaaccactaatctttattttaaggaacaaataaatcaaacaaccagaaaactaacctcaagagtcaaacatgggcgagaaacagcaaacccaaaggctactacaagggtgatagctgatacagcagcacccgcgaacggaggataaattatcagactagcaacaacaccccagccttctgttgccaaagcaattccatacaggacaagaaatgcagcactagagaaatcccaatgcaatcaatagaaaagcatatgagagtcgatcagcttaatcctttatggtcatttcagatcagcagatgcaatactattaggggtactcaagtggctgcatacctgacattctttccgcaatcagcatgagcatcgtagacatatactggtagcacccttggagaatatactacaattggtggggatagaagaacctacgagaataatcgttaatattccggttgaatacagaaacagaaaaagccacagttctgttgaactcacagctaatgctcttccagccaacagagacaggaatgtaaagtaaccaacagatgctccagcaaatgctttatctgcaaaaaaattatgaaattgctgtgtcactagagtaggtctcacctctacgaagagtttaaaataaaatatgggcaatcctcaccttgatgccatccgagaagataagcggccaaacccaaaagaagagcaagaaagcagacaaaggatgtcgatttc

SEQ ID NO: 71180 - DNA, 573 bp, Arabidopsis thaliana landsberg
aatttggagagagactatcgaagcgagcctgaaaggatcaagaaatggatagaagctttgatctctattccccaaaagattggcttaacttcggcaggacacaggtattatattacaattcatttcgaattttgcagttagggttccgagtcattgtgtatagcttgaacgagaagaaagagatatcgagacatttattaaacattttagtacatttctcattggtaatggtagggatgagtctgaattggttgactcaatcgttaaggaggtgaagaaagtgctaatcgatgtttcaagaaaggacagaaacaattctcaaaattccactaacataaaaggttgtcttttagattataattgctgtgttatattgcttgtgaagtatgatttgagttttgaaaagttgtactaatagctttgtttttttgtgtgtttcaggtcaatcttttgagcctctaatggcagagctagaccgactaccaacacgtcgccacaagtgtttgtcaatttctgcaatgacgagcttggcgacaactttattaaacatctcgtgtgggctttgagagactc

SEQ ID NO: 71181 - DNA, 356 bp, Arabidopsis thaliana landsberg
aaaaccaaaacatattttgagtgttacatgtaacagatgatatgtcataccttttttggcccttatcttaaatggaacccggctttgtgagacaacacattttagataactcatatcacggggtttctattatggttgatgagtcgaggacgacacgatcttgactttacgtaagatcttgagagagctgtacgactacacatcccattatatcatgtgcataggtactaatattgatctcgcggataggacacataccgctcgcattatctacttgatcatagctgaattccagtacctacactacattttatggcgatgagaaaatacataacatcgcttgaggagataattcg

SEQ ID NO: 71182 - DNA, 582 bp, Arabidopsis thaliana landsberg
ctgcgctcgacgaaatacaccgcaccgtagccggtcgcctcggtgcgcacgcgcgagccgccccaggtcaggcccttgccagtcagcacgccggactcgtagcgattggtcatgcgcttgtactggccgaacatgtagccgatctcgcgcccgccgacgccgatatcaccggcgggaacgtcggtatactcgccgagatgccggtacagttcggtcatgaaggattggcagaatcgcatgatctcgttgtcggagcggcccttcgggtcgaaatctgaaccacctttgccgccgccgatcggcatgccggtcagggcgttcttgaaggtctgctcgaagccgaggaacttgatggtgccgagaaagacgctgggatggaagcgcaggccgcccttgaacgggccgagcgcggagttgaactggacgcggaagccgcgattgatctgcacctggcctttgtcgtcgacccacggcacgcggaagatgatctggcgctcgggctcgcagatccgctcgatcagcgcgccttcggcgtaatgcggatgtttcgccaccacagcgccgaggctatcgaggacctcg

SEQ ID NO: 71183 - DNA, 471 bp, Arabidopsis thaliana landsberg
tacaaacctcatgacgagattgccgccggtggaatcctcctcctgaaggatgggttaaatgtaactttgataggggctatacgcggggcatccccatgacacgttctggggggataatacgggagtgtaatggccatatagttctgtgtgggaatgcaaaactccaggcatcgacctgttcattacatgcggtggcccttgagtttctccatgcactccaagtaatttgggctcatggactgagttatgtttggttcgaaagcgacaggcagagtcctgatacattgaccaactatcacagacgatcaaaatatgctcgggaccctcatctacgacatgccccattggatgcttacggtgccggctcgatcgctggaacttgtgaatcgagaacggacttgtgcagctggttgcttatgatctcatgtacatgcaagagaccctctgtatcagccttatactacaccacca

SEQ ID NO: 71184 - DNA, 369 bp, Arabidopsis thaliana landsberg
  unsure (1)..(369): unsure at all n locations
tccttagctcggttttcgagtatggcgactgtttctaagattcaactttttgatatgttctcttgcagatggtcacagctcatgttgaagtcgggaaaaagctgttttgtatcgactggaagaaccaccggcagatgtcggcgttcaatgcggaagacgaaacctgggaagtggtggctcttacgctatcaggaagctcgagggccgggtttcagattggtaagctgagtgggaagctcttgctattcccgtctcaagaagaaaccggtcaatgttctttnnnnnnnnnnnnnnnnnnnnnnnnnngctcactttggtaaacggatgtgatcctgctacttgtgtgccgcgtatgctacgtcacaagcc

SEQ ID NO: 71185 - DNA, 568 bp, Arabidopsis thaliana landsberg
gacgccactgggttaatattcagttgtcggaaacacgcccctctttcgtcacatccgcctccaacttacccattcatatcggctggcccaaagcacgatggcgaggagtttttaacagccattcggtcactatcctctgcccttcataggtgaccagatccgtaacaagcctgtcggggattgtatgtttctcgcgtaggtagaattgggccttcgtaacttccactccaggttcaatctttgcaagctgggcatcgacgagcatgagccctcctagggctatggcctagtgacctagtggaacattatacgcgatcttcccagaccatttaccctgtgctgttactaggtccataagctctttgtttgcagctaagacgcatgtggggtctagcggctttatcagggaaccccacagaaaggaagtagagcaagaattaagaccgtcacacccccagacctacgttcactgtgctccctagctgcttgacctcttcactctctgtagtgccggtttacccctgacagagctaccgtacgcggacggttaactaaatcgatcctggat

SEQ ID NO: 71186 - DNA, 528 bp, Arabidopsis thaliana landsberg
attcaataatcattttgtgtcatttataagttttaagtttcataacataaaaccatttcttgctctagcgactgcaaatcgtcaaatctattagaatatgttcaaatatctaaatgacggtctaaatgagtttacctgatattgccaaccatcaagtccatgatcatcagtttgttgttccatctcgaagcatttttctgatcccgaatagttgtagtataagcttgcagcaccaaaggcacggtcaagattactggatcctcgagggaacccgtcgatgatcttgcacatctgatgcaagagaaaatgacggtcgggaaaaagaaaatactcgatgacacactttaacgaatgaatatctcacctgctctacgggataaccaggcagtggcgccatgaaattagctgcagttggataattaaccatggctgtataaacaaatgctccccttaaccaatctctggctgaatattgagaatgaaagcccctataaaattcaagcaaaacagtttcggttaagcttttgt

SEQ ID NO: 71187 - DNA, 703 bp, Arabidopsis thaliana landsberg
cgttccgacacaattctttagtggacgaaacagtggggctaaatgaccttgattcaggattgggttttgatgtctcttcaaacacatcagggagcctaaacgctgagaaacatgatatatccagcataaacgaagttgacagcctcaaaagtgtggtatctggagatctgagtggacttgctcagagcccgcagaaagagaaagacagtcttgggtggcaacatggctgggggtcagactatcttggtaagaatagcgatttgggcaatgcaatagaagacaacaataagcttaaaggattcttggaagacatggaatcatccattaatgagattaagattgaagtgagttcgctgcagtgccatgcagatgatataggttccaaagctcaagatttttctcaaatacttatatcagagattggttctggggatcatttggtcagagaagtatctgtgctgaaatcagagtgttcaaagttaaaagaagagatggagcgattacgtaacgtcaaatcacacgttctatttaatagcaaagatcaagataatgttccccacagtctacaactaagatggctgcagggacttttagttgtagaggataacataagagaaattcaaaacaaagtatgctatggctaccatgacagagacttaagattggtcctctcagactttgagtctctgctcggagttctaca

SEQ ID NO: 71188 - DNA, 880 bp, Arabidopsis thaliana landsberg
agactatgcactatagacggggtttcaactatctgttaattttaattatataaaatgaaaatagaatattaaattccttaaaaatataaaattaagccagtagcaactatgcaaatataacagtcttaaaaaatttaatatccgagtgagaaaactaagtaggagataaccaaactataaacgtgaaagattcaaactcgaacaaatacattgttgcaaaaaacaaactcgagtgatgtacttttgaagaaaccttatgggagagagatatcaataaagtatggaattttagcaaatcatttatgggagtagtgaagcaaacatagtttgtaaccaaagggctgtctctcaggtcatgatcatctaaagatacgtttgctgtctcttgcacaagaaaacctacgaagtacgaacgcttgatatatattgtggtaccatcggtcaatgttaaacgaggaaacttccatggaagatgatctttgaagaagttgtctgctagagaaaaaaaaaaggataaacgggagacaagtccaaatcttctaaaggttgtagaaaagaatgccccaaaatgtaagatatgatagtatccttaagcaaggaagaggtcatgcgagtcgataataatttaaaaagaaaacagtttttacgtaaatttttgaatatataaatgaagagatgtaaatttaaattaatcaccggagactatcaattttcacaaaaataattttcataacaatgaagattaataaactaaatcgaacctgcctgatatatacatttgcacctctttgctcttcttcgactccaaaatctagggactaggggtcatatcaaactcttctcattctccttcgaacgttttgctagtcgtggtggaagt

SEQ ID NO: 71189 - DNA, 135 bp, Arabidopsis thaliana landsberg
  unsure (1)..(135): unsure at all n locations
tatggaagtagnctagtaaaagagcctatcacctctgataatatattctctcataattttttccctaacgcgcgtcggtatcgactctcgaagatctgggcaatgagtaaaatacattaataatggaaagttttt

SEQ ID NO: 71190 - DNA, 385 bp, Arabidopsis thaliana landsberg
aattgctataatccaaacgagccataaactaatgtgaacgcatgttgcgacccaagccttggaaacgatggcacatgatgcatgaacgtcacaaagcggagcccctaacctttctttgcttatgctggactgaacctggcgtgccgtacgtaaccgaacgaagaatggactatactcccatccaaggacgactgaaacgaaccaacatgctgtgatacactttatccatcacatggtattgcatgctctagcccacaaactgtacatgacccatatttcatataacaacacaaggtgatgcggtattacccactggatataagcatactaatatgcaggagaaaagaaaacaacaaagagaaccttagctacctaaagcgaacca

SEQ ID NO: 71191 - DNA, 251 bp, Arabidopsis thaliana landsberg
cgccacaaagttttttcttagctctcggtccgaaacaacaccaacaatgcttttcaaatgttagtaccttgcaaaaggttttgatacacggtggtattgtaatattgagcatcgatctatgtatagctccaccctccattctacctacacattgatttaaaatacacaaaaatttgactaatgggaaaaaagagagatcatttgtatatattatacattaagtgtagatatttagagagaaaaaccctata

SEQ ID NO: 71192 - DNA, 309 bp, Arabidopsis thaliana landsberg
ccctacgagtgacaacctcgctgaggaaccgtgggtgctggcacagcattggacgattaccaatgcttgcatacctcaagcggtcattctctggtacaagaacgtccacgaacggtcgcgctgttgcttcaccctgaagcggtacgctaggctaccgacgaatgcggacaattcacaactgctgcctaccgtttgagcctgggccgcgtctgagcacgagcgcgggtgaacatactttttgcccacttactgatcgttggctggttcaactattgcctcacgaactagtttataacactacagccccta

SEQ ID NO: 71193 - DNA, 792 bp, Arabidopsis thaliana landsberg
aaagttaactacgaatcctgctttccatcaatcatgggaatctcatagtggaattctttacatatccagtaacagatgatttatgccaactaatcatgtgtgataggcgcaaggtttggggatactactcgagagtacatttctctcacaagagaaattaaaagatttagatagaagatggtgcataccttgtctcaacaggacatgctaagatgaaaactgctggtgtataagcagaaatgaaagcatccaaagacacaactccatcattaatgaagtccataacctaatcagatagaaaaaaacattagcacggatgcagtacatgcccatacactataaacaagcaaaatacttcatgttttgaattacaacaagagcagaaacttggcatgctatattttgatcagttgagtgtgctaagagtgtgcacacttgtgtttggctcatgcaagtgtctgcatgctcactcgcacgtattcatatcaaaaacataacaaaaatgaaatatactaaattattttaaagccaatcctaaagcaagcttcaaattttcttaccctataataacgagttaatatgtatgtcctaattcctatgtaacaagaaaccatatcaggggttagatagatatcttggaagagatcaacacaaacaaatactgtatcacgtttataattatatgtttacgaatataactaaaatgttactagtctcatgtgtctacagaagcaaatgcacaacagagaaattaatagaaaaaaggggacggaaattcacctccaaaaggtc

SEQ ID NO: 71194 - DNA, 2009 bp, Arabidopsis thaliana landsberg
tatgaaagtagatctatagatccaagataacgttgaagaagaaaacttaaaacaagaatttacagaccaagaatgttaaattcaacacttgatgtgattttaaacataatataaatgtgtgtcatatattacacctttaattttattaatttatcccaaagaagagtttctgaaatcaaatacatataacatacctccaaagatgaggtgcaacggtgatgcattgtgtgcaggatgcccaagaaatgagacaacatcatattcaaactttcagaaattccgttttgtgatttcacagcattttcaatctggtaaaatatacaattcgattagcaaaagaatagaacattatctcagcttaattatccagcagcaattgggaattccaggatgtcaaatgtcacaaaaagagaatcaaacctagcaaaaaatgatgcacagagttaaaagattatctcagctttcggacgagttataattctcctatgacttactaaagattttgtgagctctgcattctcatgtccatatatagcgcatatatccaataactttggcaagtccagtaacttcttgtcctgcagaagaactacaaacaaaactggtgaatagctgtaagctagaaaataatctttaaaatttcctacaaaatgtgcaacgtaaagaaaaaagaagaaaaactcaattcattctagaaagtcttgatcagtgagcggactactctcactacctgattcgtacaaccaataccaatttccaatatattcaagaagaaccacatgttcagctgctagctctattttaccctgcccaagactaaccaactctaatcagttacctatgttgagctggtctaagaaatataatcaaactacccgagaacaaatgtcgactaatataagcataattttacacataagaatcgtaaagcttatcaaaaacctaaatggtacatgtaaaggagtcaaccaacataagcacacaacgtctacacataatactcgtaaagcttatccaaaatccaaatggaacatgtaaaggaatctaaccttgagttaaaaaatcactgtgtgaaaataatcacaatagtcatatcacctttacaacagtcctacttctaactatacccctgagtgagtaatggaattttacttaagctttagatggtataatagtcccagagacttggtaagaaaagaacattgtgagtcattctctagtttagattaggaaaggcagcttacatcgaggatgagacacaaaagaattatagcctaagatttagtaatataaacattgaggcatgttaatctttcattctatgttcatgtccttttcagaacgaaataagtaacaacaactgaatgggattagaatagacaaagagcaaaaggccaccttcatgatctttctgactgaggctatcagcagctttagcaccgggatccctattggacgatctgccacagccaaatatacaaaccctcaactgacaagacccaaaagaatcaaaaataatgacactagtatccatgatgaaaaaagactattcaataaaaagctttggattatgaaacaagcagcgactcacattctatacaagaccatgaaaacacgacggcataactcgagttctccgacaatcacgcccgcaacaatacccttgacaccatgaaaaggaaaatcataccatctgcttctaaactgcaggaagctatcccaaaaatcatgcaacgatgcatcactagccactgtcattaaccaagagaagtaatatcagtctaaaaatccatcacacaaaaaaaaaagttgaaacccgagagaccgaagctcattatgaaccaaaactgacataaaatcaaaagaagcatgaccttttctccaaaaatttttaggattgagcttaagcaggcctgtgagctctttattgaggagatccaccacttcctgagactccactggatccaaacctccatcatcaaggccctaaaccaacggcaacagcctcg

SEQ ID NO: 71195 - DNA, 590 bp, Arabidopsis thaliana landsberg
  unsure (1)..(590): unsure at all n locations
caggttgaaatattacaatcgatttctttatgataaaannnnnnnnnnnnnnnnnnnnnnnnnnnnnnnnnnnnnnnnnnnnnnnnnnnngattcacttatcaacagctaccaaactgtccaatctagtctaaaaaaaaaagttcttgatgttgagaatgagaaagtccgacatatttattctcctctcaccctgcagttgatgttaaatttgtgagtattttagctgaagtcatgattttgcgtttcaggttcttttgcaagagcagtgtgctggtctgcagagccaaatggaagaactaaatcaggaagcccaaaagcatgaatcttccttaaaggtattttggttttcttcaaaatactagtttgtttcttttcttcctcaaactctccagaattagaagtaacttgatgtttttaaccatttgccagatgctctcagaacaccatgagtcggagaggtcagatctactctctcacatagaatgtcttgaaaaggatatagcgagcctgtcatcctcttccttggccaaagagaaggagaacctaagagaagattttgagaagacgagaacaaagctaanagacact

SEQ ID NO: 71196 - DNA, 610 bp, Arabidopsis thaliana landsberg
cagacaaaaagacactctaaaacatgccccgtatctgctcttatacaaatcgtagtgcagtcgtccgtttacaggggtatacttgtacatcaattttcatcaaacatgagcttcaccaattcttatgtcaagtcgcttgatatcaacatatgatatcatgtaattctatatactttccctcttcccgcaggatccaaaaagttgtgcagaacaaaagatcatccgagaatatcatctttcatacactaaaacgattactttgaatccgaattcttgatctagcttaatttagtttaatactcatgtatcgttatttttagtagtatcaaaataatttgaaaaaaagatggaaaagagaaaaccacgttgggaaaattccagctagggattcaacagaggcacacaagtgtgattcttcaaaattccaaattctttatattgaaaagcttactgaattataatacacattacattgttccaacttcaaaacataggcactcttaaacaaaacacagaaatacaaaatctcttataacttcaaactttccaaccaaacagaaccacataggctattactacttagttaggcggcttgaagaaactgagctta

SEQ ID NO: 71197 - DNA, 346 bp, Arabidopsis thaliana landsberg
acgattcattcagtgcaggccacactcattctaatactaataatgaaattaaattaactcaaactgttgaattacctcgccatattggttcgcacgaagaacataaactgcgaagtaagacacgcccattatgaccaaaactccaagctgaatccatggcaacctctttggtctttgattatcctgcaagagaggcaacttcagactctcaatcttatgttcttcatgaacatcttgaagtttattcgattctataatcgtcaccatgtacgattgcaatctccaatactaaggtgcattcgcacacttgtcaacgacgaccacgcaagacacacagtgaagagac

SEQ ID NO: 71198 - DNA, 575 bp, Arabidopsis thaliana landsberg
  unsure (1)..(575): unsure at all n locations
gaaatcacggttgcgttcatccttgatgccgtgcgggtcatggtggggaaagctgaacaggttcgcaaagcatttgaagcgtacgagatggaagagannnnnnnnnnnnnnnnnnnnnnnnnnnnnnnnnnnnnnnnnnnnnnnnnnnnnnnnnnnnnnnttgactttcgtcgggttcttcgcggcgagcaggacggcaagcacggcgcctgccgataggcctccggcgatgacgacgtcgcactccttcttcagatcgtcgagcgcctggtcggcgctgcgataccagtcggtccaggacgnnnnnnnnnnnnnnnnnnnnnnnnnnnnnnnnnnnnnnnnnnnnnnnnnnnnnnnnnnnnnnnnnnnnttggcgaggccgctcgcgacgaagcgcatttcgaccggcgttccgcagaggcggtgcagcagcaggatgccgatctttccgcccttgattttgaagcccgcgtccgtcgccatcagtccctccgggagccatatttattcgatgatcaaggggtacgtgctctcgtcgcgggcggcagttccgcccgtgacacgggcttacgcgg

SEQ ID NO: 71199 - DNA, 485 bp, Arabidopsis thaliana landsberg
attttcagttttttttttaacactcaccgtcgatacgtcgacgtttcagtgtcaccatctttatcttcctcctacaaaaatttcaaaatttcaaaaaaaaaaacattaacattaaatgatacatatacagttacaagaatctagaatcaacaacattaaataacctccagatgtattaattctttcttcttatattcattgctcccactacaagacgacgaaactccattatcaccgacgacggagacagagcttgatttttccgatctaacataaacaattctccggctccgtagctgcatatacgttgacgaaactccagcttctacaattcctttagcttttctatattttctcaccatcttcgatttaggttacgtgtgcgtgaagtcacaatctctgtgagagagagagatatgattgagaggatgaggaagaagaagaaagaaagatgatgaatttggttttgaacggtcaggattgag

SEQ ID NO: 71200 - DNA, 509 bp, Arabidopsis thaliana landsberg
  unsure (1)..(509): unsure at all n locations
caccctatttcggctcggctgacgcagaggcgccagtggcaggggatggaccaggtcctggtgtggcagaggttccagcacgagctggagtgctgacttcagtcttgccttgactcttccggctgcccttcttgcccttcttccgcttggacttcttgtcctcggcctcctgtcgtcgtctctcggcgacttcttcccaaggcttnnnnnnnnnnnnnnnnnnnnnnnnnnngaccttgtggttctcgggcttgcactgctcacaatagtattgatcgggttcttggcccttggcaaaggtcaatcccatgcagtcattgtgttgccatgcagagcactggtcacagcagatcatgtcacgctcgacatcttcttcttcctcgtattctccacagatgcatcgaatgatctcctcttcttctccatcgctaggaccggnggtaggctcggcggaagctatgctggacttgtctttctggtctttggggcttttgctcttgccccttttc

SEQ ID NO: 71201 - DNA, 147 bp, Arabidopsis thaliana landsberg
ctcctctagcaatataagaatctataaaccattaatagtagaatttcaaatgtgtgaagctatatactataaatgaaaattttactttttaacttttgtgtccctaatatcataccatacttaaaattttatttatttgattttaat

SEQ ID NO: 71202 - DNA, 253 bp, Arabidopsis thaliana landsberg
tgcggttttgaagcacttcaccatttggaaataatggtttcaataacttccctacagtttgcttcttggaccacatctagaactatcttgaagaggtggtgtttccataaatcttattctgtattcattacaatctgattactttgtattccattccgtcgtgaataaatgatcttaacatagatccggcgtggtcttacaagactctaataatgaggacaactctgcctcttacaattccctatatctgggt

SEQ ID NO: 71203 - DNA, 585 bp, Arabidopsis thaliana landsberg
  unsure (1)..(585): unsure at all n locations
aaatgtctccttgcaattaaagagagaggaaaaataaacagagggaaacacaattatacaggttttgcttgcactctaagtttatcatcttccctcttaatcatatcttaagaagttcttgcagaaacattataaacacaaacacaagacttcttaaatcacatgatgttaatctttctgatccaaaacttaaaactctaccatctttttctttgtccatgctctctgcatcggcttttcgaaatagatttttttagccgtctcaataactaattgaaacccatctatttaatacctacagagatccatattagctcataaaaactcccatcaacaatcagcaatttagcaatcatcagcttcatcatcaacacattgtttcaatagagattgacatagtcttctcttcctttggttgattcattggtgatgaaagtctctcaaccaaaacatctaatgcttctttcatccaccaatctctacaagcttctcttgcttcggntacattcatctgttgtcccccaataattcatatcaatcagtaaaacactagatatgttacaaaatatcttnagaaaacatagt

SEQ ID NO: 71204 - DNA, 3385 bp, Arabidopsis thaliana landsberg
caaaattgttccttggtaatggttatggtgatcatgtaagaattagttaatatcgttgtgtagtgaatctgaactagttttgatttctaactagatagtgtctttctgctcaaagataagagaaacggctttgttgatatatagctgcattatatttgcatacaccagattttgctctcttattgttggtgtgggatctttattgtgtttggtttatgttcactttgtaggcattcaaatcgtatggatatctcctcccattcatcatcttatcgcttttcttcagcaccggacccaaagctttcctcgtgtcactagccgtagcaatcgggccatcattgttattttatgcgttccagaagttgattggttgggataaacgcagaggtacatcaatagcaaatcaattcgggatagaggaagaagaagaagaagtggagagaagtagtagcaggattcgatacaacccatcaaccgttagaaacaatgtcaatggccgtggagttaaccgtagttcagctggaatggcttctaagtttggtgggtgggacgagttagacgggcttggtaccaccattcccaaacggccaacaagcgaaccgaagaagaaaccgttaccgaagaggaagagagtaagaagagaaaaggcagcagaaccattattgttgagattgttggtgtctttgtttccattcttaagcacatacacaaacatgctcaagtgaaaaaccactaaaccaaaacaaaccaagttgttcaaattaaaccaaaccgaaattggttaaaaatagagaataattatgagcctcaatttcagtttgagcatcaccatttcttttccatgactttcctcttatcaagaacatttatttctctcactctcagaccttcttgttcgatttccatggcgaatttaacgacgaacgctaaatctcgcctgagaggtgttgtattcgatatggacggaaccctgactgttccggtcatcgatttcgccgcaatgtatagagctgttcttggtgaagatgcttacaagcgaatcaaagcagagagccctagtgggattgatattctgcatcatattgagtcgtggagtcctgataaacagcagaaggcgtatgaaatcattgctgattatgagaaacaaggaatagataagcttcaaatcatgcctggtacggattcatctgctttattttttgatttttgattttgtgtttgagctgaggaagtgttaaggatttgggttttcgtctgataatctatcgtaaaatgggttaaagattgagaatttcgtagagttaaagatgagaaaagattgcaaattcaaggctgaaagataaaatgaacatttgttaaaagtgaagactttatggtctaacggaggtttgacttttgtcttagagccccacatcacgatttgagatcattcctttactggtcattgactttatgctgttgagttctataagatgatttagcagttgaaaatctagaaggagtactgtgtttctttggcgtttagaggtttaattctcttctgatatgtgatcatttatgtggcaggtactgctgaactatgtggcttccttgattccaaaaagataaagtctgtggttttcagatacttctgtctatgattttttgttttcttgttcagataacttgactgttgttacattttgtattttactttataggagggggctaattacacgcaatgttcaaaaggcaatcgacatcttccatcaacgttttgaggtaagaatgttgaattgaagacattttgacagctgcctgagataggtttagctggatcattcttttttttttatcagagagaagaaatctgaggcagttccttacagttatttttcattgtataggttatcttttctccagcactaggcagagagtttcgtccatataaaccaaacccagacccgctgttgcatatatgttctacatgggacatccaacctaatgaagtcatgatggttggtgacagcttaaaagatgatgtgagtgacagacatgatgacaagcctttggtcaaccctttctccatagcaaatcgataagcaatgcaatgaaagaagcttaaacaatggatcttctcatgccattgcttaaagattttctatgtggaaaggatgcctaccaacttttcagactatttttctcacatctttactgaagattacaactgggaatcgatctttcttttctcgattctgcagatagcatgtgggaaacgagctggagccttcacttgcttgctagatgaaaccggaaggtatggaccagacgatttttctgtttccggtctgcaacctgattttaaggttgattccttgtccaaaatccagaacctattggagacgaacttcgacctgaacccgtagtttttcaaagttcctcatcttgtagtttcagtgaccaaattagtgtcctactcaacacagtatctgttcaggatagccataaatgtcaaaccacggaattctatgcactggctatctttaagttgcacaattgtgtccctgcatggtcgtctagcgaacatgtgtgtgagggcaaacattgttgtttgttaaatccaaaatttcaagatttttaatatcatctctagtctctgaatggctgaatctgtttcttagtaagtcttccaacaatgatagatctagtgtgaaatgtgatcctgctaagtgaaaaagacttctcaatcgctattagtgtttctacaaggaaccaatgaatgcatatatcttcgtgaaggtcccagtggggtctttttgcttccctagcgtctggttagcacggtcagattatggcatgtcttcgcagaatcatgatacaaacaaaacatttgtatttgatggtgatctaatgccatattcccagaataatggcgattgcaaataagatcaacaaggtaaagttgcctccgggaagaacccatggcctgcaaaatcagaaggttttggtttcatatgaatcccatagatagttccaatgaagaaacagaggactacagagaatgttttgtatagtagggtgaagttacctgagcttctttctggactgttgaatataagccattgcaggaggcaggacaccaaagaggaaacagtttgcataaacaccggcaaaatccagagctctcgagaacgttgagggaaagaatgttgcaattagagctggaactccaaggacaaatagcatcactactgcttcatacccatcacgagctcttgctggttcattgtatgaggctctcccattagttctcctatcacgctcttttgatgagaaacttacagacccaagtcttccatttccatttgattgcttagacacaagctttcatgtgtcgaggagctgt

SEQ ID NO: 71205 - DNA, 594 bp, Arabidopsis thaliana landsberg
ggcagatttgtaagaacttatttttctcgcttttgttttcaattccgcaatagatttgtaaaaaatcattacaatattccaaaaaacaagttcgtgtagaagaaaaatgtatgtgtctttttatcttgtagatctgtaagaacttatatttctatcactattgtagaagtaaaaactacagatctgtttagtttatgtatagatctgcgtaaaacaccagtttgacacacatatatttctctcctttgttctcatgtaattgttcatttatcttatagataagctaagtaattctcaacctaaatactaacatattctactacaattattaaataaaaagatccaaacaaacagcattaataatcatattagcatttagatcttctttaaaaacaactatgaaaactgaaaacaacttcagattatcaatagaacaaaagattttgtttttcaaaaagtgagggcaacggttgttaacggtttttgttttaatttaaacttaagaaaatcatcttaccttttcgatattacatatcaaataatcatgtaattctttaattataatggatgttgaggtttcctaataattttttt

SEQ ID NO: 71206 - DNA, 539 bp, Arabidopsis thaliana landsberg
  unsure (1)..(539): unsure at all n locations
gggatggtattttttatcggcatcaatgtgtgctttgctttcctttattatttcctcggcgtaggtgaatttacccgggccgccaatggcaatatattacactacctggtacatctattttttttcagtgtgcaggcgctgaccaccgtcacggtagattacaaacaaatcatgcccacggggttctgggccagcatcgtttcctctcttgaagccatttgcgggctgatgacatttgccgttctcaccggactggtttacagccgtttcgcacgaccgcgctcctacctgctgttcagccggaatgccctgatatcgccttacaaaggtaagacagggctgatgttccgcctggtcagctacaaggaccgccacaacctggtggatgcaaacgtacatgtcaacctgnggctgaatgtagaagaagacggcaaaccttcttataaattntattctcttcccctggaaagataccatattgactcgctcaacatgaactggaccatcgtgcattcgatagatgagcagagccctttaca

SEQ ID NO: 71207 - DNA, 729 bp, Arabidopsis thaliana landsberg
tgaacttatcttcaaagcattccacgcagctacatacttggacgcagtccacgcagccacatctcctacgtctcttcttaaattctcacttcccaaaaaaagttataattcacttctacaaaatataaagtctctcccacagtgtaaactcttcctccacaaattttaaaggtaattttgtggatctctcgctctctagatatttctgatcatattctcttataaatatttttaattattagtaaatgttttctccagtcattcaattcaggaatgtattcttgtcttggcttacagagtgatggctcttctttgttttagatttgtcattttcttaattaattgattgaatgaatactctaaaatcttagtattatgtggaatgaatacactaatctttcaataatggaaggttcattgtttgttttagtgaaacttttacctctgagattattagatatttttttgaatattttttgttttgttttcaagacatgtttaaatagtaaacaatatttggattaaataagtagatacaaaatgtgataattaggaaaattcaaaaatttagaaatatagagtaagttgattttctcaattaagtttaccatcataaattgtcaacgaaaaacaataattaccgttcctaaaaaattgatcatcgtgaaatctaaatcctccatcaataaacatattgttttattaaaacactaaaagtctactaatttt

SEQ ID NO: 71208 - DNA, 282 bp, Arabidopsis thaliana landsberg
agtacacactaacttgagatagaaataactaactcatgaaaaagcaaagggcccttcaaaagctttaaaatattgtacatgccttgaaacatgagcaacctagctcttaacacataaatgtttattatttgtcatatatacagttacgttcatgcatgggatatatatactggttaaggtaatatacatatgtactgatttatcatatacatgtactagatatactttagtacattcacattttatatgcctctaattggcaaactgtcaaatatgaaaatc

SEQ ID NO: 71209 - DNA, 331 bp, Arabidopsis thaliana landsberg
ccgcagaaccaactgagtctgcctcttcatacacagcatcaggacaaaccccagtttctgtaccttccttcacagaacacacactggactgcgagatataaaaatcatccgcacacgggaagccatcctctctattcccagtaaccacaacatacgcattcaacatgacgctcgacagaacatatcaggaaggccaaccaaacgccatgcatgtcaagaaaccagttggaggctctggaccaatataaacatatcctctctctggattcaagctacgcctaaggctatacttatccgatggcaacttacaaagatcaaacatagcctagag

SEQ ID NO: 71210 - DNA, 537 bp, Arabidopsis thaliana landsberg
tgaatataaaatttgttaaaatattcctagagtaattaagcctttgaagagtaaactttgttattatttcattgtctaatgtgtgggaatgagttaatttggcagttcctcatagtaccactctaaccacctgtgcgtgctctgaccttcaaaaaccaccaagttcaagtttcgaatcacgtccgtgattggggcaccgtctccagcctgaccaagacacgaaaccaaaacttcgaaacctgacccgcaccagtcctgctcagcctcacagacatcaacagtacagcaacacctgaagctgctgctgggctagtctgcttcacagctgcctctttcgcaacggcctccaagttgggaatttgggactgatgatttggagagatgtggccgacatgtgagtcttgaaagtgtatataagaagggagcatctttgcaatggaatcatcaattcaactgcaagccagtcttctctcttctactcttttccatcatctacattcaacgccctggaggcatctcattctacaccttactcac

SEQ ID NO: 71211 - DNA, 583 bp, Arabidopsis thaliana landsberg
  unsure (1)..(583): unsure at all n locations
aatggctcctatctaattatagaagtacaaaaaggttattgccaacttcactttgtgttacggaagaaatggtaaatggattccatattgcacatggaggaatcgcttacagtcttgcagattcagcacttgcatttnnnnnnnnnnnnnnnnnnnnnnnnnnnntaagcactgaaacttccatttcgcacatccgttctacaaaggttggagacactctcacggcaacttgcacggaaattaatcggggaaaaagactaggtatttaccaagtacttgtaacaaatcaagaagataaaaccgttgcgcattttaaaggtagtgtgatgattttggatacagattggggttgataaactcaatgatgcgtataatatcttaacagatataatttttgtgatttaaaaaaaagagcttgtcaacacacttaacaagctcttccttcttatggttttatcgtattttattattttctcacctccaaaattttcacctctgtcctacngttatcttggtggaatgtttcttgttcatctttggagtgatttttataataaatncatncngtaatcgaacttttttt

SEQ ID NO: 71212 - DNA, 282 bp, Arabidopsis thaliana landsberg
acataacacgtaacactcaaacatgaaacatgtaacaagtaaggagttctaagtcaaacaattacaagaagctgcctcgctctttcgtttactttgaatatttcacaacaacattcaaataaaaccattgtctctctccctctccatgtatctttatatatttcctccatcaaaacttttatctctcatccttcttaattccctcaaaagattcattattagctaactcaacgtttcctcatactaatcaaccactagaccattcatccccgcgttacaagg

SEQ ID NO: 71213 - DNA, 427 bp, Arabidopsis thaliana landsberg
aaccttagcagctgactccttctcaattatttcagtaatgcttttctccttccttctgtggggaattctatgatcaggaaaaccagaacacttatctaacgatctctgaagagacgacgactcttcatgatccaaagctgctacttcttctactctagaccgtttagcacgccattgtaacccatcattaacattctttggttcatcatcatcatcatcatcattgttcttgtcttcaagtcctggaactgattgaggttcatgatactcaggcaaaccatatcctctattagaccgataaaacgcagataccttccttttcaatatctccagctcaagcaagccacttatactaacagcctctgcaaaactcttaccatctttaagaatctctgcgtgtttaccaatcgacaacgacgaaatcatt

SEQ ID NO: 71214 - DNA, 326 bp, Arabidopsis thaliana landsberg
gctctccagtatcaacatttgtgtatttggatgcatgctccaaatcaaacatcaattacaaccactatttctcaatccgtcgaatagagctagtgaacaaggcattgcatagagaaacatgagatactcatctcataagggtcggcaaaccctcgacggagttttactgcttatgactggttgagatgagataatgtcgtgttgtcaccaaaaaattatctatatgaaaatatgacactgtgcatacaaaccgaaacctgtcaagtcgcctattcgtgcaagtttgctctacacactcgcaaaatgccatattatactatgaagta

SEQ ID NO: 71215 - DNA, 581 bp, Arabidopsis thaliana landsberg
tcaattcatccatcgtgaatatttcctgctcagttccatcattccatcccaacaaagcaagcttattatatgaacgcttccggaaggaacccgggttcacgaaaaccctggtttgaaattcccgttttaggatcgttccagttcatggcaaacaccgggaagccaagacgctcaccgtcgcgcttgctcagttttccgttaccatcaggttttaatattaatggcaaatgcgcccactccggcatgctatctttccatcccagataatcccacaataaaagatgtaccggagcagaaggaagccattcctctccgcgaaatacatgagtaatatccattaagtgatcatctacaacaactgccagatgataggtaggcatgccgtctgctttcagcaatactttatcatctatctgcgatgtgtcaaaactcacatctcccctgatcatatcatttagccatacggtctcatcttcaggcattttgatcctgatcacatacggtgtcccgtttgtcttcagcgtatctacttctgattcaggcaggcataatgagtttcgcatttgcagccggtacttatt

SEQ ID NO: 71216 - DNA, 460 bp, Arabidopsis thaliana landsberg
gttttgcttgtttagatctttgattattgattaggtgacacgactttttatcttcttttggatgtagtgatatcaacatatcattttacgattattagattcccttaggatggattcattgtgtggcattgtgattggtttgttgtgttgttagcgtttttgagtctttggcttttcgttttattccgggtctttcactaggtatcttttatgtgtcttagagttcgattttttggccattttaggtattgctagcggaaagaaacacagtttggtgcgttgtagttactacattgtttgtgtttccattccaagggaaaaagtgtgttcaaaaatgctcactgtatccaagggattatcgattatattctacagcatacctttgtatatcttctaggcctcgcaaagcttctgctgccttttgttaactgttttactgaaatacttttatgtgtttgaa

SEQ ID NO: 71217 - DNA, 134 bp, Arabidopsis thaliana landsberg
tgataaccgccgctggagcagttggtccatactaaggcgggacgatggctttgcgacgcattgtgaccaccaccaacttaggaaaagggctaggggccgtgtttctaagtgggaagtgcgcacatttaatgaaa

SEQ ID NO: 71218 - DNA, 454 bp, Arabidopsis thaliana landsberg
  unsure (1)..(454): unsure at all n locations
gaaaaaagtttcgcggaccccaaaacgaaataagaacctcatgacaaatgccgatctganccaaaacagttatgtcgccatggtactatgcatgacacaaaaagtaattaacacaattgaaatggataatcaggagaaaaatctatataaactataatctcttaataaaaagtacaacatttttagatttaggatttataatttactttctatggttgtaatttaaaatttgagatttagagttgaagtatagaatttagttttaacgttagggttttgaattataaattgaaattatgacatattttaaatgaatataatctaacattcttagttttggtataaatgtagactttattttagttgtttagggtgtcatcacaatgaaaaatgtgaatacgtggattcagaaatgagacatacttggttctatcagaatgaataaatgagacat

SEQ ID NO: 71219 - DNA, 534 bp, Arabidopsis thaliana landsberg
agttataacaaaacttaaactaattacacatttcgtgaactttgacaaaagtaatttgtagtagtaaatacccatctccaaaaatcgaaatagtaactacaatctatactaaaaaaaactgtgtgatcaggcaaaaccagtatttgaataactccagagtaatctttaaagaaaaagaaaaagaaacatattttcgataatcaatcaaataaacaaactcaagtcacttgccgatgaaagtggtggaaatttcccataaataaacaaaggaacaaacaaacaactcctccatttccattactttactctttctatttcttaatataaacggacgattttaccctccatctctcgccgttttcacactatgagctttccacatccctttacgaagtgacgatattaccctaaaagcgaccttcctcgaagaaaccacataccaacaatctgagagattaatcgcaatttcccagacacgggaccttccttcattaatcttagctggcttccatggatgttcttctcagaaatcca

SEQ ID NO: 71220 - DNA, 996 bp, Arabidopsis thaliana landsberg
agcaacataaatccatgattctaattacaaatgacttttatttttaaccacagcgaaaatcatcgatgggcagggaacaagtatacaacactgcgactttgagatcagcgacaatgaaatcgagtcatttgagttaatcaaagctgatttttcaatcagtgagatcgatcgatgatcgcgcatttgcaataagtgttcgagcagagaaagaaaacattacgacagaagataattttcacatacactatgtaaactttggtcgccattgaagaagtgcgctcgatcctctgaaagcttttctgatttttgttttcgcagaaaatctagctccaaattgttgttatagctagctcttcgagaatttttagtcaacgacccaaaacttattaatttatatttctgccccttaacttatttttgatccagtaaaccaccttaattgtaaaagcttgactagatagctcctaattaacatatctccttttattcatggaaagattaagcattataatcaacacatcattgatagtgcttaaggatgatgatttttttgtgtgtgctacaaatcgatattgtgatacagtcatcaccagtctagtttatgaatttttttctttattttatatatgttcaacacatctgatcaaagatataaactgaagtgtaaaaatagtatcaagtactatgattaaaagaattatgtgaatggtaacattaatggaaaaattaagaaaaaggtaacaaatgaatcgaattaaataaaagaggaagggatcccaaatctctccagtgtcaatgccggcgcgtgaagccaaactcctcctcaatgacctccgtgacgagacaccgcgacgcttccatcaaatcagggctaagcctaaacatcaacacacaaaactccatctgattcaacgcaccgtcgcagtcaaaatcaccttcttcaatcatacaccggacatcttcatcagtcaaatctcctaaacccagaaccgccgc

SEQ ID NO: 71221 - DNA, 337 bp, Arabidopsis thaliana landsberg
  unsure (1)..(337): unsure at all n locations
atgattgtaagagatatgaggaaaaggagggatatgagaacgcctaatacacatatgaagcttttgtttttagatcatataaggaaactgaaannnnnnnnnnnnnnnnnnnnnnnnnnnnnnnnnnnnnnnnnnnnnnnnnnnnnnnnnnnnnnnnnnnnnnnnnnnnnnnnnnnnnnnnnnnnnnnnnnnnnnnnnnnnnnnnnnnnnnnnnnnnnnnnnnnnnnnnnnnnnnnnnnnnnnnnnnnnnnnnnnnnnnnnnnnnnnnnnnnnnnnnnnnnnnnnnnnnnnnnnnnnnnnnnnnnnnnnnnnnnnnnnnnnnnnnnnnnnnnngtgg

SEQ ID NO: 71222 - DNA, 3925 bp, Arabidopsis thaliana landsberg
gtaatcagcccactgaaaatgagggcaatggttactaccagaactttggaaatgggaacaaagtagcgaattcatctgttggaggaggaaggccacaatcgtcatcgacaagtggtcatttcaacaattcacagaattcaaattcttgggatagttggggagagaatgagaataagaagacagaagcagcagctccaaaggggtcttctgcttctaatgatgatgatggctggactggttgggatgatcacgatgccaaagatgatgggttcgatggtcattaccaaagtgcaggcgataagaaatctgctggtcgcaacggtaaatcagacaccgcttggaccggcggaggttttcagtaagggtaagcaagctttagctcatgtagctctaacagttaatatcacagtaacactttactcatctttatttggataggtggtgattcagaatctccgtgagaagtgtataattaattaaagctgggaccgtcgtgatctgaatataagatgagattggtcttcatcttaaaaccatgttcatgcttacccacaggtctgcttttttcttcataagttggcagtttcttgatatctttttcttcatgtgttaaggagtaacatatttgtacaagatccatagccgattgtttgctaaagattttcggttttagtctttcacaagttaaatttatcttcaactgtaatcacaactgaacattctttttctccaaattgccttacttgttggtagcgtgataatgtgggttctcgaaacgcataaattatgctgttttggtatgtttctataaagggtaaatggatttagcagttcaaagaatgttttggttggatccataacataatccactagtagtgatacaagtggcactgataattcgtctacgagtgacgaaacggtcatctactgatacatgtggacttatctgcttgaacaaatatgcacttataccagaaaagatccacaatttgtagtggagaatccagatgctttttttatttgtatcccactaaccccaataataaagttactggttaaaattacgaccgagtggatagttaccgaagcatagtggactgaccatagaaccacatggtttgaccgaagaagaaatgagatgctgaattagtctaagttcttctcttaatgcataatccgtttccatgtcataatagttcaataatctaaaaacgctagcacaaggtcaaaaagacaaaaacaatcggagcctaatatacaaacagtaaggagagaccgtagagactagaagtgtaagagagagcataacccaacgaataactgaggaacacctaacacggcacactcgattgtcgttttgtttctgcatgttggtcttcaaacataggattatatattgatgaattaccctaaaactttataggaaatcatattcataacatcatacatatcttctgcgaaattgggaatgatacttttttcaaaggtatcatcttggccggtaagttctcctaggttggcgactgtccaagacgccgccaagagtggccaaagcgtcctgaaatttcctgattttaagcaaacctttcaccattgaaacctcttcctccgagaatctagctttctgcatcaccatgttcactaacttgactagtgtctcctccattgacaaagttagaagaccttcagccaacatgtacaaagaagaaaactcaggtacaaaccctttctctaacagctcaacaagaaagtccactgcttcacggattggtccacctccattacatagcccacggaaaacgattctgtaagatactgcatctggtgcagcttcattctgttcaagcatctctctaaacagatttatagcttctgttgttttcctctttctaaacaacccttgaatcaccgggttataagcatgcggtgtcaaagcaatccctttcatctgaattgacctcaaaagcttacttgcaacttcaactctaccagctttacacaaaccgcttatcaaggttccataggtcacaatgtctggttcacacccgtttgaggtcatggcttgcacgatatccgcagctttctttatgtcacctcctctgcaaaaatgtgttagaagcgagttgtatgtgtacttgtcaggtttctgtccttccataatcatttgatccatgagctgagccgcgtcctctactcgcctgcttttacaaagcccatcgatgagtgtgttgtatgtaacagagtttcttgaaactccatgtacttccatctcatcaaatatctcctcggcttctctaatcttgttggctttgcaaaacccatcaatcaaagtgttgtaagttatcacactccgtgcacaaccactcaattccatttgtttaagcatgttcagagcttcatctagcttccctttggagcataagctatcaatcagcatattgtaagtgaactcgtcaggctcacatcctttgctcctcatctcttcaaacaactccatcgcaacccggtgattcctagtcaaacacaaaccttggatcaaagagttaaatgtacaaacgtcaggaaggatccctttgctggtgagaacacgggcaagctccgtagcttcctcgacctgattctctttacataacgtgctgatcaaagtgttgtaagtaaccgtgttcggagaacaatctctagtaatcatctgatcaagaacctccactgcttctttcacctctccaagcttacacaaacccgaaatcaccgagttataagtatacacatctggatcatacccttcttgaagcatcacatccataatctcaatagcatgcttcacatgccctgctttacacaaaccattaactaacgtgttaaacgtatactgatccggaaaaaacccgtcttggttagacatctcctggatgaaattgagagcgtcttcaactctcccttccttacaaaaaccatgaacaataacattaacactgacattagaccatgaacaaccaaactcaaccatctgttccctaatcctcaaagctccatccaagtctccttcttcaatgtatccttgcataatcgttgtaaatgtcttctcgtcaggaacaaggccgtaactaggcatatcctccaacatcaaaatcgcaggtctaagctgatgagctctacacaaagctttgatcaaaacattaaacgtagatacatctggtttaatcccccagacactcatcttcgcgtgagaaatctcaacgagtttcagactattcccatcaacgagaagattcaacatccggttataaaaatgggtatcgggttttaacccgaattcgtcaatcatccaatcaacaacacttaaaatctcatcttgcaattcgaactgagcataactctcgattaatatcaagaaaggagaagtacccatttcgcatctggaactcttcatgtcttccagaattttcttcatgtcatcaaacgaaccagaccgacctagccgaaggagaatctcttcgtatagagcaggttcaggtgagaaatttggcttcttagaggccagattaaagagacgaagtgcggcggaatcatcaggctggctacggagtgagtcgagaagcttgacatcggtagaggagagagctgctgagtgaggagaagcgaaggagatggtagaagaaggaggagttagattgagagagaaggaatgatgagttagggttacagcttgagagatagaaaatggatagaatttgagacatgaagagaaagccatagttttcagtttccagagaagatgatgatagtgaagcaacaaaaggggtttaaggatttcgattttttgctaaccgaccggttcgttcgtgacccgcacaattattaaaaattcgatttaggaatttaagcagtaagccaaaaagtgagacgctttggaaaatggaaagtg

SEQ ID NO: 71223 - DNA, 620 bp, Arabidopsis thaliana landsberg
  unsure (1)..(620): unsure at all n locations
aatcataagttatggattcaccgttcttgagaaaagaaagaaagaaaaatacatggaaaagatgaagcttgtttttcttcgtactagaaaacagctggcttttctcaatcacatgattgaatggtttctggtaccatttttgtttttaatttttcatttttgatttccttaaaactatacaataagacaatgacctaaaaaaaattatacacgactcaacaaaaattacacggctctcgtgcccaaacccaaactgtttactatttaattgggctaaatctatagaggcccaatggcttataaatcatagattcataatactgaaatattaaaccggcgtaaatggtacgtacttcgggaaataacgaattcgattttaaccggaaactgaaccggaagctgagtctcgtgcctgccttctctaggcttctttgtttccaatcagaatctcgagctcaactgtcaaaactagccgaccactaagtcgttgtcctaactttctctctgtttctcatcgaacattattgggaggagagagagagagatgaacangaaacaacgagaatagatcggaggattttgtccgaccagaagaggaagatgggagatatctggacatg

SEQ ID NO: 71224 - DNA, 563 bp, Arabidopsis thaliana landsberg
gatgaatttgtacttttctctttcacatgtataatgagtgtttgtaatgaaaaaagcagtacaggtctatagaagagaaatttgggaatttagcaatgtttacaaaaattcctattccgatcaagtgaggccacaggaaatcattatctagaaccagactatgaaatcaaaatcggcagaatctctgaacaaaattcctcttctgattcaccatggccactggaaatcgttatctacaaccgtactatgaaatcaaaatccatgaatctctcagctaaaaaggaaacgaagaagaaagagtagtgtcttcaattaccaaaaaggtaacaagatgttggctgccttgtggttgttattacatcttgacaaaagaagtaaaagaagtgtatagacacagtgatgtgtttagtgtgagtctagtatcagtaatcatacaagaatgcaagtaaaaccagcagccaccactgatggataaccttgtaaattaatcaaacttgatagtgaaatcaaatctctgcaacaaattggcagaaccaaaactcctaatatgatgagaaagcctt

SEQ ID NO: 71225 - DNA, 194 bp, Arabidopsis thaliana landsberg
taataatgatggatcaactaaaccctcttggggacttgcttaagaaattattgacaattgtctgttacacacaagaaaaacttaagatgttgaatacttgattatatattgttattactaacggctgaatcactgtattagatctaattgatacatccagattctgttatttatgtagtcgaatgtgaaatacg

SEQ ID NO: 71226 - DNA, 275 bp, Arabidopsis thaliana landsberg
atgtaatatattctttttatttgctgtcgtgaacatttttatctttagttctatctatttcggttctcattgtttgcgtcgatttgatgacgtggacctaaagtgcgtgaaagtaaaacctttgctttgtccttagaactgaatgttcacactcccaaaaattaaattcgaaactaaataaataaaaacaaataacaaaaacgtgaattggtggcctaagtgccactcaacactactaatgaacctttgcctaattcagtggttaactcttcacg

SEQ ID NO: 71227 - DNA, 3864 bp, Arabidopsis thaliana landsberg
gacaccaccagtttctctgaaatcagctaatatattagcttttatgtctagcttgtgattcttgtgataacggtaacactggatactagctttctccaatatatcggccactgcttcaacagcttcgaccgtgtttgcaaacaccattgtcctctctgtgttggtgttgttattgttttttacagcctctataagagcatcaacctgtgagtctattgtgacttcaacccatttttgctttagtctgcaacataacaaagacaataacaaaatctgagttggagtggcttgctaactactactaagtaattcaatcaagagaaggagattatctatatatgaatggcttgcaaaccaatagcttataatcatccctatacacattttcgacctcataatgatacatatatataacttaatcaacaatttaaaggggtgggggaaatgattcatagtatttcaaagaagatgaaagagagaagttttcacctcggactgtttcggtgaagaaagtttccgctaacccaaacagcatcttgaaacatatgtttcaaaattcccccggcagtcttcttcccgttaactggaagtgtggctgcaatgaaaatatactgcttactacgggtatagatctttctcactcttctccagccctttttagtatctgacccaacttcagcttcaacactaggcatttgtgctatatcatcaagatattcctcttcctcttcttcatcctcttcctcagaaatagattcttcatcgaattctgcatcatcctcattttctagatcaatttggggtacagaggcatcaatctccattggtctgccaagattggatttagccaaacgagacacctgtttctcatcgaaacgcagcatatttatcagacggataatctgattctggaagcttccacacagaagcatatcagcttcatcaaagacctgaaagcaatccaaacattcaaaaggagacctgcaagtgatccaaacaacacaactctaaacaagttttccttaccacatatttgacacatcgtagaaggtccggacgcctatttcttttcggctcaatattattaagaagagcagcaggtgtcgaaacaattatatcagggagtctatctggccaaccctgcagcaaatgcaacttccatattcagctatattcaaacagttacaaaggaacagttagatattgcttctcaatatgaaaatgttacctgagatccacacacagcttcaactctaagaagtggattaccatcttcatcaacaagaccattaaccatccgaaccacttgttcacaaagcatcacatttggacacagaataagagagatattcttaagcggaaacggtctttcctctctattcgtaacctcggaatcaagagcggtgtttgttaattgatcaattattggagcaagataaccatgtgttttaccactaccagtttctgctgcaacaatcacatctttcccagacaatatagacggtatgcaaacagcctacaggtaagaaaacagtataaaatcagattcacaatcaaacatttcagaatcaaaaacgcaaaaatgattccttttttcccattcactaaacaatgtctcaagactttacataaaaacagaaactctaacttatcatttcccaatcaacaaatgcttctctaagttcttctgttagatttcaccaaaatttgaaaacttacctgagtaagagatggtctatcgaacccagaatctcgaagagctatagagacattatctgataacccaagagacttccaagaaacggtatggtcagcaaaaaaagtatcattaccctttttctcgacttctgcttcagtagcagacgcaaacccacgaacccattttctatcagattgattgagagagcttaaacggaaagaaacagatgaaccataagcgagagcgaacgagaccttgaacctctgagataagagcttcgacggcgctgaagaagagactccacacaaatgaagcacggagacagagcgtgagagaatcatcgagtttcacaaatcaaactttcatgaagaaaaaaagcaatcagattttatcacggcggataagatttggagaaaacctaatccaaaaagggttttagggtttaagcaaaatatgagagatacagagaagaaagtaagaaacctctgtttcagtctctctcttcattagctcactgatgtaagaaacgacgacatattagcaattagtacgttgaggaaggcaacgacgacgtataggctttgttaagtgactttagtcttttctttgtctcacaccgtctaaagtgaagataagttgtactgtttatacattgatagatatcatgaatggtcacgacctaacctgaactgtcataggctcgtacctctgtaacactggttgatcaaccatgaccgtgcgatctgagtgtctatagaatttcttaacggatgaggtcgccaccgtttagctcttcctctctggggtgggtctttacggtctcttcacttgtgaagttagagttctatagtgtttggcttctttttattttgtcaccttatttttggtttctgttaaatctttagattctgttttggttcagtgaagcgcaccactaatgaacgaagagtctctgtgtgatttttcttacatgtgtatagagattagagagaagtcactcggtttcttgttaattgttaattgttatcgagagaaggaacaagattacaagactaatgcttttgattgattctaatgttgtattttctggcaaagacacacaagttaataatttggaccaacatgaccttctagcataaaaagttttattgatcttttgagttaaatagttcaatgtaaacataactctaatgtacaaaactctaaatgattacacaatgttgttgtatgatatcaaaatttcttcccttgagcaaggtttactcgaatcgcccgaccctccagctcaaatccgtcaagcgattcaagagcggtttccatttctgctttggaagagtaacatacaaagccataaccccgtgatctttctgtatctccatcaaacacaactctagccccaaccacatctccacattctcgaaacgctccagctaatgactcggaagtaacagtccatgataagttaccaacaaagagcttgtgctctgtttctggatacagaggttctttgttaggctttggtttgtctgcaaagttcactttcaaagcacgaccaagatactcctgagaaagaccaataacaaagatcaactaaaatgtgttttttccttttttttatgtgttttgtaataaggctgcaagagacttacagttccatcgaggttatcgatgatgatgttgcaatcttcgacattgctcatggtaacgaaggcgaatccacgactctgtccggtatctctgttgtaaagaacctcaacgagctcagggttagcgaaatcttgaatgatttgagccagagttgcactgtcaacattgtaaggcaagttaccgaagtagagcttagtgttaacggcggcaggaggatcaagaacagcacttgcaccatcatccttctcctcctcttccaatttgacggtgatggtctctgacaagactctgaatcgtcgtgagcagctccgtgaggagatcaggagaggttttggggttgaaaagttgaatctgaggagtgtttggttagatgagtagttgcagccatggagaaggtttggttgatgatgggatttgaagcacgagagtagtactgatgatgcccccatttctctctggacagagccacacagagaatggcctaagacacaaacgtttaaaaatcaaaaagatttcgg

SEQ ID NO: 71228 - DNA, 3532 bp, Arabidopsis thaliana landsberg
aaagaaaacaacaacttaggaattgacacacttatatattatattttttttgtgtatgtaggagattgctctcatggtctgtaatgtaatttcgtttttttcattcatctcttctaatttgatagcaagctttacacaaactataaaatcatatacataaagtatggtttaatctttgttaatgcttaattttaattaaaatatttctaagtgagatagataacccaagattaatgaaacgacccgtcggatccaaaagaaagaaacaagcgggttaaattgatatcgtcttcgtctaccgtttctcaaaatcaaaaccccagaaagcagaaacctctcttcttcgtcttctctcgtcaattcagctgcgaaaatggatttccaggtcgtgattctagccggcggattctctagttatcttgttcccttagtctccaaggtccgtctctctctttcactctcatcatcagcataacagtttcgacgaattgctaatttgttgttgttgttcaggaagttcctaaggcgttgcttcccgtagcgaatcgtccggtgttgtcttacgttctggatcttctcgagagtagtaatctcaaggatctgatcgtcgtacgccttttatcttttcaatacaattactgatttccttttgcgagtttctaggttgaatgttttcaatagagctcagattttttcgtttcgcattggtggaacaggttgttgaaggggaagatgctgctttgaaagttggtggatggatttcttctgcttgtgttgatcgtttacatgttgaggtatttactcatctatggcatctgaattctgtaaaactctatgcatgattgaaagaaactagtgtcatattcgttattaatgttctgctggatattttactttaggttgctgctgttgctgagaatgttggaactgctggggcactcagggcaattgcacaccacttaactgccaaagacattttggttagcttttcaataaagacgtctcgtagcttttgctttgtgcaactttttgagcttctagttaactggtaatttgctttgacgtagatcgtaagtggagacattgtttctgatattcctcctggtgctgttgccgccactcatagaaggcatgatgcagcagtgactgttatgctttgtgctcaacctgtcagtgggccatcagaatcaggaggttctggtgggaaagataaaaccaaaaaacctgcttgcgatgatatcatagggcttgattccttgaaacagttcttgttatacatagccaaaggtcctacttttaatttttctttatgtttcttagaggtaacaaaatgcttgaacttgttgttggtttacctcctgaaattgtgttaggtactgagattaagaaagatacccgagtaaaaaagagcattctctgtgcggctggcaaggtaatgttcttattaagtttttgaaattacctacaaatgcatctttttatgattcatatattacaaattcttagtacagtttctaattatcttgtcattttcgatttagatggaaattcgatcagatctgatggattctcatatatatgccttcaagaggttggtcagatctgctttcctgctatcaaagtagttttatctgtcgatactcaatatgttcttttgtcttacagagcagttctgcaggaagttttggatcaaaaacctgcttttaggagcctaaaacaggatgtactaccgtatcttgttcgtacacagctggttagtcggatacggtccttgcaaatgaccattttttttttattaccattttgattccttatttgtgcggtttccccttgagtatcagagatcagatgtcttctctgaccaaagtaatgtagaagaaaatgggaatggaaatggaaaaaataatatgcagaacaacgaggtggtcttgtctcaaattctctccaacgcatccatgccaagctttcatcaagtctatgaatcaggtctgggtacccggaaaacccataaatgctgtgtttatatagcggatgaaagtaagtatttcgtccgcttgaatagcattcaagccttcatggacgtaaacagagatgtaagttgtttacacatgggattccttctccagtatttttttctcagttgacttatgaagctccgcaattgttcaaacttgtgcaggttattggtgaatcaaaccacctatctggatactccttttctgctcatcacaacattgtccacccatcagctgagcttggatcgaaaaccacagtacgtaactctacatgtgtagatattgagcatttgttctgtgagttgtgatcgtgaataacaatttttgggttgcaggttggacctcattgtatgcttggagaaggctctcaagtcggtgataaatgcagtgtcaaaagatctgtaattgggagacattgccggataggctccaatgtgaaggtaataattagctttttactcaagccagccaaagaaaggtggtgtacatctcgaaaagacactcaactgcttgtatatgtgggtgcagattgttaattcagttgtgatggaccatgccacaattggagacggatgttcaatacaaggctcagtcatttgcagcaacgcacagcttcaagagcgtgttactctaagagactgccaagtacgttacccccttcagttttcataatacagtgtcccctacgtatcaatgcttttacagattccataatcaaaacatcaattggttttataggtggaagcagggtatgttgtttgtgccgggagtgagcacaaaggagagacctttgctagaaaatgaaaaggaaggataagcaaatgaggtcacatcttggaacgcttttttaaaatgaaaagcagcattacttagtcattcgtttggtaggagagaagagtgtgaaggattggaaagtttcccactaagggttttgttgattaagagtttgagattttccgttagtatcttttactgatagagtttgatcttttgctattcattacatatacatgaagtcttgaaacactttgtcagccactgacccttctctctgttccgttggttatattacatacgtctttttttgttcttctcattatttactcttttgttcgagataaaacactttcctgaaagatctaaattttgtttttggtatttccatagagacgaatacacccaaaaagtcacatgctttcagattcgataaatttcagagtaaatgatttcgaatgtatgaaacctttctgtttaaatagtcacgagaatagataaacttcatagcttgtttaaagtgtaacaaaatgtacaagttgtgattcttcttggcgaacttttcgttgcttaacccctcctaacttctcccacaatgcaatttttatttagagattaaacctgcaaaaccaaatctcaaatcttttatgttatgttgagacaaatctacaccatatagaaacatttctaattattagactccaaaataaagttagtgcactctcggtcgcagagttccaggt

SEQ ID NO: 71229 - DNA, 275 bp, Arabidopsis thaliana landsberg
agaatcattagcagcctcaggattagcccacccaatgaaatctttaccatacactttaactctattctcctcacttgccctgatcttatacacattctcaaacagatagtcctgaaacctagtaacaaacttcctataatcctcatccgtcaagaacttcaaagcccaaacaccattactaacaaagtcaaccctacgttgatccccaaacattttcaactgcatatccgtagaaaccctagctttaaccttagtaccaacacccagaaaccaaa

SEQ ID NO: 71230 - DNA, 919 bp, Arabidopsis thaliana landsberg
gatgtatgtttataatctgacttggaaaaagaaaagacttatattgctgtttgatttctgcaatttgtatttgatacgtttgtatacatgtactaaaagatttctgactttgaatggaaatggtatctacatggttagtcttcttttacataactaagcacccagtggttggaccataagaatcatgcactattctataaacctcaggccttggctgctcattgctaaccacaggacattgagctatgcagcaatgcggtgtaatagacttctcttcgacctgtggcttcttcacttcttcaagagtctcaagagtgacatgacatgctttcttccttaaggccataatcaaagaagctgaatccactccatctccaacaaccacaagctcatcctgaaattctccttccatggccactgaagttacacctgcgttgccagatacagatgtattaaagtttcattttttttaaccataagaaaaccactctcgatcggttcaaaacattaaatctgttttaacactaaccatctgcagcaactgctacttgcattgccttcttcctgcatttttcactattcactgacagtttgatacgcatcttttgctgcaaattgctccaacaaagaccaatgattcgaaaaaagaaacagatcgagaaacaagacatccatgattatcgaaataaaaatgaagagcctttaagcaacaagaaaaattagcaccttcattgtcctgacgaagctttgtctctctataaagaagttgctttttaagaatcgaagccaaacttcctcagatatgagttaagagaaccaaaccctaattattctccgttttgtacggatttcaaaagcgaagaagcttctacacactgagtttcagaactgtaaacttcgccagaaaaagacagagaga

SEQ ID NO: 71231 - DNA, 2924 bp, Arabidopsis thaliana landsberg
aggttgaagaggttctgcttcttaaagttcttgcttccggaggaaaggtttgtgtttgctgaacatatttcattgcgtttaagttttgaggtagtgagttatatgcgtgtgttttgtgtcgcgggtactaaggatagaaggggtaaaggttaaggcatgttgggtgtacaaaacttagacaatctaacctcatgaaatttggtttctggttaaagtgatatcagttcatttaagcctggctaagctattgatgatgagatggaaactggaaactaccaacagagccacattattatcatattttttttttgataatatcaaagccacagtatcgttgactaaggattagtaaatgataagttcttagtgtattgtttggtaaatcatgttgcatatcttagtgctccacttttctagatttcctttgcttagatttttgcctttctcgggttccctttcctgatatgtcttgtaattttttcataagctgtttttatcctttaagttctacacaacagactagtttgatagaggcagaattgtgtttgctttgcaggtgcacttgataagttccgagagtggcttaactgttagaacaaagttgcactctctgaaaatcaaagatgaactccagcagcagcagtcaggaagtgctcagtatttagcttactcggtcctgaagaacgaagacatacaagaatcattaggaacatgtgattctttcgacaaggagatgcctgtaggacatgcagatgatgaagatgcctacacagatgctttaccagagtttctgtcacctacagaaccaggtactccggatatggatatgattcaatgcagcatgatgatggactccgatgaacatgtgggactcgaggatactgaaggagggtttcatgaaaaagatacatctcagggaaaaagtctttgcgatgaggtattttatgaggtgcagggtggtgaattttctgattttgtgtcagttgttttcttgacgaggagctccagttcccacgattataatggaattgatacacaggtatgtagtgaaagaccatcggaagacatcttactgcctcacatatttcttatcagctttactaagctctgtttgaaatcaattccagatgagcattcgcatgtcaaaactggagttcttttgcagcagaccaactgttgttgctctaattggttttggatttgatttgagcactgcatcatatatcgaaaatgataaagatgccaacactttggtacctgagaaatctgatagtgagaaagaaacaaatgatgaaagtgggcgcattgaaggcttacttggatatggcaaggatcgtgtagtgttttacctgaacatgaatgttgataatgtgactgtgtttctcaacaaggaggatggttctcagcttgcgatgtttgtgcaggaacgatttgtgttggacattaaggtaagatattttggccgggggcatcttggtgtatttaatttcttataatgattttctcttaatattagccctatgcagtagtacaagaaaatcaaagttgttcatgatattatgtaattgggtttccaaaagttgcatttgtagttgatcctctagttaaatgatttcatcacagcatcattttaagttaactagtagtttggctaaatttgtttatttttcaaggttcacccgagctctctttcagtagaagggactctgggaaattttaaactctgtgacaagtcgttagactctggaaactgttggagttggctctgtgacatacgagatcctggtgttgagtctcttatcaaggtattgaatattatataaaaatttctgatggttttattcctgtttctgtgatattgttgattcttgtttgatgtggttgtgaatctgcttgattcttgttttacactgcagttcaaattcagttcatatagtgctggcgacgacgactatgaaggatatgattatagcttatctggtaaactatcggctgttcgcattgtatttctctacagatttgttcaagaggtaccatgatcactgaacctgcctcttacctaattgatttgaaatgcaaccgaaagttatacaaatactcttctttggacatcattttgttgtggaacaacccaatgaaatggttttcaggttacagcatatttcatgggacttgctactcctcattctgaagaagtcattaaacttgttgacaaagttggaggctttgagtggctaatccagaaagatgaaatggatggtgctactgcggtgaaactggacctttcgttagacactccaataattgttgtccctagagattctctgagcaaggagtaagtagaaatagagtgtggaaattattaatatgtgctatcctatcaaatatctattaggtttaggataacacataacttttcatggatctctagctcttttgacaccttggtatatcaattatcacagtgtttacttgacatcaaaatagttaaggcagattctggccttttggctgtaggtctaaagattctgaaagcttgaggcctgcaacatgtttttttttagctgaatctccaaaatatttagctcaactttttctctgaatcttcttggcacaatctcaacacatttgtatttcctgcagttacattcaacttgaccttggtcagctggaggtatcaaatgaaataagttggcatgggtgtccggagaaagatgccactgctgtacgtgtagatgttcttcatgcgaaggtacatatatattacgaaaagtatggaacacttgtatttatcgtgaggaatgaatactctttagcctgatgattatttctgttgttttttgttgcaaagattcttggactaaatatgtcggtaggcataaatggttcaattggtaaaccaatgatacgtgaaggacagggat

SEQ ID NO: 71232 - DNA, 518 bp, Arabidopsis thaliana landsberg
ctctgtaagaaaatactagtgtctatttgaaaatacttcaagaaacgagtgaatttattcttatcttttacttgcatgcatttttgccttttctcgtgtggtttgaagaaaagattaaaaaaaaaccttcaaagacgtacatatacttttgaatcaaaaaatatttgttagttatatttgcgtcaaaaagtattcgctacttttcctttgttcttttttatactaaaccccgttgaaagaagtaagtaaaagtgtaaacatctttgaaacggtcaccatctcaaaaagtaacatagtaaaagcaaagagaaatgaccaactgtatctagaataaagatattaaatcaaaatacaaattcatcaataaaattaaatttcatattaactcagatattaaatttaaatagacacaccaatttcttaggaagatatatgttttgatgttttcagtttagtcaacagcttatatataaataaaacggtttaaaaaaagttataaaaaggtggtacaacgtaca

SEQ ID NO: 71233 - DNA, 711 bp, Arabidopsis thaliana landsberg
acaaattcacattttttggaatctctcaatattaaatcacaactccaaccaaaaaaaaaaaagaatttaagaaagtttataaaatctatactcctcccaagaagaaattgtaagttcaaaaaaaaaaaaaaccccataaaaatatctcaaatattaaaaacagaatcaatcaatcaataacctttttcttgtaaatctcaaaaaaaaattgagttttttttttataatgtttttcaagtcttacaggcgtaaatgaagagagagaagtcaagcttgtcttgttgatctttcttaacaatcttctcttctaaccaaagcctgctgctgtctaaaccattccttgtcctaaacatgaacacagctcttccacaagctccttgattactaaagaaccaatcatgaacatcccacatcagatccacaagcaatccattcaagaaaatcgtttgattccctctgaaattccattgaagcctcttcacttttatcaccgccttcttatcaatacaaacagagagaacagggtaatgattgctctgttttagaccctctgtttctttattacatctgatgacgatttcatgtgaatctccctgtctaacgaaacttactttagtcgagtaaaaagtattgttccctgtgaaatgttcttggcgagaaacaagaagaaaatccaaaccgatatcgccggagaaaccttttttacggaga

SEQ ID NO: 71234 - DNA, 107 bp, Arabidopsis thaliana landsberg
  unsure (1)..(107): unsure at all n locations
gctaaatactcctgggtgaccgatagcgaagtagtaccgngagggaaggctgaaaagaacccccatcggggagtgaaatagacatcaaacccggagcccccaagcag

SEQ ID NO: 71235 - DNA, 578 bp, Arabidopsis thaliana landsberg
  unsure (1)..(578): unsure at all n locations
ctcaagttttacgcagaataattttcaaaaccaaaaaaaaaaccaataaaggcagtgccacacacaacacngctcaaatggttacttcatttgttgcataagatacaacatcaaatccttcgttccaaaacatgtttgataaagagcctgccaagatcgatttttgccttctccacgaattggcaatcggaatgcgaatgtgcgtatgttcatccgtttctccaacttctccgcacactcctcagcaaaccgcgcacaagcaacatccatccagaatgcattcacgttttcaatcactttcgcagcttctttagccttgccatgttttaactcatcccatttcgtcacgacaagggccttggtgtctgcaacaaaaggggttttggaaatcttctataaaccccccttccgtcgtaaatagcttcatcgccgggaccaccaaaaccgtcaattgatccgctgatgcagaactatagtcttccagctcnnnnnnnnnnnnnnnnnnnnnnncgcaaaagcactagggttttcacttgggttcagcatgcanacttgtggcgctcgatccttgactcgct

SEQ ID NO: 71236 - DNA, 556 bp, Arabidopsis thaliana landsberg
ggccgtatccaggtcgcactggaagacgccggcggcgtcgctctccctgagctagaagtcccgcttgattgaccagacgagccggccgaacttgtgcacgaggcgttcccaggcacccgtatcgccaatggacgctcgccgcacgagccgcgcgacgtccaagcccgcgacatcgacctgctctagcgttgcaaccgcgctagaacgcacctgaccccctgatgatcaccgtgaccgctttccacagaatctgcagatcgagcgcgaacgaccagatctccacatagcgcaggtccaggcggaccgactcctcccaggagagatcggaacgaccgttcacctgccagagcccggccaggccaggtttgacgaccagaccttcgccgacgtgatccgcgtacttctccgcttcggcgggcagcgcggggcgggggcccactaatgacatatcgccgagcagcacggtgacgagctgctgcagctcatccattgaccatttgcgcagctgcaccccgacgccggtgaagcgcggaacgcggcgccccttggacagcac

SEQ ID NO: 71237 - DNA, 272 bp, Arabidopsis thaliana landsberg
tacatacactaatattcatatagatatatgctaaatttacgatacacgctgtgtaaatatttggagtggaactggctcacttgataaaaggcccaacttaaaatttagggccaacatacatacttcatacaatgtcttcttcctcactacaggatacctgattttgatgtagattatcttacgcatgactacattcgaaagtggacggaggaatgttgtttcaacaagaagaatgaggaagagacgtcttttggaaacaacaacagatgaac

SEQ ID NO: 71238 - DNA, 523 bp, Arabidopsis thaliana landsberg
  unsure (1)..(523): unsure at all n locations
gtccccgccacgaaggattatgacnnnnnnnnnnnnnnnnnnnnnnnnnnnnnnnnnnnnnnnnnnnnnnnnnnnnnnnnnnnnnnnnnnnnnnnnnnnnnnnnncccaccgtcaatggcggcagtgatacggtgacagtctnnnnnnnnnnnnnnnnnnnnnnnnnnnnnnnnnnnnnnnnnnnnnnnnnnnnnnnnnnnnnnnnnnnnnnnnnnnnnnnnnnnnnnnnnnctacgggaaatacctataccaccggcgctctcacccaaaccactatttattatgtggaggccagccgggatggttgtgccaaccccaacagacttcctgtaaccgtgatgctagggactgttccacccacccccgctcttgtcaatgacaacgtcgccatctgcccgggtgaaaaagccacgctggaagtaaaggatctcgagacaggcataaaatatgtctggtatgatgtggctttcggtggtacggctctggacaccagtgatacgtttaccacccctggcataaaca

SEQ ID NO: 71239 - DNA, 577 bp, Arabidopsis thaliana landsberg
ggtggcctcggcgctcgctgtatcaaccttattcgtgttcgggaaaatccgtattgcgcctccttgggttattgactgaccacttcttttagagaattctttacgcacaagcgaagtgagttcacttttaattatggagagctctaagcagacgtatcgctggatagagacctagaagagatgttcttgcaccttcaatggccaacatggatgtgacttttttatcttcctcccttgtgttccaaccccaggtgacatttttgttgagaatgatattaatttctgacttgcccttataacaaatatgtcacaggaaatagagccacgagaagagcaaacacccagggaagcagattttgtgcttgaggcaaatggaaaatgggtgacgatgacaaaaactgaggcacacaccagtgttacaacgatcagggcatgtagaacagtcagtcggtgaaagaactctgctgatatataaacaacgagagctaaacccatggtaatggagtaaaaagctctcagttctactacgtatttgaatgggatatgagatgtggcacctgccaaaatcaagaggtgt

SEQ ID NO: 71240 - DNA, 3933 bp, Arabidopsis thaliana landsberg
tttataatctatattctcattggatctgaaatctctttgtctataagtcaaatattttacaggctaatctaatcttgctagagatactataagaaaccaatgcaggaatttgtttgctgtctattggtttattggtacttgtttttggtcgtctttctttgaacctgagcacagaatttgaatttggatatgatcaccgattattatcctcttcccaacatttgctttacaaaactatgttaagtaattgcctagttgtaatttttcatataaaatatatataattctatgattttagttgaaaaaatataagcaaataactcgttctttactcatccttgcaaaaaggaaattgctaataatccgatcattctcagtcctattcgtttctacaagttacgaggcatatttggttcatataatgaaacatgattattacaaattaggtactgaagaagctaatccgagactccatctacaatatttatcacgaagaagaattaatttcatcatcttgtgataagttttgttatattcaaatcaaatacagctcatttcataaagtagtatattagtattcaactacgttagtcttgtattttcaaacttggtgtatatcacaactctaatttacacactaattataatattttcaactttgtctcaagagagtaaaatccattaatgaatttacattttctccttagttttattttgacaatgtcctgagttctagaggtcaagcaagacagccacagacttcgaaacagcaaccaatacactggaaacaagccaatgctgcacagagctgagagaagacaatggtgcactgatcactcacccttgacatacactgcaagcaacacatacagcaaacgcggtcaaccactcctgacgccgctcttatcagaagttcagttccttccacctccttcggctcctccatccacggtggcacgttctttaaagtagctgcaacgttcccgaacccatacccttgtttcccaagcaaactccttctcatgctgttgctcctctgcatctgcttgtggatttggtatggtgggttccttagaatctctttgattgaaactggtcttgccatcgtcttctcttcctcgtcgtgtttgactgataataccatttgcgtgtattcgctaggaaaccctgtttgtatactcaatctcatgacctgattaagcaaaaaaaaagatgttattaggtaagaagaagaaaaaagaccaacaatgtcaaatcacaacccctacaacaaccttttcttgcagcttgtcttcaaaccaagctcgagcagtgagttcattgatttgtctcctcgcaagaacctgttttttgaatgttagcaaaaggagctttgttgcatttcttacatttaaggcagaattaagtaaaccttgtctagaggaatgtctttagccttctgcactgttaactctattgtgaaacagctcatatcagccagtgtgcctctaagttcaacttcatctgggaactctcctttgtatcttccagacaagatcaacggatcaccgagagtaatgtctggaacctgacaaggaaacagctgcaaaagacacaaagacaagaacaagttcaagaaacaaatctcaagaaattgatgttattgaacttgtcaagttacctcaactgatcggagaagtttgagagcatcaaaagtagtattggctacgatcgttgaagaagctatctcaaatagtctactcatctgatgctcgaatgaatctggctaggtgtattgttaatacaaagccaagaaatatgtttttagtttcttgattatgaattagtaacactatcagcgataatcaaacaaatagaccaaaggagattacaatctacctgtgttgtttgtgccgtcatagtaaccattccctatccgagctagcatttgcaagaagtaatggttgcaaaacgaacctgtggaattgtttctaatcaaaattttgaatatttatatgaaagaagcaagcaagtaaaagcagagtattcttttacttaccaatgccaaaggtagatatcctaggagaaatcgattttccgtttctgctacaagattctttcatagcatgacatatctctctctcgttttcaacagatccatcagtgacaaggtatacaagaggaactccaatattgcttccttcaagtagtttcattgcctaaaccacacatagagaagagtctcagagactaatgtctccagaaagataagagattctagacaacgtacctgtttgaggggaagtaacatgtttgttccaccatttgcaattaaattactatcaagccattcagtcacagcggatatagtttcatctgttgcaaactccattgaagttgagaattctagaatttcgtcattgaaagcgattatgttgaaaacatcttcagcttgtagtttagccaaacactctaacaaagctttcttcacatcctcgagcggcttccatttcatgcttgcacttatgtcaatcacaaacacaactcttcgtttgaaaagctgtagacaaaataacaacattgcattgatcatgtcacagttaagcagaagattcatagtagttgtagtgcaaacaaaccttcgtatgcttggtggttccagggaaaaggtacaaacagaatattcctctgtcatctgaatcccatggagatggagacttaaccaatacattaccacacagatcaccagaggaaacctgtaaaaaggcaaacaaagctcaatctaagaatcaagaagaagaatacaaaaatgcttaagataatcaaaaaccctcacattgaatgaaacaccaaaatcaacccttgaccaagatggtacttcagcttcatactcacaacttaattcacccgctacacggtgaataatctgagaatgaatttcacacattacataatccatagtaacagactaacagtttgaaaaagaaaaaaaaaaactgtgaacacaaatcatacctttaatggatggcttgtataactagaagctatttcgccgccactaacacaagaattcatgtttaacacaatcttttctcgtttaataatttccttgcctataggattcacataagaagggaatctaaaaggcacattgagatgaaacttgccgtctttgtaaatcaatttctgagaccaagtcacattaaccgaaaagattgatcctccagcaacctgtaattatgaacaacattttagcatttattcataacaaaatccaaagaaaactaactataaaaagtgagacaaagaacaaacatgtgggatcttgaaagtatagatatgagacttaaagaaacgtgaatctttgtctttatgaacgttatcaaagtcagatgtttcatcctctgtaactagtttggtctggtaagatttctcattgttcaaaacatcaatctcagcacctagaaatgagccctgttacacaatgtcttccaattatttcccaaaacaatatctgaaacaatgctattaatggaaagatagagaaaagatggaaaaagaaggttttttgtcgttttgttgtaatgaaattaccttctcacccataggaacaccgacacagcagtcaaagcgtttgctaggcctaacacagtgaactctccaccgtccggtgacggtgacaaacgccgtgtcgagccaacaatctatattcatctcaattccgagcatctgaagcggcacgagagctgaaggatcgcatcgtgcgtgaacgtacggctggtagctaggaacgtcggggttatcaacagccaccggatctgttattgaagcgtaagccgtaatcgccgtcggaagaaagttttccggtgaagaaggaggatctggtactacaggaggagcgatgcctttgccgtagtatatacgtcttgcgagctgaagaccttgctctactcg

SEQ ID NO: 71241 - DNA, 154 bp, Arabidopsis thaliana landsberg
  unsure (1)..(154): unsure at all n locations
aaaangagcacacacatacaacaaacataattagagaggaaaatctctcaaggcaacccttattttattgggaagccaccaaataccctgaaaagcccatggcccaaccaccaaaaaacccccggggcccgaacccaaacaacccccccccccc

SEQ ID NO: 71242 - DNA, 3136 bp, Arabidopsis thaliana landsberg
  unsure (1)..(3136): unsure at all n locations
gcataacaaaataaaaacaatagacttactttaggaccatttccagacacaccaaagtattcagggactggcttcccataatcctcattatccagatccacagatacaaagatgagctgtagcaagaaacaaaggcttcttagaagtaactctttcattgttgcccccaaatatcctctttcctttgaatgatttgtctttgatacaaaacaaaatatcaattaaatcggtctaaattagactagaactatgttcatacctttcctttgaatgatttcgctgcttcttgaaattccgtaagaaccttttcagattcatttttggttacaaacaacaacaactgcaaaatgagaacatatactttcatgttagtaaacggacctacaccatcttcgaatttaaaacaaaaaatcctactaaaaccattgacagacctgtttcttgattgcactctcaaaaatttccggagcagtctctctggtgaaaacagagaccaaagcaagcttgttggcagacacaaaactaactagagcagacttaacaaattctccatctgcatattaaacacaaacatagtaagcaaaagcccaaagaacaagatcactaaatcaatgcataacaaagatttacagagaaccaaccaaaatggctaattttctcctcttccttcttaactaggacaagagcaggccttttagactccggatcaaggtgaaacatctttgcaacatcaggattcactgtttgataaaagttcacatcgtcttcagctttggaagcagcattaagctgatcgtgctcaacaccctgtagaatttcaccaaaaatgtaataaattgtgttactttaaaaacgactcatagactatatactaaagtgaatagaggaaacataccaccaaggagttcaagtatcccaaaacaactttgttcccagaagtcaacactttctcagcatcatctaatgtagttagattatacacaccaggaccaatcttcttcttcacccatgtcacaattgtttctctaaaccacaaaaccaataaaactattcaaactccaaatcagattcaacgatgcctcacttagtaccaaaattcaatttcacttacttagtccttcctccagtgtnnnnnnnnnnnnnnnnnnnnnnnnagaaaagaagcgtcggaaagccctgaacacgatactcctgagctaactcattctcctccgtcgcatcaatcttagccaaaacaacaccatcttccttaagctccgtggcagcagcagcatactcaggagcaagagactgacaatgaccacaccacggagcataaaactcaaccaaaacgtattgattattctcaatcacatcagtgaagttacgctccttgataaccacaacgtctttctcatcaatctccggcgtcggtaacggatcggaatccggattacctagatcggaaaaatctccttcttcatcgtcatcgtcgttgtacatatcgggatcttcttcttctcctccttcgaattcgtcaaatccagttgaggaagagagnnnnnnnnnnnnnnnnnnnncgtcttctttgagatcttcgaggaagctgagatcctcatcgtcaacgtcgtcggaggaagaagcggcgaaagaaggagaaacggcggagaagatgagaagtgcggtgagtgagaagaggagcaaaacgcggaacgccattttagtgtgtgcgactctgttgttgagatctaacaactacgagtacaatacaagcttgtttcttttctagtacattgttcgttgttaccaaatcaaacgtcctcgttttaggatcaaattaaattattagggactataaatctataattaagtcttaaccagaaaaatatataaaccgaacaaattaaactaaaccgaaccgaaatgttttctttgacacattgtaacgttctacataatcaaaacaatagaaatttgacaaaatcttgaaaagagtaatgaaagaagtatgtttttggtatatttaagcatcagagtgagtgacaatagtgcggatgatattagcacgttgtttcttgatcacaaagtagattcctaatgagagaaatgcgatgaaagaaaggcctaacactactccgatggtttctccacgtccttcttcttctcgtcgactctcacttgttgtgtgttcgtctgatgaaactttacttccttgtgaatctggttctacaatagatgtttttgaaggtgaaggtgaaagtgaaagcggagaaggcgaggattttggtggattattgtgatcagagagtgatgattttgggtgaaagaaatcgtaagcttgtggagagaaagcagatgggtttgtataagctggaccgtgaacaggtctgcttcctgcaatggagacgcaaagaagcatagataagcaagagaagaagaagagcaaagagtgagttaggtatgtcatgatgttgttgtttttttcgctaaccagttttgtaaatgttttcttattttgtttagtgtgagtgtgtgtttttgggttttatatgggatattgtctatagaggagatagttgttgcttaaagttcaaaattgtatgattgcataatatcaagaaaaataataaagtgtgtatttgaatgagtgaagactgaagagaagtcatgcattttttgttgttttcaatcatctatatagaatttaccttttctagaacaagtgttaatgaatgatacactttatccttaacagaacaaatagttcgtaatatatatagtggttttaccctctctcttttttcaaaaatcttatgaccctttgtaatttactcgtttattatatatttgatataggtatgtggaacaaatgattttaaattaaggtcatatgatttgttctcttctttcgtatttttggtaagattggtgacaaagaatgcatgaagagtttgttagcttgaaggaaccgcaatggaaaaagaaaacaaggatacggaaattttattaatcgggtccacaatttgggttatattggaatccctaattaatccacataaacctaaaaaaatgctcgcaaaggaactacaaagttgagatttaaaacatgcgtgacatatgttgattcccgagagaaatacaatcaaaagacgcaatt

SEQ ID NO: 71243 - DNA, 560 bp, Arabidopsis thaliana landsberg
tcttcttaccaaggcttagttcaatatgacttaccaactttatcctgtcaagaaagatgacacttgttcttataagaaaacttggtgacatattcccacaaatcaaagcttagtttgaaagcattttaacaagataaatagataatcattaattaggatatcttcaaaatgagattacaagaagaagaataaacatttaccagaaacgatggagcaatgtaataatctccttgaagatgttcaaaggacctcgtcgccttctgacggtaatcaaacacaatatcagctgcaaattcacagatatacacaagttctgtcaactccacaatcagagtcattgtacttatccaaattccaaaatataggatttttcaaaaagaagaaaaagagacttaacaatcttttccaaggaagtcttcaatgaatacatcatcgatcatgccgcttcgtgccccaacggctatgttaacattatccgattccgcgccaagcctatagagataatactttccttctgaatctttaaacttccatgacgattgctccgacaacttttttcg

SEQ ID NO: 71244 - DNA, 172 bp, Arabidopsis thaliana landsberg
tggcggggataggttaacttaacaacaagctactaacaaaagagggtgctgcaaccaaagaggaagaagttcaaacagaacaagcgctatgtgtgatgggaatgatgataccactttttgctggaatcttatcagcgttaaggggggttatccccaccccctttttctctaa

SEQ ID NO: 71245 - DNA, 756 bp, Arabidopsis thaliana landsberg
gggccccttgaacttttggctcctcgacttgcaaatccttgcctccaccgtgaccgaaccccctaaagaattatataaactatatagaatatcgtacaaggcaaaaaaacaagacatgtttatatgagtgtatttgtgtatgttgcatacatgcattcacaagaatcatcatagaatatttgactttctatatgtgtgatggataagtctaggtttcagtatatacgtttgttttctaattacacaaacacgagatatatagtataaattaatacgaaaactattaccagtagcttaccaaaactaccttctatatatacacactacaagcttactataagctttatgttttgtccactcgtttttcatgattttaaaatattctactttggttatcaaaaaagaattaccatcatagggtcatatacatacataaccatgaataacaagataatacacatatatgttcttagcatctcgagaggaagcataccaagaatttcatagacaatgaggaaagatcaatatacactaatatataaacatgagtctatttactcatcaacaattgatttgaacttaaacgttcattataaagcttgatagatgaaaatggaaagactcttctaggtaatcgacatcaaataaatataacatcgacattatcaactttgggaaaactaaatactacttttgattgtattagttttaatatagtgggattaaacagagtcattgtgcatgtagactttgact

SEQ ID NO: 71246 - DNA, 384 bp, Arabidopsis thaliana landsberg
atggttttaaataaaccaaatcaagttctcaattaaacctttaatcgaaccaaaccaaaccaaatgtaatatatctgtacaaagattttttattaattactttcttaaaggaagaaaagaaatccaaaataaatggatttttaagaggctatcctaaaattttgtattattgaaaccattatccaataacttagatctaaatataattttattctaaaatcatgggggtctataattacaaaaattaacgcaataaaaaaaaaattgcaagtaaatggttctaagatagctaaacagaggaatacgattaaatcatatggtctacactctactgtgatactcgggctcattcatcaaataaaacaggttgacaagaaaatcaaa

SEQ ID NO: 71247 - DNA, 442 bp, Arabidopsis thaliana landsberg
ggctgtcaggagcatgactttcatggcactcatggggtttatctacgctatacagaaaatttatatttagcggacaggtacatgacaaaactcttcctcgatttaacgggaagcatgtaaatgattgcgtactacccacacaatgcaggcatagaacttatataccttgacagaagatcatatctataccctaaatgccctatgcgaactaagaataactcttgctgaaacgagacaaacaaaaaccattgggggtgaaagatttattaccaaataacagaagataaaatactttactagcgttaagataatagaactatatacacatgctgagacagtcattattaaaattgcatgcaaggaacgacaggggactcattcctaccttactgacctcgaattcatcagacagtctgtcggactcatcacagcgaaaagacgt

SEQ ID NO: 71248 - DNA, 383 bp, Arabidopsis thaliana landsberg
  unsure (1)..(383): unsure at all n locations
cgggaagcgaagacgagcgaaacatcaagaactaacanccgaaaagagaaagaagcggaggcgggagaancgcccgccaagaaacacaagggccccgacagggagcaagcggacccccgggagaaagacgcggacaagacgaagaagaagaagaagaacacgaacaagaggaaggaagaagcgggcgaancagaggaggacgaggacggncgggcgcgagagcaggaagggcagggagaccagcaggcggccgcggaggccgagcccaacccgaccacaaccggaaacgcgcgagcagacaccgccggaaccagcataaaagaaaagcccgcccgaccggaggagagcggaaggcaaaccgaacggaaggccgaagcaaagct

SEQ ID NO: 71249 - DNA, 217 bp, Arabidopsis thaliana landsberg
cggttctgtgtctggggcttccaccgcgggtagcatctgtctggtaacgagtggaaccctgtggattcttagtcatggggggtgttttagaatgaacaagactaagggatttggctgcggaggagcagtgcccgactttgatagagtggcttattgttctggtcgagcagcttccctgaacgattatgatcaggggcacttctttgtcagaactttc

SEQ ID NO: 71250 - DNA, 674 bp, Arabidopsis thaliana landsberg
ggccgacgcggctcagcgcctcgacctgcagcgcctgcccggcgttggcctgcagtacttcggccaggtcgtcctggtgtcatgctgaaggccagggagatgggcgccatctgggggagcgtcagcaagccggtgttgtcgctggcgtggacgatgctgccggcgtccaccaggcgctgcccggtgcgcccggcgaagggcgcggagatgcgggtgtagccgagctgcagctgggcggtgtccagcgccgcctggtcggcctggatcgtggcttgcacggaggcgacctggccgcgcagggtgtacacgtcctggctcggcccggcatgggcggcggccagcttgccggcgcgctcgaggttgaccttggccaccgccagctgcgcttcgtcgcgcgccttgttggccttggcctgcagcacctgggcggcgtaggggcgcgggtcgatctcggcgagcagttgcccggccttgaccatatggccctcctggaagtgcaactgctgtaactcgccgtccacccgcaccttgatgtccaccgcattcagcgcctgcaccgggcccaatggtattggcatccagaatcggcagggttccgccttggtctgggcccccgccccaggggcttaaccgggggcaccccgggcggcctttcggggcccggcttttgggcc

SEQ ID NO: 71251 - DNA, 668 bp, Arabidopsis thaliana landsberg
aaaaactgtgataattacatgtcaatcactgaatttgaacagtaattataattttctataccgcacaacatatgcttattttggttttgggtactgtcttattagttacatacggtttaggttggcttgtttgtttgttttgtcctagctaatcacgttaatgaaaacgctctaccaaataaccgcgtttagaaaacgctattagttaccgagtgtggttgggaccgagtgaggacgtcacggctccaaccaatccgcaaataaggaagcgcgtgtgtgtaagtagtgggtgaccactttgcctagtcttaaacgttaagtctggaaataccaaaactacccctggtttggtcgaagattctcacgcccctaccacccaacccaatcacaatcctcgtgaacgaacacaccaccttctctccaatctggatctggttcctcttcttcttggtctcttctccatctcatcggagctgatctcgaattgttctccgttcatttgttacggtggagatgacatcggatcaccgcgacgctcttttctctctggaactggaatcgcctgatccggacgaaggaggtgtagcagacggaggagaatctgataccgacgaggatttgcgcgacaacgatgatgttgttatgccgggaacgaacgaagctgaagc

SEQ ID NO: 71252 - DNA, 751 bp, Arabidopsis thaliana landsberg
tgatttaaaaatataaactaatataataatattggtatttaatcatttcaaatattcttaattatattctttttgaatacacgcatattgttctaaactattaatttcttacaaaaattctatattatttattgtgtctacaaacaaaagagtcgtctaatcatttttggtttcattttttttttgctagaaatcaaaaacaaattcctcattttttttgaggtaagctaatgttattttctaataacaatcataagtaatacccgtggtttaaagtttacacggtattaattaggtactacagccatggtggacggtggatcttcatcacctaatccgtacaattaagagacaattaattacattaaatcatgtgcattagttgatttaggaactaattgataaatcaactctaaagactaaagtagtgcgatagaataaagctaaagtatatattttcttcagtataaagataggaatatatggggacatatacttttgtcgattttgtatccagctttgcatcagtgaagtctgagcgaagatatgaccagacttaaaaagcaactaaaaagatgcataacagaaacacaaaaataaaattcatgcatctgctagtcatagaggttattggattcattgcacgtatcttaatgattcgttttcgtttcacctcccttgctacaaaagatttgaaagagaaaatgttaaattctttaggtcagaatcaattaagataatttcattttct

SEQ ID NO: 71253 - DNA, 306 bp, Arabidopsis thaliana landsberg
  unsure (1)..(306): unsure at all n locations
gaaaaggaggaaaaaacgcagaaagcgggaaaggaggacgcagaaggggaccaacaggangggaaggaagaagcgggagcaggaaacaggaaagggggaaaaacaagagaaaaagagagaaagacggaaaaaggaggaggagaaaaggaaaaacaagaagagagagcaaaaaagaaagggaaagggaaacggaacgagagagacacgccaggaggggaaacacagaacgaccgggacaaaaagcaaaggaaaaaggngaaaagaggagggaggggaacagaaagaaggaaagagaagcgaggaaag

SEQ ID NO: 71254 - DNA, 287 bp, Arabidopsis thaliana landsberg
aacaggcaactgagccataggccataataatccggaactagtctcttatatggagggctgaaagaacatgaattttatatgtggacaccttatgaggcccagattaactaagaaaaggtcactaaaattattttgggaactttgctgcgcatataaacaaagatgtgatcattgcaaataaattattctatcgaacgcaaaaacttttgtacagactataccgggacacctactttttctactatacgagaaagcctataactggccccgtttgtttattttatacc

SEQ ID NO: 71255 - DNA, 400 bp, Arabidopsis thaliana landsberg
  unsure (1)..(400): unsure at all n locations
gagcatgtgaaaactgaataagaatcaaataacttcgaaattgtaaattccggcgataattcggtaataagatacattatctcataggaagatgaaacactctaatgaaacaagagggttctcaaacgagtcgttaggggcagaattgtaatttccaatagaacccggccacttgtgatgattacactcttgatccgacccgttcatattcggattgagtctgacccgacccggagactggttttgtctcctcattgctccacaactgtctgtactctgttgactccgagttgggcccatcatgacggacctgttcatcgccggcgatctagaccttctctcggannnnnnnnnnnnnnnnnnnnnnnncgtagccgacggaaccagcctcaccgagcca

SEQ ID NO: 71256 - DNA, 453 bp, Arabidopsis thaliana landsberg
tatattaaactacttatttccttctacatcttaattatttttttagtattcttacaaacacttctgattggcatttgttgcttcaatatataaactcctctctattcaaaaaattccctcaacactataatatcattcattccctatctaaaagtttatgcgtccatagagatacaccgatcattgaaatttaaatgatatatggcggacatcatgcattgacaattatcttcaatagaatcattactacttattaaatgtgtcttcccgacattttattacatgattctactgttttcttcctcatcatctcattccattatctgttcttctatttgcgtctctagattacttgacatgtacgttaaatcatttatctttcttttcccttgatatcccacttcaatgacatgtatctgaaaaacttttactatctacggaaatctcactttc

SEQ ID NO: 71257 - DNA, 582 bp, Arabidopsis thaliana landsberg
  unsure (1)..(582): unsure at all n locations
atggaggtgtgatcgtgtttctgtttgtgttgacttggattgtttacctggtttggatagtgaagaggctggggtcggctaaggcaatgaaatgtttctacttcancaaagacaaaactcaggatgatgaagctaagactagaaagtttggttcagctacgatggctagaggaggatcagggtctgagtttaattcagatacaagtactgctacttccattacttcttccttgcacgtcctctcagagacacacagtaataatctcaaagtatttgtcctcgatgaccttaaaaccgctaccaagaacttcagccgctccttgatgatcggtgaaggtggctttggtggtgtctttcgtggcgtgattcagaaccctcaagattctcgtgaaaagattgatattgcagctaaacaacttagtagaagaggtctacaggcaagcaaatcttgttctctctctttagtttgcttctgttttacacaacctccttcagtacccaacaataaaaacaactacgtatgcattaacaggtgcataaagaatgggtgacagaggtaaatgtattgtgagtagtggagca

SEQ ID NO: 71258 - DNA, 407 bp, Arabidopsis thaliana landsberg
gcgcaccggccaatgcccaggctttggacaaggtgcgcaacaccagcacattgggatagtcatccagcaaggccgccgcgctgccgccgtcggcaaattcgacatacgcctcgtcgacaatcaccagcgcgcgcccggccagcgccgcggcgatggcctcgatgtcttccagcggcaccacgccaccggtcggattgttcggcgaacacaaaaacaccagtttcaccgccggcgtgacggccgccagtaaagcctcgacatccacgccgaaatccgcgttcagcggcacactcaccacgtccgcgccctgcacgccggcgcataccgcgtacatgccgaacgtcggcgggcagatggcgatggcgtactggcccggtcggcaaaacacgcgcaccagcaaatccatc

SEQ ID NO: 71259 - DNA, 495 bp, Arabidopsis thaliana landsberg
tgatccgatcagcctcataatcctactaatcaagatcggattcaatattttaatttttgatctcatactattgcgtaaactattcctgtttcaaatatgaattgaaatctaaaattttctttaaatttatataatatattgtataaaccatgtttgttgcaattttttgataaatatttcattatgtcgctcaaataaaacaactaatatggatcatttcttattcaaccgaaaatctattattcaatcgacttgtcgactcggagcgatccccatatctggattgggttttaaaacactgttttaaatctattgtttgaagaaaaaaatcgttagaccatccttattggcgggcttttaaacaaaatccttaacattctgagatatcaaacaataacccactattagtaggcttaagaaaaagtataccaaatatctcttatctaaaaactattttcctctcttaagaaccccttcttatatctttaattctta

SEQ ID NO: 71260 - DNA, 403 bp, Arabidopsis thaliana landsberg
  unsure (1)..(403): unsure at all n locations
gtctagtgtaatcggccttgctgggagctggtgtttttcatgtataaccgcacatctatatgccggtgccaaccaggtaatgctctatataccataacaaagagttctttcatctacatataattacccaaatccagcttaaaagcacgagnnnnnnnnnnnnnnnnnnnnnnnnnnnnnnatggacgctacaggagggaccatttgaaaacgacatacatcataggccgaaatataaagacacaaaagctcgcacccgaaacaagctctcagaggaatcacggcgaaaaatgaccgaatgtgctacatactcacctatagaacgctctctacatacaaaccacgctgagcaaaaccattgccacatgcttatgatgatgtgccatatgaaagagcgcaaaac

SEQ ID NO: 71261 - DNA, 553 bp, Arabidopsis thaliana landsberg
tttaatgaaacggccctttgtctattgtctatactaatcatataaattatagatatatttgacattttaattataagaaaacttatgttaccgtaaaaccgtaaaaaaacaattgtgtaatcggaattaattggatttcattgtatttgcatgccatgccatgcccgcatgccggctggaatagatagagatcgaagagtccgttaggtcacagtcacacgtgaaggaggtacgagggaagtgacacgtcggatgtagcactaaatctaagacataagataacacaaagtacaaagggagaagagtggccatttccatgccagcttgactcactcccattcttgcttttgttttttttttttcatgtcgtccactttctcatttccaatactagaaacaaaaacgagcattattgatcttttaaattgctacaaaatagtatatgggttaccttgacgttttctcctaaatatttcggcaaataattagttaactatgccacaccaataaacgataaaaaagttgggaaagcttgtctaatttttaataaaac

SEQ ID NO: 71262 - DNA, 597 bp, Arabidopsis thaliana landsberg
acataaatgattgtgcacatcacatttcaattttcgaagttttattctagagaaaattaatttcatttttcaaagaaataacaatcaagcaggtggtggaacatcaacaggtccagagtgtttctttttgcaacaacatgtgtttcctggtttacaatatcctcctgcaggaaaccctaactcatggcaaagtccattgcaatctggtttaaccaaatttccacatactccaggacacatcggatcatatattccattcgatcttgcttctgaacctatgaaattattacaattatcattagttgtttgataattttttttttgttgaaaaccatctataaaagttttatatatgaaaaaaaaaacttattttgctatttaaaagattatacctgaaattaaaaggatgagaacaagagcaatcatcatgaacgtattcttataaagagatgcgaccatcttgtttgccattttagttgttataaaaaaaattgtgttgtgcttggttctcttctttgtgtgtgtcgtgttatatatagaaaatcaaaccattgtaacctactcacttatatatagagagatatgtgtgtgtgcatg

SEQ ID NO: 71263 - DNA, 4313 bp, Arabidopsis thaliana landsberg
  unsure (1)..(4313): unsure at all n locations
tgttaagtaaccatcttcgagagaatactgtaatattcgtaagcactaaaactttgtacttctcgcgtatgcaaagggaaagttntgagatgaatcacatttatattggcaagggtctggtattaggttgttcatggaaagttcataagcacagaatatctgagagttttgtgttgtttatatgtttgaagacaatgttactttgttctttgtgatccctaaaaagatttgacatttatacgtctcttaaaatgaaaaactctttatgtttaagtgatacaggttatagttgagaaatctgctgctcaaggtttacctgaaggatggatcaagaaacttgaaataacaaatagatcaggccgtaaaaccagaagagatccagtttgtaccctctactctctttgtgataacatcatctttgatcaaaagtacattttgtgtcttttccacataagctcactttagaaaatctcttatgtgattcttcttggacatgtcttgtttttgattttgcagttcttcattgaccctaaaagtgagtatatctttcaatccttcaaagacgcatcacggtatgttgagactggcaatattggacattatgcacgtaaattgaaagaaagtgatatcgaagatgatgattccggaaatggaaagactgttgtgagttccgttctccttttttgttatagttagtttaatggaaagcactatagctgaatgattgaattttctgttaatcttttaactcataacttttctctgtctgattttagcttcgtctggagtatgtggacaagagatctgcagatgatgtattggaaaaagagaaaacgatagatgatgtcagaagaagtaaacggagaaacttatcttcttctgatgaacattccaagaattgtaagtacaaagtcttttgggttctgattttgccacttgccagggtataatcatacttatgccgtgagttacgttaagtaagtgtcaacattcgattatatatgcaggtaaaatgacttctgacttgagcattgtaacctcacaagttcttgaggatttggggaagaaggaagaggtgaaagatcctatcgaaaagcagctcatagcgaaacgggttactagaagccaaactaaagccagtacgactgaggaagtcgtcgtatatttaaaaagaaatctgtcttcatcaaatgcaaaatcagaaaaaggtgtgcagatacctgacttaatatttccacctgagtagtggctgagataacaaaaagatttgaggacaccaattttttctatgttctctatatttgtagattctgtaaactccagtgtaaggtcacaaaaaccaaagaaggaagctgttatgaaggaagaagaggaacaagattcttctgagaaacggatcacaaggagtaaagttgaagagaagaagaatgagctaagtaatagtgtagcccgacgaacatcaaaacggttagctggtattgagcttgaaccaacgcctgaactgaagacaagagccaaagttcaacgaatagtaccgcttgatgatgaaccgacgcctgaactgaagacaagaaccaaagttcaacgagtagtaccgcctgatgatgaaccgacgcctgaactgaagacaagaaccaaaattcaacgaatagtacctcctgatgatgaaccgacgcttgaactgaagacaagaaccaaagttcaacgaatattacctcctgatgatgaactgacgcccgaactgaagtcaagaaccaaagttcaacgaatagtacctcctgatgatgaactgacgcctgaatttaagacgagaaccaaagtacaacaaagaatacctcctgatgatggcagagccggaaagtgcaagcaacctgtgaatcatgttactaccagcggatcaaaaaagacggaaataccgctcaacaaggaagtagcccaaagctgtaatgaacaatcctctcagaaaccacatgctgctgctgcaacaagcaacaatcgtgtgagtgcagattcggcagtgggaatacaaaatatcggtaaagcagtaggcaggaagccttctaaagacaagaagacgctgaaatcaccactgatagtatatgaactgaatccagtttttcatcttgacggttacaagcagaaggaagaaatgtcacctgtgtcaccgttgtcttgccaaacttctgcaacaaagtgtgagaagacagcagcaggcaaaagagtgggaaggtctagcccaaaggctaaccttactaccagtgtgaaaccaactcagatctcgcctctgagatcaccaaataaaggaaagcaaccacatccttctgacagtggttctgccattcaaaggagaaataaactagctaatgagtattctaactcatccgttgtaagaggcacatgctcagaagtgatggagaagagtaccaacagcttctcctctgcatttgactcgactcttgcagatctttgtaaagatccttgcattgcctttgctatcaaaactctaaccggagaatctctgtgtcttctcaacactccagcgatctcttctaatcccattaacaaccacaccaagcagaaaggagtctcctttaccccagagactccaggaaatgttaacacatgctctgaaaaactggtatttccgagtccacccccgggtgcagatatctggcaagacccgtgtatcgactttgctataaaaactctaacaggcgcaatcccgatcgggttagatgaaccagatacgaagtcaaagtcacaggggatgacgtctactacagcagcaacacaagaagctaaaggtaggcaaaacaactgtgattatatgacgaacaagactgtaggtaaacctgatgatctaaggtttacacaatctttctctaaggactaacaagaacaaaataaagcctactgtacttttaggtgttttcgtatattagggtttttgataatgccattggtatcgtgtaagatccatgtgcaatgccttagctttattttctttcgggccatgttctgttgtaaatacatatgtattagtgttgtgtatcgacagaaccttgaaaaactcataaaaactcttcctttaaccacccccaatgatcttgtttcttcttcttaaagatggatcttttctagttttctttctcaaattttgaatgcatctttgagaagatgatggtgacgtcatcttaaacgaaaaaagcccgcgaaagatctctaattttccgccaaaatttatatacatacatatatataaagtgaatatatagaattcgaagaaaacggagaagaagaagaagaagaagatggagattcgagtgaagtgtagatgtggagaagaagagtgtagcgaatgggcgatcgtagagcttcaaggagtcgtcgagactcaagcttccttccaaggttctattcagaatctcgagatcggtcgtctctgccactccgattcctcacaggttttgttttttcaaattcatttctctaatcggaactgttatcgccggagatttcattaagagatttgctggcgcagggaacatacacgttcacggtgggttaccatgaactcgtaggctctaaagtgactctaaagaagccattactggttttgaagaagcttcaatttgatgaagtttcagggaaagcaacggagcttgaagttgttgggattatacgaacaaagatcttgtttaaaaccagacctaagcctcttatttccggtaacaacaacctctctctgttttgttcttgattgctttagtctgatagttcagaattctgagtctcttcttcttctttgtttcaggaacaaattgaaacctctctattgtttcattatctctgcttgtttcaataatgtagtctctgtttgtactattgaatgagtttgcaaatgaagaaacttgattacattattgggtttgcagtaactaaatgcaatcatcaccacaaagtctcaattgaattataacattagtaaacatatgaaggtggcaataaggagattactagttcctactcatcatgtgaatttgatgctagccaaaatgatgcaaagattgtggtctgttcttatctacaaatgtatttcaaaggaaaccagttgactggagagttgagtttgcgagtcctttctcgtgtctatgaatttggcacaggagtgtaccctgcacgggctcttaatgattcggttctcttgcttttctccattactccaaccagccattctatactttctttgattcctcgcctgctctcaacaaaacatacgtttaatatttcctgctaaagggtgttcgattggc

SEQ ID NO: 71264 - DNA, 427 bp, Arabidopsis thaliana landsberg
  unsure (1)..(427): unsure at all n locations
acatctagtattatatattcgatcaattgacttttgacttatcaaaaactgttattttttcatggtcgagttgtctagatagacgtcacattattgatctgagattctttttaggatataattgcgcacaacaaacgcgngggtgatagttatgcaagctgttttctttcgcaaaactgaaagtatgatttcggagaaattcggagtgttcagaggcattacgagttacaacgacttttttgaggtaatgatatgatcataaaattgcatcgttggagatgtcatttcttctcaaagtggatcatcgtgtgagtcattctaaactcaatttgaaggggggaagacaaagatatccgtttgactaccatatcgagtaggtcggcttatttaagtcgatcttattagaaaatctcatacactatacact

SEQ ID NO: 71265 - DNA, 125 bp, Arabidopsis thaliana landsberg
cgaaacagacctactttggtaggaccaaggacattttgactctattgtcttgcttgcttctctccatactgagggggggaaccttactaccttcactttacagttgaacgagtgcatttttacaa

SEQ ID NO: 71266 - DNA, 4290 bp, Arabidopsis thaliana landsberg
cctcttgtcgctttactgcaagtgataattaaatttgaaattaattaattataaagaaaattgattagataacggcatggtaacaacaccttattgatttgttgaagctaaactttatttagtacaatatcaagattacaacacaaggtcgctaatgatgaccagtaacttcatatctaccaagaaacaaaggaacaaagaaataatccagaaacgatccacacagcatttactgttcttgtcttgagtgctaaacgtttcttctttttgtttttttactttggtatttgctttctcagagccgcggagacagcttctgtgtagcttcacggtaatcataaactcctactcctcgttttcttcctaatctcccagcatcaacgtattgaacaagaagagggcaaggtgcgtactttgagtccccaagtccctcgtgcaacactttcattacggacaagcacacgtctagaccgattaagtccgccaactccaaaggacccatcgggtggtttgtgccgtgtttcattccgctgtcaatgtcttcctttgtagctacccctgtgtaaagtgtgtggaacgcttcattgatcataggcatgaggattcggttcactacgaatcccgcatagtcttgtgagcagactgttgtcttgccaaacctgcaggtttcagggatatacagttaaatttaaatctaaagagagtaactgaatcagcgatttagttagttaaaccgcgcaatcaaacacaagaaggctatttcaaggatgtcctataatcaaattgttctcgaccttaaaagagatttgtaatctgcgttcgagtgacccaaaggtaacagttttgatagataatgcatttgatttcattccaacatttgatactaagttgaaaatatctcatacaatgtaaactttatttcaagaaaatatcaaacctttcagccagaacttttgtagcaagaaacgtctcttctgaggtatctgcaccgccaatgatttcaaccagtttcattattggaggagggttcataaagtgcattccaatgacctattgacgataaacaaacacttaatataaggttcgaaatgatcgcacctgaaaactcatgaacagataaataatcaactcaagcagaggaagtaaaagagtcttaaacctggctgggtcttctcgtagcagatgcaagacgagtaatggatatagaacttgtgttagaagctaaaatcgcagaactcttagctataccatctagatccttaaacagcttcttcttaatgtcttctgattccacaatggcttcaacgatgatatcagcagaacacaaatcttcaagattcgatgttaatcgtagacgatgcatagcatcatcaccaacttcctgcaacatacaaaatcactctcgtcttaataaatcaccacaaatttctcccattttacattttcctaaatcctgcaaaatatatcaaagtcttaacactatcataaaactaacataggatcgtgaagtagcctaagaatcaatatgcgtgagcgagcatacaaatcaaaaacagtacaggctatgatttgaatatgtttgctaaaacggtgatctctcaattagttgattcgacggagaaagaaatacttaataaattgaaaatctaaattacaaggaggatcttgccttggagattagacctttggagacgaatcgtttgacggaggaggagatagctgcggtggctcgagagagggcatctcgatcagcgtccatgagccaaacgtcgaggccactcgtggcggcgagttgcgcgattcctgaacccatttgtccagcaccaactactccgacactcttcatctccgccatttttctatctgcttctttgaatcgccggcgatcgtaatctctctgttctgttattctgtagtttccagattaaagagaacattttccagctatgcttcagaaactgggccctaactaactataatgggcctaaatggctacaacgggccaaaatatagaaacggcccaataataaggatatgggaaccgtctcgagcacgtgtcgagaagtgagacattaactgagaaacgtgtcgtacgtttgtccacgtgtcgctggtctgatactcccaccattccactgacttccgtaacctttggatcttcgctaactacttcttaagcgagtgagggataatgggaaacaacagattaaaatctaatcaagacaacgaaaattaacaatggcgactaggtttttggtgaagagactcacggcggtgaatgtttcaagaactcctgggggagatttctccggttatgctctccgacaagctacaatcggaatcaaccacttctcaaccggatttaagcaaacggaggtgtgtccacttttctcgtcaaaagtatatatttattcggtattatcgctaataaattacggattgatttgtagggctctactcatgacgataagtccacgacgagttacgtggcagacaaggcaaaggaaggggtgaagaatgcgaccgacgcagccgtcagcacgggtgataacatgaaggatgcgatggatggtgcgtggaaaacggctaaggaaacgggtcaaaacattagcgatgcggttacgggcgatgatgatgacggcagaattcaagaggataaggtcgcagtggaattgaaggatgtgcaacagcctgtggatacgacggagtatagaggtgtggaggatctacatcagcaaaccggcggagaagttaagtcaccctaagctaatgtgttagggtgtctatcctttctttcattgttgtttcagtgagaggttgcttgtgcctcgtggttcaaattaaaggtttatgaatggaccgtggcttagatcgcattacaatttactcttattactagttgaactaaagcaaaataaacaactactccgattctccgaacaaatttctagatgtttttttctaaaatttatatgcacatacattatctcataattattttacgtcaaaatctcccaaatatttttcatcaaaggataatacaaatatgatgtgattgcatgcaagaactgatacgataagtgggtgtgtaaattgacatatatctacggagttttggtgtggggttgggactgaacacagctggatcgcatagtctgcaaggaatctcacgttggcaaatatttaaagctggtgtcattgaaaattcccgtaaatggagggacaaattctctaggcttacgctctaacagatcagacaccaatcgtgtactattatttactaaaactagtaattcaacttcttcctctaaaaacaatcaaagtatttatatacacagaaaaaaaatcaaacaattgtgaatacataaaaatatgaactatcactagtcccatttgcttttgtttataaacgcctatcgtgaacaaatctacagttctaacaaatttttaatgtaaatatattttagttatttaatccatgattctgtcatatccagtttttggcatctatgacaaataaacataacaaatgctctttggttctgtaggggacaagtggaaccgaaaacgagaggaggcatctctgatatttggtgtagtagtggcttaaggatagctacgtgcgttttgtttccttacgttaagtgacaaatgcgaagctagaaaatttcgccatgaaggaaatatgactgcataaatatattctccacttcagggtttatacgatagcatctctttttttcctctttgtaagttcgggttcgaatctgttttttttattgtagggccaaaacttgaaagtggcccgagcagacggagacgagcattagcttatcatatcctacgttaagttcactctgttttttgttaaatggtgtgttcactttgttctttacatgatctcaaaaggaccacttcttgcccacacaaaaaattacaaaacaaaagcaaaactatatccttaaaactataacgtattctttgaattttagggtgctaagaaaaaattaattataaggaccaccaacaattgaaaatgaaggaaaatcgaaggggagatgtgagaaaaaagggacaacgcttatttattctgttattgtaaataacaaccccaaaagcttaggtcatagactcgagacatgagtacagtttggcatgtgaaaccttttatgtcctgtctctttcactacccactaattctaactatttcatctttcttacactgccctattgtataacaaaaaacatttacacacaaaaaaagggagcaaagaagttttcactgttaaa

SEQ ID NO: 71267 - DNA, 694 bp, Arabidopsis thaliana landsberg
cttttttttcttctactttgtccccgcttcatcatatatccacgaagttaagatcaacggaatcccaactcttatcgcttctatagcgagtccgcgagtaaaccccgagaaatcatcctctgttacaccgacaaacgatgcaagaacgattccaagatatccgctaactatgaatgcaagagcaatggctgacatgacaaatgccatgagagacccttcacatccaggaggacagagacgagccatcaagacagtaaacggcagaatcttgaagtaaaagagagtttccaagaatccagaaaagaagagtacatatacagaatccgagactcccaaatcccggtacacgcctttcacaaacaagagatcggatatcacaaagaaagctatcgtcacctgaatggctgtcatcaatttcctcggccgcatagatttaagccaacgattatacgcaaaaccccaaagaagcattgcaatttgaccaaacaccttggagatccctaaaagtgatgcatcaattcttcagaaactttgtttggtaaaaaaacatagaccctgtcaaaaccggaaccacagcggttgataccgcgatccaagctatcgaataagaaatctcgggcttcctcaacacatgcgaaagatcagagagatgttttctaataccaccagctggtgatggattttccggaagatt

SEQ ID NO: 71268 - DNA, 504 bp, Arabidopsis thaliana landsberg
acacgaccaaaggaatatgagattatgcccatagtttactcttttctagctcttgcgatctcgttggcgccatgtcgcacgcgcgcaaggctacatcgaaagcttgaaagtcgagaacttgacgctccctgcgcaaacggcgagccgcgtgccgtacctcgacagcaataagaaaatggtcacgttgagcgtcaccgcaaccgagctaggctatctctctggcgtaacgagcggtgtgcaaacgcagctcgacggcctctcaaacgacatcgccgcaacctcgctcggcatgctccccgtcggcggctcgagcggccaggtgctcgcgaagtcgagcgcaagcgattacgatgtcggctgggtcgaccgcttcactacgccgatgacgacaaacggcgacatgatctatcaagcgtcaggcgtgcctgcgcgactcgccatcggaacgagcggctacatccttacgagcaacggaagtgcgccggcatggaccgcaacgcctac

SEQ ID NO: 71269 - DNA, 412 bp, Arabidopsis thaliana landsberg
agagagattacttatatatgttggattgaggattgtccatggtttagcctgtcattttttaagcttttacaaagttggaagagtataaggatttaaggtagtatctccggtgccggggtttcgtgtttaaggtattataagtagcttgttgtgtagaaaaaagatttttcctaaatatttgtgggaaatgtggaagtatttatagggttgaccaaatgtaaatttgtttagtactgggttatctgacctgagttggtggaactcctaacatgtgagtcgcatgtcagcctctctgtagtgtggcgagattaggttcggtgtgtgataatgactcttatgtacaattatatttaatgtgatgtttagcttggtcatgctatactgggcaatgattttgcagtatttataatcc

SEQ ID NO: 71270 - DNA, 463 bp, Arabidopsis thaliana landsberg
tggcggtgcttcctgaacttcacccacactgccgggcttgtgatgcgcaagccttctttcagactcttgtattaagtcgccgaccagcgcgttgatgatgccgcgaacggtttcgtgaatcaggcgacgccccgccaacccagggtgacgggctttcacgcggtccaggtgaagtttgaacaaacgcacctcggccgcctgttccagcgtgatcaagccggaacgcaaaccatcgtccatgtcatgattgttgtaggcaatttcatcggccaggttggtcacctgcgctttcagcaccgggcggcgccgatccacaaagcgcttggccacctcacccaacttcagggcatttggcattgagcaatgcttcaaaatgctttcacgagtctcgaaacacagattcaagccgttgaattcggcgtacttctctttcagatcattcaccactcgcaaagactgaaga

SEQ ID NO: 71271 - DNA, 196 bp, Arabidopsis thaliana landsberg
  unsure (1)..(196): unsure at all n locations
ggatgcttaggggggatcctcgnatttggggaataaggaaatgccaattgaaatgaaatctttaggataaatcaatgccatttaggaggaatcaatgaaaggacatcaattcaaatcctggattttctaattgagagaaatagggagagagatcaagaatgctcactactttcttaaaaccattttttttttttgg

SEQ ID NO: 71272 - DNA, 151 bp, Arabidopsis thaliana landsberg
tataaaaactttgggactccatatcgaataattcctgaaaaccctgcataaactggctgctgcagaactttaaaactaaaagcagtctctttccgagcaagatacatggaaccgccccttcatggacaatgaaacgtctatcaactatttg

SEQ ID NO: 71273 - DNA, 583 bp, Arabidopsis thaliana landsberg
gggcgcccgaccaggatcggctcggcaatctcctcctcgagcagcacctgggtttttcttagcacgcgctcgtcctcgccctcggggaagatcacccgcttcttctgcgccgccttggcggcggtgaagatcggcttcatgatgaagcccgagcggaagacgaaacggttgagttggtcgagataggcgtcgaaatcggtgatcggccgggccgccacgccggtttccgccgcagccttcgctacggccggcgcgatgcgtaggatcagccgctggtcgaacggcgacgggatcagataatccggcccaaagatcggcgtgtccccgccgatcgccttggcggcaacctcgttgacttcctcgcgcgccagggccgcgatcgccttgaccgccgccatcttcatctcttcgttgatcgtgcgggcgccgcaatcgagcgcgccgcggaagatataggggaagcagaggacgttgttgacctggttggggaaatcagagcggtcggtgcagaacatcgcgttggggcgcaccgcgcgcgcctcttccgcatgatcttgggatggggattggcgagcgccatgat

SEQ ID NO: 71274 - DNA, 574 bp, Arabidopsis thaliana landsberg
caaacatatctataatatatacgaatttatcatcaaaacaaagaatatattgtatttacgaaagatggggttatggtcgttacgtgttttgacggatcaaaagaaatattaaaatttcaaactattttaggagtttcaagatttaaaccgatgaaaatactaaaacctaacttagtttcctgatatataatgtaattatacttaaaaatattatatattattctagatgacataatcatctaatgacataaatcaagtttttattttgctaaattttgtgacggctaaaacaagacgcatctgttttttatattttgtaatgaacctaaacactaaaattccactgggccacacaacacaactcaattaagatataataaggcccacatttgcaacaaaaaccatgttacaaattttatattatgaaccaggaattttggaatcatcattcatacttcatagcctagcgaatcacagagagcaaagctagttttattacccttccacctaattatctttgtggtcgtccatatacaatgaaggatttgataatcagcgatcacaaaatgagaga

SEQ ID NO: 71275 - DNA, 655 bp, Arabidopsis thaliana landsberg
ccatggaactgtttgtagcaattttgtggttcattctgcggaaagatatacgtctaaacttgtaatatttggagagaagaaagtgaagatcttttcattgattgttgaattagcttcgagctctggtgaaatctccgtgaatttggaaaattttgaatctttgcctaggcttagcaattgggtcttcgacgtttgtttcttacaggttaaaatctctgtttttgcattgtctgtttgattttataatgttccttgttcctcatggattgggtttgttcttgtggtaggactctactggttcgttggaagaagaagataaggttctagctattggttgtagtgataattctctcagcatttgggatattaaagaatcacgcatggcttttgaaattcagtcaccaggttagttttactgtacttggggtttaaggggtgtgatgactcaagttagaggttttgatttatttagtaatttttggttgcagaaaggtgtctactgtatactatgcggttatggggagacagtatttcgactctccgtatcgcttctggcactattttcaatgaggtaggctaacttttatttcccttcatatttcaccttagatcctttttcccgttgttagtcttgctgccatttcgtgattctagc

SEQ ID NO: 71276 - DNA, 274 bp, Arabidopsis thaliana landsberg
actgcactctctgacattaaacctattgtacactgatcatgctccaagcttgaacagaacaacagcaatgactgacctgcgattgccctatctgaaaccaatattgaactccgctttcaattgacagcggaaaagacatacccatcaatgccacctcatgcagacggtgaggccattaaaactacaacaaaccttgcgattagtgcctatgttacctgtccaaacataacaaagacaatgtctccggatctaaaactagcctgcgatgatcgta

SEQ ID NO: 71277 - DNA, 341 bp, Arabidopsis thaliana landsberg
  unsure (1)..(341): unsure at all n locations
gaaaatccaactntttatgttaattgtcctatgagacactgagaggcgacagaacagattgaatttttggacgttttcttatctgnngcnagcgcctattatcacaggctaatttttcgattaatttacagggttttgccaaaggaaagcaaaccgtgggaaaatgtgaagaagacgctgaacggtctcccaaacattaaaaatggatcaaatgaaaagaaaacttgttgaaaggagactgtgatttaactacgagaactctgtgaaaagctgtgacgtgacaaacttaagatttgaaacattatctttctttgccaatacctgagccccaaataagcgtt

SEQ ID NO: 71278 - DNA, 483 bp, Arabidopsis thaliana landsberg
cccctctactcggcgggtttggtgcttttaacctttctacaccgttttcaatttaaaatctacaaaaagattattctattttaattatttgcatgggagtccaaaatacagatttagatacttggaacttgaaagtcgacacaattatgtataaaaaatgtttgttaacaaaaaaaaaagggtgaaaagttgagagaaaaaaattagtataattgtctccagagagagaaaagaagaagaaggctcctttttcttggacaagccaaagaaaaagaaaaaaaggttgaagctttcacacaaagtctcacacacaagccgccttattttttttttcggtgattcttcagagagaaacaagccggaagtagtaaggataactcgcctccggtgaaatctcagccgttggatcagatcggtggacggtggataaaacatgcctgtggagaagagagagtctgggttaaatgattaagatattccttg

SEQ ID NO: 71279 - DNA, 548 bp, Arabidopsis thaliana landsberg
gcattgcagccgaaggcggccatggtggcgccgtagtcgaccgcgatgccgtgcgcctgatagagggcggcgatcttgcgctgcatctggaaatcctcggcgagcgtgcggcgctggttgcgcagcgcgaaggtctccgacatcgccagggtaatcttgcccttgatgtcgagcacgccggcggcgatggcgcgctggaggccggcgtcgttgaggtagatgccgttataggcgacgccggggtggcgggtgaggccggcacagatcgcctcggcatcggccatctgcggcacctgctttgggctgacgaaagaaacgatctgcaaggtggtgaggccggtggcggccagcatgtcgatcaggcggatcttgtcggcggtggagatcttgtccggctggccgatgccctcgaactggaagccctcgcgggggccgacttctgcgagcgtgattttggtggggaggggcatggcggggtctccgagggtaggaaggaatgtcttctttttgtgaacaaaaagaagctaaaactcttttttatcccattg

SEQ ID NO: 71280 - DNA, 725 bp, Arabidopsis thaliana landsberg
tgttggcaatcataagctacttgactaatagcaataaatagtattcctccctccaacctttacttgtgttggtttactttgaccattattgggttgcgttgtgtagaatgtgaaacggaactctattgtaaaatttggtaattactttgaccaccagctatagcttgaacaacaattcttttcataaagcacaatcagcatgccttccctgattttatgttgaggtacatgatggtcaatactgtttaacttttgttattgctgcagcctttggatataattctctcacaagatcataatcaaattatagccttgttggagtatgtcagatatgattctcttcctcagattcagcgatcttcaatcaaaatcatgaacattttaaggtggtaacaaatttcgtttgagacatctctgtagtttgtttaaccacatacaacttttttcttagatagcattagcaaataccattataaacttctttcagatcctcagacttttagatgtttgattccttagctttgtataattagtttaaccttatgttttgatttgaattacatgggttttaattaataatatacttgatgacagttctcgcttggttggacttgttccaatgctgatcaaaattgatgctgcgaattccttgattgaggattatgccgcctgccttgagggacgacttgaagagggtgaagttgtagagaacagttgtgatgatc

SEQ ID NO: 71281 - DNA, 391 bp, Arabidopsis thaliana landsberg
cgctgaactcggagacggccagccggagtggatcatgcaagccgcggagcatcgctggcctgtgggccaagcccggtttcgtacgcctcgcgaccgtgattcgcgcgcggaataccccggagctgaagctgatcaagaactacagcaccgcgcccgctgcgggcgaatgggttacggtggcggacgcgcggctcatcagtgaggatccgggcctggcgggcgtcgaccacaaggttgttgcgtgggcgcactccgtccggaggatgcgcgcgttcgtggtgaacacctaccgcaagccgcgcgccgggctccagtagatgtcagcgaccctggagcgggacctcgacacgtgcgcgctgtagatcatgatcaacgactgcatggggatgct

SEQ ID NO: 71282 - DNA, 529 bp, Arabidopsis thaliana landsberg
  unsure (1)..(529): unsure at all n locations
aacaagaaaaattanataacaaaactgcgtgatatttaaacattcttgatatataaaaggttatatatcgagaaaggttagatttttagacatcttacgcatatcaagaaaaattagatgttcttacatctgaagtagatcaaacaaaaattgtgtggatatacaactagatgttctcacctatttatatagaaaataatgatattgtgaaatttcttaccaaaaaagcaatgaaaatattttgacaaacaatcatattaaaaaattacctttcgatttaaatattcattcttaattttttttgttcaagattgttacattttatagattaatttatacaaagannnnnnnnnnnnnnnnnnnnnnnnnnnnnnnncctctttgccttaccaaaaataaaaagacaaatgaattttataatgtatcaccgacgctttgtgtcaaacatataaaaagaactcattgtcctttaattttccctaattgaacaaatattctattcactactaaattgttattactacttttt

SEQ ID NO: 71283 - DNA, 446 bp, Arabidopsis thaliana landsberg
gaggaaaatctcctatcggaaactaaggttagccgatataactttaaaatcaaagcttaccacttaaacttaagaaaaaaccatgacagtgaaaaggaaaaatctcaaaaaaaaactttcaagttgaaacactttcccaactaaaacttctaaattttgatcttcttttttcaaacctgcaactaaataactttacctataaaaacattcacgtaacttttccttttttgttcttttttttttttttttccttttccaaactttcacattaacatgcaccatcccgaaattttaatacactttagcttctaaagcctttatttcacgaaatttagtccatgaccgaccatatgaactatcggcagtatagtgaagcctattaattttactatggggtgatttcattcacatgctttaaggaagcgatgatgtgattctacaaagat

SEQ ID NO: 71284 - DNA, 217 bp, Arabidopsis thaliana landsberg
ggtaaaatagtttcatttccgagactaatggaccggccgcgggggggttaaccaggacggggccatgccctacaaaaaataatgtttccgaattgctcattgaacccattgggtatgacgcaccgtttggtgaactattaccttaatatacatcaatagcgagtttatgatgaaaagtttgcctaacttatgaccaacgtggcttttctagaccatc

SEQ ID NO: 71285 - DNA, 4557 bp, Arabidopsis thaliana landsberg
acaaatcctcgaaagaagccattcgttcgtattaataaaaacaacaaagtggagagtaccgttttcatactctcactggccttcttgtggtatactcagctcttcatagtcaccaactattacctcaaatggctgagaatggtaagtgtatgcaatgtataactgcttaggttggccgggacagggatcgcaaaaacccatgatccctgatttcttcactccctcatggagcttgagctgccctgagtcactcacaaggaagttcatcggcactgtcacgtcaatgactcccgaatccagtccttccactccttcttcgtttcttctctctattgcttttgggtcaccatacaacgctttcgttactatgagcccatctgtttcaacttgacggtttttcttccttgtggctacggtttgtagcaattgctgggctttctcagcccttgcccttgcttccccaacctaaaacccacagtttaaacaaatattcataataagatcatctacaatcacaaggaatctcgcttggctaccaaactcggaagtaacaatcacctggccccaagttttctccatattctccaaggccttttgtttttctcttttaagcaaatatggcttcaccacaaatttctgcgtggaacagtgaaaatgtttaataaggtaaacagcttataacaatagaccaaaagtagattatatttagagggtccaatcactcacctttaacaaaaagtaaagagatgttggaacaatgaatgctccagttgcaaatactggagctaaatgtgcggagagtagaatctgcacgtttcaaagataatcatcatgaaggtgtcaaaagtgaaagacttccccagagtaatacggatgtttgtctttgtccataattgagttgggtaagggtttcagagagtcaaggataatgctctagaatccatccctaggcttttaggattggtctttggttctattggtttatgcttttttaatatattctactccacagattaagacacaatctgttcggttcttatccgaagacagcagacatgacaccacaagaaaagaaaggaagaaagtaacactcacgggaacaatcagcttttggctaccacggtgtagctctactttccagaaaataccctacaaacaaagtataagagtaccggaaataagcagattgcataatggctaagatggctccgaaagttttaaagagtagtttaccttgagtcctactgtatacatcattcttactgtactgaactcagaaatttgccttccaccaccgagctcaatctcaagagcattgctgaataagttaaaaaaaaaaaatccaaagtaaaatgagaacaatgattgcgccacacatgtaaagacaacttaaaaaatgatttctatcctctcgcacatcatacattaggttgctcgggattgtcaataaaacataccttcctattctacccacaatgcgaccatgagatttggatgaaagtttacgagtataacgagctgatgctccgagtccaccagattcaatctagtaatagcaagattagagctagagaaagtaagaaaggtggtcgaggtaagaacagtcagaatgcaatttggtactcagcctaccttaaagtcaccagcagcagatacattctcgtctctctttttccatccaactgtaattgctgatcgcatacccagtgccagttcaatctggatgaaatgaactattttaaaatcgagaaaactgctttctcgccatcttagaaggtttaatcaaaacaacagagcgaacttacatttccgcttgaagtttctgaaagctgtcgagtccacgtgttggtaagattgatggagccatcactcaacgactttgaaatattgattgtggcagttgaatgtatggttaactgactgccccaacaagaaacccataagagtcacataaaccgaaaccataaaagatgcccagaaataactggaaaaactcatgagcctaccgtgttgtctgcactccaataagcgactgcaaacccgttgaagcgacaaactctatggatgacactggagaaatctgacgtctcagtatggcagtagcgactccgccaccagacttttcattggccgccaaatttccaccaatggcaattgcatcatcttttgacaactgagactgcacttgactagccataaccattctgaaagttgcagatacaagcacaaaagaaacgaaaaggcatcaaaaacaaaaactacttcaaatgaaacaaagtagtcagggctagtgttgagcaaccaaaattctcacacaagataactaatacacacaactagataagaagaaaacagaaacaagaccaaatcttttctcaataaaccatttgctatcaaaactttccagactagtaagtgtctccaaggtcaaattaggaacccaaatcaagaaccatgctaccaaaaatacatcaaaacttgaaaagaagaagaaaataagtaccctctcatgatgccatcgcctactaaaaaatgtgggacagacaaattgaagagaatagaaccagtgggttgaaaatgagccatcttcttagcttcttcatttctcctcttaatcctttcaagctcctctttgatctcatcagccttactcaacctaggaccaagctctaatcctgaattcaatccttccatgccatataagtcatatattagcctcttagtctcatccgacaatatctcatatgcttcacatatccgttggaaattctccgtagccacttccttcatctaaccacacaaattctaaatcagcccactcgaaaaagctacttcctttatgtaaagtatccaaatttgatatcacgaagatcagaggcgaattgaaaacaaagaagattgattcgggcaaacctgaggagattggatcttgtcagggtgataaacttgagcccattgacgataagcttttctgatttcttcgtcggaggcctccggtgataaattcaggagcgcgtagagttctctgttgggtggtcccgtcggagctgcttcttggcccatcattgcttaagattcaatcgattcagtgattgaaatctcgatagagacagtcaaaggaaagtgatagaagaaagagaaagttccggtgccggagggttttaggggttttgcggcggatgaggtttttgacaccgctgctcttggctttagctcgcttgttgacgctttgacccttgcttgattcccaagtccattcttctttctttttcttcgtccccaatttcctcgtaaattctacttttgacatcttattttataaattgttcaattttgacccatttccatatgttaatgggccttaaaatgtccataaggcttcggctaaagctacacattaatcttgacccacaaaacaatcgatttctaaagagattaagaagacaagattaaagaatgttggactaaacatatatccaacaatctcggagaaatagagtcataatcttctctttcaggcgttttgtcaaacttattgggctttctttggaatccatcttgaaaatagtttgcatgctaagatcttaacggttggaccaaactcgaatttgaatacctgaatattgtccgtttgataacaatgggttttgtttggaccgaattcagatgtgagattaagtaattctctagcctaatgtgttatgtggatacttgaaaaaaggtaatcaagtttgcatttaattgtaagagttaacttttgtcatatgaagatttttattaagttgtgttttatcgaagccttgaaatagtaggtactcctgtttttgatcatagcaatcgcaaagattggctcatgaaactcattgtagcaactagcaacctttcgatacttaataaaaagaaataatgtcaacatggtctttaaacaataaaacaaaaatgtaagtagaagtcaacagaaaaaggagacacttggttggatccgtaagcatctaaaagacaatttcagacaatttggaccgacgcggtttcaacacaagataagaggagtcgtgtcttgtttaatcagtcaacgtttactcgaccctttccttcctctttcccttttctctactttcttcccccaaatttctgttctaatatacgataaagatgttttttgttccatttattagtagtttataactatttaaaatgtgcagtattttaatttgttatattggttgattttttataaatgagaaaatacttgttgtttcttaatctttgtgattttagccaaaacgtttttaagaaaatgggatagaggaaatataatacagcctattgcatgatgaaatgatacaacacgtaatcttgatatgttgtacaatataaatatccatattgccatatacttaataaaaaatacaagatgggttgttatgtattactccataaatgtgcatatttgggtacgtacagtcaacgttggatatctgcctaaaacatacaatgaattttattttcctgttaacctcaaaataagtggtacaaaaccaacgtgacaaggacgac

SEQ ID NO: 71286 - DNA, 532 bp, Arabidopsis thaliana landsberg
ctatcgttggagaatctctcgttctctgcttccctgtcctgttcagatctcgagccgcatttcgtggatgggtcaggggtcgcgttaaaacctactcgcttctctctaaccctagggtttttgaatttttttcgggacgagggagaaatcaatgtctgtgaagctttgaggaagctatatggttacacctttggttctggttagtcttcgttttgatcggcggagagtgttcgccgaggcttggtgtctccgtcattgactaatggtggtttttgatttgagacaagagatgcggaactttgcgatgcttctgctgttaattcttcttcttcactctctcgcctcgttttctatatgctttggtatgaactagttaacaaatttctcttccccttttcaaatttatgaaacgattttgataggagaaattaacctttagttacagtgctcttactttgacagctcaagaatagctggtggcctatctatatttagaataggtcattggatttaaatatatttagaagctaac

SEQ ID NO: 71287 - DNA, 1414 bp, Arabidopsis thaliana landsberg
ctaacgtcttactccttacttcttagagactataatgttcgaatttacacatacatttgaaactctcttgtgtctatttagagcacatggtttccaatttagctcgcagatccttcctcagaatcttgcccgaaactgcttttggtataacttctatgaaaaacaccatcttaatccgcttgtagtgaaccacctatataaaccatcacaccattgatttaagacatagacagttttccatcttgtgtgtgtttcgcattgaaaaaccgaaagcgaattcgtacctgtttgtttacgtaactcttgacatcatcttcagttaactgagacccttgagatcttgctacaaatgctactggaacctcatcagctacttcatccttcattctgaaaattcaaatatcattagagacaacaaccattttagtgtctcagtttggaagtttcagatttgttttgaactcacgcaacaactgcggcatcatcgatagaaggatgagaaataagcaatgcttcaagctcagctggagccacttggtagcctttgaatttgatcagttccttcaaccgatcaacaatgaagatctcatcatcatcatccacaaacccaatatctcctgtatgtaaccacccgtctttgtctatggttcgtgcagtagcttccggatcattcaaataacctaacaacattgcaccatgttttccctatcaatgtttattctcccaaaggaaaaaaaagaagggacatagcttgatcgtttgaccctttttacctttcatgagctgatgacctcggacgcagatctcgccagatttgttgcgcggcaaggagattccggtttcggtatcgaccactttcatctcggcgtttctgatcacagtcccacatgcaccggacttggttttaaatgggttctttgcaaacgctaatgacttagctaccgttccggactcggtcattccataaccctgaaacagagttttgtttttttagttttagtcaatacgaaaatgtaaaaacgacaacagtcgaatattgtccaacatgataataacatcgccagtgacgaagacatgaaacggcattctgaaaactgtaattaagtaaacgagatattaaagtataacatgtgctttgttgttgtgggtcgtggttgacgcttaattacttttatgatcccacaatctatcaataagtcaacacttttgttgtttcttgtcaaatcaataagtcaaatagttatgaaataataaatgaactaaaagactacttgaaattttggatgggtgattcgtataaagagacacgtaatgaatgtttacccaataaactaaactatgcaaaaacaaaaaataatcatcacttagtactgttataaacctgtataaggatcttcttaaataattaaaatgg

SEQ ID NO: 71288 - DNA, 699 bp, Arabidopsis thaliana landsberg
  unsure (1)..(699): unsure at all n locations
caccctccgcctcgatgccgcgcagccactggtgctgcaaggagagcgcggctacagcaagaaatccgagcgcggtcaggcctcgtattatttcagccagccctatttcaaggccaccggctacatcgtgctcgacggcaagcaggtggatgtctcagggccggcgtggatggatcgcgagtggtcgagccagccgcttgcctcggaccagaccggatgggactggttctcgctgcatctcgcatccggcgagaaggtcatgctgttccggctgcgtcaaaagaacggcgagaattatttcgccggcaactggatcgggattgacggccgctcggcacagcttgcgtccggatccatcgtgatgacgccgacggcgaccaccgagatcgctgaccgcaagctgccgacacagtggcacatcgccatcgccgaccgcggcctcgctatcgactgtatgccgctgaatgcacaaagctggatgggcaccagctttccttattgggaaggcccgattgattttcacggcagccacgccggcgtcggctatctggagatgacaggatattgaacgcagcanataagatgggcgtggtcctttcggatcgcgcccatgctcaagagtagttagtcagattacttggtgaagggacagccgctatccttcgcgcttggataggcgctgtcgcccggggacggggg

SEQ ID NO: 71289 - DNA, 470 bp, Arabidopsis thaliana landsberg
attgggggctaaatcgatgagagacagaagagaaaagggattttgaattcaaatggtgaagtgttgaggttttgttataaaggagagagcttcctcgttttttcggccgctaacctttgagccttttatattctcgaaatatcatcaagtagggctctttcgtcaatttcactaattctctaattactaatgtctttttcacttttactcccaggggggctcacttgttcatattttaccccacacatttacaaattattatttagagaaattacatatgtatatcaatcactatataagatgttagtatttactaaaaatgccaagaacaaaaaacttcattcattttataagattttaggccttaaaatagatggggaatacaacaaatctaagtttttttctggtcgttacggggaatttaattatttaaaattttgattaattaatggtataaaaagctactaagc

SEQ ID NO: 71290 - DNA, 586 bp, Arabidopsis thaliana landsberg
taataaagagaaccacaagcaaaaaatgtggtgttgttcctatgataaatcttctaagtgtaattgatggattcaactcccttgaaaatgatttttttccgaagaaaaggaatttaacttggtgtggattttgcttcggcagaaaaaaaagaaaaaagaacaagagttattacgtaatcaataccattatctacaacggctcatatatgcgttttacagatacagtctcgttgttggaagtgataaacgaagaagaagcggtggatatgtgttattcttcttaatccaatcttattgcatgagaggctcttgtcttatatacaatgactaaaccaatattaaccaatactaaaccggtacacatttgattactcgaataatcgttttaactttagataaaattttaattgacatacaatcacacataatgcgttacgtacaaaatatttttagcatgtgtttggttttgatttcggcctattagctattgggctttagtccaaaaactgaaagtatgtatgtatagttgtggcaattgtattagtggatgcagctttaaaattttatttttaaacgattcatcaaa

SEQ ID NO: 71291 - DNA, 562 bp, Arabidopsis thaliana landsberg
  unsure (1)..(562): unsure at all n locations
gtcacaactctgagctttactctctcactttcaacttcagtgtgcgcatccctcaagctttgcatatatgacaacacacttttcctctgttcctcgagttcctccaattgtttttccaatagtagctctttttcttccatttgctccctggaaaataccaaagcttcccgagaagaaataagctcgaatcttacatcagtcagaagctttttcactttcatgaagtcctccatggtttcattggcttctcctaaacgtttcacggtttcctctttaagcttattcacttcatcctgggctatcagccactcttctgtctgtttcttcaagttggcttctgtttctctaagcttttcttgttcaagtttcttcgtagccttagaaatctctaattcttcttccttctcctcaagagctctctgaagtgcatatatttcaccttcttgtctcttgacaacttcgctggctttgcttaagaattgtgactngctttcaaattcagaaatagccatagaaaacctnctgcttctgtttgcaatctcttgacgcatcttctctagct

SEQ ID NO: 71292 - DNA, 224 bp, Arabidopsis thaliana landsberg
tgcattacccgttgctgagctcgtgttgcagagtgaacgatatttttttaacatgtgctcgcatacacatgagaaatccttggaagtgatgaacactttgacgagggagcatgcatttaccactgaaacctaatgggatagccgggtgtatactcaagccagctgaggctcttgtctcgcatatgatagcctatggcttcgtgtgcatattccttatccttcgc

SEQ ID NO: 71293 - DNA, 3441 bp, Arabidopsis thaliana landsberg
  unsure (1)..(3441): unsure at all n locations
cttacatgaaactttgtaaaatgaggacttccccacgctttctttttaaccttcgatactccaggctctttgtttttcttggccgatgccaaataattagcttgtatctcactggctcgagcttcctttgctaaccttttctacataacaggaaacaacaacaaatattagaatcacaaggattacagaacagtgaaacttcttgaacactaaaaagtagcttcttaaaagcacaaggatttgatcagaacgaataagagagtaataaacacagaattcacgcaccccacgggccttttctgtctcataatcatcatacagctgtgtgtcaacacgttcccgatcgataagaccaatcatggagttgaacttagattttacaatctcttcgcttcaaaaatataaacaagacagtcagtgaactaaacccctacacagtttctcctaccagaactaacatctcgaatcagcacgaaataaggaacgtacatagttacttcaacctcaaggagctctgaaatagactctgcagaatcaagagcattttcaacaagctctctaactgtagtataaagcgacttccctggctgacgagatccacaattcaaaattcgtgtgatacagaattgaaattacaaagatgcatcgtttgaattgaaaccaacaaattggggactcacattatcaaatccagcaatgttcttgttctccgcgaaaaactcagctggagattctgcaaattcacgaattcaaaaaagagagtcaattgagcttaatctcaattgaaatcaattgtgcagcaaatgatacatagagcattactttgcttgagcttgctctcgttgctgtccttagagttcttcgagcttcccttcttcgtttcaactaaatcatcacccgccattgaaacaacaacaaattttgaaaatttgagtcagatcaaaccaaatgtctcagagtacaacactacaagtttccaatcaaaattcaaagcaggatctagggttttatggagggaagttaaggaaactcgatcaaagagattggttgctggggttatatcggtcattttactaaattatagcgtttgcgattggacttagtgtttcatgagttgtgtggtgtgactataagcagcaacagttgtaagttaacttgattctgtttggatccaatagagaaaaccattacacgagaaaggaaaaaaatggtgaatccttcttcacctggaattgccatactcggagctgggatcttcgtcaaaactcaatacattccgagattagctgagatctccgatctcgtcgacctgaaagcgatttggagccgtactgaggtgacatttcgatcaatgcgcttgatttttgggagatgtttatgccaaatgtctaaaaagatgaaaactttggcgaattgtgatttttgttatggttgaaggaatctgcaaaaggagctgtggagatagcaagaaagcattttcctgaagtgaagtgcaaatggggagatgagggtctcaatgagatcattcaagacagttcaatagttggtgttgctgtagttgtagctgcagaaaccatggtatgtttgatcttagacttgagagatgcgtatgaatctagttgggacagtgcataggatatttcttactcaaagtcttgtgctttaggttgaattgtcactgaagatgctcaaggcaggaaagcacgtccttcaaggtgacttgtccacttcatttctgctctgcttttatgatcgtcttctttagcaatgttattgcttcttggaaatgtgtcccaacttaaaaagctaaagatatttcttttttcttgatatgtatattgctgtcctggatcggtctgcagagaagccagctgctgcttgtaagttgatcactgctcttgtttaaaccaacttggcatgttgtttaagttccactactctagcccagagtcaatttttcctgttgagcatgacccatttaacgtgaaactatagtcttcctggttatgccactctaaagtgcagatgaaatgctttattcctattgttttacaagtttttttgttgcagcaatcagtgagatagaaactgcaatgtcaagctatagaaatatttctgctgattccccatgccgtccaatttgggctgtggctgaaaattatcgttttgagccagcttttgttgaggtaactgttacttattgtcttcttggcactacctatttgagcaagtaatattgtccttgaaaaattgaagtatttcatggttgctttcggcagttgaagaaactgatagcagaaattggagatatgatgaacgtccagcttattattgagggatcaatgaacagttctaatccttatttctcaagctcctggaggcgaaatttgagtgtatgtaatactttctattccgtcacattcttattttgtcagactctgttgcattgcatcttcctaacacgctgcttacttagactgtaacataagaattacactgacatatatatcaatcacccatatatatcttgaagaaactgtgttatctgttaatattttacagaaagttcttcatatgcagggtggtttcatcttggatatgggtgtacattacattgcaggattaagaatggtaccgtgtaacttcattagctgataagcttatcttgctgtggatcccaagtatgatatattggtttttcatgaacagcttgttggatgtgaggtaacatcagtctcagccaccactacccatgtggataagactttacctggaccagacaatataacatcaaacttgtaagtgtaaatacatcaatcttgtttcttagcacactaatttcacatgaacatactaatccaggatgtttgctctatagtcagctcgagaacggatgctctggggtttttgttatggttgtgtcttcaaggtctccaaaggcatgtagtaagacttagattttcttctttccacaccggtttagcctaataaccatagtttttcttacataacttctatttgttagatactatggagaatcgtaggactaaagggcactgttcaactagagcgtggagtggaaggtggccgacatggttacatggtttgtatactttaacatgtgaccatctgaatgatccagattttgcttgaaactactcaactcaaatggctgtgatcttatgaaattttnnnnnnnnnnnnnnnnnngaaggagggacatcaaggaccatcttttacccattcagcggagtgactgaagagttaaaagcgttcttcaatgatatttcagaaacttcaaaggtaatcctagaatcttagccttggaatgcaggaactcataacatgagtattctattacctaaactctcctattatggatccgtttcaggagcaagagcctcgtctatcatatgtggaaggtgctcgtgacgttgcagt

SEQ ID NO: 71294 - DNA, 313 bp, Arabidopsis thaliana landsberg
tacctatcatcgctgcactttaacacaccccttttgaatccaatttcttcggagtcccacagccaggtgagttgataattatttaactggaccgcggggaccatcctgttaatttggaaagtcttgactggagtgaggcctctggtggaactaatatggtgtataaaaataacagggtaggcaaacacaacgcactgatcacttataactacaggaaagagttccttgatactgtattggtaatttcaggactgaagaaagacctcttctgtccgtttgttacagaatactacgtagcatggagtttttgatg

SEQ ID NO: 71295 - DNA, 726 bp, Arabidopsis thaliana landsberg
  unsure (1)..(726): unsure at all n locations
tatatagtcaactttgtgacaccgagtattttgaattcgagtttgtacagattccaatgtggctagaactggctagtaggttaatgcctaacggtcgccttatggtgaattgtgcgggaatcgaaacagaagtaaagaatggaaaaccacagttggtgttagatgatttggcttggatgttgaattctactgtcaagatcttatcagaagcatttcctggacaagtaagtaacacatttcatcttcatatccttttgttaactacgcgtttaagataaaaagaaaaacatcgcgattatttattgttgcaggttagttggaagagaacaccagattcagaaggtctcaactttgtggcattaacaggaggcttacctgatcttagtgactggtctagtaaggttccagtccgtttaagcgaatcagtgaagctatggaagctttgcgagacggtccctttgcaactcggtgctttgaatgcatcttaacatcaagagttttgccaaaagatttgatcagaaactcacatgtggatagtgaaagttgtgtatgatttgttttgccaattgagtacagagatacacaaaaggacaaaaagaaggtacatatgaatttcacatttgaacttaagaatttttaaatccaaaattcgattatcataaaattttgaattttatacaagaaaccttttatgatactatgntatatatatgttactattagtca

SEQ ID NO: 71296 - DNA, 618 bp, Arabidopsis thaliana landsberg
tcgacttttgttcttacatctaacatcttacaaaattaatattctaactcctagcaatcttttactatttttttcttccctaaaaatagaaacagggtcgatttcctcttaaaataagtgtcaacagaaatagaacaattaataattagtagtcttaagttgtatatatccattatcccaccatgtcaaaaaactaatggggtttagaaaccttatttatagaactcaattactaattttatcatttttgggtttcatcgtctaccgatatatcattataaaaccatatatcattgaatgagtataaaccatatatgtttttttttttttttttttgttatttttgaatcgataaggtccaatccatatataatttctattacgcggaataatacgatttagtagattctaactccgccggaaaagtgaagtaagtggatttacttaaccacgtaaataaagatatataactaataggggatataaaccatatatctagaatataatgttatgatgttaatatatatacggctatatttgagacttatagtgtcaaaggtgactattttaatatctgaaattatattacgtttacacattattgtagagagagtttta

SEQ ID NO: 71297 - DNA, 563 bp, Arabidopsis thaliana landsberg
  unsure (1)..(563): unsure at all n locations
cgggaattggttgatgggagctaggaatggcctgtttacctgtcactggaacctcacccccattagccgcctcctctcgcgccatcgcttcacgtttcagttttttggcctcgttcagtttcatgcctcggttgctgagctgagtatttcctatattctcaagctgcatctcctcggcatgagtgacttcgatgttgtcgcaatcgatgaccttggtaccattctcggttgccaacgatttcgcggcccgatatccttcccatccacggcctgatagtgctaactcacgctgtatcataacatggcttggctgccaaacggcgttcttcttcatcttcttgcgcagtttagtcatctcccactccgtgaggcgcagccatggcaaatgttcactgccgagtctggcannnnnnnnnnnnnnnnnnnnnnnnnnnnnnnnnnnnnnnnncgaaactcccacgcctgagcttggtcggcgtaccttttccttcttgtgtggcttgactggcttcggtgggatctccacatcctcgtcgtcagagtgctcggtgcttgcgatgggc

SEQ ID NO: 71298 - DNA, 181 bp, Arabidopsis thaliana landsberg
gaagataggagtaaaaccagagaccatctcgaaatgctgatggagctaaacagaaacaccggcagaggtctaggtccagatcattggaaaatgacaatggatctcatgagaatgttgatgttgctcaagacaatgatctaaattcccgtcacaggaagcgcaggtcaaaatcattggacga

SEQ ID NO: 71299 - DNA, 559 bp, Arabidopsis thaliana landsberg
ccaacttatttctaattctttttcataattatatttgtatctaatttaagtagaatacctacatattgaaaagaaatagtagcttgctagggcctagggataaacgttaaagagaaatattactatagagaaaaaccctttagttttgaacacaatttctatgtgtaaacatgcgtgattgttatgtaggcagatgtgcactaagcacttaaacagaaaaagagacaagttttgaacatgagttatgagtaaaacatataattataaagttttgaacatgagttatgagtaaaaacatatcattataaagttttgagagcatctatgagtaaaaacagactaaattaaatagaacatatatatggacaatatagcaggtaaaatctctcggactgacgaaatagatgtaactatactaccaatgcttgcgattcaaaccgtcaaaagtgaaaaatacctgtgaaataacaagtcaacttctataaatgaaaattaatatatattgtagacggcttatatataccgtttggatcatatcgattcactaataaaaaagtaa

SEQ ID NO: 71300 - DNA, 203 bp, Arabidopsis thaliana landsberg
tctttgatcggtctttttttaaggctggtggaacactatttccttctgagaacatattgcagattgggtccactgccaactaattctagttgcacctacagcaccccattcaccttgccgaccagtggttcgctgtaccatatgtgacccccacataagtaccttgaggaaaggaacagaatcacataacgtaatgaaagtgg

SEQ ID NO: 71301 - DNA, 3545 bp, Arabidopsis thaliana landsberg
agctaaagatctgacagatggagatgcaaaagaaggtgcggatgttacagaagatgaaatggatatacaggtattgaagaaatctaaggaggaagaaaaggttgatagtactactgaattagagatagaaactaagcgcctagaggtgcatgacgtggctactgagatgtccgacaaaactgttatatcatcagctgttgttactcagtttactggggaaacaagtaatgataaggaaactgttatggatgatgtcaaagaagatgttgacaaggattcagaagctggtaaatcactggacatacatgtaccagaggctacagaagaagtagacacagatgttaattacggtgttgggatagagaaagaaggcgatggggtgggtggtgcggaagaagcagggcagacagttgatttggaggaaattcgagaagaaaaccaagaactgtctaaggaactggctcaagtagatgaaaccaagatttctgaaatgtcggaagtaacggagacaatgatcaaagatgaggatcaggagaaagatgacaatatgactgatttggcggaggatgtggaaaaccatagagattcctcagtagctgatattgaggagggaagggaagatcatgaagatatgggagtgacagagacacagaaggagactgttttgggtaaagtagacagaacaaaaattgctgaagtgtcagaagaaacagacacaaggattgaagatgaggatcaggagaaagatgatgagatgactgatgttgcggaagatgtgaaaacgcatggagactcctcagtagctgatattgaagagggaagggaaagtcaagaagagatgacagagacacaggaggacagtgttatggctgatgaagagcctgaggaagttgaggaagaaaataagagtgctggaggaaagagaaaacgggggagaaatacaaagacagtcaaagggacaggaaagaagaaagaggaagatgtttgttttatgtgctttgattgggggtgatcatgtcctttgtgaccgcaggtgaactttcatttgtagtttctgtgactttgctgttggtccttctccttcttgcttatggtcccttccctttaacatatgataaattttattaatgtatgatcctgttggcttgcaggggatgcacaaaagcgtaccacccttcctgtgtagatcgagatgaggctttcttccagacaaagggtaaatggaactgtggtaagttttttctgttattctctcagtaggtgtctgcttaaattaaatcagtgaactatagtttggaaaaacatgatacatcatctgctaagcacatattttctttcactagtgtatgtagtggtgaatattgtttactataggtatttagagtgtcttttaactgtacttccttagaaaatcatgacagcatatgtttttttatctgacttccggattatgacatttataacaattctttgtgatttaagcttcttctttcttcttttgtttgagttcctggcttgcagtttgtctttttaagtatttgctctcaaattattagtttgaacctttagttgaaagttatgtcaaaggcatttttctattgcttttcacatcatctttgattttcgtgttgttccttattgattcttactttagtctcaggcctgttgtaccactgtccaatgctacacaggcagtgacagatgttggattgtttgtgaaatggataagtctgattatcatcaaggctatgctcacccttttttgtgtacagtcatgactctttgagattccacaagaacttgtcaatggtagcttttagttgattctccgttgttcagtgtaaataccaaatagcagcagtgggatctgctatgtcgtttatttaaataaactataaaagtaaatacactggcattgatacttttaaatactttggtagttttctttccttgactatgggttggcgtggtgacatcatccagttttatcataccagaaatctacaccatttaaacttggtaacataacatattgatattaatgagaaagattaatttttcacgatcttctaggcaccaattaatggttatctctaagctattttcatgctgcaccgaattgtaaatgattcttgcatttatagcaaatggatcagattttttttggtacagatgttgttcaattccacaaactattgagatgcaggagcccaaaaaacactgtacagtctcttagtatagtactgtccctcatattttagaatacatgttttaaacttttaaaatagtacactgtttgagggattatttcccctaatttctttaaactagaattaattggcattctgcttcggttatgctgtatttttaagtttctctctgtgcatggtcatacttttgtttggttacctctctctgtgtatgtatgtattccgtgagctttcatcatttccatgtctttctaatagaacctaacataatgcttcatttttatgagtaggatggcacctatgtagcaaatgtgagaaaactgcaacgtacttgtgttatacatgtatgttttcattatgcaagggatgtgccaaggatgctgtcttcttttgcatcagaggtaataagggtttgtgtgagacatgcatggagacagtcaagttgatagaaagaaaacagcaggaaaaggagccggtatgcctgacatactcttgtagtttttttttgcttaccgaaatgttttcttttcttgtaacaatgagctgataaactgctcatgttgcagtagctcatgatcttatatttcctgtttctctcattaaacatgttgtgataagtctgatgatcaatcttctgttgattctctttcaacctagttgatgcatgataaccttacatttctttcttttactatgtaatgtcactaataaattatgagtttattttcacttctgccttagtttccactttgttatttgaatgacagttttttatttttctgatctctttcttacgtcgttttgtcttttacaggcgcagttggattttaatgacaagaccagctgggaatatctctttaaggattactggattgatttgaaaacccagctatctttaagtccagaggaacttgatcaggctaagaggccactgaaaggacatgagaccaatgctagcaaacagggaacagccagtgagactgactatgttactgatggaggatcagattcagatagttctccaaaaaagaggaagaccaggagtcgatcaaagtctggttctgctgagaaaatcctatcatcaggcgataagaatttgtcagatgaaactatggagtgggcttccaaggaacttttggatctggtcgtgcacatgagacgtggtgacagatctttcttacctatgttagaagtacagactctcctactggcttatataaaaagatacaatcttcgcgatccccgtcgtaaaagccaggttatctgcgactccaggcttcagaatctgtcggcaaatcacatgttggacactttgagatgttaaatcttcttgac

SEQ ID NO: 71302 - DNA, 404 bp, Arabidopsis thaliana landsberg
tccgaacactctttccgttactcttatcattacttgacttgtggaagcagtcaacacttcatttaaggtgaattctttcatttccaaatccaagcatctgcacagtcaaattccaacataagaacacagataaaccatattttaaatggactttcattctagcatacccttcaatgatgctttcaagatccgaatcatcgaggatcttgcttagttgcttctgacataacgcgctagtttgcaaaatccgtctttgctctggtcctaattcagtaccctctatcattttccttgtaaacatgatcccagatagcggattcctgatctgtctttttatgtatgctagagcctttagtctcttcactgcggttcgctcagctaaacgttgaacatggagcgcttgc

SEQ ID NO: 71303 - DNA, 487 bp, Arabidopsis thaliana landsberg
caaactgaaactttctttcacatgaaaaaaaaggagacaaatgaaatcctatagggttccattatccatgtcgtctcggttcgtgtgttcctcaaactcccactttcactgttctttttctttcttcttgggatgtccgcaaaataaaacaaatacgtagaaaacaaaaaccaaagttaatcacacaacaatctttcatatttttcacacaacacacacttgcacagtgtctcccatgttactgtacaaagtcacatctcagtttatataaatatatgccctcactcataaacctcctcttattataagccttattcaacatatctctttctttctttataattctctctctctctctaaagacatacatatttaatggaggagctggattttagttcaaaaacaacaactttctcgcctaaagctatttggatttagtgttgatggagaagaaaatttcttcgtcaatcaagcaaactaaccattt

SEQ ID NO: 71304 - DNA, 588 bp, Arabidopsis thaliana landsberg
gtaataacgtcgacaatctccagtcccgggattcggcgcaacagccgcacgacgttattgccaatttcggacatgccacggtgggtatggaccagaacgcgcttgttcactggcgttttgaaacgcgctgcaagctggtcctcgtgctccatgagaaacttggtgatgtggtgaaaatcgaaactgacctcgcgatagcccttgatcgtttcaccgagatgcagttggcatgacggacaccaactgagcaccttgtccggcttgtaaccgccgaacctgctgagcgtttgctccgaaacccgaccgcccttcttgacgtcgccttcccatttgctctgaataatgccgcaacacgatgacggcccgccgagcacctcgtagttgatatccaacacgtcaagcatggtcatgacgttgaacaggacatgtggcgttcggataggattgcatccggtatagaaaaccacatccacatcacgcaccggcggagggcgcaacaagcgcgcgacgttttcccggatgagctgcatcgataccatgatgcggatcgcgcgcgacatcttacggaacgtaatcggcgtaccgtgc

SEQ ID NO: 71305 - DNA, 235 bp, Arabidopsis thaliana landsberg
aaaccaaagaattttttgaatctgagccaccaaatgtactaaaaattcaatattacaactttcgaatacttttaacatatttatagcaataaaacgaatgcattactttacagcatagattttggaatatgtatattttgtggtaattgtgttgagtattgtccaacaaattgtttgtcaatgactgaagaatatgaattttccacttatgatcctcacgaattgaattataatc

SEQ ID NO: 71306 - DNA, 234 bp, Arabidopsis thaliana landsberg
attgccatttcttcttgcataatactaatacatgcaaatgatagatctctctttctgttgtgtagtacatcaatgcttaccaacatttgtaattaataaatgggaagtgtattaaaaccgatctctacctcttgtgagtttgtgcaaaactcagaatgtcccatgtgcttaatcatgcatattgcataataatgttctttacttatctttgtcaatttaatattaatcttaatc

SEQ ID NO: 71307 - DNA, 1716 bp, Arabidopsis thaliana landsberg
attgtaggtccaaaatctgcctacagaaacataatgtatcaatactatctagagaatccaatgaaggacttgcatttaaaaatgtgggttcctctctcctttcaagaccttgtgtggaatgcactacacagaagttgcaacaaaaggttttattacattggcaaagaaagcaatacataaagaaagattctttgtcttgttaaaaaaggtaaacatttcatcaaaaaagaaaagaacgaagagtattaggtagagtaggttgagaaagacaaaaagagtagttgaattttagctatacaatggaaacttgctttgcaaactaaaagagatataatcattacgctgagataatgttgagtacttaaaagggtattaaaatatggagaaatcatagatcaattagattaaatacaatgaagatgaacaaggaaggttagttttttctccttttaccgacatcacttccatcatacctttacattgtttttaaacaaaattttcccgcaacaattagtgtctttttttttttttaagcttctgtctctaaactggatttgttagttacttgtgactataattatttatccactagaaccaaaactttacaaagacaatatctatggatcaatttacaacataagagagtgttctctagtactttatataatggtaaagtgtgaatcttgatgatgttcttcattctgttcaagtgtggacctgggtagagacaatcagtactactagtcttctactagaccctggaaagtttgaagatttgttactttcctgcgaaattaacaagattttcccgggaaaacagagggtgatcgatcaccgttcttcgggaaaccattactcgacggataccacaccggagaaactagaagtttcccagacctccacaccttccatacattcccgagaaacaaagagccggtcacctcctgcttcaattttcgaaatcatccctctcttggaatcatcttccttgtctacaaagtttctcctgcgaattggatcaccacttgtcttctccttaacacttgaccatacctctaatgcaccacctctggcggccaacacttgctttctgtaacaatgtaccacgctgtaaccacctccgtcgccggctttccaggcaccgggattctcgtctgacatatatacccatggatcttcacctaatttacgaatgtctgccattccgaggtctcctgacttggaacataccttgaaaaggatcgagtcttcaacgtccacgtccatatcagctaaggcgtctccaaacctagtgcttcgtcccgatcctggctcgttcgtttcccatacgatgttcctggaccttgggtcccaaatccggatgtagccagagcaaccaaacactccacgttgaacggctgatcccaccaaaagacctttcgctggcagccaccggagtttctccggtactgtggttttagccgagtttccagattgctgaccgatcacggcggcgacttgaagagtggatttgtcgatctggagaacactgttctctctgtgcaggcaatcaaaggatgcgaatactccaccttccgaatcagcaacggcggcgacgcgtgccttatggatcctcggatctttcggatccgtccagtgcgtagatccgatgtatcgacctccagagagatcgtagaaatgaagtcccgacgcggatccagtatcaattgcagcagc

SEQ ID NO: 71308 - DNA, 589 bp, Arabidopsis thaliana landsberg
  unsure (1)..(589): unsure at all n locations
tggaatgttcccttgttcttaccttaaagtagattttgttcgctgaaattgagggtttaggttttatctgatctgattgagttttgtttcagtttcaaatctttatggcagtagcaagagctgatgttatcttcgaacttgatatctatgatgatgtttaaatttaattccaatgaaggattcttatgttttagattgttgctgtctatgtatgttcatctctgattatggttggctttttcctttatataaagaaatttaagtgaagaatctacacggttaaagctagtttccgcgaatggactaacttttaatctaattggacactaactagtatgatcaatgcggaaatgcctatggttgatgaagtatatagatcctcttagttttattggggtgtgcattgcatcagatggataatttcgtgtgtggttacagggtcagtgaagaaaattaggaagccngaaaccgtggaagcataccccaaccgatcacgaaaagcttgaggcttatggaaacttaaaagaaaaaggttttggggaacacctgccttcctccaatctatgggggggggaggaaaaaaggggaa

SEQ ID NO: 71309 - DNA, 1586 bp, Arabidopsis thaliana landsberg
atatcgaaccactcttttaacttgattgctgctaataaatagccaaaaaacaatatctaacataatttaagacaaatcaatgcgtaaacaaataaagctgagacggaaatgtaaagggtctccgaaccaaacaattatggctcaaagaagtagtgggttggtaagatgggttcattgaaaaacacttgcatgtgtgtatggctctttaccacatcttctatttcttactaaacattcttcatttttttgtccgcagatattgtttgacttgtcggtaacagtttttttttattagtgaaaggtgtatctgtttttgtttttaacaggaccccattgatgatatttttaggccttattttatacaaatacaaagactaattgagagaccattttaagataacaccatgtatcacgaggcagattattaaaccatcaatcaactgatgttttcttcctacatcatcacttaagtttaatattttcttcaatattttttcaaaaaaaattataaatacggctgaataacttgtttatttttctcaacatacaaaccttaaaaatcaatccaacaacaatttttttggggttaattgatgagttgtggaccgagctcatacatcttttccgtgcaataaaaacccctcgaaaagaaaaaattgaacctatgttttggaacgcaaaccccttacacacttggtgacaacaaacttaccaactagatgttccgaacttgccaactatttctttttataattttttttttttgaaaaataatagatgcctaaggaatttttaattctttataataaattcttttgttaatatataaaaaaacaaatattataaagaatcaaaaaataactatcccttatgcatataatatctgttatccactcttcaagactcttaacgcattagcttcgtcgaacctaaaatgctgactaagccaagaaaaataaaaaagcactcaagtatatatgaaattacgtgagccgtgaaaaaatagctagaggaccaccaaccacagtggcaaagatcgatcaggcaccactcgtctcaccaacccctttagtatccattcacatgtcccacattatctcaaattttacaatcatcaaacgtcatttgtccaaatcagccacatatataaaacttcctcttctttataatacagtactagtagataaatgcatacctccgaatctccaatagctttatgacgtctttgaaaacaacatcaagttcttgatagttttagcacaacaccatttgctaatcaatatcttttgtgtgtcaacaattataatcagtgatttttctttgtgttatatgataaatatagcaggtctataaaatatatgtaagctcgtaaaaaactcactaatcttgatggatgtcttaagattatcaaatcacatatactctgagaatatgacaaactacataatttccaatcgtaagaaaaaccgtaattaaaattttcttaatctccttgttagatacagaatttactaaccaatatattctcctaatcaaacatgctctcttgattttgtgagaatgtgggtgtagctcttttctacaaa

SEQ ID NO: 71310 - DNA, 188 bp, Arabidopsis thaliana landsberg
tcacttaatcataccaaaaaaaaaaaaaatgtcccacttaataatttagcgacgaccattatttttttctgtaaataaaatgaaaatgaattgcttcatgaattatattactcatttttcctagagatgggaccgttcataaaaagtattacggatatactgatagcaaaacatttattttttttcta

SEQ ID NO: 71311 - DNA, 357 bp, Arabidopsis thaliana landsberg
tggacgagtcgggcgagagggaggcgaacaagatttctgtctacttccgggcaccgacacgcctggtgggcgcgcccgtagcgtcgcccttctacggcaccgacgaccgcggcaagacgggatgcttcttccccttcccagatctgtcgatccgcaccaacggcgtgtaccgcctgcgcttcacggtcaacgcgaccgtcgagacaccccggccgggcttccggctgcccattgttgccgtcgtcacgagtgacgccttcaccgtctacagcgccaaggacttccccggcatgcagaagagcacccccttgaccaagtgcctcaagcgccagggctgcaacatcatgctcaaaaagg

SEQ ID NO: 71312 - DNA, 181 bp, Arabidopsis thaliana landsberg
gctgatgtttcagatgaagccgctgaaattcatgtatattttagaaacattagcaatttaaatattattagtatactttctttataaataatttttttttttatatatagaatcttgaagtttttggtctagttacatgtttggtaaacttatgtttaggttatgacaaaaatgcttgaag

SEQ ID NO: 71313 - DNA, 737 bp, Arabidopsis thaliana landsberg
gaagagtagcaaaaaattcttagagccaagtaagttggtataaaacaacattagataagagatcatcaaccaccaaaaaaacaaaccctgggagttagatttgaccatcacggagaagatgaaagcaggaggtttaaaggggtttatgtcttctttccgggaagagtccgttgagcgcaagcaatacgttgtaaagtaaataaccctaagctacgttttatttatagaaaacaatcaaaggaaattatttggtttgggctgggctgggctttcattgtacctgcttaagaggcccaagacccaacatgcttcttcttcttcttcgtctacctccaaatcagcccagtgtgtttgctctggaattcataattcatagtttccgattaaaaagcaagagaccaggtacaatctcaacctgtggattgcatgataaagatgattttaatcggaaaccgtaacgattcaaaattgaaacaaaactattcattgaggatatcaaaattcgataacctgacgcatgtgtctcgaattagagaaatcaaatagtgttttctgggcaaaatcaaaaccaatcgacacaaatcgatctcttgcgaaaaaatactaaaaagaaagacaaacccgtgtaaacttcatcttaatctcatgagtaagagtttccagattagcatatctccgtgatgaaactttctccattccattaacaccactgattgaagatgcgatcaccggaaaac

SEQ ID NO: 71314 - DNA, 430 bp, Arabidopsis thaliana landsberg
  unsure (1)..(430): unsure at all n locations
catctgcttcaatcaagaactgttttccaatcactgactcttcgagcatcaacacatttaatcaaatgtttctccactgcttcaagcttctgcaactccattggatctgatggtcttccaagaaaacaaagatgcttccttgcactattaacctgacctaatctgcaatccaaccaagtaattaaagaccagacacacattgaagtctaagaaacacatcaccaacaatgtatcaagaaacgaatgctttacctaataagcaataaggccnnnnnnnnnnnnnnnnnnnnatagttaggatccgatctaacagcatcttcacattccttaacagcttcaccaattcgagacaaaccaatcaatgcggcagctcgattactccggtaagcagcgttagtcggagataaagctattgctctatcatacaact

SEQ ID NO: 71315 - DNA, 585 bp, Arabidopsis thaliana landsberg
tcctgttcgcctttccggagggtgcccttcttgctttatttttttgtgacaaattcatgacaggcgttgtttgttattatagatgtttgtggcaagcactctcatggggtgcccatgggtagtgcgatcaaggaacgggcgacagtgatctgccgtcaggacgacaagatccttttcgtgcgcaaggcccggcgcaaatggaacctgcccggcggccgtatcgaggccgacgaggcgccgcgccaggcggcccagcgcgaactggccgaagagaccggtctgcaggtggaggccatggcctacctcgccccgctggagctgtaccagaccctccactatgtgttcgaaacggtcctgccagagccgcataacccccggccgcagaacgagatcgccgactgccgctggttctccctggaagaactggccaagcgcaacgttaacaaagccatccggcgcctgctgaaggactaccgcaacccgcaggcgcatcaggcatccagcgccctgaggcctttcggtaaacaacaccccgcaggatgggttgagcggagcgatacccatcgcccccccccgcatgggtat

SEQ ID NO: 71316 - DNA, 503 bp, Arabidopsis thaliana landsberg
aagctttttaagtcccgactacaatctgactcagaaaaaataatttttttttatcagcgccggttttgatacgctggcgaagccacgtcttgatcatgaaattgaaaacggactgcaggcacagattttaggaatggtggccccagggaccgccgttctcagctacctggatgtcaaacagcttttctggaaacaaggatttctgagtattgggcgaaaaaaagaatcttggagttatattgacaacaattttagcctgggaatgtatcaacctctttttcagtgggaccctttgcttccgcaacaacaaggcttgaccggaatttttctgactttggattctccagagaccacgattccatggggatttgtcgcctttggctcgccgatgtttattccggatcaaggcgccggctatcagattaaggatgggcaatttgaaagatccaatccttattttcaggcgccacccaaattctttgtgattcgcggacagaccgata

SEQ ID NO: 71317 - DNA, 505 bp, Arabidopsis thaliana landsberg
cgctgccgacgccgcgtacaccatggggcgggtagtgcatggcgcgcaccagttcgcgcgcctggtcggcgctttccaccatcggcaccagcagggtctgcacgccgatatcgagcacttgcttgatcagcgcagtgtcaccgatcaccgggcgtatcaccggctggctggggtagggcgccacggcctggagctggccgagcagggtgcgcaagtcgttgggcgcgtgttcaccgtcgatcagcagccagtcgaagccggcgttggccgccagttccgcacagtaggcatcggccaaccccagccacaggccgatctgcgcctcgccgctgcgcaggcgttgcttgaaggtattgatgggcatgtccatgaaacggtctccgatcagacgaaacggcaggcgatggaaccgagcatgtcgtagtcgacatgaaaggtgtcgccggggttggctgccacggggcgggtgaaggagccgccgaggatgatctgtcccggttgcagg

SEQ ID NO: 71318 - DNA, 469 bp, Arabidopsis thaliana landsberg
gttactataattttttgtcgagagattcattgtacatttttttattctttttggttgtggatgtcaattttttaattatagtccaataaaatttcaagaaaattaattaccggagttgaacaaactcaaattgacaactacttcaaaattaattgctattagttatagcgtttaactttttctttataaattgaaaatgattagttgtagtagctaagaaaaaatgtgtaggagtacagaccgtagacgaatacttaaattcagtgaatagagagtcctaaatttaggaaaaggactaaaacagactaacaaagaaaccgtattgaaagggaaaaaaaaggaattgaaaactaatttatattgccgtgacgtaattgtcatactcatataataaagtgtactcaaaagaaaatggaagaagggaatgcttgcttacttcgttcgtcatggccataagtagatcatgtgg

SEQ ID NO: 71319 - DNA, 484 bp, Arabidopsis thaliana landsberg
gaagaactcaaccggtatcttatcatcccaatgtctagaaaggcggaggacagccttttcagtagcaagtctcaaatgggccttgtcaacagaactgtggagaggttgagcatgagtgccttcaaatttaaaataagaatgacctcttagcatatataacacatctaccaaccttgattctagatcttcggatacttcgccaaaggaaagaatgttttttagtattccaagaagatcatcaacacccgcacgaagttgaacatccttaaaaggtaaatagctcttaaccaacgtcttgatcccatatatctatcacgaaaaaaagagttttatattaactggacaagagagaaattagttgatcactttaacacaaggtaaaccaaacattggtaactattagtgaagtcagttataagaactttttcggcagatccaaccttcagttgacaaaatttacttttgtcatcccatgacaattttt

SEQ ID NO: 71320 - DNA, 606 bp, Arabidopsis thaliana landsberg
cgctgtcagcgtccctgacatagcagcctactgcaacaaggatggtacaggcgcggtgtttttcatgtacctggatactgcaggaatggtcaaggcatatgaaaagatcaattatgtatcgggtaattttccatatcccgtaaccggttttggaggcagtatccaggcagtggatgatatggacggcaacggtgtgcgcgatgtgctgattgcccagggcgggtataccacctttgggatatcacgtggcgggatatggatcgcctatctcgactcgctggccaatgtcatcgatgcgaatatcattactgactccacaggtgtttatgccaatatgaatgccacttatgtttttggaggggtcatacggtttatgggatatgatacgctggggaatatgaagctattgacaagcggccgtgaagatgaaaggggaacggataggggggcggcttttattttaacaagcctgcatgtccttactcatgcattcacatcaactgagaaatattatgtcaacacccggaaagaaattgatggcggatattacctcacttataacgggaaattaacagtgcggtacgagggagaatatgacagctcata

SEQ ID NO: 71321 - DNA, 520 bp, Arabidopsis thaliana landsberg
  unsure (1)..(520): unsure at all n locations
cttggtatgtataaggactcgctaatgccatagttgtagacgaagaacttgatctccgcatacacatctaatggtgggtcggtgatgcttgagtcatcaatttttacataaagataaataagtcctcttgtggtgtccgagtttccgtttgggtagattttgaacgtccttttaaaacgttaatttaagaaaaagaataagggttacaattagaaacatatataagctagctaacaagttaatgttgtaatggtctttaacgaaaatgacgtaccagttgaatccatcgacagtgaaaggaagggactcgtaatatccattgtttactagctccatcattttcccaaaagactcgaacgtgacgctgtaagttgttggaggacgttctctccaatatggtagaagagcggtcttgagcttctcgtgtttttgtgaccctttagaagttacttttaattcatatttagacattnntgattatcaacttattatttctagtagcaggaaatattaaattttt

SEQ ID NO: 71322 - DNA, 403 bp, Arabidopsis thaliana landsberg
atgacttggatattgcatacaaacgacactttgggacgtttgttatgatcgaacatgacgttaaatctttccttatcatccattgccttatggtaaaccctaaccacttcaagacgcgatagatttcgcaagaaacagcttattagactcagctgttgcacaggtttctttatacccactgatctctaacacctttatagtagacggcgactgagaattagacgctgtatcccatgaaaagcagagacggctcataggagacataggagtcataccttcccatacttatgcaacatattgcactacaccctgcgactacataggagaaaatatcattgctgactcagacctagactacatataactgcgtgagaggcataccatgatgatgagagatcctagc

SEQ ID NO: 71323 - DNA, 581 bp, Arabidopsis thaliana landsberg
  unsure (1)..(581): unsure at all n locations
aaagaaccatcatgtattaccaacagcaaaaatcccaaacttttctgaagatttctgttgcattgccgactatggtggcaagctgtcgcggtatgacttcccaaatatttgtgcgctatgtgtctactatctcttatcctttactgatttaaagtcattgtaattattaaattggtaggcatccttgatagaggcctacaaattgatggattgggtatgaagagcttccagacatatgaaagcaatattcttttcgatctccgtttcatggttgattgcgatattgtcggaggaaattgcattgaagtacctactgtgaagtataagaaaaatgcaagaactttgtcatactgccaattggagctccattgcctgtatcctcatcggaatttcttttctggaacaataatatgcttatagtaacatattgtattttatgccagtgctttctttacatggggtttaggtactcagatctaatcagtcatgctgcagaaggtgaatactcaaaaatggctccattccgtgtactaagtctcgatattgagtgtgcangtcgnaaaggacattttccggaagct

SEQ ID NO: 71324 - DNA, 869 bp, Arabidopsis thaliana landsberg
acatattggaatcttttctctaaaattattggttattgaaaaattcgatgaaaatgaagaaaattaggatctctaggttattaattggggatcactagacgaagaagctcaagcatctatgactcttgttttttagccattactcgctgcacccacttcactgtcactctcaatatttttttttttaatcttacttctccaaatttgatctttctctagtctttgtttttctcctaaatttttaattagtcttctctctcaaacggtattattttcctttttataatctgattttatgtcagaataagaaaatgatttgaataggcattttcttcctcgaattttgatccccgaaccttccgagattgctaaaattttatggatccggatgcttctctttctgtcggattctctggattagatttcaagttttcgacaaatgggtccgtttccaaaatcgaaaaaactcatatttatttatgttattagtattttgatatctatttcccaagaagcatctgtccaaatttatttgtgcgcattttggaaagaacacattaatttcatatgcatgtattgaaaaaagcttctaatcatcgtttaaataaatcaatttttcatgtttctattcctttcttccatgcggcctcgtatatcccgtctctatcatcttcaaatagtatagtaaaatatttatttcaattgtcttattatcttgaatttttatcctattagcttctattaaaaattaacatattatctcatcgtgcaagtgtattttgaagtagacggtgttctggttggttgcctgtctaatggattgatttcggtttgtcaggctcgtgggtgagcatgcagatcgcgagaca

SEQ ID NO: 71325 - DNA, 456 bp, Arabidopsis thaliana landsberg
  unsure (1)..(456): unsure at all n locations
gtagcattaacatttataacacataaagattcctcgaattcagcaaacttctacaacaaaagcacacaaaagaatctaaattacaaaagtaaaaaatcagagtagaagaaaaagttatcttttttgaactttttatgtctttttttttgtatccttttggaatgagaatcagagagagagagcgtctcattctgagaggggaatctttatcatggncaccacaagtagaaacagaggttcttgaagaacagagctcagattcagtcacattactcttcctagtagtaaacgactgcttacaatgctcgatcgctccttcaatggagttatcactcgcgttgctgcttctcatcagtgtctgcagatccaacgacccgtttgatccaaaactgaacgaagaagacaacgaagacgcagaggaagaagaagaagaagatgttgaacactttgcttgag

SEQ ID NO: 71326 - DNA, 459 bp, Arabidopsis thaliana landsberg
tgtattttgtgtatatactaaaaaataagacagagttacaccgtttcactatgttatgacatgacacgattgaactgatagaagacaaaaggagcggtttggtgaagttagttaaaagagttgggtttcttcgtaagcatcgaaatcagatttctttaccaaagaaaaaataaagaaaagaaaaatatagcaagtacactgcatttcaacactctcatatctctccttcctacttcctcggtttcatcgtccgctgtctcaacaatggcgtcattgtcggtaccttgcgtcaagatctgtgctctgaacaggcgggtcggatctctccctggaatctctactcaaagatggcagccgcaacccaatgggatctcctttccctccgatgtttcttaggtttcttctgctcctcttctttctctctctgcctctcttgcatatgatgattctataaaaaag

SEQ ID NO: 71327 - DNA, 388 bp, Arabidopsis thaliana landsberg
gacgctgccctaagaatatatgcaaatcagagggccacttttcaacactttaattccatcaacattaccggcgcccaacccacactctacgaaaagatgaaggaccatcatgtggaactcatggagcctacccaaactcgctaacagagactccaacgctggtgaaccacaccgtggatcttacacaacagacatcgaaacgagcgactgctttcaccacacgacaagacctggaatcaaatgaacccagctcgaccggtcagaccacattcagcactgaggcataaagcataagaatctcaagcccgagctcgtgaaaatccgcctactgtaaactgaaatgtaaccatggcagagccgtaagagattccgcgacagctgcagttac

SEQ ID NO: 71328 - DNA, 646 bp, Arabidopsis thaliana landsberg
ttggatcgctttgaggtccttttttctcttttacctacatggctactataccattgaaccttatcttatcatagttaccgtttgatttgacagaaccaagacgatgaggttgatgaccacctacttggtaccgacccccttaatgaggtgaactcttgtgttctacataagtgttgtatctgctcctaattctccaactcgtgatctgtttcaccaactctctttatctctgaaacaaacagattaatctggcaagttatgtggctgattttttgttgaagttttcgagtgaagatcggcctctttttgataatctttgccaggtttggtttctattctcttataacctatcaacatcatgaaacttaatatgaaccactcggcttgttttcaaatatctgtagggcttaacaaatgcgcaaagaaacgtgatccatatggcactgaaccgctaggcttggcccgttataatccacaactcttggcttgagtgttgttttttgtcagctgattgatttttggggaagtaagaaatggtagcatcccttttgtaaaagtgtagttttacacaagggactctaataaaatatatctttgcaactttaaagactgaagaaaatccctctagtctcatgttaaaccttac

SEQ ID NO: 71329 - DNA, 380 bp, Arabidopsis thaliana landsberg
ttttgtgattgaaccggggaaccggggcaaactgaaacatttgaagggatgtagggaaaccaagggagacggaccatagagttatataaggagggacgtgattcaacaaaatttctcaaagtgacaaactctcgcaactaagaatataggtcatcgagagaggagcattattgacaaagagtcctatagccggaagtgaagaactttcccgcgcgaataatgctaaaggacgcccagaccttgaattggtcatcaggactaaccatctcacagaaatggaccacgactccgaagatctgtaacgcgtattgataatcgcatatataaatctatcctgtgtcacgaatagctctcctcggagaagaatctctgtcaagcca

SEQ ID NO: 71330 - DNA, 443 bp, Arabidopsis thaliana landsberg
aacattgaggaacaaacaaaccaaatgattccaagaaatgtagatatgtcacagaaggctctaaaaagcagaacaattgcaggtgattcagactattttttatggtgcatagatttactcacgtatacgcaaaaatcaactgaatttgcatgcgcaagtgttggcaacatattaataaatgcaaaaagaaaacaaaaaacagtaggcctcagcttttggtggacgtgaaataaactaatcgaaaaagtaagtgaagaactatacctagaagtcgcatcaagcaaacttctcatagtaaaaccgggatcaccactccatgtgagcaactcttgtctaccactagatataaaagctgccaggcattctgtagcattctgaccaattaaaggctagtgataagtgaccttcctcgatataaaagtgagcaaactagaaatgggata

SEQ ID NO: 71331 - DNA, 1231 bp, Arabidopsis thaliana landsberg
gaagtacattctgcagctttttttgtttcttccgtcagagatggcaccccgggtccaggatctggttgctgctcttgtaagacggttgcagtctgctgaaattttggctttaaaaggctcattgctactgatttttgccagattggtaatcttcacctttcagttggatagttttagtatattaatggttcctatcttctttgtaaggtgctgtcaaggctccaaaagttcacaaaaattttttatcagtcctgcgctgtaaccattgatttttgcaggttcatatgagttatccgaatgtcgatcagtttatcaatctgcttgttagcatacccgctgatggccatgaaaattcctttacatatgttatgacagaatggactaaacaacaaggcaagcatctatatccgtgttgtctagttgtataactctatttgtataacgtatgcggtaagggtttttctggctatttcaacttattgttggttaagcatctattttcaggggagatacaatccgcatatcaaatcaaagtcacaacttcagctctggccttgctactgtccactagacattctgaatttgcgaaggtcaatgtcccaggcagtccaattcaggtcttatgctgtacccatctttttttgttttttcttaaaacgcagtttattctcagccttacagaaacttgagttaatttctggtatagtccaatggtggcataactactcgctcaaaagctagatctgctcctgaacaatggaccattatccctctacccatgaaggtatgttattggttgattccttgattccttgatctaaatgttctcaatgtacaagatgcaagtcggaatatgtattcgttggggatatatacagttctatcctgtatctaaatgttcttaatcagtcatatcctcctttcttttcatcattctggtgtatgctttcagaaactttacattctttggctctgcagatactggctttactagctgatacattgattgaaattcaagagcaagttttgagtaatgaagacgaggtgattatagttccttgagcttctttatttcctttcccatcgttgaattgagtggaacttgagatggctaattctgttctccggagtagcaggatagcgaatgggaagaagtgcatgaaggagacgctaaagctgagaaagacttgctacgttcagctggtacctcccaattcagcaaacccacata

SEQ ID NO: 71332 - DNA, 556 bp, Arabidopsis thaliana landsberg
  unsure (1)..(556): unsure at all n locations
aaggtaactcctccaatctctcggtagaagctctatcgagcacgcaatatctcaaactttatagagtttctcttcgacgagaattggtctctcctctttttctttaccaaaatatattttccttttcttgatctcatcatgatatctaactagaagtttgtaaacagggcaaacgatgaaaatgcattggaggttgattttggagcgctggatttcactcttccttggctttcgttgtcatcttcaataggaaacggcctgagttttgtgtcctcgaagcttggagggcgtttaaacgataacccgcaatctctcgtggactacttgttgtcacttgagcatcaaggagaggttagttttgtccccatcgtatccatttcttcattgttttttgtttccttgtgtaaatgacgttttcgtatttgtgttttcgtatgaaaagaattaagaaaataaaaccttagatttctgttgacattaatatagatagatatctaatgtaccanaaattcanaattttcatttaaaatactcctatttagaaaatattataaag

SEQ ID NO: 71333 - DNA, 432 bp, Arabidopsis thaliana landsberg
cgttcataaaccccatggcttatgtcttactcttgtatagcgattaattctcggctgatcttgatgaacaagaagccatatacttaatccctactcacccatagcctgtgcttgtttccatgcatggaaagaattattggtccgagggatttcatgtactggttttaacctgagaagactagataagcatatatgatataatctatgacaatgattgatttaggtaacgaggaggcttgcgatattacgtttaaacggatcaacttgggtatatcttgcttttccgagagcctatatccattctgtgtaaaaagacatattttctcgttaggatgatgggatcttttctttatcgagcattctactcgaagttcagtatgtgtgggtcatcttctgctttctagaggtgagactgacctcttttatctagat

SEQ ID NO: 71334 - DNA, 426 bp, Arabidopsis thaliana landsberg
  unsure (1)..(426): unsure at all n locations
aacctattaaacattagcatccatcgggaaaatagtctagtttgtttacaaaagattgatgtaagttgttggaagttacctctttagcaatctatagaaagactattggtttggtatttagaaacagggccttatataatgatacatccatgaactttcgtgttcttctgctgggtgtcattaaattgctaactcagctcgccgccacgagatcttgaagctgtatcatcatatagcatatttcttaagacacaaagagcagagttttaagatggtgaactgtttaacaacatactaactcacttttgcattctagacatcttgtnnnnnnnnnnnnnnnnnnnnnnnnnntactagcaagtgttgattacttatcttcttgaccttagtatctcctaactcgatgaatctcgtaacagttctcga

SEQ ID NO: 71335 - DNA, 691 bp, Arabidopsis thaliana landsberg
cacacatcctgagacccggcctactatttactctcctgtgccacacgacattttcctttaatcagtacttgcgcttatacttatacgagtacgactaaatctaagaaactaacacccatttgctcaactaggcaaaacccttactccgccaaagtacaccctcatacccattgcgtatggctataaacacacaaacgccagtttcctagattcccagaactcaataaatataatggcacataatcaaccaatgcactcgtcaaatccacacggtaggcctatgttctgtctcattatattcccttgtcacatatatatattggcacgccaatcataatattgttttcctttacacaacactttgtgcaaatacccctggatatcgagcaccccctaaccacaccgatcagcctaacaagtgactccaatcagagacgtaaccagcgagttaccatcattatatgcaccatccttgccgtaacaggtcaatgcatcgctagactcctcgagaactattacctcctccacaaaaaccttgacccacgccgaggtatcttgactcaaacacttctccaaggtcacagattccccatccttcttttccctttccttcttcacttcctcatcaagaaacaaaaaccaaactctcattttcttccgttgaaaacctcccttcaagcaccttagccct

SEQ ID NO: 71336 - DNA, 410 bp, Arabidopsis thaliana landsberg
aaaaggcaagaaaatttaaggcaaaatatagtataatgtataaatataaccagttcactggcccccctggtaagggtattcggcgctagagaaaacatgatctgttgattccctttcccgaaaaaactgcaatacattccatgacagttcccgatcaattcccatataaaaaagatagaagccgtcagggttattccaacccattgtcagcaggccctctgaaaaatgcccactccctattacctgccctcccatgcatcgagacttcgactcgtgaggcttaaaccatccccaaatcgacaattatgacaaaacatatgagccccgttttctccccttggcagactgtaatgcaaaaagaatatgttattgagaccagtgcacatgacatcctctctgggtcacacact

SEQ ID NO: 71337 - DNA, 431 bp, Arabidopsis thaliana landsberg
ctggtttaaggatcacctcatgttctttctgccgaattattgatataaatatgattgtctttatacaaaatgcaaaagatcttgaacctacttaacaggaccatgactaccagattagcataatttttttattaacaataacaacatacaatatgcggatttgaatccatattgtgacacaccaacatcactagcaaaaactactacatgtcatggtcgatactaacacatgggtatatgtaaaatttaccatcttatacatctgtatgtaaatattacctttaactctgcgagaactttagggttttccaataggaattttacagccaagcaaatcgcctttgaggtggtatcttgagtgacacatgaaagggtaaagaagagggttataattgcattttcgttcaataactctgctgctttctctgact

SEQ ID NO: 71338 - DNA, 3809 bp, Arabidopsis thaliana landsberg
cattacttgaaaatgtttattggttaaaagttgcttacattctaaagacaccaaatcgagtatcttctaatggacggtttaaagcagcagagagacaaagtcccaaaacctttctggtatcacacggatcaatcactccatcatcccaaagtctcgccgtcgagtagtaaggatttgcctctctctcatacgcatccaccgttttcttcttgaacgcttattactcttcctcagtccactgcatcacaaagaaaaacgcaaattcatcaatgttgaacaaacagagttgaaatcggtttagagaatgttttattcagtaccttgattccttgtctcttcttggtagccctttcaatctgagttaaaacacctgcagcctgcaaagttttcgccaagccaataacaacgtcaaacaaaaccaaactgaattttgttctgctacactaagattataaacacattttgattcagtttggtttcggtttaaacatttcggtgcattctggtttacctgagcgcctcccatgatgccaattctggcgtttggccaaatgaacataaaatctggactgtatgcacgcccacacattgcatagtttccagcaccaaagcttgcacccgttatgattgtaatctttggtacctgaatgaagacccgagcttagaatctggcttatcctaatcaaatctctcagactcttaaccaagaattaaacataccttagcacaggatactgccatcaccattttcgctccagcttttgcaatgccgttggcctcagctctagaacccacctataagcaaaaacggagcaagtaagatagatagagacactcttatatagccaaatgtgagaacacaacacaaacactacaattaccataaagcctgtgatgttttggaggaaaacaagaggaattttacgttgagaacataattcgatgaagtgagctccttttagtgcagattcattgaacagtatgccattgttcccgataatacccaccgtctgaccataaattctagcaaaaccagtcacaagcgtctgccaaaaagaagttccacataagaaagtaaaaaggtaacatttggatacaaaataaggcgaataacattatctcacagtgccgtattgtttcttgaactcgtcaaattcacttccatcaacaatccgggcaataatagaccgcacatcaaattgctgtttgtgatctactggagcaatggagcgaagctcgtttatgtcatagagcggttccttgtatacaagatttttgcttccaaatgttccttccatcccttgttttgcagccatgtgcaaattcttgacaatgtttcttccaatagcgaggccatgtagctcgtctgcaagcttagagcatcttaaggtctaaactctaaaacacgattattgttttcatattaaattgcagaaagagatgaatatatgtaccttgagcaaaataatctgacacaccggacacagtacagtgaacagtggcgcctcctaaatcctcagctgaaacttcttctcctgtagcagcctgttcaaaagctttttcatttagcgttagattctcaagaaactacttaagactagaacgagagagagagtgagagaaagtaacttgagaaaattgaccttgacaagtggcggtcctgccaaaaatatggtaccattccctttgaccattacactttcatcagccatggcaggaatgtaagcaccaccagcagtgcaggagcctaaaacaatggcgatttgtggaattccatcagatgacataaccgattcgttgtagaaaaccctaccaaaattctccttgtcagggaaaacctcagcctgttttggaaggtaagcaccaccactatcaacaagatatatgcaaggaagtctgcaccgagcagcaatctcttgtgctctgagatgtttcttgatagtaatgggataatacgtccctcctttaactgtaggatcatttgccataaacatacaaatacgtccatggattggtcctatccctgtgattatcccacctgaaggtaaaggctcctcatacaattcatgtcctgcaagctgcaaacatattcatatccagtaagcagcaacatcaaacaagtttttaataaatgccaattccctaatcttcttttgttttcctaacttatgcaagtactaatcaacaataaactctagattgcaaatgtgcattaaatccaaacaaagaaacaaaacaaaacctgagagagctccaaaaaggaagaaccaggatcaagtagccgatcaatcctttctctaggcaaaagcttgtttctgcttctgttcctcttaaccgcttcctctccacctccggccaatacctacaaatctccaccgagatacacttatatcattcatctgcaaacaattaagacatcaatcgataaatgagatggctttacctttttgatatgggaacgaagctccgataagatcccttccatggcgatcgaattgctagaaaaagcctccgaatttctgtcgactccgtccggtaaaatgcccacgcagaaacccttttgtagtccccggaaagttcgaaaaggatcgggacgagaatcggttcctggtcggatccgccattgttgaatactagtaagctctttcgaagctgaaacaactcttctccccaaaatccttaacattttcgtctcactgtctctcgaaaccgatttcacttaaaagacatatttatacacactgttgtgactgactacttgattgtctgtaattcatatctcaaaccaaagagaaaagaggagataagctcaaggaaacaaaaatactatttttataaatcgttttcaaaattcgtctcatttctttaggtgagagtcgtgtgtgacaatctcacagtgaaaagcaaaaaaaatgttacattttcgacaaaaattggaggaaaaaattgaagctttatccaatcaagcaataagacaacgatacgacgacgtttttagctttctttaagaagtgtatactagtagataagacgccactcactctccgtctagcggcgggattatcagactgctgcattagctatcgtcaatggggtctttaggatattcgatttcaatgatagcttcgctgagtccaactttgatggagtcaaggcttatctcttcgatgggttgtgtctcgatgactgctgctcctagtttgtcttcagtctctgtagtttcttcttcactagggacaacaaggagggaccgaactttaaagcttagatcttccatgtctccgggtatggtaacaacgctagattccgatgttggcgtcgggtcttctgcaactactaaaaaggtttctccttttttcttgttatctataactaaaattgtccagcttgtttgtgtagagagattgagattggagataactgagaaactatgtaggtgcttgttccaattggatatgggacggaggaaatagaagctgttgtgttagttgatgttttacggcgagctggtgctgatgttactgttgcttctgtggagcagaagctagaggttgaaggatcctcagggaccagattgcttgctgatgttcttatctcgaaatgtgctgatcaagtttatgatttagttgctttgccggtaagttcctcttttgctgattcataaactataagtgaggacagtctttgaactttactttaatggttttgtgtatttgtttctggatggtctggaaatacaaattgtgaagggaggcatgcctggtgctgttaggttaagagactgtaaggtccgagaagaacataagaga

SEQ ID NO: 71339 - DNA, 4330 bp, Arabidopsis thaliana landsberg
ctttatttttgttcgtaatatgcgtaattttgattatccctatactatacacttttactctagacacatgtatattgttggccctccaacaaaataaagaaatcaagagataaaagagaagtctctccaagattatgagtgaagaagacggcggctcaatgagtgtcaaaagcagtctctcaagcttcctcaagatcttatcttcttacaattccaatgttcttttagctgctctagtcttccttctcttagtcgtcctcttcgtcttgcttctccatttctacgctcgctttttctggtctccctctcatcaagatttctccgccgccgctagacatcgccggagaagacgaagaaaccggagaagaacagtgacgacaacaagaatcataccttctctcccactcggaggttttgatgatggagtatcttctccagctgctactgcaacaagggatgacaaaggtttggattcttcagtgatttcttcaattcctctgtttgtttacgaagaaaacgaggaagaggaggatgaagaagaagagtgtgtgatatgtttggggttatgggaagctggagattttggtagaaagttgagaaattgtggacatgggtttcacgtagagtgtatagatatgtggttgtcctctcattccacgtgtcctctctgtcgatcccctgttcttgccgccgtctccgatgaagaaaatcttaagctggccgttaacgccgtcgaagaagaagcagaggttagattacaaatgtctccagcgggagaaaacgagagcaacgtctccggtgatcggagagtttcactgtctctttctgtaatggaagatgatctcaaaacaggggatgacgatggagaagaagaggttagaattgaagtgtttgatgatgatgaggagatcaacgatggaggaacaagaagtgatcggagaagatcaatgtcaatgacgtcatcagcatcgagttcgttaatgaaggatgttaagtagtagtagtagtagtagatcggagcgtaacaaagtgttcccgccgacaaggcaagattcatctaaatagaaatattattatatatagacaagtaaaaatgttgttgtgaacaattttggaaatggaatatgaataaccaaaagcctcgtgtggttaaaaaacagaaagatgtttacaaaagaggtaatctatttgattaagcttttggttgaagatttaaagctaatggaggcaaaatctaataaggtcatgtaatcttaattaaattgtaatatgtaattagatctcatataaaatatggagttgtgtgatgtttgaaagatgaaaaaagcgtagagagcgacagtgaaagaatctcagagggcaacatcacacacttctcatttggttgggttgggatcaaaagcaaactaactactgttgaacttattgttgcaaacttaaaattatgcttttgtattttccattattcttggcctcttcttctatcttccatatcatttcatattcggtaggacaccaccatgctttgcagttttgttttgaagactagtttatttcgtctacatacatcgatttagaactaaataggtatcgagaaacgagtgatcaattaagaaaaacgttaactttctaatgaccacaacatataattaacctttatgatatttctagtcttcgatcaaagtatggttttccatcaaatgagctgagaggttgttttcaaagtttactatcttgattgcttactctaacactctttgtatttttagacctaaaccctgaaatcactcatcgcatttcttccctaaggacaaaagctaaactattcacaaaagaggccaaaatcggtagaatgagtgatgaggttgattgggttcgtgccgtggcgagtcggcggacttctgaatcatagctgctgcagtgccccgaacccaatcactctataattttatcaaccaatcatgacttgccacggcactgcagcagctaaaacgttaaacggcaagcgtttcttctcttagttttataccttatcttttgtttcatttcttctggaacaatcacaaacacttttttgattatgtccgtttcgttttaccgtgaccgcgaatacaactccacgttctctaatttgtgctaaattgttttttataaaagcccaccttaaggcccatgaaaatgagatttgtatgtgatgatgacaagtttgatatagtgaagaaccaacagcacaagcttaggcccatgttaggccctatggttgatgtacaataataatgcttcgatttgtttatataaattccccagcgaatgtgtttttcttttgctccaaagacttgtctgtttttactgtttcttgtcagaaaacaaacagtcaaccgcgacatgaaccacaacgcaaccaagcaggatttgcctttgccaggtccggaattttgtgcttttcttttgctccaaacactttaacaatcataacacaacagtgggaactgtttgattgaggactctacagagttttttgtaattataacatgatggtgcatgtactaatatattgataccccattagtaagctgtagaaatagctacattatgaacctccgctacttttccttttgcgccgcttttctctctttttttgtgaactgaatataaacctagcaattcgatttataccagtctggtcgagtcagttactagccacattgtcgttcagtaatcagtataagcctctcatcagttgtacttcagtctcctttcacgttctctcgaactgtgacatttgagcagtcttcacctgcaacaccaggtgatccacttgctaactggttctcactagcagaatttggataaggagaatatcgtggattggggctgcgtcgtgcattccggttctgtgcagccgttgtgcttctggttgtcttggcacgagcctttcttccctgttaggtggtttccaaaaaaaaaaaaaaagtaaggactagaggttcaatgaaacaacacattctggaatactatctgacagagataaggaggcatgcaagcaataagatcacctttcccatgcatttttccagatgaggagcaaaccttcctgcaacaatttgtcgcccacagttcatgcaattgaacacttcactagctacaggagggtgagtctgcccaaatatatcaacaacatatttggtgttggtttcgaggttgttgctaggatcagcgatcttcgcacgcgcttccactgacaatctcaactcttcttctactatatccaaatcacgatcaagtcctagtcgtgctacccgatgacactcagatgctacatcagctatcaccgaatccacaagatcaagaaaaatttgggacgaaagctgcaagcaaagttcaagagcaaagaaacgtaagtctaacttagtttccactaggcagttactttaacaaggaggagaaatcttaatagttttacatagaacgagaatgtggagcatataaacagtaattgaattcattatgagatgagactaaatgaacaaatacctgagcatgggaagatttattatcctctgcgccagacattggaatcctctaaatacgagattgctcaacaaaatgtctgcgagaaaatcaaaaccaaatcgtaaagagagatttccatcaccatcaggagccctagaaaaagcgaatttctccagaaatcaaaaaagtcgatcatcactatctaacagattcgttttggagtttctgtgataggaaactctactactcattcctcacaactttactgtttcaggttccaaatcaaatcatccaataaaacaaacccagtctacaagcatagatacagaaacgaaatcgccgtagaatcagaaagcttacactgtagagccgagtcgcgacggtgaacggaggagggagagagagttttttctctctcgatctgttgaatttaacatcggcgaagaaaccaccaatcatgacttgccacggcacccaggccaagctaaaatattaaacggcaacggcaagcgtttctttacttaatcatataaacgacacggttttccttctcaccgtcacctcgaatagaaagaaaacgacactccacgtcgtctaatttctgttatgatttttttattaaaagcccatctcatggcccattcaaatctcttttttttttttgcagcacccatgcaaaatctcagtagagcacacctcgattatagcttcttcttctagtttggcacaattgctaattagtttcttctgaaaatgtctctttcagaaccattcaattaatacaagcataccacgttttcttctatttagagaatgc

SEQ ID NO: 71340 - DNA, 584 bp, Arabidopsis thaliana landsberg
  unsure (1)..(584): unsure at all n locations
tcggtccgcaacgagttggtcaccgaccaggcggcagttttgtacgcgccgtaggcgccggcaccggcgagccgggacagcaccgagtgcatgttgaccagagctccgccaccgttggccgccagcaccggggcgaacgcgcgcgcaacccgtagtgccccgaacacgttgacgtcgaaggtgtcggaaatgtcgtcaaaggaaccggtcaacagcgaaccgggcagcagaatgccggcgttgttgaacacgatctcggcgtcgccggcgccgcgagccagcgcgtcgatcgatgcgggggagcgcaccttcgagttcacgggtcaccaccgaccggcgagcatcggtgaacgccgagcgctgcggtcgagtacaccttggccgcgccgcgggccagtacctcgtgaccagtgccgcgcccagccgtcgccgtccgacggtgaccaccaccaccttgcctgttatcgccaccatttcaactccccttccatctgaatnacgatcccgttagtgagatagaagcacgattatctggataacgcaatcattagtcacgtatgctaggtcacatgaagttcgagccc

SEQ ID NO: 71341 - DNA, 606 bp, Arabidopsis thaliana landsberg
  unsure (1)..(606): unsure at all n locations
ttaaatcacttgcatcttataactcgtttttatttcgttctaaaatgttgtatgtttttggaatcttaaggatgaaatggagacatgttcaatatcggtacgtaacacaaccgactaacattaagtcatataggaccgcatttcaaatcaatcatcacaacgggagaagaataatccaattcatattggtctttggttcgaattggtgtaagttataacttataagtttataacgcaacatttaatattttgcataaaatgacgttaatctaatacctgtttagtataatttaataatcaaccgacgttagatcaaaagttaggaaacannnnnnnnnnnnnnnnnnnnnnnnnnnnnnnnnnnnnnnnnnnnnnnnatatgttatatggcttatttctttcaaaacctcttgattatacaagtgtgtgtgcctagatattcttcccagtgagagtttaacaaaannnnnnnnnnnnnnnnnnnnnnnnnnnnnnnnnnnnggtcgatcgatgccaaaagaatttcttaggacacagaaattgagttttaagtttgcattattttaacgaatatctggtagtctttttatttaattgctgtaatag

SEQ ID NO: 71342 - DNA, 648 bp, Arabidopsis thaliana landsberg
ttattggaggaatactatcccatcagaacagccagattgcataagttgtaaagcttttgctatctgtcagaaaattattagtagccaacaaagcagcaagaaaatcaatcataagagaaacaagaaaacttatgtctaattctcgtaagagtattatgactcgacttacaagttaagtaaatcatcattacaattgggcctactttcgcactgcgtaatttcgaaagaattaatacacaattgacatggtggattttgattctaatcgtcatgacatatactttcgcggtatagctacgtttctttaatcgctatccatatcggcatatcgctatatagtacaaactataccattgcaatacaagatatacgggtttaacaatcacaccaatcataaagtgatatcaacgttactaaaacaatattctcagctatttcacattgctagcttaacgatgagagatgtaacagtgctacaattgttcgacgatctattagattatcaacacttgtataatcaactttagtctgaacaatcgtagtaaaaccatggtataaaaaatacgactcctaaataatcaactttagtctttagtcatactataaacactaatcctcaacttgtagacgtatgtatcctaaattcct

SEQ ID NO: 71343 - DNA, 155 bp, Arabidopsis thaliana landsberg
actatgatggatgtagctaccctataccattcccctccttagatagttacatacacgaaaagactacttacaagaggctgatatggcgagttatgtgcggaaaactcaagttacaagaaatcgccaaaccattcgccttcccaagatcacacatg

SEQ ID NO: 71344 - DNA, 338 bp, Arabidopsis thaliana landsberg
gtacgacaaggactcggtgatggaggtagacaaatggggtttctaccactgcaacggcagcgatcccattacagcctttgacaatggaaacagcacattcgaccttgatcgtcctggtctcttctacttcatcagcggctccaaccagcactgcaccagcggccagcgtctcatcgtagaagtcatgcatatccaccaacaccatgaccatgacgcttccatgcctccatccatgtcgcctctttctaattctgcctctccctacgcatccgcatccgcatcttctgctgcctcctccctgcctacggcttgtcttcttattcctcttttcttaacca

SEQ ID NO: 71345 - DNA, 464 bp, Arabidopsis thaliana landsberg
gggtttttaccgccaatcgtggcgttggtggtggtgccggtcacgttgttgctggcattgatggtcaacagcgggaacaggctggttgggccgctgacgctgctgtggccatggtcagacaccaccacgatgttggtcgtgctgtccatgttgttggctttcagtgcagccatcagttcacccaggcgtgcgtcctgtgactgcaggcctttgtggtagttggctgaaccagggccatagccgtgttcttcgttgtcgggggtgcggaaccagatgacggacaggtccggctttttcttgggcaaaatgtaggacgtgtacacattcagcaggtatttgttggaggcgtcttcaggcgcaccttgtgtgctgtctgtcgaatcacgcgctgaaactgtaagcacgccgtttggatcgtaattggtgatcgggaaggtcaaatagccggaacgtgccgaggggtc

SEQ ID NO: 71346 - DNA, 261 bp, Arabidopsis thaliana landsberg
  unsure (1)..(261): unsure at all n locations
cggcagtccnnnnnnnnnnnnnnnnnnnnnnnnnnncgagatgttattttagaaggcgagcgccgacctgccgggggggctatacttaacgctgctcggctgcatagagagcctgctctcggacgaggtggcggattcgatgaccggccggcggcaccgctcgaattgcgagctctaggcacaggggctggccaatatcgcctcgccgatgagcggcgggatctgaggcacaggggacatcgcgcgcaccctaaataatgt

SEQ ID NO: 71347 - DNA, 427 bp, Arabidopsis thaliana landsberg
cagctttgacgaacactaactcacatcgatccagtggggggaaatgtgcctaccatgtccatgctttacttcctaaacagcgctggcgcctataaccgaaggttattgactaatgtgagccaccctaaacctatctcacccggtatcccatagcttatatacgagactgacctggccattaacgacgacatcgtaaaggtgcagttgtgcccgacctttgccatgttgagggccaggggtgatgcaacggagggatcacctgcgtcatgcttgtacggtatctgaaacactgaacacgcttctgtcgggatcacgcatatgaaggaagctcatggtgcgcttcatatgaataatctcacgcgcatgatcaggaatctcgacgctcgggccgaaacacagctgtctcgcgatgattctaccgaaacag

SEQ ID NO: 71348 - DNA, 519 bp, Arabidopsis thaliana landsberg
  unsure (1)..(519): unsure at all n locations
ggcgcgggcgcgcgacttcaccgtttcgggacgcgcctgcacgatgtacatgcttgccggtgcgtccgtccttgggccattggatgtccatcggacggccgtaatgttcctcgatggtgagcgcctgtcgggccaggttttcnnnnnnnnnnnnnnnnnnnnagaactggttgcgcagttcgcgcggcgtctcctcgatgcgcacgcgctcgccgggggcgtccgaatacaccatgcgctgctgcttggcgccgatctggcggcgcagcacggcgggcttgccgtcgcgcagggtaggcttgaacacgtagaactcgtccgggttgacggcgccttgcaccaccatttcgcccagcccgtagctgccggtcacgaacaccacgtcgcggaagcccgactcggtatccagcgtgaacagcacgccggacgcgcccagatccgagcgcaccatcagctgcacgccggccgacaagaacacgtcctcgtgcttgagccgntgtgcacgcggtaggcgatggc

SEQ ID NO: 71349 - DNA, 533 bp, Arabidopsis thaliana landsberg
agtttattcctgctgataattaacgttcgttgtgttattctacatttatatgaatagggaattttctgggggcgggtgtgtaacattcaattgcgcaacaaatgtacaaaagcccacttgccctttgtaatctctcttgaattttgatcgaccctggattttgatgaactaaattcctaaaaccatttgtgtttaataaataattattctgaaaatatatcagccattgacgtagtgacacgtgtaagtgtggaaattggacaacacactttttaacttttttttgatgtttgtgaatttcattgactctaattatgattacaacgcagcattctgacggtttgctgcctcttacagctagaccaccactaccttttcctaaacgaaaaacaagagattacatttttcatttttaaaaaaaaattgtctctgattcatataacctaacaaagatgagcatgagaaacgtctctacctaagtctattcctaataaatgacctggaatgcaatagctacttaaaggctatgattg

SEQ ID NO: 71350 - DNA, 583 bp, Arabidopsis thaliana landsberg
  unsure (1)..(583): unsure at all n locations
atcgctttctgcacttctcgcacatcgccttatcaccgggtcgttcatgtccatcttgctcattttcatgtctttcatcttcgagcagtcggccggggcggcgccttcttgcttgtgcatcttcgggtcatgggcgagcgccggcagcgcgaacgcagcgagtacgaacggaacggtgagcttgagcgagttcttcagggtcgtgttcatcgtaaatctcctatcagtgctgatattgggtgtacgccgcgcaatgtcgtcgtgccgccgcgcggcgtggcggcggcccttgcagtcttcagtttgcattttcatgtcgtgtgctcagagccagatgcgcagacccgccagcaggcggacatcgtccgcgtcctcgcccgcgtcgcggcggagatcggcggtgttgccaactgcacgttcgtaatccacaccgaggtaaggtgcgaactggcgggtgaactcgtagcgcaggcgcaggccggcttcgaacgtgctcaatcccgatccagtgccacgagccggatcggtcctgccgtaggcatccacctncagccgctgctgcagaatcaggcggatggtgagc

SEQ ID NO: 71351 - DNA, 290 bp, Arabidopsis thaliana landsberg
gctttcgcatgaaacagactcttgtgaaccactgtcctttcttaaatggagactgaaaaaagcggacgtgctatagacccttactgatcatatccgattgaccacacactcactgatgcgctcataatgatactctgactccatcccacgccatagagcatcaatgtgatccaagatgttgatggtggagataatttgtaccccaacaacccattcccaagttctaatcgcctatggggttgggacgcttactgccattatgctgattacgaaaggcctatggttctaac

SEQ ID NO: 71352 - DNA, 302 bp, Arabidopsis thaliana landsberg
  unsure (1)..(302): unsure at all n locations
tcaaaaaacctttgaatttttgttttcgagatatcttttcttttgttccattccatgaggcttctatgttttgtgttattcttcccttgatttatgttgcttgtgtcggaagatttctgtttcatcttgttccaaacttcatctcagatctcgagatcttctgtatctctgtatatcttccatgtttcaaactaaaatagattattttnatttggtgggaatgtattagtacttaatttatttatttttcctgaaaatacagaagctattaccgttgcaccacagtgggttgcggagtgaag

SEQ ID NO: 71353 - DNA, 526 bp, Arabidopsis thaliana landsberg
  unsure (1)..(526): unsure at all n locations
cttggggatatttatgctgctgttcatacctctgaacaagctttcatcacttgaagaagcaattgttcaaaatctgttagcaacctttctgcttgtaagtctcttatcaactgatttctccacaatggatccctctttgatctgatatcatatttccccttttttacaggcaaaccttgttacaggaatggtgaacctcaccgtagataccatctttgcttctccattctcttctcttctgatattaaccgcttacgcctttgctttatctgctattatcggaaccattcatttctccggtttccggttaaagttctggtaaaaaaaaatagctgacactagctttggattctgatatgattgtgtggcatatgagcggagaagttaaagacagttntgtgaagtatgaatctttcttctgtgtatgaaagctttgccgtgatgagtatttttttcacataaaagtgtcgacttttattttatcgcaataagacttaccaagaactcctcagggtagtttttgatt

SEQ ID NO: 71354 - DNA, 592 bp, Arabidopsis thaliana landsberg
atccagggccgctttgacctgcgccgccgcatgggtaagcacctgaaaatcaggattggtggccgccccgttcatgtatcttttatgcgtaaataaattagccgttccccagagcaattttacaccgctttcctgctgcttttgccccgcatactccaccatcgcctgcaggcgccggtcattttctgctatatcgttgccatagtccaccaggtccacatcgtggaaacaataaaacgggatgcccatcttggtgatgaattcaaaagcagcatccattttgtctttggctctctccaccgcatcctgtttttcattccatgggaattcatgcgtgggccctccgaacggatcggaacctgtgttgcagaaagaatgccagtaagcacaggcaaagggcaaatgctccttcatggccttgccgcccacaattttattttcatcataccagcgaaaagccagcaggttatcactctcaggcccctcatattttatctgcccgattcctttgaaaaattcttgttctccttttactacgttcatgattatttatttttaattaagcgaataacgaaataaaagttctataaac

SEQ ID NO: 71355 - DNA, 564 bp, Arabidopsis thaliana landsberg
  unsure (1)..(564): unsure at all n locations
tggccttcaatcctttttgtttagcttaggctattaaaaaggtttaaagttgtttgcctttgatttgtgggacaacccgtacgtgggtactggggattaaccggatattgccggtttggtagtgctggtcaaccggattataccccgttataaaatccgtgcccctatcgatcgcattccctgttgttatggacggacacaccccttatttaattatcgtattaagtctgattgagatagttaattacttatattctccatgatttagattactgtttcgaataatttagattatgtagtatggaggaatgatttgcgtattttacactgagtattgcatcaaacattattgtggaattcaaattttaaaccctatgtatttaacttaattaaacattaaatcattatgaaaccaatatatatattttagtaatatatataagttaattactccttatcatctgacgaccaaatgtctcgaatataatctgttgtcatactcgtactaactacactgcaattataatggatactngatgaataataacaattcaacaagtgaga

SEQ ID NO: 71356 - DNA, 867 bp, Arabidopsis thaliana landsberg
gatccgtctgctgattaaccaaacaaggagaagatgctcaatatatcatgacaccgaaatcgttccaatgctgtggtagtgccagagtgcatcatcgacgattgatcagcgattgctggctcctcagtcaggacgacgcacgagtgaggattccacacgttggcaaccgtctttatatcccatctcggaggacgtcggggagagtgatcgctcaacggccaaggtctcagtcgtacgtgggaaatcaaagaccaaaaagttggttttattcagctacaaaatcaagagagcctggttagtcctcacgtatatattagatggtttccgtctatctttttattattttcataaatttcatattagctggttagaaaaaataatacatatgttagatgtctttctattaaaattatagacattgtctttgctggatttactaaatatattttgttgaatttgtctaacaggaacattgcaatgtcaacgaatttaagagcctcgccggggttgtctccttgtccggttatgtgtcgaactgtataattttcttcccttatatatgcattgcgaaagaaaattgcatatgatgtaaattattatttctctaaattttctttcaaatcgtaaaaaaaggaattggatatgcgattatccattttcatgttgctgagcgtgtttgaagttaaaaagtttagtgacagcctagtgcaaactaaacaataattcttgaagtgggttatacataaaccattaatacttgttggtttatctgtttttgatctgacacaacaacatcttggtatcctttatgcgcgttcaaaaaattttccctataaaccaatcggtaccgaaaatacccgtgctttt

SEQ ID NO: 71357 - DNA, 480 bp, Arabidopsis thaliana landsberg
  unsure (1)..(480): unsure at all n locations
cggttatgatgtanacataagaactttaaaatatacacaccgtaaaatcgtatttaagctaaatcttgctggagtaatactatgttaatcaaaccattatatggacagcttgtttgatcaatctttgaccatgatagntgtcaatccccaatgatcctgtagaggctaattagcaattccttaatcttttattgtccagatttatttatttatgttcaattaccggtcgaattgttttcttttctgactcatatttagtgtttttagtgtttttgaactcaaattactncgccgattttttagtgtttatagaattagctcatagatctgaactcatatttagtngttttcttttcttttaaattcaaaaagacatattttattttatgagaatactaannaccatacaatgtacatatgatatcccttttttttataaaggaaaatatccatgaaaaaatagaaaatacaaaagatggt

SEQ ID NO: 71358 - DNA, 524 bp, Arabidopsis thaliana landsberg
cggtggcgaccttgacgccgtcgcggtacccgtcgatgcggagcccgggcagcgccgacccgtcgaccgcgctgaagtccaccgtcgagggcgggtacgggaggctcccgtagtccgccgtgtccggcgtgaccgtggcgagcaggtcgcctccgacgtagaccttcagctcgtccaggttggacgcgatcagcgccggtgccaggctcgtgaccgggctttgggggttgaaatcccagtagaacgccggggcgatgaccggcgtcaccgccgggtcggcctgcgcccggtagacggccgcgccgggcttcggcacgcggaagaggtccacgacgcccgtgtacttcacgccctggaactggttgccgttgccggacgggtagtcgaatccggaccacgcgaggcagccgcaataagcgtcctgcgaataggagatgttctgcacgatggcgtgcgcgatcgcctcgccctgctggacgaactgggtgtcggtccgccggtagtagatcgccgggccggacagg

SEQ ID NO: 71359 - DNA, 488 bp, Arabidopsis thaliana landsberg
tttgatgcttattaaaggaagatcgggtgctatattactgattaggtttcactgtttatgaatgttggcgaccatattgtttgtgaggctaaaagcaacagataacatgcacccgtgcacatgcgtggtaggtatccttattttttctgcattagaggttacgtaaaacaacaacaattaatatttctcaaatggtttactttaaaaaaaatcatatattttatcttttaattattgctattataatttacatagctccacagaagaacgattttatcaaatatttgatatgttaatgtaacattaagttgtattccactcttgccagctaattatcatcagggtatatctatgccaagacttggcagctcgcaccatcccataagaaagaaaaaacattttgagattataataaagtgatttataaaatgatgtttattacattccctaaatgaggtgaactcgacatgttatatattccgaaagac

SEQ ID NO: 71360 - DNA, 604 bp, Arabidopsis thaliana landsberg
  unsure (1)..(604): unsure at all n locations
cggatatcgatgttcctgaatgaaatggtgcagccatccggggcaaaccattttaccagttgcccggggtcagtccatgcagcaaataccctttcgcgtgctgcatcgaacacatgtgtaatgcgtacctcatcgggatggatatcaatgtttttttctgccatactttttgtgttttaaggtggcggtttcctgcaggtgtttctccagcgccaggaacctgccgttccagtgtttcctgtattgttctgcccatgatactacttcgttcagtcggtcgagtttcgcttcgcagaacctttcgcgtccctgcnnnnnnnnnnnnnnnnnnccgcattcggtcaatacttttacatgcagcgatactgcctgccgggtcatatcaaattcccccgcaatagcattcaggttcatcgaaccgccggccagtaatcctatgatctgcctgcgggtagggtcggctatggcgtgaaaaacatctctcctggtttccatgttatgcaagtaagtgcttgcaaatatatgtgcaagtatttgcttgcgcaaataaaattgcaaattgcagatgggagaatgcagagtgaggatgggcagggcttttaac

SEQ ID NO: 71361 - DNA, 613 bp, Arabidopsis thaliana landsberg
gctctcaggatctccgtgccgatcgacagcgcccccaccgggttcatgtaaagcggcgtcgccggctgcccgcgccgcccgcgcaacacctcgccgcgcgtcacgagatcgcgctgttcgagatcggtgagcaccgccgacacggtctgcggcgcaagatcggtgacgcgcgcgagctcggcattggagatgcccggctgcagcgaaatcacactcaagattgcccgctgattggtctgacgcacatgcgacggctgtatgccgcgccctacgacgacaacgtcgcgcgggcggttggtaatgtcagacaatgattatcccccaagagcgcagtcggcctcaatgcgcttgccgatcgcatcatcgactatccacagcttagagctaaaatcaatactttggttggtgtcgggacatcgaccgcccaaactctgttcaccgacgatcgcgcaaagttgtcgcgcggtcgaagacagcacgcgcggtgtcttgccacttcggcgccacgtaggtttcccgaatacgggactcagcgtccgcaatcgcctgcggatgatcaaaatagtaatgcaggcgctccgcccactggggcacgctcaggggatcgacatac

SEQ ID NO: 71362 - DNA, 422 bp, Arabidopsis thaliana landsberg
  unsure (1)..(422): unsure at all n locations
nnnnnnnnnnnnnnnnnnnnnnnnnnnnnnnnnnnnnnnnnnnnnnnnnnnnnnnnnnnnnnnnnnnnnnnnnnnnnnnnnnnnnnnnnnnnnnnnnnnnnnnnnnnnnnnnnnnnnnnnnnnnnnnnnnnnnnnnnnnnnnnnnnnnnnnnnnnnnnnnnnnnnnnnnnnnnnnnnnnnnnnnnnnnnnnnnnnnnnnnnnnnnnnnnnnnnnnnnnnnnnnnnnnnnnnnnnnnnnnnnnnnnnnnnnnnnnnnnnnnnnnnnnnnnnnnnnnncaacgacgctaagagaaggggaaagcgtaatggtctctcttccgataactgggtgactgactttggtgtgctcggtcgagtagcacatgccaactgtgacctctcaactaatagccggtacactgatatacacataatcgggggat

SEQ ID NO: 71363 - DNA, 310 bp, Arabidopsis thaliana landsberg
  unsure (1)..(310): unsure at all n locations
ttaggaaacaggggagctggagcagggacacagacaaacccccgacgaagcgaagcngcngcnccaacaaaaagncaaacagggggncgaagcaacaangaggccggaccagcaagacgcgngcaccagaaccacgaacacgagcanncccgaagaacagggacagggaacgaagganaccacgggggaagacacggccacacacagagaganggcgacaggcaagcagcgagggggaacaagccgaagagacaaggaaaacgananccanancaaggaagaacccccaagacgnangacagaagggagg

SEQ ID NO: 71364 - DNA, 508 bp, Arabidopsis thaliana landsberg
  unsure (1)..(508): unsure at all n locations
tgctcgtccatgtgctctangagacatcgccagggcaccggcggtggacatgttctccagggccacgcccgccgagtcaggggcgggcggcggctgcgccgtgacctcgtccagcggcgccgtgcgcgggcggctgccggccctgcgcaggtggtccagggcgcggtggcgggctatggtcgcggcccaggcgcggaaggccgtgccgtccccgctgaacgacgccaggtcgcgcactatgtcgtgccaggcttcggcggccacgtcgtccgcgtcgttgccgaccagcccgcgggcgtagccgagcagccggggctgcacgctccggtagacgacggcgaaggcgttctcgtcgcccgcgcgggcgcgcaggagtgccgcgctcagctccccgtcctgcgcccgcgtacgcccgcgcgccgnccgcctgtccacgccgccctcttcgtgtcccgcggcaccggtcggtgtgcccgtttcccgggggcggaggtgtccttggaccggc

SEQ ID NO: 71365 - DNA, 481 bp, Arabidopsis thaliana landsberg
tgtaaggtcataaaaagaccagattttatcgcgctaaagtaggaatggtggacgccagttcttttccaggattttattaatatcagcatgccgacgtgcttgtgtatcggcataataaactttctcgggcagtttctgaacctccagtaagttaaaagcaaattttgatgactgattgacaattaatggagttgctgttaaagtatgagggtctacttcctctaacctcctgtaaatcttaacctcaaagctaccttcatcaaaagtaggcccaaatgttatagaagatgagttaagcgtcacttgtgtaaggacatccgataatcccgagccctccttatccattgctccagagccataaaataagtctgctaatactggatttctgtatccttttataccttttttaccttttcttatatcatcctcaagtgtctcagatcccaattgccgctttacctcttcacaaggcctcctgggc

SEQ ID NO: 71366 - DNA, 512 bp, Arabidopsis thaliana landsberg
gctccacttcgatctggaacctggtcagcatacccggtaatccctgcaccgaaaattttgctccctttatccggttttgcccggggtcgaattggtaatgataggctgtacgcaggtctgctttttccaggacagtttgcacaaatgaagcattctggaggtcgcaccgctcaaatacagcttctgaaaggtcggcctcttccaggttcacttcctgcatggaacactgagcaaagcgggtctttttcattttcttttgaaaaaaagaagcatagtccagctggcaatcgttgaaagagaccgcaaacaggaaatgatcgcttacgctgaaatcgagccccatgagcttacagcccgaaaagcgaatattcttgagtttggcatgcaacaaattggccagggcaaagttacaatcattaaaggtgcagtcggtcaggtcccagttgctcagcacggccgatgtaaaattgcagctgttgaaagtacaggccaggaactccgttttgggcagc

SEQ ID NO: 71367 - DNA, 110 bp, Arabidopsis thaliana landsberg
acgtaagcaaaattaagagtaacgcaagtatgaattttcatgtcagatcgatggaagcactcaattatgcttttaaaaaaagctttaccatatctctgagtgtgatgacc

SEQ ID NO: 71368 - DNA, 443 bp, Arabidopsis thaliana landsberg
ctttgtaaattacagctaatgcacacatattcttttccattactatctcactcactaaagtatcatctgcttctatttccttattcaaataaagataatatttgtttgcttccttaatattgttctctatgcggtctatctttctttgtgaaccagcaagcaccgccaacatatcatcactttctgaccagtagataggtgtctacctttcttaataactactgcgagctcacagaggtcatgtcttggttgatttaccttcgctataacatcctcacttattagttcataagaagccattttttatttgagagataaggtaagtgaagaatatgtgtgcacttgctagagaggtgatgggtgctgggtggtaactcagggcagaagattaaacatatatatagtggtggggattgacttatgaggcggaagtattttttaaa

SEQ ID NO: 71369 - DNA, 591 bp, Arabidopsis thaliana landsberg
  unsure (1)..(591): unsure at all n locations
nnnnnnnnnnnnnnnnnnnnnnnnnnnnnnnnnnnnnnnnnnnnnnnnnnnnnnnnnnnnnnnnnnnnnnnnnnnnnnnnnnnnnnnnnnnnnnnnnnnnnnnnnnnnnnnnnnnnnnnnnnnnnnnnnnnnnnnnnnnnnnnnnnnnnnnnnnnnnnnnnnnnnnnnnnnnnnnnnnnnnnnnnnnnnnnnnnnnnnnnnnnnnnnnnnnnnnnnnnnnnnnnnnnnnnnnnnnnnnnnnnnnnnnnnnnnnnnnnnnnnnnnnnnnnnnnnnnnnnnnnnnnnnnnnnnnnnnnnnnnnnnnnnnnnnnnnnnnnnnnnnnnnnnnnnnnnnnnnnnnnnnnnnnnnnnnnnnnnnnnnnnnnnnnnnnnnnnnnnnnnnnnnnnnnnnnnnnnnnnnnnnnnnnnnnnnnnnnnnnnnnnnnnnnnnnnnnnccacaagggggggggggggttttttttttttttgttgggaaaaaaccccccgcccaccaaaaaaaggcggctctacttattgtggggggggcccccccttttttttttaataacacaatgaggggggggggcctcttttttttttttttttttttt

SEQ ID NO: 71370 - DNA, 486 bp, Arabidopsis thaliana landsberg
atctacatcatgtttttaggttttgacttcatcagcattttgtttaggacagagtttgtttcttcgttcgcatgcatacatttttattttataaagtattttcttctaaagctccttattggatggattttaaattgactttgttcaaaataaacatcaacaggcccaactctagcccaatcttctctgccaatgtaatctcaaaaacttctcttttgataagacttacaagagaatccaaaacacaccatttttgtgtgtgacaatggaaacctaaatcatgaagagacttcaaatagaaacgttataacatcaactagcgatattaaaataggcactaagcccgcgggtctaaacgggcttcaaccgataattattgaaaagttgtctacctaataaggaatcaaggatcctaaatttgatttctatgctctaattgtaaggaatcgatggtagagcttatctttgcaattacaagtcacaatg

SEQ ID NO: 71371 - DNA, 170 bp, Arabidopsis thaliana landsberg
gagcaagcatgagggctactggcctacttatgagaacaacaaggcttacgggatgtaacccttggagacatggaggtcggatctttatggatggacagcgcaggggcacaacgatcgttgctgcttgaactctaataacactaatgcagagcttaccctcaggaaacagg

SEQ ID NO: 71372 - DNA, 490 bp, Arabidopsis thaliana landsberg
  unsure (1)..(490): unsure at all n locations
atggtttccaggtggctggataaacctgcactgggacaactgatctggatgctcgcgctgctgatgatcattttctccgtgctgggagcagggctggaacatattgccgtacagaagatcgccaccggcgccaatcctgcacaactgctgcctccctacctgatgcatgtggttacggccatgctgctgttcctggtggtatgcacaattgttgtttgtattaccggaattgatgcggccggtatgcagctctttgtactgctggctgcggcgcaatgcctgctgttcctggccaatcctttcaggcctgtggccaatggcatgcaaaggttccgggtattctttatcatgtcatccgtagccaacctgctgcggccggtgctggtggcattgctggctgtatcaagaacgatatcnnnnnnnnnnnnnnnnnnnnnnnnnnnnnnctcggcgtatgctgaactgcttgtctgtattctcttataccggt

SEQ ID NO: 71373 - DNA, 620 bp, Arabidopsis thaliana landsberg
  unsure (1)..(620): unsure at all n locations
gtagtttttttattaaggcagtcattctttatcgaaagttcttgtatagatttaagattggtgtgttgtgtaggaagatccattaggagtttgggaatttagaagtaagagtagcagtgtggaagctgattgctgcttaggtggtggatgcaaaggttatatgtttgcgttnnnnnnnnnnnnnnnnnnnnnnnnnnnnnnnnnnnnnnnnnnnnnnnnnnnnnnnnnnnnnnnnnnnnnnnnnnnnnnnnnnnnnnnnnnnnnnnnnnnnagatatgttgttatatgagtgagtgataatggtttgtgtaaatgccacagctgaatgtaaaagaagccttggagctgtgtcggtatgagtggatgcagagcgctcttgaagagtttctacgagtaatggcagaagaaggaagcacaaaggaagactctcttgccatttccagcatttcaaatagaagagagcgtcaaattgatcctcgctactgctttgtagtctaactagtttcgtttctctaggcgtatcaaacttctctctcattgttatatattatggaaagacttcttctgtatacaaagttaaacatgagaagcaatgctttcagaccctgtgacttgatgtg

SEQ ID NO: 71374 - DNA, 1716 bp, Arabidopsis thaliana landsberg
cctcatgcgtccaccgactatctcgtgacgctcaaacatcaggatctttgcttgatttaagccggtggaaacagagtagttacggaggaagtgagctacggatgagcctccgatcccactcccgacgatacatacggtcgctggagaatcatcctcgacgccgccggtggaatcgccggagcaaggtagaagaaccggcgatagtagagcgaacagaagggagattgctatcgggaaatctttcattttagtcaacgagttgactttatcgctctctctctcgattgtaaattatcaatgaggccttcttgggcccttatcctatcggactaactctatagtgcataaaggaaaaatattattttgttttatttatttattttgcaagtgttctaaagaaattgaattaatctcattaagctcaagatctatattctatacgatttaaacatacttatcatatagtcatatatcataagaagctaaccggatccgagtccggttttgattcaatttcaattgtgagatcaactttaaccgaattattgaagcccattaaaggcacaaatttccacaactgttcggtcagtgtctcagtgacaccaccaatagtagctaggctatatcataagagcgggaaaattcgcctactgaaaacaaaaaaacgtaattactaaccgttagggttttctttaccggcgatgtcgcgacgaggcggtggccccgtgacagtgttgaacgtggcggagaagccgtccgtggcgaagtcagtggcggggattctatcccgtggaactttccggactcgggagggtaggtctcggtacaacaaaatcttcgagttcgattacgccatcaatgggcagccgtgtcgtatgctaatgacctccgtcatcggccacctgatggagcttgagttcgccgatcgttaccgcaaatggcactcctgcgacccggcagatctgtaccaagctccggtcatgaaacacgttcccgaggtaattctattgtatgtgtgtgcacgcctaattgatttaatgtcccattgtacttgtatgcttttgtatagttctgggttgttgatttagtcattgcttctctaactaggaattgttgattgggtctgatttgttttggtaattgcaactgtataaaacgggactaggatctttgattcgcctttataatgaagttggggttttctgacttgcaagttttgtttaattctggtgttgagtgaattaggacaaaaaggatattaagaagacattggaggaggaggcaaggaaaagcgactggcttgtgctgtggcttgattgtgatagggaaggtgaaaacattgcatttgaagttgtagatgtttgcagagctgtcaagcataatctttttatacgcagggctcatttctctgcgttaattgacaggtagagattgctttacacgttattcctcatatatcttctactaagcactctatttcaaacgattgaactgattccaatgatgtaattgctagggatattcatgaagcagttcagaatcttagagatcctaatcaattgtttgctgaggctgtagatgctagacaagtgagtttcttctgaaatccctcttctgtttatgtgttagcagtatttccaaccgaatttgtattagctaatgtttttttcgaaaactttaggaaatagacctacgcattggagttcatgcaagtca

SEQ ID NO: 71375 - DNA, 1990 bp, Arabidopsis thaliana landsberg
ttttcgtaacttgattttgcatctaggtttgtgtttgtgtgtgtgtgtggatccttttgtatgttgactgatgttgattttttatgttcgtagaatacagttgataatttcttgaagtactatgaaagcttagagtcaagacctatcttcgacaatgttgaagggatgcttaaatggtcaggcttgtacaatctcacaaagctcactctacaggagaaattatctgaagctcagctttctcctttgttagtcaacgagctggttacggtaatctttcttacaatactgtccttcaaaggccattttaatctcttctttgcttatatggttcaacatataactcttctccttaacaacttttgccaattatcatcctattacaattttgagtgtgtttattgtgtttctccaggttattacaaggataaactatggacagagtgtactcatcagtgggttggcaggtgctgtctctttggcgggttcaggtggaggattatggtctgttgaaggtggaaactggcagatggctgcaaagctcattaatcattcagatgttacgttacacctgaacgagaaaattgaatccatttcatatctcgaaaaccattacgagcttaaatccactaaaggaaacagctacaagtgtgatgtcacagtagttgccacaccattagacgaagtggatattcagttctcacccacgatctcaattcctaagagagaactacaacacacgcacacgacatttgtgagggggcttttaaacccagtaagtatcaatcactgtctgtagttttaacgttatcctgatcatgattctgactcgtaactaatgtgtgatcatgttttctctatgaaaagggatactttgggatgaaatcgctttcagatgttccagctttggtgggaacccttgaagatcctctaattccattctcatgcatctcaattctaaggaaatatagtagaacagatatgacatacaagatttttacgcgacaacctgcatcagattcgttgcttgatgagctcttcaggtagttacaacacaatctctgtcagatttgaagcacatctgttcagtttcattaaaactggttcaatttctcttctttcttaaacagtaggagaaccgaaaccgttcgaatagactggggtgcatacccaaagtaccacgcgcctgaagttttcgcaccattcatattagatgaccatcacttgtactatgtgaatgcttttgaaaacgcggcaagcacaatggagacaagtgcagtggctggtgagaacattgccagactcataatttccagattcatgacaaaggaatcattatcttcctcggacaaaagaagctgtagttctggtctgcactcagactcataaacaactttggtccccacataaacaaggactattggctgtgtgtgttttgaagaagaatatgatgtttatgtatatagacacataaaacagttttgagttactgattgtgtttgttcctcgtaacctaagcttcttctttttttttatctttttcgagttcttgaatcagacattggcattagcatacaaaaacaaaaacagagaaagttaagaatcttttagtaccaagacagagacataaacagctacataagttgattcaatattagattttactacgtaaacaacagcaaagttgttgattcaatagcattttatataaataaaaaaaaactttatttagtagtgcataaatgataaagcaaattttctaattagcttttgttgattaatcgggttaataaataaatcattaatgtaaaagattttaatataaaataagaatccccaaaaagagctaaattattctgcagaagacgcgtcttctttcttcttcggtaaacttcaaatcagaagcgaagaagagatcaaatcaatctgatcgtagatgggttgtttcagttgcttcgacggacccaaaaggaacagcgtaaggaagaagaga

SEQ ID NO: 71376 - DNA, 1481 bp, Arabidopsis thaliana landsberg
  unsure (1)..(1481): unsure at all n locations
tgcaggtcgactctagaggatcccccataacattattttcataattcaaccaaaccacctacgtgattcacttttaacctgtaatctccagcataaaaacaaacagaaaacttaccttccttttaaataactcgtgtttggttcatggctgaataattcagttatgtatcatttattccattaaaggtaattaaaatgaggtctgtatagtcatatacgcatacacaatgataaataacatttaaaaagaatcaaccaacaaagttattcgatctggcaaaaaaggtcattaaaacatataataaatcccacacatgcccgcagatcattcaacctcatatcccatcaaggtttaatatatataggaatcacaggtcattttatactctcgaacatgttggtcttgattcctctttctctataaattaaaacacctgttcacatctttctcgatatgcatatatacaatgttccattcttttatttctgccgatattaaaatgaaatgttcaagacttttgggtggttttttagagatgtgatcatgacaagaagaggaattgtatgaacacaaaaatggagaaattcttgaagttggcacaatcatttgcatttgtttggggattcatcttgctggctgctctcgtgtgttgctgcatcagcactaaacctaatcgcgaaaatgatgatgatgatactggttgcgccgcctgcgacggagggcatgccggattttagtcgatgatcctctgtttctttcacttttcttttttggtcctctggtagatttgtacaacatagaatcctcatggcttatctttttcataattacacaaagcattattttgtcttctcttttaatatagaccaagtttatatttctttacgtttgcatttcatgttctagtgattaggatattgctataaacgtatacattgaatgaaaacgtcggtttattcagttatggttgcataaaatttggatttgggtttagatacatttcggtataaaaatttacaactgagtaaaaaaaaaaaaaaaaaaaaaaaaaaaaaggagtggcaacgaaacggagagagggaattaggcaaattagaagagagaagtcgtagaccatacaatttgcacacaaactatatctctccactgactccaatcatctccttcctccgctcccatctgcgtctcaatggcttccttcaattcgttccccattcccaaacaggtttgttgtctctccttacatgtacatatcaatcgtatagacacgcgtgcgtccactctcgagctgatttctctgngtgtttttatttttcggatgatagattgttggttctttttcttcgtcgtcctcctttacttctcggccacgtattttagtgcgatcgagtttaacatcgtctatgacctttaccaatagtatgctggtagcccgatgacgctctcttcttctctttcttttgattctctttgaatttaa

SEQ ID NO: 71377 - DNA, 218 bp, Arabidopsis thaliana landsberg
tactatcaaagaatcggaaaaagacagagcccacaagaagatgactgattaaacaactaaacttaaaaagcgaacgcccagaaggaaggtatggcgtgtgaacctatagacacagggggaaaacataaaagccaatcgaaaatgaaggaaaactgagcaagcagaggaagacgaaaaactgaaatacagaacagtcttggcttggcaccaatgataag

SEQ ID NO: 71378 - DNA, 747 bp, Arabidopsis thaliana landsberg
acgtgctgctgttactgcttttcacagcgttggcggtgttactctccacatacttggagtctccagtagttacttatatttttgtgtcgcgcatcgctgacgctgacgcagcgatcatgaaaaaaacatgactattgtgtacacgttccagtacactctcaagctacagtaaaacataggaacatagagataaattgatattctcataagaacgaggagatttgcttctgaattttttttattaaacattgatataatttaattatcttttgatagctttcaaaatattcttcttctttgacactccttttttggtaacaaaacaaagtacaaattacaataccataagatgaaaaaacaatttcttgtcctttgcttattttcattacaattcattgactttttattttgctgccactttggcatttgcttgttttgattacaaaccaataaaaatagttaaacatgaaacatatgaaattgatgcaaaagatggaaagataaaataagtcaattcacttagcccatccataagacacacctaatgcatttcccttcaagaagtagctggaatgcgtcgttgatctcctcgaatttcatctcatgtgtcacaaacttatccaattcaagttcattgctcaagtagcgtttaagaagaattggaatgtgtgttttagcctttaaacctccaaacaacgaacccatcagaatcttcccatggtgaagaacatcaaacgaatctaaaca

SEQ ID NO: 71379 - DNA, 673 bp, Arabidopsis thaliana landsberg
  unsure (1)..(673): unsure at all n locations
gatttctaacattttaattatataagttatagttataacatttaattaatatttcattctcaacgtactttacaattttacaaaactacatttaagaaatagcataattagtaagaagatcacaatactannnnnnnnnnnnnnnnnngttaggctgctacatagtttcgggccctgaaaaatcaaggtccaaatatcgaaaaaaaaatttgaatttttataaaaaatataaactggcaaattttttgtctttctctttcaaaattaggaaattttttttaaggggtttttcaaaatgtaaaaatttttttttttcgggaattgcaattttttttagaatttggaaaggagtttttccaagggcatttgggtgagggtaaaaatccttataattacacggccattcaccacagaaaaaaaaaaatttaaaaaattcccctctaattggggccagggaaaagggccctataaaaatattttgggcccaaaaaaggggagcccttttcaacccttttttttgggggggggatattaaaattttttctaaacgggggtttaaaaacccaccccttttttttttgtcagggaaatagccgccctattattttaggtttttggaattatcaataggggagtgcccccccctttaatttatggggggtggttttttttt

SEQ ID NO: 71380 - DNA, 247 bp, Arabidopsis thaliana landsberg
ctaacgcttcctcaaaatttcccgaagctgttaattgcacaatctacaatgaaactcaaccttttcaaattattttaaaagcagctactgcgagtaaaatcaaagttctttacaaagaatactgaaatagtgtcatattcaaccgatatattaggttaaatgaaacacatttttattttcattccccaaagaaacctattagctgttgcataaaaacatcaattttctcttgggttaaagttaaatt

SEQ ID NO: 71381 - DNA, 508 bp, Arabidopsis thaliana landsberg
gccctttggacccccgtaccgattgcgccgctgccgcctgtcaccagtgcccgtttcatgcattgcctttcgtgtgcttgatgcgttgttgttcaggtgctgccgagcgcatcggcattgaggatgacggccgccctgccctcgaccagcaggcggccggcggcgcgaatcgcaaaatcgtacaggatgctgttggcatcgccgccgaagcgcaccgcctccaccgtcaagccgccggcgatatcgtcgagccgggcaacatagagcgttgcgccgcgtacgctggccagatacccgaggcgcggacgttcggatgccggcaccgtcagcgcgccgtgcaccgccatcgcctgcgccgcgtattcgatgccgcaagcggcggccagccggccgtgcgatcgcagcggattgacgagggcgcggtggctggtggcgatgcaccgtacctgctgatgatcccaggcgtcgacgccgtcgagcaggcacatgctgccctggtgcgggatgc

SEQ ID NO: 71382 - DNA, 367 bp, Arabidopsis thaliana landsberg
  unsure (1)..(367): unsure at all n locations
cgaatcattggtnnnnnnnnnnnnnnnnnnnnnnnnnnnnnnnnnnnnnnnnnnnnnnnnnnnnnnnnnnnnnnnnnnnnnnnnnnnnnnnnnnnnnnnnnnnnnnnnnnnnnnnnnnnnnnnnnnnnnnnnnnnnnnnnnnnnnnnnnnnnnnnnnnnnnnnnnnnnnnnnnnnnnnnnnnnnnnnnnnnnnnnnnnnnnnnnnnnnnnnnnnnnnnnnnnnnnnnnnnnnnnnnnnnnnntctgacacctttagctaaaaattccgggggtctaaagggatcgtcggnnnnnnnnnnnnnnnnnnnnnnnnnnnnnnnnnnnnnnnnagtttttttttttttttcaaaaaaaattattttttttg

SEQ ID NO: 71383 - DNA, 386 bp, Arabidopsis thaliana landsberg
cgtatgtaggatacccatctagctaacttctgttttttgaaaaaatcaaacatgtggacagggatttggtcgtatatcccaaatacaaaatgcccgaaagacttaaggtaaaattgggtcgacaacgtaatggaaagtccattgtctgttcttcgcggagggctgctttgctttaacacattgctcagctggcatactgttctgcagtcttaggcacctaatctatgtgttaacaaggcatgtttaatgaccggtttaacacaatgtcatatgggcacgactcgtatgaacattacctgataagcttaataaatgaaaggagagtatgagtattacatttcggcgccttattccttttgggcatttgcttctgtttgctaccaaaa

SEQ ID NO: 71384 - DNA, 212 bp, Arabidopsis thaliana landsberg
ataccgtctgattcataattcattactggactgatttgtagaagtggcctctatattttttttggaatttacttttggtcgatattagatctaattagcctaggactaactgtattggagctatgttgctatctctagagacctttcttgtcgcacttttaatccttcttcttatatcttgcagaaaaggtggtctcatagaaaagcctggt

SEQ ID NO: 71385 - DNA, 580 bp, Arabidopsis thaliana landsberg
  unsure (1)..(580): unsure at all n locations
tccacaaaataaacaaaaaaaaagtttatacagtttaataataaattagaaaaaaagattggcacacattgcaacggataaactaaataagaacctttcattcagttttttgcctcctcgccttcttcacatgacataaacactctcttgactctcaaaatttcccccaaattcaccaagaagccctaattcctcctctccatcaattgccatttcatcacccgccactacttcttcctcttcaaaactcctcaattccttcaatttcgatagagtttttgctcactggatattgaaatgactctaatcatttcttattttctaatctttgttccgcttttcacaaatcttttgttccctctttttatcttcccaaccaccacatccaaaataatgaattagaaaattattgggaaatcgagaagatcgacctatacaaagtttgaacggtcgagatgagtaaccaatattatgaaaataatgaagatatgattatagaaaaatcaagaaggaaccaaaagatggttgattcttctataatcatatcttcgttatttctataatatcggntagtcatctc

SEQ ID NO: 71386 - DNA, 4505 bp, Arabidopsis thaliana landsberg
  unsure (1)..(4505): unsure at all n locations
tctctgttttagctcattaaaatacactctcccatgagagctgatccaatccgtgtcgtaatatgggtgccaagccgcagtacaattagatctgcaagaattgcagcagaaaagctcttaaggtaatcatcaataacacagtttcatcttctttcttggccaaaatctatcaattctctaataataaaaaccattctatgtgcaggatagttggagcaggatctgcagatccattagcttcatgctccatagtaaagaagagaatcaaaaacaagcgtccaatggtctcacacctcagaaaacctgtgagcgaccatcaaaaatttgtgagaagcacgagcatgtacccagtggagcacagtccaggacatggtcagctttgcattacaccagctgactaagaaactgcatatctaggaattgatttatcaccatacacactaaagcacaaaacaggacgtcgatacattccttcaaaaacaagtccctctgcttatgcgccattgttaggagttgaagatcatcaaggtgacagttatatgcgtaatctctgtaggttaggtttaattcttttgttatctattttccggaattttcttcaccagagatgtaggtaaaatcatagaggactgaaagagaacagagctagaaattgattatgtctaattttagtacataagcaaatgttatgttctttgttctcttttcttgcctcctctagtccatgtcttaccttgtactagtcacaaaattatattaagcagaatagtgtaaagcagttggtcctctctttgtttctactttctacgagctgcatgaagaggaaacgaattggaatctgtcagtgaaatctgagaagtcctaaaagacaaggaaaagggagcttagaaattacctgaaggatctttttgaaacagaaaggtagctgaagcaggatgtttcatctctcagcggctcgaaattccccttctatatgttcgttagaagcttggatcagttagaacttttagaggccaaacctttaattccaaatatcatctagtgcttcaatacacaaatgaatataataaactccaaccttggccagagaacatcgttaggaaccgaatagttatcagagcagcttcagcagattcttgtagaaaaaggtccaacgattctagtctacaaccatcagtctgtaaccaaacatataattaaaattaaatggatgctacaacagaagcatgactaaagagcatctctcttgcttaccaatatctcagcaatgtattgtcaggtaccaaatccagtcgtcggatttttcttgcaaggattaaaatgttttctttgagttctagaaggctccactgaagaagacccacaagccaagcttccatctgttaacaaaatttctgtatattcaccggagttgatccttcttctattcatacagagaagcaaatggattcacagcaaaattgaacaagtctgatttgctatatggcaaactgatcatgggctctcacgatgtcatcgagaataaaacaattaaccaatacactccatgtagcaatacttgggacgatccctgcacttatcatcctctcaagaagaatcactccatcctccctacaattagatctgcatagaccccaaatcacgtttgtgtaagagattacatcaggccgccactttcttcttccacatgaaactagatccaacatctgggctgccctctcagctttgccttgtttgcaatatgctaatattatcatattcatagntatctcatccggagatttaccatcgaccatcattcttcctactagctgcacagctatccccgggagacctgcattgcatgatccatgtaaaagcgtgttgtaagtcgatgagctccactccacacctctcatgaagatctctcgggttagaccataagcttcttctattcggtttgcctttgcgagcccatccagtaactcgttgtatgttacaatgttgggagggcatctgtgttgctgctccatttgtctgaacactttctcagcccagtcaagcctccctgcatcgcataaacctttgataaatgcgttaaacgttggcacagaaggagcacagttttctttggacataatctctataagagattcagcttctttaaacttggagtgcctacaaagagcttccaccatgttcgtatacactacaacatttgggcaacatccactagtcagcatcttgttccatatataaactgcgccatccaggctacctcttttggcaaaaccgttgataagtgagccataggttctgatgtttggagaacatccgatttcttccatgtgtgaaaagacagacacagccttgactatattcccatgggaacaaaacccttgtaccaaagtattatacgctacaacgttcggctgtaacccaaatcctctgatcatctggttccacaagtctagagcatcgaaggtcgtacctcttagaaaacaacccttcacaagagaactcaatgtataaatatttggatgacaccctcgtttcaacatctgcgtcagaaacgagaaagcaagctcaatctgaccagaattacaaagcacattgataagtgtagagtacgagataacattaggagatatccccttctccaccatttctctcatcagttcaaacgcccctttgtaatcatgctctttgcataacccattaatcaaagcattataaacactcacaacaggttcaaatctttccgcgagttctctaccttccttaaccaaaccaacctcacacatcgacgagatcaccgtagtataactcacagcatcaggacaacaccctttattcgacatctcaacgagcagcttcttcgcaccatctaccttattattcttacacaacgccttaagaagaacattatacgtaaacacattaggctcaaacccatctctcttcatatctctataaaccatataaatcatctgaatcctattctcaccaagtaaagtatccaaaacatgattatatatcttcacagaaggatcacacccaaactccttaatcctataaaacatctccacagctctttcagctaaacccacttgcctatatacactaataacactgataaacaaatcttcagaacaatgaaaaccttgaagtttcatttgctgcaaaagatactgaacactatcaacctgaccatccattgcaagctttctaatcattacctcgaatgttaaaggcgtgtgcttgaaaagattagaatttgcaatggatttgaagaaatgcaaagctaatggaacacatgactcttgtctcagcctctttaccacatctaattctttgatctccgcatggtttggagattctgtgaggagatgattcacattgagatttgtattgaggacaaatgggattaagggtttttgaactttcaatagcaacgaacatccttctttcaagtacatgacaacgaacaatcttctgccaaagctagggttctgaaaagtaatcgcaggtctgatgaggatgaagatgattagcaaatgaccattttaccctgagtcattaaaaagaaactgacggaaattgagggacttgttgagcaattattgtataaatactgttagtgactgcagaaacacacacgtgtcagtaagtgaacatcgctcttcttcttccttcttcgattctcctgatgacgacgattctctcttctttctctcacatccacttctgattcctccagataaacctaaatagcctaagccaaaagattcgacctttcatcttctctactagctccttacttgcctatggcggttccaatctgaaataaaaaaacttctaaaaatggcggaattgcaaccagtggatggtcagcaaacaaacggcggcgttgttactattcctgcgtcaacttcagccgaagcgacggcgattgcagccgcgggatcgaaacgattgacaagaccaagcgttagattaggcgaaatcggctgagaccagtaccagcagcagcatcatccccactcggcggcggcggcggcgtatgattcacaagggaggaaatcgaaatggacaccgacgacgacgagtggtaatagaaaagatacgagtaaatcgtcgaggactcgaaccctaacgaatttgagttctgggtatgagaatataggaaccctagatgatgaaagagaaggaaatgtggattcttttggtgttgggagttggcgggttaagaaacgggtcgggtcatcagcagcagcgaagagagttagatccaattgggtatcgaaagttggtgatggggatgagaaaattagtggaggggaagaattggaaggtgggtttagggattttagtagagaagattctgagagtccgataaaggaagagtctttggatagagatggtggtgggttttatggtagaagaaggtatgagagtaacaatagtagtggcaacagagaattcgaatcgaatatggatggaggaggaaaagaaaaggaaaagat

SEQ ID NO: 71387 - DNA, 3652 bp, Arabidopsis thaliana landsberg
atgttaatcaacgaatcacgagtgtcctgattacttgagagagcttataagaaagactttgacattgacagagaaaccatttgggatcggtggtgttcttgcgtttcctcatgatttgaacattaagacaatcttagaagagaaagtggctgtcttgcagctttattggggtgattgttcacaggagcttgtggatgatgctcactttgccggtgtcaaagttattcctcaggtaactaattttgtatgtttaccaaaaggaaggaacttgtcttatatttattgcttagttaacttttgaaaggtggggaatgtcgaagaagctagaaaggctgttgctgtaggagtagacgccattattgtccaagggcatgaagcaggtgggcatgttattggcaaggatggtctcttttcattgttgccaagagtggtggatttagttggggaacgcgatattcccgttattgctgctggaggaattgtggatggacgcggttatgttgcagctttgtcacttggggctcaaggggtctgtctaggcacaaggtgtgtgctcttcttttgttccacatgttctcaagtttgatattagctttttgttgggctgagttttttagaatcttcgttttcttagatttgtggcgactcatgaaagctatgcacacccaatatacaaaaggaagttgattgaatatgaaaaaaccgaatacacggatgtatttggaagagcaaggtggcctggtgcgcctcaacgtgttctggagacgcctttctttgatgactggaggtctcttccggctcatgagaatgaagttaaccaacctattattggacgttccatcatacatggcgttgtaagttgtgtcatttgcatatttctttttttaatgagatttctttggtcttgcactgatgattaagggagcttcacattcattataggaaaaggagataagaagattttcaggaacagtaccaaacatgacgacaacaggcgacttagagagtatggctatgtatgcaggccaaagcgtaggccttatcaaggagattttaccggctggagaggtagtgaaaagtcttgtggaagaagctcaggctctgatcctccaaaagttcaacaatgctactactacatgatgcagtcccagcctcaaatcatgagaaaacataaactttactgcttttggaatcgggatgaaaatagtctcatctaatgtaaataaggtacataaacttctgtatctctcgtgttgttttcaactagaaaaattgtgtccatcatgtgtaatccagcaatagaccttgtgtattggattaagtatacttcttatggttgtttgtttcctgtgaaactttccacacatttcatttcattttaaatttcttagcgaatcaattatttcatagctttattgctcgtaagaagagagaggctatgcaacataatcattacatgatacatacacatagaaacgtttccgagctatttgcagcatcatatgtacagcattcagagcacaacctttgttgagtacacgtcaaattcctcagatgatgttagcagtggctcctgggagatacgatattcaatcattcagaatgtaagtttcagataatacaagttgtttattaacttaccgcggatgcatcagagcttgtgtagtccccgttaaaggcgaggcgagactgggcctctcgtattgcagaacacataaggttaagcaggtggccatacgtgggtgctggtccagctgtcttcaccgcctttatgaagctataagtcatggctcctgtgttcttccccgtgaacacctgaaacagcacgaaatgatccagttaacatacagagaggtatgtgtgcttagttgcatgatgatgaatgatataatggaagcatacaggagtgtaaccactggattcatcatcgtcacaagcactgaaacagaaagctgctccaccatctgttcctttgtaagctctgactgatctatggtcttcccattcataagaaccattcctgatttttcacaaacgcaccacaagtttctttttcagattcagtctaagtagaagtgagcagaatgatttataagtttacctctccatcctgcaaatgaagggtaaatcaaggacagtcccgctgttacaggcgtcgatgacagcgtgaagcttagctccatggacgagaggcctcacgagtatccggttaatctcgtcatcaatgatttttccttctgtttcatggtctaaagggcacaaggcttcatcttgaccatcgatctcgtctccgttgtagtcattctgctgagatccatgaccagagaaatggaacactagtgagtcccttgctctgttcccttcaactaaccatctcatcgccttcctaatgtttctcttcgtcggtattctctgcgggctggcttcatcttctgcaacaataacacaacactcatcatcaggaagaaagaaacagagagttttaattagagaaatggaaaacaaacaaaaaacgaaaaacctgtgagcatgagaatagagtcaatagggaaacccatttgttgaaccaataaagatctcatggacttagcatcactgatgcaacctttcaagctataactttttcccttatagttcacgccgcataaaactgctctcttcttcccaaacggcgagggaagaggctcaagcagccgtggtggcggttgagccatcatttgttgttgttgttgttgttcatgatgttgcggttggtgttgtctaagtagctgttgaaacccatgaattatgcggtttgcaccgcgagctatgtccactagcgagtagagctgcgtgacggtgtggcaggttgagcattggacggtacgggcgtctggttgaacccacatccgtctgccgcaccggcaccgtacttctctccgactagccatgattgagctttgttttggttttctttttgcaattgcaacaaatgcatttgagtgatgagtttataaagagaatgatattattcgttcttatctacgaaaagaataaaaaatgtggaatgttgatttgtccacgttattaagcttccatgcatgttgtcatgtgaatcaattcggaaacaaaaaacttataacggaatttgattctttgaaagtttttattttattttattattgaactctgttgcgtatctttttttttcttttttcttgtcaaagtctatcgcgtatctattccactaaagtcacttccttacaattttgggttggtccattaaacttattatataagcttatcatttggaaaataataattaaaaagtatgacttttgataatatttaagcatttatatttcataacacaaacgaataattcatttttaataaaattatcttacagttaaaaggtattactaatgaacaaaataaattaagtttaaaacttaactattgcgacataaaactatctcgatgatacttcatcttcttttttttttgtgtgttcctaaaaatttatgtaatatttttttgttctaatgcaaattcatgtgattaaggtgagacgattagtgggtaaattattatgaaaataaataaaatttaccttaatttagtattccaaaaattatatacataccacgtaaataagggcacatttgtattt

SEQ ID NO: 71388 - DNA, 572 bp, Arabidopsis thaliana landsberg
gcttgtgcttcatcgaaaaccaatgacataatggagttagaagacacgagaggaccaattggcacatacgcaagaccactccaaatcgggttggtttggtttcttcttgttttcacccagtttttgcctttaaacaggtacagcgtaaagaatagctggctgttggagatatctgtttgggaaagtacttgccctccttgccttacgtgctttctcaggtacttgggtaaacgggtaagtacagtatgaagcctacgcccgttgcgatcctgaaaatggtagtcttgcatatcaccactaaacatatccactaccatatggctgttgtttctctgctggatggctcgctcccattgcttgtttgatttggctgtggcagtagcctcaacaaagtgcgcctcgatatccttcctggcctgttctacgtcaatagtcagtgccttgtaccactttttcagccctcttactgtttggctcattctaaggagcttgttcatctcttctttaggaacatatttcttcttggtagccatcttaaagtcagttactggaatagacaccgacctatcatg

SEQ ID NO: 71389 - DNA, 288 bp, Arabidopsis thaliana landsberg
  unsure (1)..(288): unsure at all n locations
gacccacaacccacgagcaacgaaaacacaaaccagccgggaacaacccgggggggcgggggcagcgacgaacaagaggagaagccagaacgggcagcgagcagnaaggaccacacgaaacagaacgggagggcgagaaaacagagccccacagcgagggagaccaggaccaagacaaaagccaggagagaggacggaaacacacacaccgcagncgaggacgcgcccagaaaagggcgcaacacggaagagaagccaagacaggcgcnccaaaacagcngacacaac

SEQ ID NO: 71390 - DNA, 509 bp, Arabidopsis thaliana landsberg
  unsure (1)..(509): unsure at all n locations
aagtcctctttgttcaaaaaaaaaaaaaaagaagaaggtaaagcaagcctgaaaactggccggagaaaaaaattttagtcggatggttaccttggagcaagcatatatcctccaataccagccctaacaaggactcctttgcaacagtgatacttgcgtcgaaattagaaagttatattttttaacaagtgtagttaaaataaataaaaaagggttttgtcatacttttgtagatatattgnctggaaggaaaaaaatacaatttctctaatttcgataatctaagaagaccaatgaactgttatattctagaattgaaaaccaaattggaaacccattcttatttgtttggaatttttatttggccaaaaaaacttctctaaatttggaattattctttggccaaataaaaattctaaaaatgggtattatcattttccttctcttttcatcttgcaaataccattgtacttctatattatatttggaaattttcattaccgctaacc

SEQ ID NO: 71391 - DNA, 139 bp, Arabidopsis thaliana landsberg
aaaagaaaaggacagacgccggcggacaccccggaacagcaccgaacgcaccaaacctccacctcccacagggaacaaaaccacccggggggagggccgacacgaacccccgaaccgccacaccgcgagagggggagag

SEQ ID NO: 71392 - DNA, 317 bp, Arabidopsis thaliana landsberg
  unsure (1)..(317): unsure at all n locations
aagagaagaaaaagagcaaccgcgcagagagacggagaaagcaaaagcaaaagggagggggagaccaaaagcaagacggaccaccaccagagagagagcagagaacagaacagagccaccaggaccgcccggaaaaaccaacagcccagcagggggaaanggacggcccgcaggacaaagncccgaccagacaggagggcgacgagagcgccanaccacgcggaaacgccggcacggggaaaaccaccaggagcggcgcgccgggaaaagcgaaaaaacaggaccaggacaaaaaggggccggagggccccaccggc

SEQ ID NO: 71393 - DNA, 513 bp, Arabidopsis thaliana landsberg
  unsure (1)..(513): unsure at all n locations
ttggtctgggtgtgcaggatccggtcgacatcgatctggaggcgattgcctggacagtgggggtgaaggtcaaatacgctcnnnnnnnnnnnnnnnnnnnnnnnnnnnnnngcaccgcagatcgtgcgatcgtgacgatcaaggaaaacgctacaccgggccggcgccggttttcgctcgggcacgaacttggccattggcaccatgaccgtggaaagtgcctggtctgcggaagcgacgagatcggcaatccgctggcgagcacctcggagcgggcggccgatcgttatgcggctgacctgctgatgcctcgcttcctgttcgaccctgctgtgcgggccgcaggcaaggtcaactttgcgatgctccgaaatttggccaaggccttcaacaccagcgttactgcggccgcaatccgggtagtcgagggcaaacgcgtncctgccatgctcgtctgtcacggcgccgaagggcgcaggtggttcgtgcgatcccaaatgatcgacgaccgct

SEQ ID NO: 71394 - DNA, 247 bp, Arabidopsis thaliana landsberg
  unsure (1)..(247): unsure at all n locations
gaaggggactttgaacgacacaaccccgagaaggggcancagacgggccggacnaaaaaaagacaaaccacncgcagaggacaccaaaaacacgaaaaaagcacaaaaaccgagaggcagnggaaacgcagaaagaccagaagaaaagagcgccaacaaagcgacacggcgagggagacgaagcaccaacaacagcgaggacganagaagacgcacnacccgccaaaaagcaggggggcgaacaaac

SEQ ID NO: 71395 - DNA, 698 bp, Arabidopsis thaliana landsberg
gtttgctcgaacgccggcgcgcctcgatgaactgctggcacgattgcgcggcgcgcagcgcatcgttctggctcgccagcaacagcggctcgcacatcgccagagtcagttgcaggcacaggcaccgacgcataagcttgcacgcgaccggcatcgcctcgatcaattgcagtcgcgcgcccgcgcagcgctgcatcggcacctaaacgaggcgcaggcgcggctgctgcgctgcgaggcgccgctgcagagcctcaatccgcaggcggtactggaacgcggctatgcaatcgtcctcgacgccaatggccacgcgctcaccgacgccgcgcatactcgggttggcgcggtgttgtcgctgaggctcgcgcgcggccatgtcgaggcgacggtcggcaggacaaacgacggcgccagcgcggataatccgcgcccaacttcgtaaatgcgatcgcggcttgcgccgcgcctgcaacgtcacctctcatgagcggcgcaagccgggatccggacaccaagacacccatggcctggctgaaactgcgcgttcatacgcgccaccccgaattcgccgacaagattctgcaggcccatgacgccaaagcagtcatcttcgtctatgccgtcgacgatccggtgctagaacccgcgcccggcgaaacgccgttgtgggacaacaccgtcacgctcgggctgtt

SEQ ID NO: 71396 - DNA, 309 bp, Arabidopsis thaliana landsberg
ctaattgcaagtgaagctctctggtctttaagtgcgtttctttcagttggatcaagtgttgttaagtaaaggtagggtataccgttacctttctcgggtaaaccatcactaaacgatacaacattcctgcaaatagagaccattgagatctcaataatgtcaaagcaagaaaacacattgtgatatgattcatggaaaacaagattacccgaagggagcgcctttatgatcaacggatagtgtgctgaaagaggaatacaacaccgcaaaaagaattagtaataccacaactgttacactcacattacc

SEQ ID NO: 71397 - DNA, 635 bp, Arabidopsis thaliana landsberg
aacccccccgattcgtatccttatccctcttcccaaacccaacaatcgatttctcaatctgcccataattatcctctaaattaccaataatacccttgacctcaagaaccaaaccccagaacccatcaatccaacctctcttccaattcccatggcagatttcagacaacctctctttacaactctcgagccgcttcaaagcacagacaagctcgatcgtatctccaaagctcaaagtgttggatcgttctttaaactcgttgaatctcgtgtaaagctcgttgatcgaagacacgtagtcttctcctaccaactgagtgattttgtctgcgagggatttcccaccggagaagggtagatccggaattttacatgcttcttctagtagaccaacgagagcatcgatctcacgaagcagatcagagttggtaagagaagaaaccatttcttcgtattcctctttgtgaattgtactcgatgttgaagatatgaaaaatcccatgattcttgaagttgataatagatgctcaagatataaagcgtacctacaataataatcaaaaaaacatataaaaatccaaacttaatccaaaacttcttttttttttttttttgtgaaacttacccatccggac

SEQ ID NO: 71398 - DNA, 724 bp, Arabidopsis thaliana landsberg
tggcttccttgatgaaaaagaaaatttggaacagacaggtgtatctgttctcgggtacaaggacacgggcattttccataggctgattgaaagtggtcactctgtcgatgtaccttggaataaagttacaactttgtttaacctggctagattacttgaacagatacacaaaacagaagcagcgacttttatgtatcggttgatacttttcaaggtctatatttcctacttatttaatttgatattatttgctgtttcactttgtgatgagttttctagtggtagacttgaggagaaaagaaggaaaaaaacttgaggagccgttttctgattattcctgtctgatagatgattttgagtggttacttggtttttacaaatatattttgtcttaaaacccttctttcgcggttttttaaatatctattcatgtactaaaagtataaaaatgggaacattgattcggcataatgacttccttggttataattgagtggcttctgctctcttgggaagttcagcatcgtttcgtatatgtgctatatagttttctgctttatatttcttctgtttcttatagtttttggatacacctaccatgtcttacattatttgtttgaatgttcaccctgatataagcttgatccttttatttctctttcaataatctgatgacgacttttgatttctgtcaacttaatctgactgcctatccggtgcagta

SEQ ID NO: 71399 - DNA, 213 bp, Arabidopsis thaliana landsberg
aataacacattggatacacactattaaacttctgcgaatttgtttaacacatacaacatcaaattctacatactaagatactaacctttctttttttcatatatagaggacagtttttacgtcataccacttcatcgtctacgcaaggctatataattgatctctatgagtatatatgaaaacacccgcttacctttttttttttggggggca

SEQ ID NO: 71400 - DNA, 884 bp, Arabidopsis thaliana landsberg
ctagaacaaacacgagcttcgttccaattccctaatcctaaactctcataatcaataacaaatatcaaaccataacaattgagtgacggcgagtttgaaaaaaacgaatctcaccagagaaaaaacgcagatacggaatcatttttcttcatcgcgaggcttagaactcgattgaagagaaggaagaggattagagcccttgatgatccaaccgagtccgaagaaaaaacctccagctagaatcgcagttccccaagcgtgtgagtaccatttactgtattgccgaatcgcgaatttccattgctcccttaacgtcgcctgatccggattcaccgactcaggcgggttataataccttttacccgaacccgatccgatctccggcgtcggttttttcgccgacgaagaagtattgttgttgttatcagggatttggctcttctccgccattgtcgtcgtctagattcttttcttcagatgttgaaaatcattttcagaaaatgtgtatttaactctaaagccactgacacgtgcaagataatgccacgtggcagtttctcgtactaaaacgattccgtttcattgtttcgtctacctctaaccccaccttagggttttagtactctctgtgatttttatctgttcgtcaatggcttccatttctactgcttcttcttcttcttcacttctcttcccttctcgaaatttcaaatcgattccattacttccacaacagagaagctctgtgtctttcgttcgctgtttttctaagaattcttcaacagaggaggacattctccgtttcgtggccgaatctgatgggaaggcacttccatgtgtgcggacgtacgagaataattcagctcggctcagtctcgttggta

SEQ ID NO: 71401 - DNA, 291 bp, Arabidopsis thaliana landsberg
  unsure (1)..(291): unsure at all n locations
cccgaaggcaagagacaccgaacggcgcnaagaccacgaagggngaaacnacccaagccgcaccaagccaaaaagaggaggagagacgacaagaaccaaagggcagggaaagaagacggaagacgcgcaggaaaacngacggcagagaacaaaaggaaaaccnggaggcacacgcagccaaggaagggcacaanaacaacccgacaaaacagagacgaaaaacgacggaggcgccncgggaggaaaccaacaaagacgacgaaaaggcgggaggcacaaaaangagaaaca

SEQ ID NO: 71402 - DNA, 139 bp, Arabidopsis thaliana landsberg
  unsure (1)..(139): unsure at all n locations
acgaaaaagaaaaccatanagcccccncacaaaacaacaggacccnccaaaacacnccggggccgacnaccgcgaaagaagccaccggnnactacnacacagagcccaaaannacngagcagaaaaaacactaacccaa

SEQ ID NO: 71403 - DNA, 475 bp, Arabidopsis thaliana landsberg
ccccccattcataagactaacataaggacatcctcgaacagccaaatcttctataccactattaaaagtaaatgtacttacggaatatcatgacgacatcatgggattgacctctctaattatttcgcctctgaaaaataaaaaggaaaattgcaaattgcatattgacacccctaattatatagagattgaatcttttggaaaacgttagaaaaagctaaaatgatgcctctttgacccaataaaaccatgaagcttttaagctgtgaccgactaaaaaatagtgttaaaagaaacttcgatttttaattattttttttgattctaattaagtgcctcttaaaagatatctattttttaatatacaaattgcgatcccttttgtatgtaaacattaaatatatttaatagatcctaaccaatcatattttacatcatatttctgaatgggctgaattagtctataataatgatg

SEQ ID NO: 71404 - DNA, 965 bp, Arabidopsis thaliana landsberg
cgatatcacaatttctttgaaccaaaatggaagtaagaagaatccaattagcctatacaaacttattgcaatgacaaaaatattccaattagaggtatattttctaaaatctgaacggaaattgaaaccgactctacattgcataaaccgaaaaatccaaagcaaaggtgggcacaccagatataaacatagacatacctgagccatcataagtgctacataaactccagcggtgaagggatacaatggacccaagtcaccagcaggtctggacttcctgacgcgttcacccaccttccacattcttgtctggtcaatatttcccatagggaatgctggcaagccttccttttcctgttataagtaagagaatccatcaaaactcctgcacaaactgtgtttgggtaattgtaacaaaaggaagattcggaagagtcattacatagaagcgacgaccggctaagacaacacttcggatttcgctgccactttgtacatcctcgtaacattcatagagaatctccatacaaggatagaaggatgcgctgtatgcagtctcaaaatcttttttaccttcttcagacaaggagttgtacacagccaacattccctgatgttcacaattcattagaaacaggttttagatttttatatttggctaaaaacgaattagtctgttctctacagatatcttcctactaacctgggtagagatagtccttgaaattgttcctgtgatgcattctactgtgttcttgtaagccaagtcttcactcatcccattttcggtgtatcttctaaacagagactccacgattccgtgaacagcaccaagcaaaattccttttaacaaaaaagaagaagatatgtaagtatgggattgagtgatataaagacaggtctaaaaggggatcaaactcacctctttctccaaagatgtcactcctgtactcctgttcaaggct

SEQ ID NO: 71405 - DNA, 541 bp, Arabidopsis thaliana landsberg
tctggcatcccacagcgagccacattttccatacatacttagaatgtgattattaagaatagtatcatacttgcagatggaattcaaaatgtgatcatgtatctttctgccttgtgctagagatctcgatgaagagcaagcacaagttaaagagatgttggttcttaaccttatcttgaagcttgagttcttctgcgcaaaatcaaacgcttccaatgcttcccggtagaaattacttttacatagggaattaatgtgatcattcattaattcttcggtcttgatggttgatacaacacttgatgttgccagtatctgactgttgctgacggaaactgtagctcccaaccgtaacattgacgccatttcagttaaccttttttaatccaaacgagttcttcctagcaaaagaaggttcagcgagaaagacatgttactaaacgaagcatccaactaaccaaacaaagaattctttatcttcgtcgagaatgaaggcaatataatccattatatcaaacttcttcaaaacagatacaactga

SEQ ID NO: 71406 - DNA, 192 bp, Arabidopsis thaliana landsberg
caaaaaagccaaacagaaccctccaacgtcccagacacacgacccaaacgcggagcgcgagaaaagaacagaccggaacaccacggacaacacacacaacgagcacgagaacggaaaaaaccaggagacaaagaaccaaagggccaaagccagcaagggcgcagaaacaacaaggcaaagagacaacccagc

SEQ ID NO: 71407 - DNA, 671 bp, Arabidopsis thaliana landsberg
tctagtaactggcgccagtgtgctctaaagcatgatttggtgaaattccaaagccgacagtatagtctggatgaaagaagataaaagtatatttgtgctttttgcgtgctctgaaatgattacttgtcatttcagagcatttttgttaatcgcataagttttcttttgtatgccttgagtagtcccctattcaaggtatattttttggaggtagtgagatgagcgattcaaaatatatgaaattagcaataaaactggcacaaaaaggggctggttacgtcaaccccaatcctatggtcggcgcagttattgtaaaagataatcacatcatcggacaaggttatcatgagttttttggtggcccacatgctgagagaaatgctcttaaaaactgtagagaatcccctgtcggagcgacgctttatgtaacacttgaaccctgttgtcacttcgggaaaacacctccctgtatagatgctataatcgatagtggtattacaagagtagtcattggaagcctagactgtaatcctattgtatctggaaaaggagtaaagatacttgaggaaaataatcttcaagttactgttggaattttagaaaatgagtgtcttacttaataaaaagttttagaaagtatattactagcatgtaccctatgtttatgaata

SEQ ID NO: 71408 - DNA, 230 bp, Arabidopsis thaliana landsberg
  unsure (1)..(230): unsure at all n locations
aaacgaaacaaaacaccgnaaangaaacnaaaggaacaacaancaagaccatcacgacccaagagaagcagcaacgaaaagaaaaagaaacaaaaagncnaagacaccanacccgccgngaaacncaaggagaacaacaccgggcaacaagcggcaggcaacnggacncaaaggcnacaanacgcccacaaaaaaaancataggangcaaaagaangaaaacagaacagc

SEQ ID NO: 71409 - DNA, 575 bp, Arabidopsis thaliana landsberg
aaccattttaatacggtgcgggttccgtgtggagcgatggcggagcgtggggtgccgctcaatcttgaagggaagaataagtttgcgttgctgttgaacgacgcggactttcggactgcggaggcggtatcgcagtcgataaatcatgagttgcgccgaaccgtcgctcatgcgctcgacagccgggagatcgatctcgcggtgacgcagggagaggatgttcctgcgctgctagcgcaggtggagtcggtcgaggtgccggtatttccacgggccaaggtcgtggtcaacgagcggacggggacggttgtgattggaggaaccgtggttctgcaaccggtttcgatcctgcatggcgggctggcgatcaatgtggtgagccagttcgaggtatcgcagccgaatccattttcttctgggggaacaacccaggtagtgcagcagacgcaggtcaatgcgcgggacaagccggtgagccgtatcgaactgaagcagggcgcgaccgtggatgacctggtgcggagcctgcagacgaacggggcttttcgcgcgcgatgtgaacctccatttttgca

SEQ ID NO: 71410 - DNA, 512 bp, Arabidopsis thaliana landsberg
atcattatcaacaacttggttttatgttaagagaaacacctgatcctttcattttattttccagggtcatcatgtatttgctgtcaatggtatatcaccaaaattgcaggttcgattttatcataccatcttcctaataacatattttcatactattatacattatatataaagacatcaaaatgtgtaacaaagtggcaaattacattgtatggtaggatctactgaatttagttaagaggcttgttcgagaagagaacactgagcccctaatagaggttttaataggacatcttcttcatattgccagtcttcttcctcttattgatgattcattttatccttatgcttgctatgcttttatgtacttgtgcagaagttagttgatgctcgcattcaggtacaccctgcactacgagcacctcggacgagggcaaaagatttactatttttggacattgcgttggagtcatgttttaaaaacaacaattgaaaaagaaaattcatctttt

SEQ ID NO: 71411 - DNA, 379 bp, Arabidopsis thaliana landsberg
ctgtccgggttgggatatcatgtaaaggctgcatgagttccagtctcttttatggcagttgttgtagcaaccgtaaagttccggtctgttgctgcgaggatacctgtgtggttgttggttgacatatctttaaaaactcctgacgctatttcaacgatcactgctgggatggctgcgaagtccgctgcatctatagcaactacattgtttgttacagtaacattgctgccggaaacatcaatggattgtgttacagcgcctccttctttgataaggatattaccggtgcctatttgaacgctctcattaaaagtaagcaccaggatcgcgataatgctaatattcacagcagtatccaaagggctaatcatagctacca

SEQ ID NO: 71412 - DNA, 365 bp, Arabidopsis thaliana landsberg
  unsure (1)..(365): unsure at all n locations
tgggcttgacttacttattgatcaactgctacggtgaagctattatcctatgcaatgacatcccaagcaacctctattcaatctagatgaatgcatctacatgactttgttttggaatctttctgaaatttcgattttgtgttttctctccttaatatgagatattattagaaagtgacacatgtaacatgtctgacctctcctacttaatacacatccctgtgtataaaatctgagaagattcagaccaacacgaacaccaagaaaataaatgcttggatgtacatggtgtggtgtgtacctangtgagtagtgagacaagtctcatgctctcttgtgtactcaggagcggtcggctgacttga

SEQ ID NO: 71413 - DNA, 2908 bp, Arabidopsis thaliana landsberg
gcttttaagacttttgtacaaaaagagaagaaaaaaaaagaaaagaaaaagaagttcttgtaacaaactttcagaatcaatgtgtggctgcttttgtctccaactatacctttttcttttaatgattactattgctacatagataacacacaccttaaaatcgtgaaaatgtttgaagcaatatttcattttgtgctaagagatcatcaaaatttttattgtagataagtgactaatttatggtaaagacttgaatcactaaaataaacagttaaattgcaaagggacaggagcgagtgaaagccacgtgagcaaggtgtgtaaaagagcatgggtttaagcgaaaaaaatcttgtagtataaatgtcagagcaatcacgtggatatgcacatgacataacgtccacgtgtcacagaaacaagaaaaaggaaaaggacacgtgggcctaccttttcgcgcgtggctcgttgtccctccctcaccggacacccaatttctttcccaatcatttgatgcgattgcgattctgcttttctttagctacttagggaatgacgtttatacccttgggcatccatcatccactcatgagcttatcaaagcctcaatcattcaatatgatagcttttgcctttgtgtgtgtttacatatttacagctatactcagcgtgactcgcacgtgacctcgtctctaccctttaatagaagaaatttccctctttgggtttgagtaaaccagatatgtaaacaaaaggaaagaaagctggttacactcgtggccactaggatttcatcaaatcaaatcttgttcgatttaagacactaatgtcgaggacttttctttgggcctgtatcagcccactaaaataaaattgtactgaaaatcccttaaaaccattttttctttttccagttcaggttatatataaaataaaaaatgaacacatcaactatcttaaaataagatgttgtataacgcatctaaagattgtgcgtctagagatattttagtcaattttcactgctgatcataagggggatttaaaattcgtctggctaaacatgaaaattcactaaccaacttcatatacccattaacggtcaacaccagaataaacactccatcaataagcagaaccaaaagaatgtagatgatgattgcattgagtttttggtaccaaaccataaccaggtttcgaattccgcatacaaattggcaacatttatgcaaaagcaatctactctctactccaccaatctcggttaaccggtacatttctccacggttattcctggtccggttcatttcttattttatttgattcgaaccataaatggcaaaacagcaatttcatggaagttccgaggccattttgctaacggtatagacggcacgggaagagaaagaccaccggtggagaaaaccctaatcccccaaattcgaccatgttcatggttcgattgaaattcgcatcgatctctcataatttcagtacggtggcggcgaaacatagaagagtgccgtcgaaatacaagtctctagccatcggaaaagcccagcaagccattacagactatctccacaccaccaggtctctctcctacactcacgctgaacaaattgcctcaaacgcctccgtttcgattcgaaacctcatcctgaaactcgatttctctgttcctaccttctccaaatctcttcggaagcatctcagttaccatcctattaacgaattcgagtttttcttcgagagcattggcattgactacagtgaggttagcgagtttttgcctgagaagaaattcttcttctctgaggatcggactgtgttggatgcagcttttgctttatctggatttgggtttccttggaataagcttggtaagttgtataaagaggaaaggttggtttttgtgcagcgtcctggagaaattgaatccaggctacttaagtttaaagatataggattcagtacagttgcggtgattggtacttgtttagcgattcctcgtactctctgtggaggtggtgaattgggttcggagatacgttgtttgtttgttaagctgaaaagactttttgatgagtttgattcacatcatctttttgaagaaaatgtggattcttggctcgccgttagcaggaagattaggatcttttacgatttgggttgtgagaatgaagagatgtgggagttgatgtgtagaaataagtcactttttctggaatattctgaagaagctctgatgaataaggctggatatttttgtaggtttggtgttagcaaagaagatgctgctcttttgattcttcgaaatcccgctattatgaattttgatctagagaaaccggtgatctctgttacaggaatgctaaagcattttggattgagacaggatgaagtggatgctgttgctcagaagtacccgtatgtttttggtagaaaccaattgaagaatctgccttatgtgcttagagcaatagatttgcatgaaaggatctttgatatattgaagaatgggaaccatcatttactcgctagctataccttgatggatcccgatgaagacttagagagagagtatcaagaaggcttggaggagcttcaaaactcaagaaccaaaagacacaacattcaaaagttggatttccttcatgaaatagggtttggcgaaaacggcatcaccatgaaggtactacaacatgtacatggtacggcggtagaactccacgaccgattccaaatcttactaaacagtggcatcattttctcaaagatatgcatgttgataagatcagcaccaaagatcttgaatcagaaaccacatagcatacaagataaactaaggttcctctgtggcgagatgggagattctatggaaaacctagaggttttcccagcttat

SEQ ID NO: 71414 - DNA, 1726 bp, Arabidopsis thaliana landsberg
gaattggataagttccttgaggctgaagctaaagatggacaccaccaaccatcaggaagaaacagtgacactaacactattgcatccaccattgaggccattgagggagtagatgatgaagaagataatcagccaatgaagttcccactccaagagtatttttttggatctctaatcgaactcccagaatcaaagattgcagggaagaaggatagggcatcacttggcgaactgtttcaaataacagaagtgcaagataaacaatcagaaaacatatatgggaagaaaaagaagcaacccaattcagctcacaagtccgcaaagcatcttgtgaagaaggtactgaaaaagatacacccatcctcaaggggctctgtcagtggtaaacctgaagtggattccacaaaaaagaagttccaaaaggtgtggctttttcagctctgcttttttaaaaactaataatctaaaaaaacgactgcgtgatacatgatacatgatacaccaaacttcagatattttatcccttactttgatagcattctctggagctatcatatactccattgaaaagcttgctcctaacaaacttgaatttcatgtgaggagtgcagatggtacaggttttccataggaaagtacatccagaagaatccataatggaaaccaaaatatacagcagcgtggcaaatccaaaaagcagcaaagcaaattctattgacttaacattcgagaaggtgaaccattgtcacgaggcaagtaaaagatgtatccagtatgagcttagaagttctcgctcagccaaaaacggagaacactggatcaagacagacgaagactgtaagtccaccatcatatgcaattcatagaattgtttgcataatcccttttaactcaaaggaagaatatgagtctaaattttttgataaaatggtatttaggcatgcacaagtattctgcttgtgacccaaccggctaataatccataattgatttgcagatttcgtgttggaactgtaacaaagggatcagaagaactatgtaaactaagaagtgtaagtgtataatgtcacttcatgcatgtgtgaattgtgtggtatgattaaggaaaatgtgttcaaacttactgggaatgtttattacgcccctctatgtaataataaatgttaaagggtgttataattgcagcaagatatctcatatacattgtttggagtagtagaattaagagaatgcaagcattgattcaaattcaattatctgttttaatctcagaagagagaggcataatgtttatgcctctcttagctaataagccataatttatcattatctcctacacaaaagaacttacatagaaaatccaccataaagtatgagcggctatcttatatttcatgcaataaaaaacctaagccagggtaaaagcctgtatcactttttagctaaacaaaaatcaataacatccgagccaaacctggtatggaccttccgtaatagtgaacattgaactaaagtggtggacgttctgcaacaagaacaccacctgtttccatcctccatgattggtcaaccaaggctgctagctctctgcagcaaggttcatacaaaaagcaagagaagaaaatgcactagtagttaatgttaaagggagaaattggatacatgacttttatgagagctcaaactgatttatattgagacaggccaagatgaatacatgaaaagg

SEQ ID NO: 71415 - DNA, 1841 bp, Arabidopsis thaliana landsberg
aaagaaacgcagagcatatgcagagagaacgccaaagaaaaaaacatcttctgtaaagaatgagaagcagaaaaccatgggagagatggacatcaagcacctgttgataagagaggataggaaaaatctactaaacttcaagaattagaagatgcaaaatcataccaagaccagcaaggggctcatccagtatcagtaaatctggagtttgcacctacaaaaggcagaactatttagaacagttcacactttggaatacgtcaaaaaacattgttctcaccaattggatagctagtgcaagccgacgtttgtagcctccacttagtaactggggatctttatcaagtgggatgctgtctaatccaacctaacgtttcaagaggaaagctaacataagacagatcgttggacataagataaacactgtccgaaccaggaggagtggaatacccaattaaatgctctctggagattcgaagtcagttgctccttaagctgcaaactacctttttgccttggccaaccaaaagtaatctcatcaagcacattatctgcaacaaagaatctagccacacacaaaaaagaaaaatacatcgatattttcgtgtcacttaaacagcagcacctaaacctgataaggtaaaaaaaaaaggaaaaaagatgataatgagaattacctttctggaaactggaaaacaatgcccaccttttcagtgggaagcaagtcaggatccgccttcggctggccatcatccccatatccttggatacaaatggaacctgatgttggtttgtttagcccagcaagaagctacagaaaagaagaagaaaaccccaaaagttgctacagactacaaacaactcaaagaacagtgccggatagctgtgtgtgatgacaagctcgtgagacaacaaaacaaacctgcaaaagggtagttttaccactcccactcttcccaaagatcaagccaaagctgcaaagagtaatagagtcacaaaactattaagtaggcatgttgtttatacacagtacctcaagaaacagccggaattaccttttctcgcgcagggaaaaattaactccattcaagatattcaactgtgttccaggaggacggtagcagacatctctaaccttgaaaataaatgtaaggcattctcacaattcaatcctttagaaagttgtatcaacgacattcactcgaattggaaacccacctcgatgcaagaataatcgcaagagattactcgaggcttcttcgtcctccgaaatctcaacctgtcaccgaaacaaaaacaaaccagacacggtgagcattcaagttgcgatgaagagtacacaaggagagtgatagattatggaggtcgtgaggaagtggcgtacggttgcttccagccaattgcagtggaggagaatgatgctggtggttcagcgatgccgaagacaggcgtggggctcgaaaacgtcgacactgccatggttaaccaatatactgaatgtcctccgccaatttctcgaactgggaaattaaaatcggaatctccggaaagaatccccggaaattttcaaattcctagtgaaaactgaaaagtgaactaaaaaagaataaaaattgactaccggaaaacgttggcggaatctccggtgagtttaataaatcgtaagggatgagtagaatgggccttaattgggcttttgaggcaattttgttttccttttaacggcttggattgttttggttcagttcaagagctgaatattatgatgtccaattagaattccgatttaagagaacaaaaccttatgaaaattatatgtaactgcgaaagaagatagagat

SEQ ID NO: 71416 - DNA, 635 bp, Arabidopsis thaliana landsberg
attctatcacgtactcacaagcgaaggtggtaaaaaataaacgggaatgagatctaagcacctcttagactaaagctcatagggggttaatatagatcgttgtgggaatttatttggttaacaattccctatactcaattcatttattgttatgacggctttttggaaacgtcttcttgactgagatgtaatcaaccgttgtgaagaaaccaagtcgtgcgtgactctttggtttcctttccggagatgttacaaatttagttttcccattaattataaaaagacaaaaacaggccgtttatgatactacgattgacctatcagttctgtgggaaaaaaacatctattatagttccattacagtgatttcttaaaaaaattatcaaagtttttacttaaatttctcaatctttctagaccatcacacatgaaggctcaacaacaggaatttggagtggaccatcgaatgttagcggaccttgtaatctcaaaatggattgaagtagagtttgtcgatgtatacatatataggtatgaaaaaaaaaggaagaggttctatcttggctagtcctaactattagccatgtacttatgccagttctttatggctttatggtggttataaataataataa

SEQ ID NO: 71417 - DNA, 1078 bp, Arabidopsis thaliana landsberg
cattgaatttgatagtgatattattgaatgttttgtaaatgttattaacgttgcgtcctctactagaaacgaatcactcgcgtggcgtaacataaaacaattgcttacaaccctcgtattataaaagacaaaactccaacaagagaaaacaaaaaaaaatcatatctgcaagtaatagaaaatggatcagttcaaaggtgagcctcgtctacccaagttcgccgtccccaagcgctacgatctccgcctcaatcccgatctcatcgcctgcaccttcactggaactgtagccatcgatctcgacatagtcgccgatactcgtttcatcgttctcaacgcagctgatctctccgtcaacgatgcctccgtttccttcactcctccttcctcctctaaggtctctctatcgcgtttcttttttgctgttatggattccgattttagcaatgtgattggagttatggttttgagctaattagcgccttggagatattcattttcatgattagcttcttgatctgagtatttggatatcatcatctatgatttttgattccaatggtaaattaactagagagatacaatcacgtttcagccagacttttctgttcgactgaaaaaccaatcctcaactttagaaaactgtcatggattggaattgaatctggaatcagcaaagatttagcttgttgttgcttcttatgttttgttaagcaggcgcttgcagctccaaaagttgtcttgtttgaggaggatgagattctcgtgcttgagtttggtgagattcttccccatggagtgggagttctgaaacttggtttcaatggagtactaaatgacaaaatgaagggattctacagaaggtaaagcaatgagtttcgatctttttttactgttagatagctcgagattaatgctagaacgatcttgtatttgtcttggtcgcagtacttatgaacataacggtgagaagaagaatatggcagttacccagtttgaatcagctgatgctatgagatgctttccatgttgggatgaacctgcttgcaaggtttccacttgttctttctcattccct

SEQ ID NO: 71418 - DNA, 594 bp, Arabidopsis thaliana landsberg
tgcgtttggacgtgggggtatgcgttttaacatgtttatgtataaattttacatttaagtttctcttcgaaacttaatgaaaccatacaaaaattatttttcttaaatttttaaaaatttcggaatagtgaaaaaagattttaagaaaaccacttaaaaccagtaaaatcattcaaattacaaattacattcaaagtctaaataagaaagaaccattcataagtttcttattacggtattgtcataaggtgcttaaattttggggatgttaatggattgaggcacctaatacgcgcatagacatgtgtttttaatctgattgtatattatttgatgacccatagacatgtgtttttaagttttaacgtatagaagagaaacgtagatggtgattataaaaacgcatacgtccacgttatcacgagttatggtcatgcaaaactaagctacataccgtataaatttagcttctattctccgtttctcttttcttacgaaattacatttggtgtaaacaaaattacatagatcacattataaaatactggaaattggaaaacatctttattttgttaaaacttggataaatatttt

SEQ ID NO: 71419 - DNA, 444 bp, Arabidopsis thaliana landsberg
  unsure (1)..(444): unsure at all n locations
caagcnaaaaagcaanaaagaaggaaaagagaaaaacaacggagaagaagaaaacaagaaacaaaaaaccaagaagagaggaacgaaaacgacaccacaaaaaaaccaagaggaggagacaaaacaaccgcaagcaaaagacaacnaagggcacangcggccaaaaccccgcgacgnnaaggaaacaaagccaaagaaaacaaagaggggcggggcgacacaaagccaaacgacaacaaacaaggacngagaganangggcccacacacaagaaaaagacngggcccaaaaaaaanaaanaaaaggaccaccacaacacaaagaagagggacaccaaaaaccagccgacggcgacacgcaccagaagaacggaaaaaaaaanccaaagnncccccacaaaaaacgcaaggcccaaaagaaggaaacccgccccaaaaagaacaa

SEQ ID NO: 71420 - DNA, 421 bp, Arabidopsis thaliana landsberg
tttcaaaaacccaaggggaagaacaaaacgggcgcccagagagacccacccgaccaaacaagcgacaaaacccacacaaaaaagcagagacaggaggaagaaacgacagacaaagcacagcggaacagcgaaccaaacaagcgaaaaagacggggaacgaagaaccgacgaaaggcaagagaccaagagcggaccgagaaacggagaaccgaaaggaacgaacaaaagaagagacagagaaacggccagacgaagaagaggcgaacggagagaaaaacacagaacccgaaaaacgcagcccccggggcacaaaacgggagagggaaagccgccggagacccaaaaagggaacgaagaaaggccaagaaggacgaacaggaaccaccacggggaaaaaaaaaaaagcacaagcccaaaagaa

SEQ ID NO: 71421 - DNA, 479 bp, Arabidopsis thaliana landsberg
tggatgagaacctaacgctcatgttcaaagaggaaagatgatcctataactacagcatgtgacttttgcagtctaaatgattaattttcggacgaggaactccaacagaattgaacaatctaggaatcgagagtacatcccatatgggactaaagacacacactcaatccttgaggtctatattacaacatgtgtgttttggagactttttccttctgataaaagcttatggagacttgacagatattttacataagaggaagattgctgttggcctaggaagtgactgaactaagtatacactagaaacaataaaagacaattgtcgatatttttttaaaaaggagattgaatctaggcatggaaatggttcgaactctgaatgtactaactcgaaatctgtcagattttaccactctagagtgtcgactacactgtataggtctattgtaggtaaccctacacacactatataaaga

SEQ ID NO: 71422 - DNA, 339 bp, Arabidopsis thaliana landsberg
  unsure (1)..(339): unsure at all n locations
ggaggcaggaaaaacccagagagcgaaaaaaaagcaagaccttccccaaccccccccctttgaaacaaaaaaggggaaaacaaaaganaggaccaggaaaggcccagaccccacaacaaacaaaagagaagggaagcaacccagaaaggagccgaaaccgaacaagaccgagaaggagaaaaaaaaaacaggaccaaaagaaaacgcacaagcggagaacaaacaaacaaaacgcacgagaaggcggggaaccgaaaaaaccggaacaccaacgcaaggaaggacaaaaaaaaagccacacaccaaaggggcgaaacaggaaggacaggacgccgaaaa

SEQ ID NO: 71423 - DNA, 141 bp, Arabidopsis thaliana landsberg
  unsure (1)..(141): unsure at all n locations
acaacagagaccacgacgcaagggaccgaggnacacacgnaaaacaacgaaaaaacacgaaaaanacgcaacnnncgaacggcaaaaacaaaaaaccacgaaaaagcaaacaanaacacaaaaanangcagcccgcaacag

SEQ ID NO: 71424 - DNA, 324 bp, Arabidopsis thaliana landsberg
  unsure (1)..(324): unsure at all n locations
ccgcgagaccacaagagcagatctatccccaaccttcaaattttcaaagaanacccgggcccgggggccaaggggggaacncgccgcanacaccagagcagcgcgcgngcggcccagaacaaccaagggcancacagacccggaagagccacaaaccacccgggcccaaacggccacagaccccccaagaagccggccgagaagggacgcccccacgcagccagaaagcaggccgagggcccgcccagcaacggaannaaccagacaaaacgcgccaccaaccaagaacggccaagcaccaccacccacagaancaagaaagag

SEQ ID NO: 71425 - DNA, 582 bp, Arabidopsis thaliana landsberg
gcgagtcctgcttgtcgatgcccgcggtgatcgagtggtcgccgatcttgtaggtgaggtccagccgcaggttgttattggtttagcgatggctgggattgttgactacgtcaatggtctggccgttggtgcgcggttggttcccgacatatgccgggttctcctggtcaagtccgcgaatgctggggccatccacgccggagtcaggcacctgggtgaagtagtcgatgctggacttgccgtacatggcgctcagcgtgaggtcgtcggtaatgtagctggtgaacttggccacatagatttttgcgctggtcttgttggttgtgtccttgctgacgaagccgccagtgctgccgctgtcgtagtcgtaggcatagtcggaagcgtcggagcgatgggtctgcgacaccccggtcagttccaggatgttggagtcgttgatgttccagtcgagcttcaggtagctctttggatccttgaaggtgtagcgggtattggcgggggtcgatgatttgtcgctgatcgtgttgccttgctgctgcttcgcctcgacggcggctaagacctacaggcggtccttga

SEQ ID NO: 71426 - DNA, 174 bp, Arabidopsis thaliana landsberg
caaacaaagagactttaatattaatgggtgggggccatactatcgttgctttgccaacccacaaatatctgaaattgccgagcagcatcatactggtgccatctaaggttgacttataggcataagtcgtcattaaacttaacatgtgcatatccatggaggatgcaatacttt

SEQ ID NO: 71427 - DNA, 296 bp, Arabidopsis thaliana landsberg
  unsure (1)..(296): unsure at all n locations
acacaacacggggaccgaacaccaaaaccgaaacgcagacgcagggaagaaaaacaccaaccgccgaaaagccgagggccaccaaccacccagcagaccccaaacgcggaacacaccaagaacaacccaaaaccaaaagggaaccgagacgcacaacgangangggaaggaagaaaagaagcgaacaggaacacaaaagccagggaaacgaaggaagcaccaacaccgaagccggaggcagaaaaaacgggccacagcggacccggaagccccgggccngaaaggaaaaaacaaac

SEQ ID NO: 71428 - DNA, 580 bp, Arabidopsis thaliana landsberg
aacaactctagccaaactccaatccttatctatatatctgttttcatatctagatctataggaccataggtttaaagtttaaatgatccatatatactgtatacatggcattaaacaaacttaaactagccacatctatcaacttaaagtttatataagactatacatatcgcttagtggttaagacttaagagaatacaataccaagctggtgcatgtctctccttttttgttttttgtttttaggttttagatttttttgttttcttttttcttaattggctttgtctcttgttccggtgcttttcgttttgtttttatatataatcgatcaattctggtgtgaaaatggtttaagaaacatgatgttatccaatgcgattgacaattaacataaataaaaatgtactggagtttcttcgttgcaaggtggctaatgtatatttgctataacaggaaaaaaatgaaatcaaaggatgcatggaaaggctggagaacaaattatcaccaaccatacgttctttttagatactgtggatatgggcatagcaaccggatatttccccaaaaaaatataaaa

SEQ ID NO: 71429 - DNA, 481 bp, Arabidopsis thaliana landsberg
  unsure (1)..(481): unsure at all n locations
aaccgaagaattcttcctcantccaggggagaaggcgggtctatatatctnttcaaangccaaaatccatatcaatattgcgatgatgccgttcaaaaaccccggcgcaaaaaaaacccatatacacaatcccaagataggtccaaggagaaacaaaagccaggagcctgtaccgtatacgcaaaaggggggggggtcaaaatgtacatgcctatcaatgcttcccattcacaacaaccggaggcgcaccctgcgtcttgtcgagatattcaatcagatcttcgatcgtacagaccttaatcccccactgtttcccaaacttcaagcaactatcgcgccgcatcatgtcgttattccccccaatctccggaagaccatcgacaagctcgccgtcctccaccagttccgcaatgacacccgccggcgctttcccggccaaccggcagaacttaattggccgctccgtatgtccctttcgctc

SEQ ID NO: 71430 - DNA, 4549 bp, Arabidopsis thaliana landsberg
tgttgattcctgcaattttaatactctttgataaagaggttatcatagtaaaggttttagtaatgtgtctggtgtttagttgagactagaagtttaggttgttgaataggtaagagaaatcgtgctcgtgattaaaaaaagcggtgttgctttagaacttgctattcgtttttacttctaatttttaggctgtgtttcagtggagaagacttcatgctttcttcatgatggttaattatgaaataaactactacctctttgctgtactgtgtctgatgtttagttgagacttaaaagcaaaggttgttgttgaataaataggtaatgaaaattgtgctcttgattaaaaagcagtgcttctgtcgaacttgctactcatttttacttctgtttccatggaagacttcatactttttaagttctctttgctgcatgagattttctcatgaaacagaagcagattgaaaattttcctcttttgttggtatgcagtatggtttggtgcatatctctgctggagatttgctgagggctgaaatcgcttctggaagtgaaaatggaagacgtgctaaagaacatatggagaaaggacaattggtccctgatgaaatagttgtaatgatggtaaaaggtcgtttatcacagacagattcagagcaaaaaggatggcttttggatggatatccaaggagtgcatcacaggcaacagctctcaagggatttggattccagcctgatctattcattgtcctggaagtaagcactgttcttaatttcaatgttccttatctctcatctaaaggctttctctagaacttgctagattttacctatacttgtgagttcaatgcaatggataaactcttacttctttgcaccagttattctgcaacagattgctgaaatgtttaattctggcaaatcagtcttaaaatccggacaactgataataaaactaggttcattagcttctgtcacattgctttgactctttatcctatgaatactctagcctcatttgattctcgcctactctgcttttgggacaggttcctgaagaaattctaattgaaagagttgttgggcgtcgattggatcctgtcacaggaaagatctaccacttgaagtattcgcctccagagacagaagagattgctgttagactcacccaacgttttgatgataccgaagagaaggcaaatcaatacttcttatatatctcttgaaagtttctcattcgataattatttctcacacatgagattgactcttagtcaaattatgtctctgaagtttttctctttcgctgtaggcaaaactgcggctgaagactcataaccaaaatgtgagtgatgtgctttctatgtacgacgatataacaattaaggcatgggatctcatccacaccctttctattttggctttgctatctcttctttaatgttttcgtgaagcaaaatcacctcatttcttattattatccagatcgagggaaaccgctcaaaggaggaagtgtttgcccagatcgattcttctctgtccgaattgcttcaagtgtttaacactgctccaagttcacttttaagttgattcgttcttggtacaaacctgatgaagtgcttacccagatcgacactactatgtccaaattgcttcaacagaggaactctgcttcaagttcacttgtaagttgaatcattcttggcaaggacctaaccagcggtaaatatcctttcttgcatttatcacactcgattgatatctcttgtatcgcaataacgggttgttttgtcgccagtaagacaatgtacctcacacctcagaaatatgcagaccttcttcttattacctgtagatttactgaaaataacccattgtgttctcttgtcgcaatcatgaagaatagaactgagttactaaaagtttaggaccttcaaaagttctttagtgtttcgtatcagtcaaattttgaccattggcgtgtaaattcaatttgacaattcaaaccaattattcaccaactctttttcctagcaactaatattagaagacttttagacttttctcatggagtataatataagttggtaagctttaacaattctttgtcttcaaacaattaacttggaattaaaatgcgtacaaaaagaagcagcgaatctcattggcttttgctttaagcttttcacattaagctgcaaaaagaaattgaattgtgcaagggttttcgtcgaagaaaatattaaaattctgtaccaattaattaaattcgtaatccctagaaaaataaatacaattacagttgaccacaagatttaattaagctaaacgtggctaataagtgtttgatcgagatacggtctccgtctttggagccgtcaaacaagcggccaaagcactctctagtttactgactacctccaccattgacggccttttccgactacacggcatcaaacactccgctgccaagtatccgacatgagccaccgcctcgatttcgtaaggggtcggcggtggaatcctctggtcaagtattctatgagcctcatccagcaaaatgtatggtacaacatattccactaagtttctagggttttcgtcttcgttattgtgtatcgctttgtgaccagacagcaactccagcaacaccacgccaaagctgtaaacatcgctcttggttgtgagctgttgaaacttgtagtactccgggtcgatatagcccaatgtaccggcagcgtgtaaagagagatgtgagacgtcatcttcttccgttggacccatttgagataggccgaaatccgacactttggctgcccacgtggcgtccaacagtatattcgatgactttatgtcacggtggatcactggaggcacgacaaactcatggaggtattggatcccacgagcggcatcaagtgcgatcatcaagcgtgtttgccacgtaagagggtcaaattgaggattatgaaggtgatcggcgagagatccatttttcatgtactcgtacaccaaaatcctctcttctgtgtcctcatagaaacctagaagtcgaacaagatttttgtgattaagccgcgacatagactctagctcgtttacaaacgctgaatccttatctgctcgtcggtgtctcatcgttgtcccagacaatgtagggtttgttagctcagctcgtttgattgcgacatgacgtccatccgacaaaacaccttgataaactgagccgaagctgcctataccgagatgaaaccggaaagagaaaccatccgtggctagagccagctcgtcaattgagaactccattagctgcctaggattacctaaacttgctagagtgcacagcctcttctcgagctttggtatgtctattgtcctagtatcatcaagacgtccagagtcatggacacggcaactacagtggcttttaaagattaagaagctgatgacaaggagcaaggaaaacgttccaacgcatccgaccactagaaacgcaatgtttcttctgctccaagttttgttcttagagttttgtgccctagtattgggaaattctccatcatttcttttcaaatcgcaaatcatcaattgattgctgcacaaggactgtgatcctgacaatggacggtaagggcattctcttctacacggtcctggcattaccacttgagaaattaggccttggaacggagcgaaaacacccgatctaaaattctcattcccccaacaatatagagtgtaatttcttgtggcaacaccgcaaaacattggccctttagcgtatattgatgtaaaatgaatgttctttagcgtttgaggcaaactgaagttgttgttgttgccccaacacaccacagttccattagaccatctaacaccgcaactgcggtcttccccaaccgctagtattaagaacttttcacgtggaagcgactgtgtttgtccccaacactccacatcattgtcaacagtgatcgcgcacgcttgtcttgatccagccgcgatggcgatgtagcggtctccacttggtaccctggctagaccttctccttcacagctgatccttccaagtggctgagatagcccacagaaaaaattatctcccaaggcaatggaactgtaattatccggccgtggcaaatagtacggttgccagcaacggaggcgccttgagactctttcaactccacaaatgcgggaattcccggcttctaactcttcgagctcaggaccgtggtagattcttttgtgcaacatattagttccatcaacagagaatctccaacaaagaagtgtggaagtgttgggatccagccgcgatatcaatccgcacacaaacccatttccggaaacaacccccgaaaaccttcgattttggaggttactggttaaagagaatcgaatcgaatttaaagggaaactggaacattgaagataagagtggttgttgagagcacatacaagagtctgattagaaatgtgggagatggagacggtagagagggagaagcaaacaaaggagaaggaagatagaagaagaaggagagac

SEQ ID NO: 71431 - DNA, 585 bp, Arabidopsis thaliana landsberg
gctggcggaaacaaacactagatgtaatttgatcaccaacttcctaaatcagctgcaaaagagcaaactttgacttaatattctacaaaatcccaaaaacaaaactgagaaatttctcgagattaaattatctccaaaaacaaccttagccacagaactcaaacagaaatgcacaaagaagagttaagatagcattgataagaattgacaagaaccaaatgctgaaactttttcccaaaagcagcaatttgaagatgaaaagtttcaaaatttgccggaaaccttatttgaattaaaacacttggaaacatataaaaatcaaccccagattgggaaacgcttgtcggagcaatgtcggtcccatgacaaatgacaatgcaaaaaactcagaaaaagaaacataaatatctaaaatgaaaatgaagactaacctaaatgaaatcaaagtgaaattcagctgaaagatcctgattttagaggaaatagaaaatcctagaagacaaaggtaatgtgaagaagaatctcagaagaagcagaaacggaagaagaaagaaaacgccaaaaaaaaaaaaaaaaaaaaaaaaa

SEQ ID NO: 71432 - DNA, 748 bp, Arabidopsis thaliana landsberg
agaaatattctctcaattaatttcaaattgttgcttcaggttaattaatcatacatagttatatagttctatgttatgtaattttccagtcacgctaaatcattacaacttggcagcaacgacactgacggggtaatccaacttccaaaagtattgtatgaaagaagatatggttgaagtcactaatcaatcaaccacctcaaacgttctttttttccttgtattttctcaatttggtccataaagacaaagtaatcaatcaacacattgtttacgatgtttggaacgtggacgtgtacgagacccactccacgatgactttgccttcttcctctctttgaaaatatggggggtctataatagaagttgcaatcatgactacaaatttactcaactattcgtaacttgtgtaaacgaaaaactaaaagtaacggcaacttaagacattctagtaagtgtttcatacataattaaaaacaaaatcaaaatggaatttaaacatttcttacatataatcatattctaatttgaaaaagctaaaaatgctggatttaaattgagaaaaaataaggaatattattctctttttcatattggacatggatggagaacggagcttgaaccattccttaccaaaataatgtcactttatagaaaagcaaaaaaagtgtcccaaagagaaaagtttttacccttaaaaatcccccaagacttttaaaattcaaaaatttaaaacggaatattggaa

SEQ ID NO: 71433 - DNA, 569 bp, Arabidopsis thaliana landsberg
tcccttggcacttcaaaccgaatgatcggttccaggaaatgatctcacagtctgatctcgaacggatctctggagggtgtagttcaatcttactgctattccctgcatggagatagaacctaacgaagagagtggttggcgatgactcgagctctacgtttctagcttccacgattttcacttcaaatttaagggaacgaatgttttcaacgatacccatttgcttgaaaatttcgaatcgaaccaagaatatattatttaccaaggtaataacaattagagcaaatttaagagcagtgagttcctttgtgatgaatatgtgcatgaacaaattctcactagctatttatataaatctatggggaatgttcgaggaaagtttacactagatttccacattgtacttattaaaagatactaaatttctaatcatgtttttaactttttatttttttctaatcatgttagtgaaggcttaatattttagaaattaaaactcttgagcatctcaaaagaccaaggggcggatttaataatgactcttgcccatagttttgggagataattag

SEQ ID NO: 71434 - DNA, 837 bp, Arabidopsis thaliana landsberg
taatatatttcatgaacatgatcacagccactcccggtccaacaatgtttcgtgtccgtgactccgtgtcttttgtttcatcataagtattcataacaaatatgtttgaatattttactgtttctaatgaatcctttaaaactcaagtttgttatcttcagacagtattcttgggtctcctttgtcatcattttcaaatggtggaaacatgttctggttcgaacaggttattggcattaccatctcggtgcaagccttttttcatctgatagtatcattgatccattagtaagttgaataactgattttgtctattgttgtgaactgttcaattaattaacaaaaaggaacagatagactcatgaggatcagtttggttatcaatatcgaagcaattctctgaacctggatagatgtagtataagctagcagctgcaaacgcacgatcaatattgctggattctagaggaaacccttggtcaatgatcttgcattctgatgtaataggatgtctcgttatgaataaaccaatacaaggaagaaaggactttatacatgtattgctgtatcaataaaggctgaatctagccaccatgtgaatgttaaagattagacaatatagatcatcacaagatacagagctcgaagattagctttgtcaacaatgagggaaaacgtaaaccggtatagttaaccgttactggcgtttatataacattttgtattcttcgttgaatgacggaattacccttatatcggtctgtgttggtgataatcatctgagggtgaaactggacattgggtactataaatttcccccaaaggattgatatttta

SEQ ID NO: 71435 - DNA, 687 bp, Arabidopsis thaliana landsberg
ctgcaggtcgactctagaggatccccctcccattcatttattaccattaaaagttgaaactacacaagctctcgattaacagttttcttagggaatttgtccatcagtggatccctctatttacatctgcatatgaatatatgctactaaatagtttgagtttatatatccattacttggttgttgagctacatcctctatattgtcacttacaatggtctatgtaagtactgacaattaattcttttctcccgctaattgattcccattgtttcatttgagttttattttcttgcctttaagtgttgtatatatcaaacttgctactttctacatatggggaaaagatcacatttacaatattatagcaaagaccgaatgattttagaagaaactttaagacaaccaaagttgataataaaacgaacaaggaaaaatggatggtatggactcaaatcacatgctactaactacaataatataaaaatgagtatgtcggtttgccttttcaatgtttcattttaatcaaatattagagtatttgatatatattaacgttaaattttttatacattagcacactgactactatgatgaattgtagacttaggcttaggtttgaatttaatgtcacgatgaaaagcacgggtgattagcaaatttggcaaggatagacattcatatgta

SEQ ID NO: 71436 - DNA, 289 bp, Arabidopsis thaliana landsberg
ccccccccccgtacaaagccaacaagggcagatgaaagagggggcaccaaggagcgcgaacccgcagaggccagcgccagcacaagaaagacccaccgcaagagccgaaccaaaacgaacaggaggagcgaaggacacaaaaagcacagaaacaaaacggggagacgacaaaaaagaaaaaaaaacacgggaaaccggaagggaaagaaagcgcccacaaaaagacaggaagcgccaaaaaaaaggaagccacgggggacagaaaaggagcagaagaaacggaccagca

SEQ ID NO: 71437 - DNA, 693 bp, Arabidopsis thaliana landsberg
atagattgttacatacattgcactaaactgaaatttgagctttaagttcgagtgatggtcacatttcttttttgtaaactagctatatagggtgtttccaataatcaatcccaataatttcttacgtagatggaagacaaatatgagctaggattaggaactcaagtaccaaataaagggggtggcaaaattatggttgttaatgagaaatgctagttgggtgttaggttaatgagtgatgagagcctctttagccgcattacttgactctgtttcttcatcatccaatagttctttcttttaaccagtctttacacttcacaaatacaaaattgcttcttagttttgtttctgttttttaaagctaagcctatagcgtttgtaggcttttgcaaaatcgccatcgctttaatgttttcttatcgacctattatctttgtttaatagttgataggatccctccaaatttataatttgtaaattcatagattctattattgtctaaagcaaaattcttttgtatctcgtatttcgatgtttcacaaattcacggattatttagtcgaatgaaaaattgagttaaacctcagtacagaacgggttccttttttattcccaaaattaaataatatttcggtttttttggttaaacccaaatccaatattaatccctttaaattttcaccttttttt

SEQ ID NO: 71438 - DNA, 3631 bp, Arabidopsis thaliana landsberg
gtatgttaagtgtgagttccctcctgaagaaaacgtcactttacacaaaaaatgtttgaatggtttagttgctgttttcgaagaatttgattgatttgggatcgtagtagaatttggtaacaaaaaccttggttcctgagttaagtttattcaaagtttttcctctaattttcaggtatgtggcgttttggttggttgtcctggcctccaaattcacatttgcatacttcctccaggcaaggagtttctacagctgtatatatttgctactattatagaatttgaaatctctcatatctgaattcacctgtggtgtactcattaaaaaaacaaggggatatgtctgaggctgtatataggcaactgctatgttgaatgctttttccttctccattgtataagttgttgttctcgtgcagcctggttgttaaatgtatatttattaagtaactaactaagcatgtgtacgatattacctgacggttcttcttcatgttgcagatcaaaccactcgttaaacccaccaacactatcattcatcttcctccatttcaatattcatggcatgatattgtctcaaaatgtaagtgtatttatgcttaagtgctcaaattgaattaattggctggatgttaattgacttaaaagaaatataatgtgtctacacggacttaacaaattagtcaggaaggtctgcttcattggctacaagatatgttgaattttaactgaataatattatatttgtatctgatcaaccataatacagactagaacttgttactgattactgtctttgaaaatgttgctgacacctgtggctctgctacattaaaaaattggcagctaacgatcatgcgttgaccattgttagcttgtgggctccagttttggcggtgagtgtattccttagttgtcctcttaattagatatcaactgtctaagagtttctttcgtaactaccttccattaactcttgtcctttatgagttactaatcgtggcatttggtattgatgtttagatttatcttatggatattcatatatggtacacactcttgtctgcaattattggtggtgtgatgggtgcaaaagctcgcctaggcgaggtactcctgaaccctagaatgttctactactaaatctttttgtagaacgatattgtgttctgttatattgctggtccccttactaaccatgttcaattatctttctatcttagatacgcaccatcgagatggttcataagcgttttgagagttttccagaggctttgctcagaaccttgttctcctgtgtaaaaggttataatttggatctgtctttattttgttacatttcttggaacataaacaatattgtactcctatgattaccagtatattaaagtttttctttttgggcttccttcgccgcctaatctctgttgtaatgatatatttcagagtaccacttggccaacatgcttctcaggttagtgataagtttaaactctctgtcttatcactcgatgttttaatagatattcttgcattattgccttacattgttagttctttgtctaaaaatggctctgtgatctaatcaacaatgatatgttttggccactacagccaaaacagtttcaaacatctacttttgtgataacaatatctgttctcagtatcttatgtttgtgactccatgcttaaataggaaaattaaagtcgatgatgcttgtaaatgtatcttgtttcattgatcgtggatgtaacagaatttaatttctgaaagtccttaatatagaaaattgtccttctccagcttttgctgtaactctataatgttgtttttgccatgtattttagctcctatgttttgttctctcctaatacttcattataccctaattgtactcttcgttcccactttgtcctgtgcattgcgctgattgtttctctctgtctaacctttcttttctggttaatgattaattcttagagctttttccgactgttttggcaggatggtcaggatatgaacaaggcatatgctgcgatgttttcacctttttggaatgagataataaagagcttgagagaggaagattatctcagtaacaggttattgattattacatgctttcgtgttctttcattttttgccgtttgtacaacgcctcttactcatacatttgaattctttgactgtagggagatggatttgctttctattcccagtaacacggggagccttagactagtccagtggcccttgtttcttctctgcagtaaggtgcagcttgttaaataatttcctctctttaatgttgagagctcaggcgtgacatttttctctcatgtgtgaattattcttgcttcttttgtttttcagattctggtagccattgatttagccatggagtgcaaagaaacacaagaagtactatggagacaaatatgcgatgatgaatacatggcgtatgcagttcaggagtgctattacagtgttgaaaaaatattgaattccatggttaatgatgaagggcgacgttggtacagtatttcagtttgcttgaatctcaatgtttgtttaatatgcgaagatcatgtctgttaaccatagattgctgtttttggaattttacatgtgacattgtatttatgcctcttttcactttggtaatagggtggaaagaatttttctggagatcagcaacagtatagaacagggttcccttgcgataactctaaatcttaagaagcttcagttagtggtttccagatttactgcattaaccgggcttttggtacgccttcttaaatctgcgactagttttttttttttttttgggtagaaggttaacgaacgattttcagtgaactaatgctgctttcagaaacacaaaagatatatccatgaaaaatgtattttctcttgctgctagttttgtttactgttttcaatttccgactttggctttataagccataatgtggggaagaaagattttcgtcattttcctcctgttaggattttgggctggtgtgatgcttagaccctcttttttcatttttcttacgtttggggatttatacatttttcagctttttgttctttagaaaatactgggaatttttcttttgctatgagagttattaatccttcttctgaaaatattaggcttttaaattttcttattctactggatagctttgaattcccttttcgttcttattgcatcccaactagcttctcttagattatatttttcttgctgttattgattataggtggccttaagtatagggcaagagtagaggatatattcagtatttatatcaacgcctcttactcatacatcccaataagtactgaatttatcactgtatttatattatcttactttttcttagaagtctctctacatttgatacttagattgtaatgtcatctttcagtacttttgactaacggaattttatgctgttattgttaaaatctcagttgtttcatcttgtttgacttggtttgctgaacatcatcccagattcgaaatgaaaccccagatcttgcaaaaggtgctgcaaaagctatgtttgatttttacgaggtggtcacgcatgaccttctttcacatgatttaaggta

SEQ ID NO: 71439 - DNA, 118 bp, Arabidopsis thaliana landsberg
  unsure (1)..(118): unsure at all n locations
agaaaacacaagcaaacgagccnccgcangagccaccaaagaaaaaggcacaagaacagccaagnganccccaacaaaggcagcacagaaccccaaacaaacaaagggacggaaacaa

SEQ ID NO: 71440 - DNA, 258 bp, Arabidopsis thaliana landsberg
  unsure (1)..(258): unsure at all n locations
aaaaggaagcccaagagcccacacaacncctaacgcccacacaagagaacgacacctccgccctcgaaaganacaaagaggaanaagggggnnaagnaaanccggagccgagagcccccccaccgcccgcaaaanagaaaaagaaaaaccgaacacaaaccaaanagaaaaagaaaaaccagccccccccacacgagcgagggcgacagcccccaacgaaacaacagnaaagagccccggcaaccacaaccacggaga

SEQ ID NO: 71441 - DNA, 721 bp, Arabidopsis thaliana landsberg
acgtcgggggcccatattatcggtgcccactggaagctcgatgaaccgtcacggcggccggtggtgctggccagtgcattcggacggtcgacgaagcagcaagtgccaaaccccatcggcctgagcgtcgagatgttggacgtgggcggcccgttctcagaattcgacgactagccggcgcgcggttgcactgttacccggaggccagcgccgccttctttatctgccacaaccccgcgtggacgcccggcgttgaggtcttggctagccggttggccagatcgtcgaccgacaacatgaccttcgtagcgagctcgttcgcgcttttggcagacgaggtctcaaccagctggattagcccttgccgttgcgcgtggtagacgccctcgtcaagaaggatcagaagggcatacgaccgcagcgcgcggctgtccgacaggctcttccaatatatccaaaacgtgagcactagcaggatagtgacgaccgttagagcaattcccatctcgacctcccccggcggatcacaagcatgctgattttgatcagcgccgccaagagccggcggtccggcgagtggtcacccgacgactacgacgtgcgtgacggcgccgccgatgggccagtggtggccgcatttacctttcgcccgcgcctcagcaggacccgtggttttggggcctgacccttttccggcctcggccgaggatagtgggttcgc

SEQ ID NO: 71442 - DNA, 326 bp, Arabidopsis thaliana landsberg
cgtttcacatacagcaacattagacagctatcatgaggaaccacgccctttccgaaccatgtactatcgtctagaatgtctttaatatgaggacctcaagcgagataacgagaaataatatgaaagaacggtcacgcactcgagacacaccaacgtttaggaataaagtagacatagatactcaagacggaccgaaccggaaaaggaaacgcgctttactattgacttgtctagcagggaaagaatttactgcgggataaaggtgacaaaggaggatcacctcgaaagccgagccaaagtgccatacattatgtaatggaaagagg

SEQ ID NO: 71443 - DNA, 115 bp, Arabidopsis thaliana landsberg
aagacaaaccacccaccccaacagacataacaaaagaaacccatacgactttgtttaatgcagagagaaaaataactaacacacccgaaaagacacaatatacggcacccaaaca

SEQ ID NO: 71444 - DNA, 627 bp, Arabidopsis thaliana landsberg
  unsure (1)..(627): unsure at all n locations
cggccaagaaagtacacgggggatacgtccaagtgccagctggcatccgttcttcgtcttcccaaaataccttaacaatcaaacaggtctttctgtcacacttccccacgttccttttttttattaatatattttctccttaatctctattttcaagtgccctaatctttatagtatttgtaatctgattatttttttcgccaattaacgtgggaaagtaagttttgttttggtttataacggggaaatgtaaggttaggtattattatgttgacaaaaatttaaaggtaggaactattttccttttcttacggcaaaggtggaagaaactaaagaattagaggaagcagttctgtattgaatcatcaaccgtcaaagtagacacaataccaaaccaaatatattttcacgtttgcttatccatctttgaattccacctgaagcaaaaagaaagaaagaagagttctctaaatttcgacatttcatgataagataaacacacatttaagaaaaaaaatagttggatgcttcaattggtattcctctaacgggcccttcatttaaagcacactagataacagagtaatagttttccttttcacatgnttcattattaccatctatata

SEQ ID NO: 71445 - DNA, 3966 bp, Arabidopsis thaliana landsberg
gcgttaatttcattaataaaatattcataaaaaaccctaatctttgttcttttttcgttggtccatcttcggaatcggagcgttgttgtttcgttttggtcttctctgctcagcgaaggcgtgtgtctcaagagaatgtgtctcttcttgttattatattgttagacattttcgaatgttgattgttatattttttgtagctattcctggagtctctcatctcctttttatgtatcttgttaacacaattatttgccagtaaccctatttgtattggaacaacaagaaagataaaaacgatatcgttcaacatacaacaagaaagaaaaaaacacacaaaactcgttgcttacacatacttccctctatacttaggttttggatctttgaaggctttggattcaatgtcaatctgagaagaatcaatgggtttgaatatagaggagtgaatattaccgtcctctaaccacttaagatgattctctctaaactctaaatgcattaagcgagcagcttcttcaacctcttcactataaggctctactttcaccattgttaacagaacccgactgtaccgagagctcaggatctgttcagagacagctactaacttgaaacacgggtgctccggaaacttaacctcgctgccagtctcatctctcaaaaccgggaagaaaaagacgagcctgcctttcattaccagcattcttgcagcaagatgaagtagatcatgaacacactccactagactatatgcaccagtggatggaatgtgatctgttcttttgtcatcagggacagtgtaaggatccactgttcctctaaggattttcctaccaccggatttacgtccaccagctcgaactccgtaaggtggatcacagataattgcatcaaagatctggaccaaaagatacataagatataactcagtgatctctctactcaatataccaaagataataatgaaagaactgagatatagagcattacctcctttagccccgaacgccaaggaggaacgttattatccattctaagtaaagctactggcattggtaatccatactgcataagtattaacagatgtaagaaccagtgatatcgaaagaaacataacaatagaagtcacacactcacactaacctgtttgaaattgctccaaacattacaatctggaccacgtccatcacgcactactctgatatcaatatctgcaccctaatacaataactcttttctcagttcgagatccacaaaccaacaaaaggatatcaagatactaagagaagagttgcaaaccattgtcattgcgccaaaccgtgcagcagaaacaagaatgctcccagtaccaacaaaaggatcatacacaagttttcccgaagtagctttagcttgattggccattaagaaagccatttcagcatccatagcagttggaccaaggtaagtacgagatttcaactgaaatgtaggtaaaagcttcctatcagcaaaaccaacctccctcccaaaaaatatccttctctgtagaataggttgaagtccattgttctcttcagattcaatcatttccattagaaaaaagttatgatctgggttcttcaagttaacacgaccctgcaacaatcaaatcaccaaagaatcaaaaccatgacgataaacaccaaaagagattgaaacaagaaagtggaatcagacctcaaatggtatataagtaaaagactggattcgatctttctgctcgtcaaaagttaaagcctttccaaaagtttcaacagagattctaaaagttgaatcagaagtgagaaatggaagctttcgagaatcagggtagctttgaatcgagtctttaagctcttcataacaagttccttcaccccaaagctcatacattcctttcaccaatatgcttcgtttagcaatgttacgagcaatttcttcagaagaaagttgaacgaaatggaatggagtatcgttatggtgattttcaggtagacgccattggagagactcattctctgcaatctcttctccgaagagttcagctaaagcttccacttctggttttctgaagtctaatagcctgtgatagaagacacatagaaaccacatctctctctctctctttttcccctgaaaccaaaaccctaatttgacaacagaactgagaaagaagacgaagacggagaaggaagaaacgaagaacgacggcgactaaaaccttttcttcaaaacccttatacatgggcctaataaagcccatttaatcaggcccacttgtacttaaatgacgaaattaccccgttagctgtcgaatacgagatatatcgcgtcgtttgctttcacttgtgtcttgtgtgttctgccaaagtttctctgcagcttctcctcttctcagaaattagggttccgtcgcaaatcacgagcagatctcgtactctctggtaatgatttctcgtttcttatactttgtttataccgaagtatcgattcgcttgcatgtctcgtcatctttgtaccgattctgatttgaagtttctagggtttaccatcgcggaattacgatttgtatatatgttgttagccagtagagatcaattgaaattaccttcgtggatttatctcgtaagcgcgaaccatgtttagagaaacgagttcagatttgcttcacgcttaattattgtgttgtagctgtgtatatcttctggatctgctgcgtgtgtttgatttttctgggagtcaagtcatatttacgttgttcaaaaacacttttggctgtttgttttagaagatgtctgaagagccggagtaccgttgcttcattggtgggcttgcttggacaacgtctgatcgtggtctcagagatgcctttgagaagtatggtcacctcgttgaggccaaggtaaatcttttatctctctttcctcagtggctctctgttcttctggttactgaaacttagaagctttgttctgttttgccttcagattcaaacactgaagcttttatatgttttgtaatttgtttcgtttttgcaactctgtttatggtgaggcgtgtctgtttagtaactgacttcttttagtggctatcagctcttctggttgctgagacgttgaagctttgagtgatttgttcattttcttgctctttgcaaatctgtttgtagtgttgtctgtttgataagtttacttgaaatttatcattactaccttatttttattgccataactattatgggagataaaccttatctattgatacacaggtggttcttgacaagttttctggtcgctcccgtggttttggattcatcactttcgatgagaaaaaagctatggatgaagctattgcagcaatgaatggaatggatttggatgggcgaactatcactgttgataaagctcagcctcatcagggtggtgcaggcagagataatgatggtgaccgcggtcgagaccgtggatatgatcgtgatcgcagtcgtccctctggtggtcgaggtggtggagattgctttaaatgtggcaagcctggacattttgcaagagagtgtccttctgaaagtagtagagatggtggtggaaggttcagctcaaaggatgataggtacagttcgaaggacgataggtatggtgcaaaagatgataggtatggtgcaaaggaggataggtatggtgcaaaggatgataggtacagctccaaggatgataggtacagctccaaggatgataggtatggtagtagggatggtggaggtagtcgctatggacctgatcgcagtggtgaacgcgctggaggacgcagccgggatggtggcagccgtggagctccaggaggtgagaggcacagtcgtgctccatatgaccgccccagagctggtggtttccactagaattctactccaaagggtatgtatgcattctgttattttaactttttctattgtatcccttcaaagtt

SEQ ID NO: 71446 - DNA, 153 bp, Arabidopsis thaliana landsberg
aagttagattcatcacaaccagtagtattagtaacagggctggcaacttcttcaactacagaaccataatcttccactacatcactctcagacactactttaacttcaacatgtgcagatttcaacctagctaaaccaaaatcagagatctta

SEQ ID NO: 71447 - DNA, 358 bp, Arabidopsis thaliana landsberg
taaactacgaataatatgtatagtgttttttattacagacaactatatatcgctgttaaattatctagttatgccttttgatatattaaaaagttagatgaaagtctactcgcagaatcgtatgttatgatatatgaaattttgattctgtataacttggcctaagaaagaggctaagaggcatattaaacatcaaaagaatgagtatactaataccactattgaagaaaccatgacggagacaaagccttaaggattgaacttgaacctagacattattagggctaaatgcattttatccgacgtggcggcatctattcagattctgggacccacgtttcacaacctattggtcaag

SEQ ID NO: 71448 - DNA, 570 bp, Arabidopsis thaliana landsberg
ataccccctctaccaccacctaagaaagatcaaaccaacaagtttgtagaatgctcagtaacaataaaagcttgtaacagaagctagggctttgttttgcagtttaccccaactgcaaggaagtgtcggaatggtgctcctcgttgtcattctcatcctcttctgatgaagagctctcgggatcggcttctgggctagaatcttgaggcctttcattcaacacttttggtcctgaacctctccccaacatctcaacctgagggcaaattagaattgaactcagttatgactggtgaagaccagaccgagctaatataagggttttgatgaatctttacctgtttgcgcaagatttggttttcttccaatgcttttttctcctattaatgacaaggaaacaaaacaagagtgttgagattcaacattgtatacgaattgataataacaatgattctgacatttgaggagctctgttcgtacctgtatcctggatctctcaatctggttgagcaggatttgtgtctgaatcataacaaaacttttcaagacggggatgaaatcaaaatcatc

SEQ ID NO: 71449 - DNA, 152 bp, Arabidopsis thaliana landsberg
gatgcatttttaaaagataaatcattatatccctagatagacatatacataaagaaactccatatcgatttttgttttgatgcgtggaagaataaataaattaatcatgagccctagaatagcatacaatagtgtagcgccacccaagacat

SEQ ID NO: 71450 - DNA, 289 bp, Arabidopsis thaliana landsberg
ttttctacttattcaataccaaacggtatctactaagagctgacgtctccttggcattgcggttgttcttgcccgttgcgctactccattgtacactcgcatcggcggaattgtgaaccaacctatgtcttccatcaccaacacccatggttagacacgtgagatggggatcgacattccttggtacgaggcgatagctctgctatggccatcgtctcaacgtacgcctcggtcatggggacatgaccctcgtatcgaccatcagttcgtcggcgtaacatacaccgcc

SEQ ID NO: 71451 - DNA, 502 bp, Arabidopsis thaliana landsberg
gcgccatgtattttttaatgcatcatatcctcgaatggtccaaaaacaaatacacgatttttgattttggcggatcaaacaataaaaacgtggcggaattttaccgcaggctgggaggaaaagatgccgtctactatgaaattgagatcgacaggcgaaatatcttgcataaaattgcgggtaaactgcggaaataaacaggttgatcaagtgatttcaatcctatctttgccccacattccagtttaatgatccgcaaaagacttcaccgcagttaccgcatcacccggtatgtaatgtacaaagagaccctggtggatttcaaagagcacctttgggcctttttgggatctttcacagggattggtctgattgcctttattcaaagcaagatcctgcctgataatgacaacctttttctcattggttctttcggtgcctccagtgtgctgatctatggcgccattcaaagttccctggcccaaccgcgcaatttgattgg

SEQ ID NO: 71452 - DNA, 490 bp, Arabidopsis thaliana landsberg
ctaacgtatagaaagatgctacttatacggatagaataggtacaccatactaaggacgaatggtgttcaaggaactcgtatagtatggtcaacatatagagacgaggttgaccgccttgatcgaaggctaatacactacactcttagatggctcctgcaatcattgacgtgcactcgaaaagaaatgagcatatgaccaatgtgttatatataacatacttaaccaaaaagaatgagatggaaagggacatcatatagttaaaagtcactacgtgtgctcggtggccctatggtacataaaggacactatgtgagtcgtgtgaatatccactcactctcacacacattatgaattaacgcattgatcacacacacattatagagattacccgcaataaatttgagcaaagtttgtaaatagagtgcagaatccttgactttcgacagatcgcctcagctcagcaataaaatggatgacatgttattatat

SEQ ID NO: 71453 - DNA, 3171 bp, Arabidopsis thaliana landsberg
aaatactatatcttagctatatatataaacttccgcattcccgttatagtttacgttttccaatagcccatatcaggatcaaaccaaactgtatataactagatagtgggaaaggggatataagtgttacctgcctccagcattaatgtcttaatctttcatgcaatctacagaaaaataaggaggcaaaaagatcaatttaaatgtacttattgctagaatatatatcacaatgaaggatgtgcaattttaagtttcataccttgtaaataaagggatcaagtcttcctcctgtgccaaacctcttcacttcctccatcttcaacaacctgcatcaggatttgatcagtactagaagtctctaactatcttccattaaacccaacatgcataagaggcttgaagatgtattgcatgcttaactaagaaatgaaacctaaatcatggataaaattgtaacaaatgtgtatatgtgttgttgctgttgtatgaatgagaagaagagtatacattctgagagctttgctggtatcgggactgtcgccaagaatctgacggatgtgaacttctgaagaagattcagaggaaagaaactccaagatgtctttggctctacggcgaatagaacttgacctgctactttctttcatcgtcttccctcctcctctaagtttctcattgcttttctgattcctgactttgattctgctttctacgctagaaacctcgcttgaaccagttgacaaacatgactcatctttggaatcaacagagcatgttgagagaacatcacacacaggattcatcttcaaatgtgttggcttaaagttgaaggatccccaaatgacctgagaacggcgttttctcgctgtctgcataattcagtcaatgaacatcaattttcacactctctactcaaagttttgttctctgaaatatatgtttcttactaaaatcagagcataacaaagcaaacgagtcgacatgaaattcgaaaatctcaaattccagaaacgatccgtttctggtaaactaatcactaaatccagaatcgtaaaaagaaaattgggacatctaagagctagcgattatcattcaggttgaagaacgaaacagtaacttcaaaaatcaagctcaaacggaataaatcaacaaagagaagttactaatcaatcaagtttctcataatttggaatttcttaagctcaaattcagatctagataacaaccaaaagaaaactctgaaacagagacgtgaagaagaagagtttcgcaccttgaaattcatgagacgaaacggatctccagtataattgattttgaattcgcgatcctcactcatcccaaacgaaccatcgctggacaaagccgagccacaagatctcgatccgctagatcccaacatcaagctcaagttcgaacttccttcgtgacaccacttcctcacatagctcgattcctctacagattccgacctaataatcacccaatacgataatcataatcaaacaaggaagataacacagatctaaaaccgcgagcctcaaaattaacacagaaattgaaacgagattgggttctgcgaaccttttaggtgagaagaacactggtccataggaaaggagaagaagagacgaagcaacggttctctcaatcacagaaggatacgtcgccattactgagttcttcttccgaatgaagcttttctctgagcttctgcgaatggcgcgatgatctgattttgttttgtttttgaatttcactttctgtctctcactagaattcattcgtactctgttatattgcagcgcctagagaggaattaaaattgatgagcccatatattaggcccatgaaaggccttatggcccatttaatcctctatctccttcttcgtctttcctcgcctcgtctacgcattactgttactgatacagtttaacagaaatctccacgaacctcgatttcataagcaaataaagatattttcggagaaatatcttaatgtcatgtcctcttgccttcaccttctctctcccgtctatttcccctttccttctcaactgcttccattttcccgccataaacatccttatcttcttcgcgccacaccaacctctgcaaccgaagatgttgcctccgccgtttctggcgcaccttcaatatttatctctcaatcacgctctccggagtggtggattgacttgctccggtccaaagttcgatctaatttgctccgtgaagctgttttgacttacgttgacatgattgttttgggtataaaacccgataattatgcgttccctgctttgctaaaggctgtagcagatcttcaggacatggaactggggaaacagattcatgcccatgtgtataaatttgggtacggtgtggattccgtgactgtggctaatacccttgtgaatttgtatagaaagtgtggagatttcggagctgtctataaggtgttcgatagaatatctgagagaaaccaagtctcttggaattctttaatttcttctttgtgtagttttgagaagtgggaaatggcgttagaggcatttcggtgtatgttggatgaaaatgtggaacctagttcgtttaccttggtgagtgtggttactgcttgttcgaatttgcctatgcctgagggattaatgatgggtaagcaggttcacgcctatggtttgagaaagggtgaattgaattcgtttataatcaacacattggtggctatgtatggtaaactgggaaaattagcatcttctaaagtcttacttggttcttttggaggccgtgacttggtcacatggaacactgtgttgagctcgttatgtcagaacgagcagttgcttgaagcattggaatatttgcgtgaaatggtgcttgaaggtgttgaaccagatgagttcactatttcaagtgttcttcctgcttgttcacacttggagatgcttcgcacagggaaagaattgcatgcttatgctttgaaaaatggctctttggatgagaattcctttgttggtagtgctttggttgacatgtattgcaattgcaagcaagtgttgagtggtcgtcgagtatttgatggaatgtttgatagaaagattggtctgtggaatgctatgatcgctgggtattcccagaatgagtatgacaagcaagcgttgt

SEQ ID NO: 71454 - DNA, 521 bp, Arabidopsis thaliana landsberg
  unsure (1)..(521): unsure at all n locations
tggaaaccacgttcaagcacgtttcggaaaacaagaattttaggttttgcatcgaccttgatgaaaagttgggggatactggtgataccgacatgcagcgcctgaaccacatcctgaaaaatctgctttccaatgcctttaagttcactgaaaaaggtggcgtgcagctgaagatctacgaagccaacatgaactggatgctttacaatcccagtcttgacgctgccaagaatgtcgtggcatttgagattaaagattcgggcattggtatctcccgcgacaaacaaaacatcatcttcgaagcctttcaacaggctgaaggttctacctcccgcatatatggtggcaccggccttggcctttccatcagccgtggccttgccgacctgctgggcggttccattgagcttgaaagtgaagtaaggcatggtagcaccttcacactgtttttgcccatgaacttcaaccnctatgtggtgaagaaagaatagccaagacaggaagacactgctacacacaaa

SEQ ID NO: 71455 - DNA, 481 bp, Arabidopsis thaliana landsberg
  unsure (1)..(481): unsure at all n locations
gaccccgggctatgacctgcacgtggaactctccaccggcccggaaggcaagttccagagcggtgctaccgtcgacatccagaatgcacagggccagcctgtgctcagcgttacggatgccgggccgctgctgtatgtgcagctgcctcccggcaagtacaaagtcactggcaacgcccagggtgagannnnnnnnnnnnnnnnnnnnnnnnnnnncaagacccccacgaccgtgaacctnnnnnnnnnnnnnnnnnnnaacgggcaggagtacggatgtgctcctgccgaaatggagcgcatcgccatgagcctggatcttcagctggagatgttggacgagcggggctatgtgttgctccccggtgtgctcgaacccttgcgtatcgccttgctgcgctgcgccatcgatgacctgcagccgatccactgggattaccaggggctgctggagcactacaagtgcgtgttcaaccgcaac

SEQ ID NO: 71456 - DNA, 635 bp, Arabidopsis thaliana landsberg
  unsure (1)..(635): unsure at all n locations
tggtctcagcaataaaccatctgataaagtctttgactatgttagggtatttttccttccgtttctacacgttcattttttcaccacaccaaacacatgaacggccaaaaagaaaatgctcattgactctttgtgtgatcactggtcacctaaatgggcaatgatgctttagaattacaaaagcagacacaataaacataaacagactttttaagaagataactctttgtaatttattaagaaaataacgacaatttcgaaagaacataaaagaaagaaaagaaaatattgaacatctaaattagctcttaacatagttcaaagcttttggatatgaagatgtgtaagagaagttcatggatataagtcccgacacaaagttttgttgggttattcagttctttgaactagtgtttcgctgtctgaatatatcgacccctaaataatcaatggtgctcttaataagtgcaacatttggctttgagagcttcactcgaacagcgtttatctgatggaatttttcaagcgttttggaagcaataagtttcgcgactgtctccaaaaggtttcttggtgacccttcacaatttcctagctaggctgcaacaatatcaatatgtcnacacatatcatac

SEQ ID NO: 71457 - DNA, 486 bp, Arabidopsis thaliana landsberg
agttcgcatctaagacattgcggtcattgcgcgaacgttcccgcataagcgccgcactcatatagtctccggcggcctgggccatgtgcgacatggcccagtcgtcatatgcatattccaccgtcttggagactgattcaccttccaagccgcacggaatgtttccaaagccgcgataggcgttcaggccggttgtctggcggccaaacgccaactggcgatgaagcgcccaggcgcgtttggcatcgacgggcagaccctggtgaatatgccttggcgatgaccacggtcgagtgccagccgatcatgcagaaggtctccacaccttgcactgcccagatcaccgggccggacgggctttaggcgccctgttcgatcaggtcctgcgcgaaggccgcggcgcgtggcggatcgatgatcgtcagtatgacgtgcagagcgcggtagcgtgcccacaggctgtaagagctgtaattggccttgccc

SEQ ID NO: 71458 - DNA, 419 bp, Arabidopsis thaliana landsberg
  unsure (1)..(419): unsure at all n locations
agaagggaacaaacgcgcaccagaatgagacggaggagaagacgccggagaaagttacagtttggaacaacgagaacgaaancaggaggcaaaggaaaaagaaacgcgaagagcacagcacaaccaaagcacaaggattaaaagacaggagcgggagagaagcacaagaagggccacggccaataatcgagcccagcccactaaaaacaaacacaaaggccggccgagaggaaaagcagaaagggggtgaagaaccagaagcacagagaccaagatgaacggaaaagcggcactactaggaccttgacacagaccagaaaccccgacgtcccacccggcggggaagggcaagcggattagaatcaggaatacacaagacagtgactaaaggcgaaccatagaaaaccagagaaaaaaag

SEQ ID NO: 71459 - DNA, 651 bp, Arabidopsis thaliana landsberg
  unsure (1)..(651): unsure at all n locations
gcgaactagtagtatgaaaattatatcaaaacgcaaataaaaatctattgctctcgaacaaaaacataacagttgtaaattacgtacgaccacttatactcaaatacacctacaaatgactacgtgagtggtcatccaagtgatttatatatgaaagacaaattatataaactcatataataatgatcacgtatatcaaaatcgaattataacattatgttgattcttgacactatgaattccaatctcactagtcattacaactaaaatacaattttatgaactttcaaaatgctgcacatccgagattctaaagtaatgtaaaatatatatagtaaactcgaatttcctaatcgttagaaaatactttaagagcttttgatagatgatctaatttttgcttggacagtcaagtggttggaaataatatcattgcacttaatcattagaatttgcaagaaaaaaagagctaatggaccaaatttctcttaaagtaaatatgataatggtgacaattgttgactttgtttggatgtttgtgatgggaatgttcaaatatccaaaaacacatgcacaaagcataaaaatacaccacattgacgtgacaagagcattanngacaaactacgagacacgaaacaaaaatgatgt

SEQ ID NO: 71460 - DNA, 440 bp, Arabidopsis thaliana landsberg
  unsure (1)..(440): unsure at all n locations
tactatgtataacaactataacattcaaatgaaatttctttttctacttcatttaaattaatttagatatagatatcgtatgatatgttatctgatgttcatttccataattatctattaacgttgagtataaagtattaggctcatatctctaaagttatcatgtatctactntagagctagaaacttaaattgatttgattttggaaattgatgaattaattaatatcttatattacatgtctatttcattgaaatatatcttcttatgattaatttcttatattacatgtatcttttataattgttaaaagtgaattcacgaataaaagctatataatgcttactgaagtgtatatatacaagcattattagtttagttcatggtacgaaaaatggagagtaattcatgatgtttccaaagaacctaggccaaaata

SEQ ID NO: 71461 - DNA, 616 bp, Arabidopsis thaliana landsberg
  unsure (1)..(616): unsure at all n locations
gacttaaacaaatactctaagtacacaacagccacacaccaaccactttctgatatttgaaaccctaagtaaagaacgagaaggaattcttgtggctgagaaattttgttgtattatcagtgaacgtgaataaaatgaataagaaacaaataaaaagaaaactagtggctagaaccctccttctcgtcattccacatgtcaagtttctgtagaacagacggctaaaataagaatcagtgacatggagaaaagtgcactgacattcactaattattagtattagtactatattataaattaaagtgtaattactttcacttccaccaaggatgacttttacaatttgaggagtatattaaattatgtgcttaacaatgatttcaataaaatatctacacatttgtgaaaattgatgacgacctgnacgatggataatcatattaattcgagaaagttgaaactaattataaatatcatagatagattcgcatctgcatatattatattatatgggatgtatacgtagacttacgttatggatagacccccaccatgtttttatatagaggcagaagatattaacttatggttttcgttttttcgtaaaaatggaaca

SEQ ID NO: 71462 - DNA, 462 bp, Arabidopsis thaliana landsberg
gggacgcagcggccgagttcatatccggatcgtaaaagccggcttcatcgtcggcggctccggcggcagcttcacatctaccttccatggccgaaagtacagcctcggcatcggcggcatcagctacggtctgaccttcggcgcttcggaaaccaatttctacggcactgtcaccaacatccgccgtccgcgtgacatcgaaggcgtgtacggccaggccggcgccggtgctgccgtcggccgcggcgcccagggcgtggtgctgaccaaccagaacggcgccgtattgacgctgtccggccgtcaggcgggtctgatcgtcagcgccgatctcagcggtttggcgctgtcgctgcgataggcgacttgaagttgctgagggggccgggcggccttgtgggctgtccgcccgtttttcttgcatgcgtgtaataatttgcaaagtcaactaaaggcgcgacg

SEQ ID NO: 71463 - DNA, 643 bp, Arabidopsis thaliana landsberg
cacatatagaccgaccatcctaatcaaacatgatatagttcattatcgcatcatgaaaaccttaaaatacaatgaatctatttcatccgtcttgggtataaatttgatgtcaaaataaacgagtttatgtgatttttcatcattcttattaaaacaaaaaggaaaaacgatttgtttgaatataaagagttaacgtacttttgtatcatatatttggtagttgaaatttttgagtttggatggaggatctacttaccatgagaatttttttcttttttttaaaaagaaatctaattagcatgagaagtaacattaatgacaataaacgataacgagattaattctagagtgactaaaaccataaattcatactattcatttagtatgtataatgactttatccaacatacaaaaaatcagtaaaaataatgaatacaacagtaccattcacagaggcacatagtttgcttggcacgccatttataattttctgcaaccaattcccatgaccgtttttacaccacgtttgaccacttttttcttcaacaaatttttccttttcaacctttttataaccttatttcattggaaacatttcaaattaaaacttttaaaaaagaaattcttttctcaaccatttttt

SEQ ID NO: 71464 - DNA, 510 bp, Arabidopsis thaliana landsberg
gcaacgacaccttccaaactttatcgttatgcttaagttgattatgataaattaatttgataatgatgaagtgaaattcaatgaagctaataaactcaactttgctcttgatttcaacagaactgaaatatatacttttaggtctgggtatcttccaactccactagacataaagcaattttgacccaacaaaagttttggaataaagcatattgtatcttctcattaccaaactgtatatgagaatagaaactttataaaactggttagaccaaagttataattatgttgttctcaattaaacagctgcgattttccaaatccaaacattatattgatttggagcgccttaataatatcctccgtgtttagttgaactgccttattggtattatacattatttttcccactatggcatgtttaatcagtaattatatctgctgaattttctcttcctggctgctggaaaactctctctttcttctctctaaactcgacaatttttttag

SEQ ID NO: 71465 - DNA, 325 bp, Arabidopsis thaliana landsberg
cacggtggcacgttagtctaggagtgaaccaggagcacacaggagtgagccgcgcttgcagggtttaacattaacggacagagcagagctggtatggcctaaaagtcgcttggtctcaacgcccagggggcctcttggctgccctacgtgtagggatgcctccccgtagctagtcaacgggctgaggtgaccgagggccatggtatggccgagaggaacggctccagcagctaaaggcggctaccgaccaccgcgcttgtatgcaacagaggattttgagtcatgaatggacgcacggcgtatggaccgaccccgcatgctcgcg

SEQ ID NO: 71466 - DNA, 543 bp, Arabidopsis thaliana landsberg
taactgacacaaaccaccctctgtaactacaataacaagacaatcacttgtagtccggtaattttgatctcttatatatataatctatagtaaaaataaagaaatctttttgacaggcttcatcaggttaacaaatgcaatattcatttggtgcttattaatcggaaagttaattagtatgaacatcactacatatatataggacaattttttcatgagaacgaaaccaacaaaacattttattgaagaaacagtataatatatattataattgccttttatatttaaaatttgagtattacaccccataaaataattaagaaaaaatataaaaattaacacagatgttttgaaaagaaaaaaaacgcaatatactttaaacggttcatttcaagtacttgaaaccattcaaaaacacaaggtattacgcatacgatccaaacaaaaactgaagtgtttcaacttgtgattatgtattagaccaagcaacatatacataaactaacaaaagaaagagaaacggaccagagtagcttttaaact

SEQ ID NO: 71467 - DNA, 335 bp, Arabidopsis thaliana landsberg
gaacccccgcccaacacgaacaaaacaaagcgcacgaacagccgaacacggaaacgagccgccaacgcacccaaaccgagagcaagccacaccgaagagcacgaacaaaaaacgcggggcccataaccaaaacacaaagagcccgcaagcacactacaacccaagggccgaggaccggaccgtcaccaaaaacaaacaatccgcaaacaccaagccggaccacctaggcaacaaaacaaggaccctcccaacaaacgccaaagacgcccgccccaaccacaaacccgttaccgaacacacgcaccaaaacaaaaccgcccacaaagaaaggaccg

SEQ ID NO: 71468 - DNA, 1817 bp, Arabidopsis thaliana landsberg
gtatagaactcctgaatctagcttccggttatattttgggctttaataatgggcttttatatgggctttagtaatggggttttatatgggtcttcatatgctgatatgcatcgaagcgacgccggagtgtattgatctcaccggaggttttcaaagcgtttcagggtttaactttaatcaaaagaaacaaattttaagcaaaagaaatagaggaactacaaaatgtaaacaccaaaactgaataaacttgtgacagaatcttatctgccttcattatgttcacatcattgtgctgaagcaacaagagcattcttgatatcatatcagttcaccttttaaaacaagtgaagcatgtctaatagctctagagactctccaaatctggtgttgaacattttcccaagatgcttttgtgttaaccctgtttgcattgtcaattgcatcatcaactccagggaatgatttagatccgtagtcatcgtacttcgatggtccgtatatcaaatgcttgtaccatggtctttcagagagtccatctcggtctgttaaagctcgttctgccatcattaatctatcattaagctctctcactttaagagttcctttaactgcctgcacaatccactcaagactactctcaatacaaccaatatacttgtcactttgtcaaatgtaaacaaatgtcattacctctttctctatgtttatccgttttgcagccgtagataaatcttcgatagacttaatcaacgtagaaacatctatgctatgtcctaacttctcattctccaaatcttccgcgcttttctgttttatgcaggttgacaaataccattacagcaacctcttagctcattaattgctttggccatatgttttataggatatcaattagttaccttgagttctaatgcataggaagtatagttgagtggtataatttcctcatctgctaaccgaagagcgaccaaaccaagaacactagccattgcgacatgtcgctgaaacatcggatcaccaaacttttccatccaagtgaagtcatcatacatagagtgatatactggatagcctattagtaaaaatgctgactcggcgtttatacagcagacaatgatatttggttcatgtaagtggctgaatcagatatttacctcgtccaaaggacatgtcaactcctggaacaccaacatgttgtacaaatgatgcataatccgaacctccgccccctaatctcctgatcttcacataccaagtaaacaaatcagtttaaccataagacaaaattcattatctaagctagtctcttcacttactacaacagagtcgcttgatcctatccacgattcatagattgtttgcgttgcgttatctggatcccggacctgcacacagttaaccaaaaagcttgattatgtgtcctccttgctcaaaagattgctataaaactgcctttgaaagtacctcttgagcagctactttgatcaattcatctagttgtggagtcgcagaggcatgaaatccagggccagataccgcacaatctacattcaagtaggccactgctctcgaacttaacatctctctattttcttctacccattctgttgacccaatctacataaaaaaaaaacatcaaaccccaaatttctgcttctttcaacatcacaaaagcacacatataaacagtgaggtagagactagagaccaggccatactcctcagcatcccaattacacagaataatcgtccttcgaggcttccatcctcttttctgcagcttatctagtctttgtgcaatctacaacagtttgaaa

SEQ ID NO: 71469 - DNA, 1734 bp, Arabidopsis thaliana landsberg
agctcatcatgtcaaagatgttttaacaagtgctcaaaaacatgaaaatgcgtaaaaaattctcaaagattatactaagaagaggattaacagcttgtgggtcgttaatcattatgtatgaagcatatctatcttaaccgaattgtattttttcagactcccgtttcatgtagtcacagagtttagtatcaaacctggtagttctgtggaacaaatctgaagttaagaaactgaaatggtatccatagctgccaatttgctatcattgcaccagtccactcctatacaaccagcaattcatggattcaattacaacaccgcaaaagatacaaagtatcaaatttaggttcctgcacataaacattctcgtggaaatattaagtttagttaggttttaatccaacctgttgtagcttcggtatgacatttgatggttttccttcaagtgtcacaactgctgataagaaaactccaacaaaaataggagcaaaaacaaactgcaaaaacaaataatggtgttaagtgtcaacacagaggaagcaagatgggaacagaattgttagacttggaacaggaaaatttgctacctgatccagtagaagtcgtataactgcgcctgataatccagaagctgtcacaactttgctcaaatacaaatacctaacggatggagttgagagatttcacagaatagacaataagcataagtagtataccaatggatgcataactctcttcaactgaagaacgtagcagagatgtaatatagcttttgcggtgtcataagagtgaaaggtccacggaaataccagaaatgcaatgttggaccgactagccctaagcccaagaaggtaaaagtgagtgtcctcttcttgtccagcgatgaggtcttgttgattgtaagctgcaaccaaaagtgatacgaataagccatgttgctcacatagctagcagaatacgatcaagcattataaagaaaatggggctttactacaatatccggtattttgggtctattagcttccattctaactttaaaaaagagatagcacaattcaagttaaagtctgtctgttcagaaatacataatgcagcagctcatgaatactgttttatctcgatatatcctggaaagctgaagaatccaaacttcaaagatagcaccaaaataagagagttacctgacagatcaaatctccaacgaggttcaaaagtgctgcggtcacagctttggtcaaaacaggagagtttgagagaagagcctggtacctgaagcaaccatagaaaaaggcacacaagcgtgtttatgctcaagtcaaaagcaaagaatcatactagaaaaaaagtgttccgtgagtaaattattaacacatccaagaaaaatttccaacatctgcttcaatgaattgcttttcaaagaaacatctttacacaagaacagtagtagtgacaggagcaagtatgaaaaattaccatgagagaagtgaccgcttctttccttttccgtcgcttccatcaccaccaccgccgccggaaccaccattaccaccaccgcctgaaccacctaacccgccagagccacctgaatttccacctgagaccgcagagacccggactagatgcccaaacgcagtcccagaacgccccggccaattgctccgaccacacttcagtgaaccaacatttttgtacccaaacgaaagagccttgctcgaactaccttccgttatagtt

SEQ ID NO: 71470 - DNA, 269 bp, Arabidopsis thaliana landsberg
  unsure (1)..(269): unsure at all n locations
ggaaaaaaggagagagtgccccaccccaaccgaaagaccgccaacagacaaaaagagagctgagcggacggaacccgaggctaacccaccacggcgggaccacatngganggaccagaggagccaaacccccatggacccgtcaacaagaacaacgaagacaggacgagacccagcacaacgagcgccaggctcaccaaccccgacacaaaaggccaagaccaaaccaaaagaatcacaagggcgcacgacaaccgaacgaaaggaaca

SEQ ID NO: 71471 - DNA, 1007 bp, Arabidopsis thaliana landsberg
  unsure (1)..(1007): unsure at all n locations
aattaacggtctatatattttaaagtaaaacccaaatcttttagctaaaccaatataaaatcttttcatctaaatcaaatctggtgcaaaatcaataggatttgcaaagattcggtaatggcaccacgccatttactcatttactcatatttagtgccgntactctttcttgatccttaagaaaaaagaaaaaaaaacttgcaactctggatcgagacactattgatgtgaaaacaaggcttcatgcatatatatatatatatatggaaatattgagaagtcggtttgtggtctaaacgggccttctaaaaacaaatttgtgtgtggcctaataattgagtcggtaatgttgtgcactttaatgatgatactcacttcttgtttttcaaactttctcctcttttacctaactcactaaaaagttggaaattaacttgtgcttgaactgctttgaatgttaagtgatgccatccgtctttctgcagcggctgctctcttttccctctgtgctgccattgctctcctcacttcctcctattacaacaagatttacaccaaagacaaagcaaatgttgacatggcttctccttaaatatcagactgagatcagattatacaaattggggtttgtgaagctaaccactttagaaattggcttctccttctccgcctgcgcagcttcggcctgcaaacacagggagggttagataacaagtctctactaatccgagttttgtttgaaaaatagaccctgattcaaaacgttacctgagccttcttttctcgggctttgcgtagtttcttcaactcctttgttcttgctttctgcttggcgtctttttctgcctgaacaacaatcaccgtcacgaatcaagttagtctgatgatggattcagactcccatatgcaaccacatgtctccgaaaatcatataccaaatcatgccagaacaaatatatacgacaccaattaatatagtatttggcagtcatcggattctaacacat

SEQ ID NO: 71472 - DNA, 587 bp, Arabidopsis thaliana landsberg
  unsure (1)..(587): unsure at all n locations
ttttctttatcatccatctccaaatctttgactcctagtcaagctatacgcgagaagaaatgtgttgcaagtgaacgcggtgaggacatgattgatgatacatcttattctttcttcaaaacgagaagaaaatcaaaacatctttaaaagttgcacatctttgttttattttgaagagaggaataaggtaaaacacaagaatcatggttttgaagaacaatctggatcgaaatctaacataaggtcatcgtannnnnnnnnnnnnnnnnnnnnnnnnacatcatcctactctggtctgaggttaccacttccaaagatgggatttttcgactcggtatgcttcctaagaaattcgttttattgaacctagcaaatatcttgtaatgtaagattcctgagatgatgaagaaaaaacaaacttttgttacagcaagagaacggagagaaagaaaacagagaaccaaatgctcttgaagcaaacagaagaagatgacacagatccaaacttgagacttgttctacaccagaaaaccgcatcattctgggacaacgcaaaacacgaaaagtgaactgtcaatgatatatat

SEQ ID NO: 71473 - DNA, 102 bp, Arabidopsis thaliana landsberg
ccccccccccccccccccttgccgcccccccccttcttcccctttttcccccgtggggggttggggggccccctatatcctcctccccccccccccccctcc

SEQ ID NO: 71474 - DNA, 407 bp, Arabidopsis thaliana landsberg
aaagaacaccaaagaatcgcaaacccgaaaccaactggaaaagcaaaaggcacccgcaacgacagcaacccaacaggacacaaagcaaaccccaaacccaacaacaaaacctctgcgagaggtcaaaagaaccggaacccccccccagaactaaacaccaccctcaccacacacgcccggagccaaagcggaggcccgacctaagaacagagaaagcgcgagaagccgccacagaagcgacaaggaccgcaaaacgaaactaacaagaccccggcgccactcagagaaccgaccccactccatgacactccaaaagcggaagaccaaaagcaggccggccacccaaaaggacgcaacccacaaaagcaccacgagaacccccaacgaagcggaacccgaaacaaacc

SEQ ID NO: 71475 - DNA, 5933 bp, Arabidopsis thaliana landsberg
ttctatcattccacataattcatattaaagttagtagctgaaattggaaggctgatatattttccataattcaaatttgaattttgctcatcatatatatatgtatatattaaaaatcgaatattaagaagaaaaatgaagtcgatcgatggctgccaatgctgtagctggccatgttttaaactactcagttgtcggattgaagtataggcaaaatatataaaaccgtaaaaggactaaatataataatataataggtattaattaattaaaactaattaattataaaagaagcacctaaaagtcaagagcagtagagaaatggaagaaatatctgaaaaacgaccgcttatatatatatatgtatcattggaattgaagaggctatatatatatatatatatatatatatatatatatatcgatcttagcttatatattaattgaaagtacattttggtataacagtaattaaagaagaaagaaaaaaagagagagatatataaggaagaaggagtgcgaggagaagagggaagagatcataattaagcaaagaagctagctaggggcaggatttgtatgtcaatggccgtcgacatgtcttccaaacaacccaccaaagactttttctcctctccagccctctctctatctctcgtatactactctctcttttctacatacatgtacttactagctctcacataaacatatattatatatgtcttgattttaatggagcgaggaatatatacaggctgggatattccggaatgcatcctccggcagcaccaaccctgaggagtatttcctgggcagaagggtagttgacgatgaggatcgcacagtggagatgagcagcgagaactcaggacccacaagatccagatcagaggaggatttggagggtgaggatcacgacgatgaggaggaggaagaggaggacggcgcagctggaaacaagggcactaataagagaaagaggaagaagtatcatcgtcacaccaccgatcagatcagacacatggaagcgtacgttcgatataattccatccttacctagctaactaaaccccccactctttaataagtataaactcttaattaatcattatgcttctcaaattaaaacacataattaggggattccgattcattagggcttctatcaagaaacattgggttttttccgtgctcatatttctagatgttttatagttaattatgtttttaaacccttctttctcaaatatatatatgtatcacctatgcatctccgtatatagtacttaattagtggaagaaggagaaggtgtcttgcgttgaagagcaattctcaattacgcaccttcaattctccattaatttcacatacatatatatacttagatgatgtattcatacaaatatattgccgatcgatgatatatgatccagcattagtttcaatgcgcttatatggtttcggacgcttactcgttattattccccgtcttctcctaacatgactgtaggtacacgcgcgttataacgtatataaaggcttaaacaataaagtgttaatttgtttcatcacaattaaagctgatcagtaatagtatacatatgcctagttagggttcagttgcatgtaaagattttcatcttttagaaatgtctgaatttgaggacgttgcaggctattcaaagagacaccacatccggacgagaagcaaagacagcagctgagcaagcaactagggctggcccctcgccaggtcaagttctggttccaaaaccgccgcacacagatcaaggtaatgtatatcttacgtgatatggatttttgtctgactatagtagtatatatatagtttatgaatcaatcatgcatggacaggctattcaagaacggcacgagaactccctgctcaaggcggaactagagaagctgcgagaggaaaacaaagccatgagggagtctttttccaaggctaattcctcctgccccaactgcggaggaggccccgatgatctccacctcgaaaactccaaactgaaagccgagctcgataagcttcgtgcagctcttggacgcactccctatcccctgcaggcttcatgctccgacgatcaagaacaccgtctcggctctctcgatttctacacgggcgtctttgccctcgagaagtcccgtatcgccgagatttctaaccgagccacccttgaactccagaagatggccacctcaggcgaacctatgtggctccgcagcgttgagactggccgtgagattctcaactacgatgagtacctcaaggagtttccccaagcgcaagcctcttcgtttcctggaaggaaaaccatcgaagcatctagagatgcggggattgtgtttatggacgcacataaacttgcccagagtttcatggacgtggtacttttccattatttattactgttaccagctactataacttattctatgtgtataaaaaggaattgatgtgtacgtgtaacgcgcagggacaatggaaagagacatttgcatgcttgatctcaaaggctgcaacggtcgatgttatccggcaaggcgaagggccttcacggatcgacggggccattcagctggtgagtactcatcaatatatacatatagtgataattgatgaatgacgactcagctgatacatgggatggatatggtttataactattgtggcagatgttcggagagatgcagctgctcactccggtcgtccccacaagagaagtgtacttcgtgagaagctgccggcagctgagccctgagaaatgggcaatagtggacgtctcggtctccgtggaggacagcaacacggagaaggaggcttctcttctgaaatgtcgaaaactcccctccggttgcatcatcgaggacacctccaacggtcactccaaggtcacctgggtggagcacctcgacgtgtctgcatccacagttcagcctctcttccgctccttagtcaacaccggtttggcctttggggctcgacactgggtcgccacccttcagctccattgcgaacgccttgtcttcttcatggctaccaacgtccccaccaaagactctctcggtccgtctatatatccggatcctccatttacactctctatctttctttatatataaccttttcactcctctgttgataatcaggagttacaactcttgccgggagaaagagtgtgctgaagatggctcagagaatgacacaaagcttctaccgcgccattgctgcatcaagctaccatcaatggaccaaaatcaccaccaaaactggagaagacatgcgggtttcttccaggaagaaccttcatgatcctggcgagcccacgggagtcattgtctgcgcttcttcttcgctgtggttacctgtttctccagctcttctcttcgatttctttagagatgaagctcgtcggcatgaggtaccttgtcaaattcacacacatttaagcaaacaagaaaagcggtttccactcatatatttatctaacgatacatatcatcagtgggatgctttgtcaaacggagctcatgttcagtctattgcaaacttatccaagggacaagacagaggcaactcagtggcaatccaggtgcgtttattttgtcttctcctcctgtaaatctgtctaggccttgataatctgaatttctatacatttccagacagtgaaatcgagagaaaagagcatatgggtgctgcaagacagcagcactaactcgtatgagtcggtggtggtatacgctcccgtagatataaacacgacacagctggtgctcgcgggacatgatccaagcaacatccaaatcctcccctctggattctcaatcatacctgatggagtagagtcacggccactggtaataacgtctacacaagacgacagaaacagccaaggagggtcgctcctgacactcgccctccaaaccctcatcaacccttctcctgcagcaaagctgaatatggagtctgtggaatccgtgacaaacctcgtctcagtcacactacacaacattaagagaagtctacaaatcgaagattgctgatgacaagtcacagcagatattatttacctatatataattatatgataatgtatagcagcagtgcattaaagttttgtacaaaaacgaccagctctctcttctccaatcctattattatccaacacctttttggtccattccattggcaaatgaaccataacaagaggagcaagaaccgtagaattagcagaaacaaaagtcggatcactgagaccacaagcacacagtagcaacagaaacatattaattcacattctaaatgtaactggaggtgaagatgaagtaagagcaaacaattggtagtcggaaacaatcagattgaaaacacactcatggcataagcaatgaaatcacaaaagcattccataaattacactggttccgggatacacaacaaacaaacagaagcagagcaaaaaaaagacggctttaccaaaagaaacaaagagcaatcattctctacgccggctgctgagactccaagggaaggccaaggagttcatctcctccggcttcggctttcctggcggcccttgcgatgacaggaagcgccacaaatgatttagtcttactgatgggtctgctcttttccagtctgaccacgtcgccaaccttgaactgattatcggggtcgtgagcttggtacttcttcttcatcctcacgcgcctcttgtacttggggtggggagccagcctaaccacctccaccgccacagtcttgtcactggttgcgcacaccacgcgcccctgcatcgttttcatggctctgatgaccggaactaaagcgggcattctgtggttcgggaaggaattgggcttagagagagatgagagaggagtggagccatgggcgaacggagacgaaagcttgagagcttgcagagatgaggttagggacgacgttatcatccttccgatttggaatcgaatcgatgaaaatgaagataaggtgagtactactactatttagaagggatgtatacagtatacagatggtaaatgggttttacaataaactgggcctaatcttaaaagcccaccttttcataaaaaggaatttacaaaagcccttttgtaaagtttttgaatcctaaaaataattaaataatcaataaatctgtcttcgctcttttttgcgcctaattttccacacaaatatcaatgccgtgccgttggactcttgacaccgcctagggtttcgaggtatgaggtcttcttggtcgtgacgacgcttagcttctcctttatcaacggatcatccggtagatccttcttcgactccaattcggcgttcgcggcctgatcgaagtcccatcccatgaaatccgacagcgtcatgctcccaaccagcgtctcttcctctgcttccaatggcgtgttcctcttgttccccgctcgatctgcctctaaaacgtcatcgattctggaaagtaccgtgtaggccaagctttccagtattctcgagtagctctccagcaccgcctggcccacgtcctcgttgaactggattttgctgatgtcgagtgaagattgagaaatcccggggtatctttgcttgagaatgagcaaaatggtctcagctcgctcttcgaagacctctcgcttctccagacttactccggaggcccagggtgccgatgatttgttgtctttataaaccattttgcgtttccatataatgattgatgcctcgattctgtttttgaggtccacgatcttgtgctccgacgacatgtccatgctgctcaggaactggtccgggtcaaagaagtccaccgttatattcttgtacatctgatccccgagactcgcccttccgttctgtttatttatttattacaaactaaaccagtgagtt

SEQ ID NO: 71476 - DNA, 145 bp, Arabidopsis thaliana landsberg
gctacgcaattcctccaacctctgaagcttagatcggtgtcttaagcagcaaacttcttcagataatctgttggatttccaagttgcagtgacaacttcagtaactgatcgataacttcattaaaccgaatcattgtctgagctt

SEQ ID NO: 71477 - DNA, 587 bp, Arabidopsis thaliana landsberg
cagacgcaccagcttgtctttgttcggtttcgggaaagacccggtccccccttctggaaatcccttcagtccgtcgacgacagcgatcaggatgtcatttgtaccgcgcgccttgatctcgttcatcacgcgcagccagaacttggcaccttcggtctgttcgatccacaggccgagcacttccttgtgcccggacgggcggatgccgatggccagatacaccgccttattccgaaccagtccttcgtcacggattttgacccgtagcgcgtcgaagaagacgatcgcgtaggtcgggtccagcggccgactctgccaggcactcacctcgtcgatcaccgaatcggtcaccgacgagaccaggtccggcgatacctcgatgccgtacagctcgcgcacgtggccttggatgtcacgcgtgctcatgccgcgggcgtagagcgcgatgatcttgtcgtcgaagccggggaagcggcgccggtacttggcgatcagtgccggatcgaagcggccatggcgatctctggggatggacagctcgatcgcgccgtccggcgtaaaaaccgtcttggcgctgttgcccgtgc

SEQ ID NO: 71478 - DNA, 123 bp, Arabidopsis thaliana landsberg
  unsure (1)..(123): unsure at all n locations
ggcataattggagaacaatannttgggggggaaaggtcgcaaaaaaaaaaaatnccctacctttgagtgcgttttgaactatttgatttacgtacctgtaagtaaccaattccgtttaccacg

SEQ ID NO: 71479 - DNA, 320 bp, Arabidopsis thaliana landsberg
ggaaaagccggcaggaaaacagattaccctgacccgacggggcaaagacccacgggtgggagcccaccaaaaaaggccggcccccgaacgaggcaaattcggaggaacaacccacaggccggacgagacactgcacgcactacgccgcgaggcctacagtagccaacaaggggccagagcgaccatcctcatgattcgagaggcaaggcacgccgccggaagacaccacagcccatcgggggtccccaacgaaaggggggcacctccgaaccacgcaaggaggaaaaccgtgcgcactcgccatacagcccgccaccacc

SEQ ID NO: 71480 - DNA, 498 bp, Arabidopsis thaliana landsberg
  unsure (1)..(498): unsure at all n locations
gctgtgatgtcggtgtgtatatggccaggagtgatggagttgacgcgaacctggtcaggtttaaactctcgggccatggccttacccagacctaacacgccggctttggcagcactgtagtgggggcccccaaagataccaccgccacgttgggcggaaaccgacgacatacatacaatgctgcctgcggattgggctcgcatcgtcgggattacggcttgcgacatgaggagggtgccacgcaggctgacgtctagcaccttgtcgtaatcggannnnnnnnnnnnnnnnnnnnngattggctgggtgatacccgcgttattgaccagaacgtcgatacgtccaaagtgttcaagaactttagccaccgcggatttcacttgcgcttcatcagcgacgttggctcccagccccagatggccctcacccagagtttccgcagcatcacgtgccgaggactcatctagatccacaattaccactttggcgccatgttta

SEQ ID NO: 71481 - DNA, 437 bp, Arabidopsis thaliana landsberg
  unsure (1)..(437): unsure at all n locations
aaggccagnagtcgaatggaataaacctaaacccaccagccatccggcacaaccgacagaacctgacgaggaaacgataaaaccttcgggggcccccaacaccccaggaagaaacggaacgcatacccctccgaaaagacgccgaacggaaacacttccctaagaaatgctcctcacgctccggccaaaaaaaaaagaagtagtgcccctcacactaccgcaattaacactcaagtctccgataacaggccgaacaccacccaaaacgaccgacaactcacaacaacaacaacaaaacaaaacagcgaaacctaaaaaaaaaaaaaatacaccgaaagccgcgtaaaccaccgaaaagctcggctcccgggcagaaaaacccgaacttgcacccaggtgcgtcaaactaacaaaagggcacagaaacgctcaacaaa

SEQ ID NO: 71482 - DNA, 741 bp, Arabidopsis thaliana landsberg
ggcaaacatctgtcgtgcaagcaaaactccctaaaccgtcagataaaatcaacgaatacctgcatcgatcgatgtctaagtggttttatccatatattctccatgactttcatccaacatctcaaccacaggagcatactgcatcatgtcaaattaatggtatgagcgaaagagaaagaaacttaagacaaagctggaggcagatatatttacctcatcatcttcttcaaagtaaatcccgtcaacagcgctcttcttctgaaactcccatcctaatctgttctcaagcaactctttgaacttccttgtctgcaaaggtaaatagagaaacctcatgagacattgatgaaaaaggttgtgaaatactatgtagaatttttacttacccatgacaataaatctccatcaactacagacgtctcttccactaatgcaaagaagtcctgtcatcaaagcaaagggagtattcgacttaaaatcttctagatcatctagaatgagttacttaatatgctaaacgtatattcaggcagagaaaacatgtctttggtcagaaatacaccttacaaaggaaatgcagaaagctatctgaagctagccaagaatcatcaagaagcgcatgaatgcccgtctcaagaccactattctctttttgtagtccatattttagttggtggtagatgactttgatgaactgtaacaaatgcaccagggagaggtaaaaaatgagtttctttttgt

SEQ ID NO: 71483 - DNA, 475 bp, Arabidopsis thaliana landsberg
aggagttacagcgaatggccctctcccaccgtttttaaatcctccatccccaccggaaccgcgggcgcgggcgcagttgtaggagtcggcggcagagcacaaatgtcatgtggattgggtgagaaatgcgacttgtttgacatatgaagcaatggtgaagccattagggtttgagaatcttctttctatagcactgatcatctgtgagatctcttcaaatttcaagaactttcgtaaacaatggcgattgaggatttgagggtactgagttactgtgttaatcggaaaatgggggtgttcccaaacgttgccgtttctgttgacttattgctgcatatttgtaaaatcatgcctgtggtttgagttcctgatgggaagagatttattcttttagttttggtcgaatccccctaagttatagacattacgcccatatcatgctgataacaaagaaaacgctccaaaatttaatttt

SEQ ID NO: 71484 - DNA, 511 bp, Arabidopsis thaliana landsberg
atggcatggacataccgggccgacgggatcggcgagctaacctcggcaatatactgctcgatgacatcgaggcgatcttgcgcctcgggtgaaaaaatgacgcgccagctcacgcccgcgagcggccggtgcgtgcagcccttttcgaggtgaggtgtttgcgcacctggtcgatcggtattccgcgcgacggatcactttcaagtgcttcggccgctggcaccacctggtcacgcaaccaagctttgacagccttgtcgcgggcagccaacgtgcgcaagccatcgcggatgacttcgctttcggtcgcgtactcgccggcggcgaccttcgatcgcactaagtcggccatttcattcggaagggtgatgctgaactgctgtgtggtgcgcatacgtggctcctcgagaagcgtaggattaaatcctacgccatcgcgcgaaaactgcaagcactctacgaccatttccccagagggggcggatggttactgatgagattggcggttttt

SEQ ID NO: 71485 - DNA, 486 bp, Arabidopsis thaliana landsberg
tgatgatgttcgaaaaaagactgatctattttgtccatatattatttttccaagttctaagttcttacacgtggagggagtaagactctagatgtacaagagtttgattttgcatgcagtttaatttatattattgatttttttttaacaatatagctataaaagctataaaagctccaaatctgttctctcctctcgtctgtcgtcatctcccccgggggttggcaatctccgtttgtgggcatgtggtgggtgagcatccaggggtgttttagtctttatcaaataacaaaattaagctaattgttaaaccaaaaaaaaatattaagctataaaaaaataattaacttcaactcaacattttttaactaaaagaatgtacataatgcatggtaacatgctaaaaaaaacatatcacaaattagattaactccatcccaaatttaccacgaaaacctttagtttagctcacctctagtcttttag

SEQ ID NO: 71486 - DNA, 556 bp, Arabidopsis thaliana landsberg
ccctgaatccatctcaaccagtgcatacctagtgggtattctatgggtcgaagaaacccacttgacacatccaacgaggggattattgctcaaattggacaagttttaccttgtaaccgagttttcgcaagcgtttccccaaagaaagtcgcctgttctgcacttttttttggattgtaatccaacagtcattagcaaacaacgtatttgccattccagtaaaagatcactagctaaatgggaggaaggacaaaataccactagaaaagagcgacgagctcttaacatatttcgttcataaccatgtgctctaagaaaaatccttcttaacagaaaacattataacttgaaatccgtaactgctgctcaacactttgacgaaatccaacattgctcaacaatttgagaaaacaaaaaatgcacaatcatcaaagaaaataccataagataaagaaagccaatagcaaagtgataatcaagcttcatatacagaaatccctaacgcagaatcaagtattactaccttgaaagcgaccaaaccatacctttatgaaaa

SEQ ID NO: 71487 - DNA, 762 bp, Arabidopsis thaliana landsberg
cattatcctgtaaatttgtccaatgaatacaaaatttattattcaagtttcattctacatatttttattttacaatttatgtcgttatgcaattatacaatattatcaataataaccactaaatacaaatgctaatttgcaatgtatctcatttgaggagaatatactaaaagcaagtctaccagaacgaacatcattacacctatcttgtgaagttgtgataacatccttcttaagaactagttgtatggcaaactactacatatatggttcatgtgaaagaaccgataggtgaattactatcatcatatatattcatatacattaggtggtatttacttactatatgtgtattcgagtaacagtttttaataaaaaaatatcactctttaatactattttaaaatgatcaagctttctgttttaaaaactctttatcaaaattccagatacacatacttaaaacacccgaaaatatatgttgaaaacacagaactaagagcatccacttacttctttatttgatgtgtcgaagactagaaaattcttcttaaaaacatctcctccagagatactcaaaacgatcctaaccgtttttatgtgacgcatgttcatctactcagtactctccaacgttttttccaaaccaatttggaggacctcgcacaaaatagctttaatcaaagtcttttgctcccaactaattgcctttttaaaggggaaacctaaaattatgcacatatacattataaaaatttcgat

SEQ ID NO: 71488 - DNA, 695 bp, Arabidopsis thaliana landsberg
  unsure (1)..(695): unsure at all n locations
cagggaaaagcanaaactgagagctgcatattggtgttcctctcnagattaatatctgagagttatttggactcnntttttgcactcaagcgtccgttttgtgggaaatgtcatggtgtaccctcgctcagcatgaatacttaactcttgcttcgaacccctgccgtaaaccaaaagtgtaacatcagtacggttcaagtagccaatagaggggctgcttgcggtgtcggcttgtgaatagcaagaagaaactttatcggccctctgnnnnnnnnnnnnnnnnnnnnnnnnnnnnnnnnnnnnnnnnnnnnnnnnnnnnnnnnnnnnnnnnnnnnnnnnnnnnnnnnnnnnnnnnnnnnnnnnnnnnnnnnnnnnnnnnnnnnnnnnnnnnnnnnnnnnnnnnnnnnnnnnnnnnnnnnnnnnnnnnnnnnnnnnnnnnnnnnnnnnnnnnnnnnnnnnnnnnnnnnnnnnnnnnnnnnnnnnnnnnnnnnnnnnnnnnnnnnnnnnnnnnnnnnnnnnnnnnnnnnnnnnnnnnnnnnnnnnnnnnnnnnnnnnnnnnnnnnnnnnnnnnnnnnnnnnnnnnnnnnnnnnnnnnnnnnnnnnnnnnnnnnnnnnnnnnnnnnnnnnnnnnnnnnnnnnnnnnnnnnnnnnnnnnnnnnnnnnnnnnnnnnnnnnnnnnnnnnnnnnnnnnnnnn

SEQ ID NO: 71489 - DNA, 332 bp, Arabidopsis thaliana landsberg
aaaacactgtactctgaacccgacatttgtccactcatagaaagtagggcccatgcctgggattcggaccaaacgtattaagtactgacaattaataccggtagggggaaaggtaatgaaatgccctttacttagcatatgtaccactattgagattacctaatgatggaggcctttgaaatccatgtaatgattcttaaactctttggactggagggtatacagacgggagcactgacatactgttttggaattgacagtacaatatattgcccttcgctattttacagtaaacaggctgagcctcaagagcgtttttaaggaccactaca

SEQ ID NO: 71490 - DNA, 222 bp, Arabidopsis thaliana landsberg
ttaatgcgaacatactcaaaaacaatttttatattataatatttgttttaacattattaaagaaaaaaacttctttataattcggttgagagtaagatatatcacaataaagcaactgaaattaagaactgatattttatctgattgttaagaaaagatttattatcttctcctaattgagatttataagacctttcagcccttcctccttctcactcccta

SEQ ID NO: 71491 - DNA, 574 bp, Arabidopsis thaliana landsberg
ataagccatgtgcaacacaaaacaatcataaatcacactcaataaaaagacaaagaatgaaaaaactaaccctttctggccgggtcttatgctcttaaccacttctttaactcctctcttcaagcatttcttcccagcagctgacaaaaattacagagcaatacaccaacatgagctactaatcaatatataatgagaaataaagaagatagagagatgtgaagcgagcttggaactgagattggtacctttttgaatgagtttgaaagttctcttctggagttttttgccggcgagaggtttagcgataggagcaagagtaatagcgtacttcttcttctccttttgaatcgacttctctgcttcggtatcgcttcccatattttttagctagctagctccaagtaacaaaaataatggcggaagagtgtggcggaaaaaactagggtttaggcggttgttatatgaccagaagtgttagggtttttatagagaagtgtattattgaccagtaaaatataggaaccctaatttcatatgggcttgttaatgaggtaaactggttgcatataat

SEQ ID NO: 71492 - DNA, 491 bp, Arabidopsis thaliana landsberg
tatgtcttgaaaatctttcgattatatgaaaacattaaagatttaattaataggacaaaaacaattcaaaacttggactataaactaaaagcgtagataatagaagttttggatctccagcaggaactagtacgtaatactatattttgtccgacaaaaaaaaaagtaatacgattttgtaaggagataaaacaaaacaaaactaaactaaactaatatacaaagttatgcttgctagttgctaaaatagaaaaactcaagtcattcaaagtcaatacgcgttttaaagtaaacgtgataatatctgcgtttactttgagtcatttaaaattttaacttagtactattaaaagataaaaatcttgctttatactggctatctatcacattttaaaattttcaactaaacgttgactacctttactttgtttgaaagtatgtaaaaaaaggaaaaactgaaactgaatttattaccgaagaaaaaaatccaa

SEQ ID NO: 71493 - DNA, 571 bp, Arabidopsis thaliana landsberg
  unsure (1)..(571): unsure at all n locations
atgtgaagatttaggtcaaagtaatggaaaaaagtgtctcatggaatatgttagtcaggcggtctttgtaaaaagtaaaaagagaaaaaactataaactacatgatgtttaactcttcaagtgacgtcaagacataaactacgtgccgtttcgcactattcgtaatccaacgggcgagactggaatgaatttatgaccagatcttggttttttcttgtcgtcttcttcaccgcttaccagttactaacttgagcttcagagatcatcatcatcatcacttcctctctctgaagaaacacaatttggagttttctaatcttcattccaagtgagtacttcaatcgaatcccttttctactattcaataattcaatctattattcaaagtctcgtctatctgtttcgatgattttgaggttttcgctcccttttgttatcaaattatggaatctgattcccaatttcgcgtttgtatgtactcgattttctctttttttcttgcatgattacactntggtgaagttcagaattcgagtaatatcacttgaaattgctactctctgcctattca

SEQ ID NO: 71494 - DNA, 342 bp, Arabidopsis thaliana landsberg
actgtcctctggctggatgcggtagaagaagcctctgttctacagataagccttgacacgaagaaatatggcgctcctaggagggatgaatacacgtttctaataggatctcttgtgggcaccccactacaagaacagatgggttgttggacccaagattctgcagccaaaggaagagtttcgtttctatctacattcaactatgtatctgtcaactataatgctatatgctacagatagccccaggttattctttcttagaaaggatctgttagtgccgagtgctcagggacgctttaaacatacgtggagacctaacctgaagaactctactcgtggcca

SEQ ID NO: 71495 - DNA, 656 bp, Arabidopsis thaliana landsberg
  unsure (1)..(656): unsure at all n locations
ctctacgtattcttcggacggcatgcgctggatgaagaaggacatgggcggctccgcccacgcgatcgcgctggccggcctggtgatgcaggccaagctgccggtgcgcctgactttgctggtgcccgcggtggaaaattccgtggccggcaacgccatgcgtccgggcgaagtcatcgtcacccgcgccggccacagcgtggagatcgacaacaccgacgccgaaggtcgcctgatcctgtgtgacgcactggcttacggcgccgagcagaagccggatctgatgatcgacttcgccaccctcaccggcgccgcccgcgtcgcactcggccccgacctgcccgcgctgttcagcaacgatgacgcactggccgaggccgctctggccgccggtcgcacaaacaacgatccgttgtggcgactgccgttgtggcgtccctacttcaagatgctcgactcctacctggccgacttcgccaacgccgggccgtcgcgccacgccggcgcgatcaccgncgcgctgtacctggaacgcttcgtccccgacacccagcgctggatgcatctggatacctacgcctggaacgacgccgaccgtcccggccggccgcgtggcggcgaggcgctcggcttgcgcgcggtgttcgcgatgctcg

SEQ ID NO: 71496 - DNA, 603 bp, Arabidopsis thaliana landsberg
  unsure (1)..(603): unsure at all n locations
acnnnnnnnnnnnnnnnnnnnnnnnnnnnnnnnnnnnnnnnnnnnnnnnnnnnnnnnnnnnnnnnnnnnnnnnnnnnnnnnnnnnnnnnnnnnnnnnnnnnnnnnnnnnnnnnnnnnnnnnnnnnnnnnnnnnnnnnnnnnnnnnnnnnnnnnnnnnnnnnnnnnnnnnnnnnnnnnnnnnnnnnnnnnnnnnnnnnnnnnnnnnnnnnnnnnnnnnnnnnnnnnnnnnnnnnnnnnnnnnnnnnnnnnnnnnnnnnnnnnnnnnnnnnnnnnnnnnnnnnnnnnnnnnnnnnnnnnnnnnnnnnnnnnnnnnnnnnnnnnnnnnnnnnnnnnnnnnnnnnnnnnnnnnnnnnnnnnnnnnnnnnnnnnnnnnnnnnnnnnnnnnnnnnnnnnnnnnnnnnnnnnnnnnnnnnnnnnnnnnnnnnnnnnnnnnnnnnnnnnnnnnnnnnnnnnnnnnnnnnnnnnnnnnnnnnnnnnnnnnnnnnnnnnnnnnnnnnatagctcgctacttggcacagcgcgatcaagatcactatcgatgatgctaaggtgagtgtttagcgctcatcagctactgcagcggactcactgtcgaggaagatc

SEQ ID NO: 71497 - DNA, 176 bp, Arabidopsis thaliana landsberg
  unsure (1)..(176): unsure at all n locations
aaagaagaaaaaaanaaaagaggcagcgtggagcaagacaaaaaggaggaaaagaaggggaaaaagaaacaaaaaaaacagagaaaaacggaaggaggaattttaagagagcacgaaaaaaaaagagaaaggaaggaaagaagaaaaagggagaggaaaggcaggagaaaagagag

SEQ ID NO: 71498 - DNA, 420 bp, Arabidopsis thaliana landsberg
agatcgagccattgatactgtacactgatgacaaatcaaaagcatagggaccaactttcaatttcatgaacaaaaacagaacatcatagtatggacctaaacggatcaaacgttaataacttttagctcaaaatcagtttcttttgggaattctcagaatttgatgcatcatggagaccatacccaaatcaaacacaaacccagaaaacctgtaagaatctaatgcaagtatgcacaaagagaaatggaatttggaaatcaaggaaaatcaatcgtgatgatgtgtacctgaagacgagatccacgagtagtgaactttgaagcgagagagaggaagctggtgttgctaatgtacgtggaataagacatcaactaggagctatataagttgaagattcacctgatccattatctatatac

SEQ ID NO: 71499 - DNA, 195 bp, Arabidopsis thaliana landsberg
  unsure (1)..(195): unsure at all n locations
acactaataaagcaaatccccaacacacactattggctaggctcatgcataaattttcatttccgcgacaagagaagggnccatcggaacaaagggtgatagtagttcggggagcccccctaatgaagtgagaaaagaaatgacaannnnnnnnnnnnnnnnnnnnnnnnnnnnnnnnnnnnnnnnnnnnnntca

SEQ ID NO: 71500 - DNA, 297 bp, Arabidopsis thaliana landsberg
  unsure (1)..(297): unsure at all n locations
acccggtaacacatgtgcgggcattgacttatacctctactctgttgaggcttgacagtggaaggggacagacctgcgaacaggttgtggctactggaccagccccatggcgtgcgaccaatatgacgagggatgtgactgacgagctcactactggagacttgactgagaacctactagctgccacacttggggacggggagaagcgggactctcaataannnnnnnnnnnnnnnnncagcccccgaagcatactgagattttggcgatggcaacaactcgctggaggttcacatt

SEQ ID NO: 71501 - DNA, 458 bp, Arabidopsis thaliana landsberg
ctccaataatgacccatgcactaacataatcgaacatgaccaacacgatctccctcctgttgtgttgaaagcagatccacctgcctcctccatgccaataccacccacgctcactaagagcaaattaagacgtattcgcaagcgcacagtccaacttcattcctttactgctaaacaagccactcgaaccttactttacctttgtgggctcaattaacggtcaccctgcacgcattcttatcgatggcggtgctgaaggaaatgtcatcagctcttcatttcaaaccaaacactccattccatcccattctcaccaacccattcctattgttctccctgatggcgccttctctatcacctctcatgccgcctccatccacctcgatcgcgacaactattctgacgacctagagcccctcatttacaacttgcaaaaatatgatctcattctttggaaa

SEQ ID NO: 71502 - DNA, 731 bp, Arabidopsis thaliana landsberg
tttctatttcttcccccgaatcttatcaaaattatcattgtttttcttgttacgtaaccttagctgtctaaattaatgtactagtatactaattcccacgatatgttcccgacttttactctaatacactaagccctagaaaacattacatcaagaaactttcagatagatatctatcatcattcatcaaagtaaacttgattaagctaaagttcaacatttgtaaaggtatacaagtttgagatcgttaatgaaaaaagtatgattgtttctgatgtaagagttttttcactgaatttcaaaataatctatgaaatatgttaaaacattatgtgtctttaatattttaagcttctatagcaacggaaaataattgtatttgcaatggaaagattatagtattggtttatcaatctacgaagatttgacaaaccgaactaatctggtccttcgaaaccaacatcgattagctcaactgtttgaactacgactacgatattccaacgtacatcaatatacagacgtactaactccttgccaaaaaaagtaaagaaaaaaagagagagtttagactattaactgttagagaacacgtaagtaaaatgaaaatgttgaaagttggattctgattgaggaagttcttcggatcccttttgtggttgcggtggagaccccactccttagttttcacactttgacatttacgtgattctttctcaactctttttttt

SEQ ID NO: 71503 - DNA, 501 bp, Arabidopsis thaliana landsberg
tacccacctcttttggttatggttcaatccctctgcctcgtatagatcaactcgttccatatacacactcggtacgaagcaagtattgaagcatatgtaactcgttcgagcttccacgaaattttgttatcttcacaaccttaagcgttttttccaaacactcgtaaggtttgctagtgagccaatggcttacaggatctatcactaaaggcgatggagctctctgcaaagtttaattaaagttaagggttttaccaaatagcatgacctagaatcctagaacctagatagatgtatattgtaataatgtctattgacttcatcaacgttaaagattaaaaaaaaataatagcttaccacgaaacgactactagtaaccaaatcaaacgtgagtgattccagttccggacaactattgagaaatatgctaattcccacgaagtcatttgcgtgcatatttgttttcatcaccaaatgtcgagttttcatcgaatcgtgcaa

SEQ ID NO: 71504 - DNA, 613 bp, Arabidopsis thaliana landsberg
aatactccgtaatctttttttgttgcgatatgtcaggatatattttccgggttgcagggcatattcctgctgcctgtattcggtattgaggttacacacaaatttctgttttccgtcctggatcacaaaaatactcccgtatccctggccggcaatgttcagcttcaatacacccggggcgggaatttcaattttgttgatggtgctttgcctgatctccaccttgttgatataggttcgcggcaaggtgagtatttccagatcgtaatcgcccacgagaaatttttcggtctcgccaatgttctgtacatgcagggtttgcatttgcccttttttgcgaacaatggcaggcgtacgggtcacatatttattgttgtttttgaccctcaggtccagtataccctgtggggcatcgatctcaatggtattgtgaacgcccggattaagtatgatgctttctttggttacctcgggaatggtatgcaccacaatgcggtaggtgctcaccgcgtccagcactatggtattgggatacccgtactggttaatggtgtgctcataattgtgccttatattatcggacttttgatccgaaatagaatacgacacattg

SEQ ID NO: 71505 - DNA, 564 bp, Arabidopsis thaliana landsberg
gcacctaacacttgtgtatgtgcttactcttaacacactcgattatcaattttctagatggataatgtcaaagttgacatcaaagtttcaaaactatgcatttataataacctgaatgcatcaagtatcaaacactacctcaactaccatgacgagatcagtatattgcaattacttcattacactttgcgtagctacacacgtagcacattcatatacacatacgtaacgtaccaccctacgtggactcaggaatatctcgcatatataaatttactattcttaatgcaaaaaatatgtctcctttttttttttttgggtgtaggtataagaaagtgacaattttatagacaggtaatgagttgtgaagagtgaggcacatcacatatcgctaaaattagctctaagccaaacgtaacatttaaagcttaaaagactgtagtgtaacagctttgcaaggggttggttcgagtagggtttgtcttgtcttctagagaagacagcttctcgacccatcagttaattatagcaatattttcaccagcaaattgacattgcctttat

SEQ ID NO: 71506 - DNA, 683 bp, Arabidopsis thaliana landsberg
  unsure (1)..(683): unsure at all n locations
nctctggcaaatctaacctaatggacgctattagcttcgtcctcggcgttcgtaccggtcaacttcgtggttctcagcttaaggatcttatctacgcttttgatgatcgagacaaggaacagagaggtcgtaaagcgtttgttcgactcgtttatcagatggacgatggagtagagcttcgtttcactcgttctattactagcgctggtgggagtgagtaccgtattgataacagggttgtgaatttggatgagtacaatgggaagctacgatctcttgggatacttgttaaggctcgtaatttcttggtctttcaggttgttgcttcgatttaattctatttttgtattgtttctacgaacgattctgtttgtttgatgtcaatttcgtgtttaattgttctggattgcaaaatgtagggtgatgttgaatctattgcttcgaagaatccaaaagaacttactggactcctcgaggagatttctggttccgaggagcttaagaaagagtatgaacaactagaagaaaagaaggccagcgctgaagaaaaagcagctcttatataccagaagaagaaaacaataggaaatgagaaagagttgaagaaagcacagaatgaagaagctgagaagcatcttaagctgcaggaaagaactggtatttatgtggatttgctggtttta

SEQ ID NO: 71507 - DNA, 582 bp, Arabidopsis thaliana landsberg
  unsure (1)..(582): unsure at all n locations
ccgaagcggtctttcttccggtggatttccctgtctacgaagaagtttcggcaaccgtgatgcagacgctgagggacattcctggcgcggttgtcgaggtgctgggatgggacgaggccttcgttggtctcgaagcggatgatccggccgtcgccgcacgggcagtgcacgatgccgtgttcgcggcgaccgggttgcactgcagcgtcggcatcggagacaccaagatccgcgccaaggtcgcaaccgacctcggcaagccgcgggggatcttccggctcacccgagacaactggctcgnnnnnnnnnnnnnnnnnnnnnnnnnnnncctgtggggcatcggtagtcagacgtcgaaaagactggaaacacatgggatccgcttggtgcgcgagctcgccgaggcctctgacgacctgctcgcagccgagttcggccccaacaccggcccgcacatcgggcggctgggacgcggtgccggcagctcgaccgtcgacgacacaccctggattgcacgtgcgcacggccgggagacgacctaccaggccgacctggtgacgccccactaggtccgcgcggcgc

SEQ ID NO: 71508 - DNA, 3151 bp, Arabidopsis thaliana landsberg
atgacattacaaatcatttaaaatctatataaatcacaaaccaataacaccctctaaataaaaaatatcaaattaaaatataatcgtcatcttcatttttttttcgttccgcatatggtgccgtgtttttatttctttgatttgtaaatccttctatggtttctcaatcgagaagaaggaacccaacactgagatccatggcgatggtatttgcacaacccaagaaaaacctacttcctctcattctcttcctcttctgtatctccgtcatcattctcctcgttctcgtctccgagaccactcactctaacgccggacgaggaactactttccggcgaaattacaatgatcccgctcctttcactttcctcatcaaggtcctcacctttaaccgtctccattctctctcccgctgtctcagatctctctccgccgcagactacggcgtttccggagacagaggacgcattcacctccacgtctacattgatcatttcaacctcgcgaggaacgatacacctgtggaagataacttgcaaatcgcgagggaaatcctagggtttgtggatagattcgagtggagatttggggaaaaagtagttcactatcggactgataacgctggattacaggcgcagtggctggaagcttggtggccgatctcagatcacgaattcgccttcgtcgttgaagatgatcttgaggtttctcctctttactatggaattctggaacgcctgattctcaaatactactatgatacttccaatttcaatccttccatctatggagcttcgcttcagagaccaaggtttgttccaggtaccattttctattctgtgattcagctatggagattgtagaataaacctccaagaatttagggatagatcatagaaggagattgatatatacattgtagttgaatctggtgatacattgttcaaatagagagtagcagaagttgattgaagaagtgtgattcttatatgtttcttggatatacattcccagatgatagagctatgcaagtgtagatcagtaagaagtaggatacatgagtttgttagttactagaagtgtctcaaatagtgattgaatgatttagtggtcaattgcaggtaaacatgggaataaactacatgtagatcccaaaacgaatctgatcttatatcagttagtgggaacttggggacagcttctcttcccaaaaccgtggaaagagttcagactatggtatgatgagcacaagtcgaaaggcaagaagcctttccttgatggcatggtaacagagatgcacactttcgtcttcatggatttcattgtttataaattctaagttatctgtcatttattatcttggtggatgtttttctcaggtgtcaaacggatggtacaagaggctgggagaacgaatatggacaccttggttcataaagtttgttcattctcgtggttattttaacatctatacaagtttcccgaatgagggggctcttagtgtctctcacagggatgctggtgttaactatggaagaaccgctgggccagactcacagttattgaataaaagttctctcagttctgattctctgaagctccaacccttgagcaaccttaagtggtacgatttctgtttcagtgaagttgttcccggtagagttgtgagaaacctgaatgaacttggcaccattcttccttctgtgcagagagagaaaaccataattctggtcagtctatatggtgcagacaagatgttcatcaggaacttactctgccatttcgagaagcttaatattcaaaaccacattttcataggccctagctctgagttgttccacgatctttcaagaaggggacatcctgtaattgatgcggatatgtttctaaacaagttgatcaaaagcaaaacttcttatccaaactcagtgaaggaggctctgggcaattcttacgttgtcaagaaatgcttagaacttggatacagcacctgggcattttcaagtaattcgcttttggttgataaaggtcgtctccttgacagagtcagctcagattacgacatctatatcggggagagctctggaattttgattgttcaatcttcatcagtcactcaaaagttatggagcaatgagtttctacacagcattgcatccccaaaacaaagtctagattttattcatctagtgaaagagctagtggagcaaaagggcaagaggattaagaccgtagagacgatgaatattgcagaaaataccaatgccaacagcgtaaaccaatcgttgggagatggcaagccggtggtgtattggtctcctgaggttgctcccaatatgattcggtcaaagctagaagagttgagcttgtggctcatcgatgatgatctctcttgcaaggccgtggtttgtcatagttcataacgttaaacacatattggcattttctggtgataggattgtgacaattcgttatttagttttgttgaatgttatatagaagatctaatagcagcaaccaattgtactcgttttatatcagttcaataccaagaatagattgtttgtaaccccaacagttgggagtttaactgacattccaatcttaacgcattgtcgactgaacagtctacgtaatgttcagtataggagtcatttggtcagtaaaagttccaagaacagtgacaccagatgagtattttttgtttgccttgcttgttcattttagatattctgcgcatttagcttgaacttgaagaacgaagataaatgtctcacctttttaaaatactaaaccaaaccaatttcatagtcatactaaatcaaactcaccttttgattttgatctaagaaagcgccaatcacaaccaaacaggatcataatgaaagagaaagataccaaacaagatcacaaaatttcacatcgtactgtatttgaataataagtgaatcaaatttaacaaaaagattaaaacaagaattattctaaatgagataattattttgattgattaacatataaagaggcgtatttcttcgatattgtcttatgacaaactagcacacttatacctggacacagttacattttaatctgttcaaacagagcaaaattttgatttcactttatttaagactttgccaccaatatc

SEQ ID NO: 71509 - DNA, 1627 bp, Arabidopsis thaliana landsberg
aacgtctaacagaacaagcaaaaagaccaagagactatatacgctgagtaaaataaccaatgacaaagagaggctactcgtttatcttgaccgtatctagtggttaagacaaagtgccatatatcaaagcatcaaactgtggtaccaaaaccaagagatatatgtcaaagagcaagcaagaagtatctaacgccacaaacccaactatgacagaaaggcaaaaccactttgaagatatatgtatgataacaacagcttcttcaaaaccaaaaactacaaataaagctatcgagcacagcctaaaaagtaacacatattcacgaagccccacaaccacttaaacaggtatgttcatgccaattgaacaagacaggcgtgtgaggcatccgcaaacacatgtttaacaaaacaaattaagaatagtgttattttgaacagattatacgccaagcaatgaacatcataagctaatatcaaggtaattcgaatcctttctcacttttcctcctcttattttctatctgctaacattcgaatatatacttaaagaagaaacgaaaagaaaatgattcttctgagagatcaaatggagaaaacactttatcaagtgctaaccataattataaagcaaaacctcgttatgtcactagcacatggtttgagcttagaacatatattttcagacaaacaaatagaaaccagtacctcacaagtcttcgacatgtttcttcagatcagcaatgcacaagatatcagtatggagattcttgtaaaatggacagactggatcacaattttttagaaatgcatgcttcttgttcctgctaaaaatatgaggcagcgagacataacttatctccagaacaaagaaataagcattggagaaagtagttatacctacaattgcagctaacatatatgtagacctaaagagacgttactcattgaaagaacaggatacagactaagcaataggtctctagtctaggaaccaacaagggagaaaactcaggcttgcactgaatattcttgccacctacgactgctccactagtcaaggacactcttaatactgtattcattaatcattctcagagaccagcaaagattacagagcccaaaaactgaaaaaaaaaactatgtttgactatgaagatcaaatcattccagtaaaagctttgagcaaattgtgattggcataattacaggaactgaagtactaaccaataaaaaaagaacctatactgttaagaatatgatccacagatacatttgtcaggaaaaaaatacaatatacagaatcctggcaaaagcctgcagtagtttttgtgcctctggaagtggatatatccgaaaaaggcctccatggaagagaaagtagtataactgtaactgtttgatgacaacactgataaaagacttgactttagtatttagaaaaccaaacctagaggattaaccttgttaatgagacactagcagcttcttttccattgatactaacaggagcaggccaacaaaattctaccttcacttcaagctggcctccaacaattcacggtaggtatatctggccgagacgggagcatctggggagcagtatgaccttaaatggtaaattaaaaag

SEQ ID NO: 71510 - DNA, 518 bp, Arabidopsis thaliana landsberg
gttgtttgtttgcattacctaagttggttttcttctttctggtttggtatatatattcttgttttgtttgtaaattactgtttacaatgactggagttttatgcacgattacttatataatctttctactcttctacgttataaccttttttttttttgcttgggaagtccagagcaaaatctgaccttaggttcggataaaccaacggctagtcagatgctttggttaacaacgacttgttactgattaaactaaaagtcgatcgattgttccgatgtagatagctgctccgtatctggttatgtcaacaaaagcaaaggcacactacatcacaaaccagtgaccaattccaaatcttttgtttcacaaaacgatccattgcaagtgacttcaatagaaatcaacaaagttggttcaattagccatagattcatacactgaggctcaacaaaatctagtctgtgtcctctcagtgttggaatccaaacgagccaagctgattttaattggagattaa

SEQ ID NO: 71511 - DNA, 4476 bp, Arabidopsis thaliana landsberg
tggtgaagaccatgatgttcctaagattgatccttcttgtatatactttgaagtgagtaaactctctgagttgagaccggtggctgtagaaaaggatgggattactggttcgttgatgagtccaaggaagacaacagagtctgcttgtgttattattcccccaaagatttttcgggttcttgataaaccgcttcacgagtttctcggtcacagtggtgatatccttgatatctcttggtccaagaacaatgtgagtcgtctttcttgaccttcccttcatttttacactgatgctttgaaccgaactctaggtcttaaaattgattttataaccataaggagctgcttttagaactacctagacaccttttttatgcatgtttcgttatgttttgagatctgtaacacacaagaacgtagattcagcccctgtatgtgtaatcttgaacagaaaactagaccgagttgctcattctgtgatattggtggcagcgtctgttgtcagcttcagtagacaatagtgttcggctttggcagatcggctgtgaggactgtcttggaatcttctctcacaataactacggtaatgttcttctccgtctatacaatgtcattgttttcctttcctcccttgttgttagtcgatcattcaatctgaacgccattgtattgtttttttttttgcatttttgcagttacatccgttcagtttaacccggttgatgatgatcacttcatcagtggttccatagatggaaaagttcgtatctggtcagcttcacagtgccaagttgtagattgggccgatgctagaggcattgtaaccgcagtttgttatcaacctgatgggcaggtgtgacttggaaccaaaaatccttttcctttatcgacttgactcgactcagattttttcctaaaagaatacattttccattgcaggcagtgattatcggaactttgacaagcgattgtcgcttctacaatgtatcaggtaaagctcataaataacacacacagacgcatgggcttgtcttagaaactccagagtttgagttaattagcctaagaaacctgatttcttacatagttatctctctttctggttcaggccactgccttcaacttgatggtcatatatgtctgcacaacaaaaagaagtcgtcgaataaacgaataatcggctttcaggtgcatatttcttcttaaatttgtctcccaagattgaacattttataatgatgcttagctagtttcttctgcagtttgattctactgacccaagcagtgtcatggtggcatcagcagattcacaagtgaggatcattagtggtcgcaacgttgtccacaaatacaaaggtaatgcttctaaagacatactactacatacactattcgaacaaaaatttgcaaattctgaaatgtgttaatcttctaggatctcgaaatgctggaaaccagatatcggcatcttttacagcagacgggaagcatatagtctctgcgtgtgacgattcatcggtctacgtctggaactgcgttggacacgaccctgaacagtcgtctcctggttttttctctcacaccaaacgacttaaaatccgatcattcgaaaaattctctgcggatgtttcagtagctatcccgtggtgcggatttacgcctgtactctccggcggatccgagctatcgccatcgctcttctcattagggcgcgagtacgttctcgattctcccaagggatctgccacttggccggaagagaagctagcgagctcgttttctccggtgaaagcgatccgtagatcgcattacaaattcctccggtcttcgtgccggagaacgtcggagtcatctcatctctggggattggttatagtcaccggtggttgggatggacggatcaaattgtttcacaactatggtttgcctgttcccgtttgaaatccaacgaggctacgaaacgctccttctcaaacgtcgacgtataaactcttctgtttcgaaagtggtgaagttagaagccatagtttttggagtttatacgggcctaagtttgggcctaacacggtggcccggtgggtcgtagctgagtgtcaccattatcggagctagcctgagctgaaggttcggaattgcttcatgggtagggaaaacgaaaagaagaaggggtgactcagatttttgccttttttaatcgtaaaaattattagtattatacttgtcagttctttttttttccttctttttgtaagtaataatatatagggaaatgtaactgaggcctgtgttttttcgtgtatataccatggttttctctccaatactatatttttggtacataatactggtgttacaaaaccttaaatcattgtgtaaatagtcatagtatgtggcgttatcaatttttttttaatataatattttttagaacagagtatttaggttatgcttatgcacacgactcgttctttaagatatctctctattatgatttttgtttccagtgtgagcaagaaacttgcatagttcttttcttccattcaaagatattcctatcgagatataagaaggaaaccaagtattattggcttatagactcgtagtgtagatatcaccgcggattatattacactttaactaataattaaaaaccattagaaattaaaaaattagaaccgaaaagaaatctgtaaatctcttgaccaacaaaagttttttgtaaatttatctttgctactgatgtgactctggtgatctcccaaagacaaagcaaagcatattttggaataccatttaccagcattctccattttgatgttttgattcttactacacttaacaatgaattatgtgctaccatttttctctctttctatgtttactatagtcggagttctcttaatcctttcaacaggtatttttcgtttaccatttttaatcttgttacttcactttttttttactttttcataatcattctgaaatagtgaaaatccactatcttgtagtatatatacgttagcatttgaatcaacgggttattttgttcattatcaggaagtgaagcgagtattggtgtaaactacggcacactagctaacaacctccctccaccgcaacaagtagcggagttcctcctccattccaccgtcattaaccgtatccgcctcttcgacaccgatcctcaaatcctccaagccttcgctaacaccggtatcgccgtcacagtaaccgtccccaacgaccaaatcccacacttaaccaacctctcctccgccaaacaatggatctccgatcatatccaacctcacttcccatcaacaaacatcatccgtatcctcgtcggaaacgaagtcatctccaccgccgatcacctcctcatcagaaccttaatcccggctatgcaatctctccacaccgcattagtctccgcctctctccaccgtcgaatccaaatctcaacaccacattctttaggaatcctcagtaattcaaccccaccgtcttccgctaaattccggcgaggctacgacactcaagtcctgaagcctctccttagcttcctccgctctacttcttcgccgttcgtcgtgaatccttatcccttcttcggttattcaatcgaaactctcgatttcgctctctttagacctaatccaggcttatttgatcaacacacgaagcttctctacacaaacatgctcgatgctcagcttgattcggtttattccgccatggataaattagggttttcagatgttgagatcgtgattggtgaaattggatggccatcggagggagatatagatcagaacggagttgatgttgatacagcggctgagtttaacaagaatctgattgcgcgtgtagattccggtaccggaactccattgatgccaaatcggacttttgaaacttacattttcgcgctcttcaatgaaaatctcaaatcgggaccaacgtcggagcgtaaattcggcatcttccgatcaaatctgacaccgatttacgacatcggaatcctccggccaacggtaataaatcgccgccgcaattcacaacattatttagtttcatatatgttaacgaatttggtttcttgaattgacagtttagaatatcggatccggttttcaatcctcgatcaccggttagaggatcgtcgtcgaagcgatggtgcgtgacaaaggccggtgctgagacggtggctttacaaaggaacattgattacgtatgtgggttgggtttggattgtaggcccattaatgaaggtgggctttgtttcttgccgaacacagtgagagcccattcggagtacgcaatgaacttgtattaccaaactatggagaaacacgagttcgattgcgatttcgacaacactggagagataactacgattgatcccagtatgaatcattaattaaattataatttagggaaattaactagggatcctctagagtcgacctgcaggca

SEQ ID NO: 71512 - DNA, 597 bp, Arabidopsis thaliana landsberg
gctcaagaggttgggggtaatttacagactgtggacgaccctctcaagaagcagccatgaaaggctcaagagtttgaggaagaagacagtctctaactgggttttccgggtttcatggaccgatcgtgtacctgatgaacgatgaaattattcatctccctaagtttgagacgacgaacaaaagaaaacttcacggttttttcttcttctttatttccttcattttttatattttgggaaagtatttttaattttccaagatatctataatcatatcattatatatgtaatattttttttaatgtttgggtgagtctttaatttatgcaatttttcgggtgtaaaattgttactatgtgttattatatgtttttaatgcactcaatccgaatgtggatttgcagtggctatatatataaataaatatatatcccgttgtaattttagtgaaacgtttgtgtgtattgtacccatatataaaaatgtaattcactctttttagtttatatatattttgcttataaatatgcgtttctttaatttatgctctatcatttggtatagtttttgattttgttgagagaattctcctctgac

SEQ ID NO: 71513 - DNA, 851 bp, Arabidopsis thaliana landsberg
aagagcttatgcgaattgagttgcgatgattatgtcaaagctgggttgactttggaagacgccttggtatttgacaaattggtgagcgatgtgattacaaaggctatagagactgatccaagagatcaatggaaagctttggtagatgagagtgtgcttaagccatggcatccacatcctctgcatcagcttctctattactctgtctattcaaactgggactcctctgttcatggccctcctctctattggtttccttctctgtgcgtttcatgaacttgttcgaaattctgatatttatctgtaaaatacagctgattgtctgttcaatttcttctttgtgtgtgtttagatctcagtcaaagtccaccaatctggggaagctgatggaatatcacggaccaagacttcttggtccttcatacaagaaccctcttgaaagttttgaacttttccggagattctcagttgaacaccctgaagtaagcatcaacgttgaatgttgtcgagcaaaagaatctttgtcgcagctctggtttggtctaatgtaaacatcattttcaggtttattggtcatttgttatcgatgagctttcacttgtgtttcacactcctccgaggtgtatccttaacaaatcaaaacctgaagggacttggctccctgatgcagttcttaatatcgctgagtgttgtctgatgccttcaagccatcccaaaaaggaggatgatagtgtggctgttgtatggcgtaatgaagggtttgatgactctccagtcaatagaatgaccattaaagagcttcgggagcaagtaatgtatgtaagatgaaactctttatcagtcattctgtt

SEQ ID NO: 71514 - DNA, 547 bp, Arabidopsis thaliana landsberg
gtgcacggcccagtcgtcgcggccgagttcgctgaactcccgggtgccgtccagcgggtcgacgatccacacccgctcggcactcagccggaccgggttgtcggcgccctcctcggacagcaccgcgtcatcgggccgctcgctcgccagtgcggccatcaggaagtcgtgcgaacgctggtcgccggcggctttgcgctccgcctctgtcgcgtcggccagttcctcgcggacgcgcagcagcagccggcccgcctcggcggccaggtgtgcggcgagctggtgatcgttcacttgcgggagtcgatcgccgcgatgacctggcgggcctgctcgtcgacgctgttctgcgagctcagccgcacgtcgggattccgcggccgctggtacgggctgtcgataccggtgaagtgcgtgatcaggcccgcgcgcgctttcgcgtagagccccttggggtcacgctgctcgcactcctccagcgaggtgtcgcagaacacctcgacaaagtcgaacccggcgtcggtgtgcacctggcgggccagctggc

SEQ ID NO: 71515 - DNA, 158 bp, Arabidopsis thaliana landsberg
gcaacgagagatatggaatacaacataagtggagaatgatggataacaaaaggacatctcgagaggcgtttttttgatggaaacaataaaaaaaaatatgaacaaaagggggggcatgatagaaactatgggaacgataagtaaagggtaaagttaca

SEQ ID NO: 71516 - DNA, 518 bp, Arabidopsis thaliana landsberg
  unsure (1)..(518): unsure at all n locations
aagccatacaaaccatcttacgccgcgagaactaccccaacccttacgaggcattgaaagatctgactcggggcaaacatgccatcgataaaaaagccatccattcatttatcgaccgcttacaggtaagcnnnnnnnnnnnnnnnnnnnnnnnnnnnnnnnnnnnnnnnnnnnnnnnnnnnnnnnatatggatttctgatccagaaatacctaatcagaatttaagaagcgaatacccgcgcgcctggtaagtagtgagcgtagtgatggctgacaaagccacttttacctcaggcgccacagatgcaggcgcgatattgcgtttttcgagtgattgtccgcatacaaatatcttcactcccgcttctttcagctccctgaataatcccaggttgggattggcggtatggtatttcttctggtattccgcatcattcaccacaaacggcgcagcagcgccatggatcaccagtaccacatgcagctggtttgcaggcaccccgcccaaagcatgcag

SEQ ID NO: 71517 - DNA, 697 bp, Arabidopsis thaliana landsberg
ccgcaacggtcggcgtcgtgcttaggcagaaaccaccggcacacagaaccatcacagcaccggccggaacgctggcaggagttgagacgctgatgacagagtcaccggcgccgtttgtgttgccggaaccggagccgaagtacgctatagcgactgccgttgtgacatttgcgtcccgtgtaaccacggttgcagcagcaactccgggagttaccgaagcacttgatgtgacggcaggaccgatggccgcagcagtcgcagaggcggcgccaggcgtgggatttaccgcacgcgtaaccgcagggtcattggcgacagcagttgccgcagcgacccccgccgaagcattgacaaacgccaacgcagtaacggtaggcgaaatcgcagtgaccgtagcagcagcagcacccggagaggcgttggacgtgttggtcagcgtaggcgccagcgccgcagctgtcgcagtggccacgccagccgaagcgttcgtgagtgctgccgtgctgacggtcggtccgtttgcagtagctggtgcagtagccacgccagcccgaaggctagccgtaagcgtcagcgtcggggcattggcagcacccgttgaagtagcaagagccgccgcgggatgggccgccagggtcagggtcggggcaagagccgccgcagtaagcgcgggagccgcaccgggcgcaggcgactt

SEQ ID NO: 71518 - DNA, 1617 bp, Arabidopsis thaliana landsberg
ccacacgcttatattcttaacgcacatcttcaaaactaaaagatcatcaactatttattgttaattgcatatctattcttctaaatgaaaattgtccggtgtatcttaacatgtttaagatacccgttaatcttcatagttttttcgaaatcatattccgaagagttgaagatggatacgtttgtagtaaatcaatgtgtatatctacaaaagataaaataatacccccaaaaatcccaaaaaagaaataagtagagaagataaagttaagaatgcaaaaggaggtaggaccattatcctttggtacgattgagacaaagctccaaaaatagttgatctcaagaaacagaagatgatgtaagttttgaaagctacccatccgtatccctgcaattatttttgtttccgttattaaatgagctgtagagtatagacaagcaaaatttaaaataacgaaaatattcagaagaagtaattaaaatgagcactattttattattatatcttatgctaggaaaatgtaaatgaaattattttgctcatttttgaatggtagtaggtgatctgcatctaattttagatggctgtaaaaatctagaaaggttccaatcgaatatttcaatctctcaaatctaaaggctttatttaactcctaatctggttgtctgccactaccaccagttaactacacacctgcactacacgtatcttctagttgaggctataatcgaatcatcattctttaacccaattttatattactatctaagaatatacatctatttctcagcataaaagattagggggaacccatcattttgactttggcttatccggaaaattggatgatcatgattcatgatatataataaaataaaatcagcatcacaagtattattttttcttgtctaaatataagtattttcggttgtatgcaaattttttattgtccttttaatttttgacacagttttaaatcaatttttaaaagtcatataaactctctattaaaactaaaaaaaatgaagtttcgatgaacacatataaatagaaacaaatttaaaatcatcatatctttttctacttttaccaactcatctagaaaaagatatgttgaagtgcatagatgtgggcttggagcttaaagcttaataagcctcaataaaagcccatatcacaagtgaaagatattcttcagctacttctacaaaaatgggacgttctttagacgctctatctttcttaacaacaaaacaaaagatacatatttatattacacccacaaagatcatagacgacaacaacaacaacttatgatctttctttttcactagtacaacaaacagagaccagaattttcccggtcaccagatcctaaaccccttcaaagaggttgttgaagagtgaccaccaagggacttgtcacattccgtttcccatctgaccaaactatatgaccagtctccacatttgtcgctcctggtgacaacttcacctctgtggtcttaaccctaacaacaaaactcagtttctgccccacccgtctgaacgatagcttctccggctcaaccgtcaccgtagtccctctaggcggcctaatcttaatctcgtaaaccg

SEQ ID NO: 71519 - DNA, 886 bp, Arabidopsis thaliana landsberg
tgtgatagaggaatcaattctagagcaaccaaaggtgagatcgtacggaaaaatggaggcttggggatgattatagcgaatggtgtgtttgacggtgaaggtttagtagctgattgccacgtgttaccggcgacatctgttggtgcttctggaggagatgagattcgtaggtatatctctgaatcatccaaatctcgttcatcgaaacatccaacggctacgattgttttcaaaggtacccgacttgggatccgacctgcaccggttgttgcatctttctctgctcgtggtcctaatccagagacgccggagattcttaaaccggatgtaatcgcacctggtttgaatattctagctgcttggcctgaccggattggtccatctggtgttacttctgataaccggagaactgagttcaacattttatcaggcacttcgatggcgtttccgcacgtgtctggtctagctgctttgcttgaggcggctcatccggattggagtccggcggcgataagatcagcattgataaccacggcttacacggttgataacagcggtgagccgatgatggatgagtccactggcaatacatcttcggttatggattatggttcgggtcatgttcacccaaccaaagctatggatccgggattagtctatgatataacatcttatgattatatcaacttcttgtgtaattctaactacactggaaccaacattgtgacaataacccgtcgccaagcggactgtgacggtgcaagacgagcgggacacgtcgggaatttaaactacccgtcgttctctgtcgtgtttcagcagtatggagagagtaaaatgtcgacacatttcattaggactgtgacaaatgtaggcgattcggatt

SEQ ID NO: 71520 - DNA, 503 bp, Arabidopsis thaliana landsberg
aggggaatcgagcatggcccgccattgcatccgagaaccccgctacgttcccccggtgcttcgctttggggaacaacccgacctgttcggcggcccgaccctttcccacgttgccgagcgcaagggaccgccgaaaggatggcagcgccaattgcagaaatggggccgctgcaccgtcattgccgatcttgaggtagcgccgccgtctgtcatcgaccctcccccgtccccgtctacggttttccttgtcgcttgcgttgctgcgaagctggaccgccccgccccggcgcgcgatctttacgcatacgcatggttccagaaggcccgtgcctatgtcgaacgacagggcggcgcatggttcatactgtcagcaaagcatggcctgatcgccccggaaaccgtcatcgcgccctatgacgaaacgctaggtgtaggcgctcgcaatcatgacggcgtttgctcgcaaacagccagattttctgctcacgctatctgccactggc

SEQ ID NO: 71521 - DNA, 613 bp, Arabidopsis thaliana landsberg
cctgcgaagttattaatctctcatatccatgttctttttctcctatctagtctcatgtttgactcgttcactctctccgacatgtggctgctacccctgcagcaggcgacttgggtgaaacatttgagtctaaacaaggtgacgtggggggaagggggcaggcagcacactatataagatctcggcgagccaacactgtgtcttccagattgtcttccagactgacggcgctcggcatcttctcgctgcattgtccaaaatgacgtggctcgagtctctgtcactggattttgcgagtgtgccagcggcggagctgccgccgatgattgcgtggtgcggtgttttgatctgcctttgggcctgcgccggctttttatacggaggcgcgctttttacgctttctattcccctacacagcctgctgtcgctgacaaacctttgtcagctaagcgtagagggctggtccctgcctgttgaatgccgcgtgcacctttggcattggatggaggcgccgtgcgggcatttccactgctcgaacccgcgaggcggagatgttgctgcccgacttgcatatggatgtgcccacagcgaccgtctaccaccttgggcaact

SEQ ID NO: 71522 - DNA, 741 bp, Arabidopsis thaliana landsberg
ttcgatactatctaaactaacaattctgtagcacaaacaatacaaaagttataactaagcaccagctcatattttatagtgaccaaaactaagaagtaagaaaatctaatttagcattagatgctatcaattctcaacttttctgctccaagctcaaaaaaaatgaaactagcatcagaaacaaaaccctagaaagttttcggaagtttgtaaaagtaaaattagataccaagtccatacattttggatctagtcaacaagaaagtttcatcaatttgttctatttaggaatgaagctaacaaaaaaaaaatcagacaagcgaagtaatcactagaaacgaagattagactcgataaaaaagcttcaagcagaagagaaattcgaaattgaggaatttggaattcgaaaacgaaacaagacagagcccaatagcaaaaccaaaatctcagattcaattggtaggagaaagaatcgaaacaatcaacatacacgtttctttcgacaagcccagatctcgtttgagaaagctagctaacgaaagcagcgaaacgtgaggggggaagtgtttgggtcttgggcttgggtatcgaattcccgcctaaaattttgattttagcaagtgatcgagaaaagacagagatcgaagaatgttcgagagagcgaaaaagcgagaatagttagggtttgagaagcttttgtgtctgatgaccaatgagagaggaataattctctgttttctt

SEQ ID NO: 71523 - DNA, 379 bp, Arabidopsis thaliana landsberg
cttcaaaggatgatgtcactgaggttacagactctttcaaagtttattgcttcagagaccgacaatgcctctcgttggttcaaccgcaccaatgcccacatgaggatctcgtaggctccattgccatctgttgctaaccaataaaagattgtgtctagagccgtttacttataacctgactgtctatatacagtggcgtctttgctaaaggaagcgttgccattgacgaagggtcagtccgctatcacaccaagattgttgctgatacacacccagcggatgagactaaggatacttcagctgaacaaaaaaatcatgataatgctgacctttccgctgtggagacctacgatgcaaacaaagctgctgacgagagagc

SEQ ID NO: 71524 - DNA, 603 bp, Arabidopsis thaliana landsberg
  unsure (1)..(603): unsure at all n locations
aagccggaatttccctgttcccctgtcgaccggtggtggaatgatgtagtggccggatggtggagggaatcggctcacacccctggatggaccactgtgctctgcacacctaagtagcaggatgccaagtctggggacagcttccgaagccagtgtgccccacttagtaggagggcagctcactgagagcacagaacctcagacttctggaaagcctcactatggttcaggcaggcatggcttagaggtacgatgactagcttgtcaaagctggtctgcgtgctgatctgagcacagaaagccccaggctaagccaggttggttgagcccccaggaccttcacaatcatggctgtgtatctacagcagaagatactcgagtccagcactgggagggggctagaagaaagaggtaagagaagggagaaagatgcggngatggggggaacaaggtgagggaaatgagcctatgaagaagaggaaggagaagttaaaagagagggaaagaagatgaaagtgaatggcagataggcaggcaggcaagcagacagaggcagacactccaaaccataccacagtgatacatgaaggacagacagctgga

SEQ ID NO: 71525 - DNA, 443 bp, Arabidopsis thaliana landsberg
tccatatatttagctttgctaagacaccacaaatttgaaggaacgccgcgaagtgctaatagggcaagaacctaaagtgacagaggaccaacgacctcatagtgagaaacatgaagagaataccaacgaaaacaaacgtaaaattgaatcaccggaggattactaaagaacagacaggcttctaatagctctgactagctagtttttctatgttacttgagttttagaagacatgaagaactcacaattagaagcctagacacaaacaaatagagaatatacacacagaaaccaccaagacacaaattatgtttggtaaactctactgtacatgttgaggcatgttatgtgattaactaaagcaacgtagatgaagggcttacaataaaccaaatatgtttttggaggagcccaatatgtggtacccaatatattctttttga

SEQ ID NO: 71526 - DNA, 448 bp, Arabidopsis thaliana landsberg
catgaggataccaagggaggacctgtgatccaccccgcttacgtgaagagagcaccgggccagtgcaataaaccggaccatccgacacaaacgacggggtccccttgctaccagccatccataaactcaacttgaacaatcatgtgatggggaatcataccaagggctattgctataccgaacgtgctattaatgaaccttaaccatacacgagcacctaattgagatagaacatgatcgaatataatatggcattaacagggcgctcagggtctatcatctgtttgggaaacaaagaatgggacagtgacccagacaagggccccctaaaaatcgcatatattcggcaacgaaaacgaggtaatttgacttacgaggtccttacttaagataaccgatcaactcaaaaaggagcctactcgctagggaagacacaataagtctatgt

SEQ ID NO: 71527 - DNA, 262 bp, Arabidopsis thaliana landsberg
gccgaggactttgttcttgttgtgctcctcgctttcattttgacctgctgcatggaagagccaaattggaatgacagtgtatatgcgtacttgtctccggatgagcattcaggttttatgccgaggacatagattgcaaggaacgctgagcatgcaaccgagtcattcatgagtggccacgtcctgggcctaggctgctgaaactccctgtgcagaggtcactttaatgatggggcagagactgcaaacacagaattgaata

SEQ ID NO: 71528 - DNA, 332 bp, Arabidopsis thaliana landsberg
gaagaatttgaattttgtaagtttagtaagtcatatttttaatacataaatccaaatataagttattccatgtaactccattttcatttttataatccacttacgaaaatctattatgctttacttcatatctttacccatttttaatttgcaatttattttaataatccacttataaatatatataaaaaatctattacattttatctcatatctttacagattacacattggaattgagtttggttttttcatctaaaacttttttatttatataaccatggaggtgacacaaatgccggcccgttaacatgaccttagtctaggaaggc

SEQ ID NO: 71529 - DNA, 437 bp, Arabidopsis thaliana landsberg
  unsure (1)..(437): unsure at all n locations
acggttatggannnnnnnnnnnnnnnnnnnnnnnnnnnnnnnnnnnnnnnnnnnnnnnnnnnnnnnnnnnnnnnnnnnnnnnnnnnnnnnnnnnnnnnnnnnnnnnnnnnnnnnnnnnnnnnnnnnnnnnnnnnnnnnnnnnnnnnnnnnnnnnnnnnnnnnnnnnnnnnnnnnnnnnnnnnnnnnnnnnnnnnnnnnnnnnnnnnnnnnnnnnnnnnnnnnnnnnnnnnnnnnnnnnnnnnnnnnnnnnnnnnnnnnnnnnnnnnnnnnnnnnnnnnnnnnnnnnnnnnnnnnnnnnnnnnnnnnnnnnnnnnnnnnnnnnnnnnnnntcataaaagggggtataagcaagacaagcgtttcagaatccaatatgactcgaagtcgaaagaatgattgggaagaaaagcgtaaagcgttgcatcatcctggaggcg

SEQ ID NO: 71530 - DNA, 480 bp, Arabidopsis thaliana landsberg
agtgcctgagtggtctcggctctgcttgctctcattttctatgttattattgttttatactttgggtatctgttgttgttgtttgctttttgtgcacacacacttcactataaagctctgtcattccacagcaaaactgatggttttatagatggtgatgaagccccaggacgtccagagaggaagtcactgttgactcaagtgacacacatgtgtgagtggttgactgagttgggttcggccaccactggaactcctgaagacaaatggagcaggtgagtaggtgaatagcctgcctgtaccacttctgtctgctgataaccctcgaactgagggaccatagctcttgtttctaacaaaagaggagctgtggatggtctctaggaacccagagcgtcagaagaatgtaagtctgatgggaaaaacatgtaaacaaaacaccctaatgacaattagtcacatgtccccttatgctgatca

SEQ ID NO: 71531 - DNA, 487 bp, Arabidopsis thaliana landsberg
aagcttccttttaactgatgcggcttaaaaagcccgctctcttggtttgcagaaataactactttttgcggcgatgagttagaaagaaagattgatggttctccagaagccacagactttgaaggtaacagggaagactattcttctggggagattgattactttgaagccatgaccctgaatatacaggagacaaaggaggaagactacatgccagagccattagtcccagagaatctgaaattcgaagatacatgtattaacaagccaagaagaggacaagcaagacgaggaagaccaaagcgggatttccaaagggatactctacctggtctctcttctctgtcaggcatgaagtcactgaagatattcaaatgtttgggggactgatgaaaacccgagactacacttggagatctggattggctggatcgaccgaactcaaaaagaaaacgaaatgtcactaacataaaccaagcttcattat

SEQ ID NO: 71532 - DNA, 407 bp, Arabidopsis thaliana landsberg
aagcacggaactccggacgctacgtgttcgtctccacctgctcggtgtacgccgaccagtttagctgggcggcccagctggaggacgccccggtcgccgggctccgcgacggcctgaccgagccctgggaactgtacggcccccgcaaggccctcgccgagcagatcgtccgcgacgtctacggtgaccgcgccctcatcccccggcccgggctcatcgtcggcccgcacgacccgaccgaccggttcccttactggccgcgccggatagcccgcggcggcgaggttctcgccccgggcccgccggaggacctcgtgcagttcatcgacgcccgtgacctggccgcgtggaccctggacgccggacaccaccggcgagccgggacagttaacgtctgggggaaccct

SEQ ID NO: 71533 - DNA, 430 bp, Arabidopsis thaliana landsberg
tatcacgctttcccatgagatcggtaagacctgctgactttttttttgttatgacggaatccattacaggcatatcttttccgttggatatgcggcctgtttttgcagatggtatggcagcggacggtctgtgtgctgccatatcttctttgagtttttgctctgttgcaggtgttgttatcgtttgttgcggtacacggccgttatgcgcagtatcagcaggagcgggtgcggattgcggtgtaattgtctgtgccagttattttgtatgtacatttttattccagatcagtcatcccgcagtagcaccgcctgctaccaggagaatgacagctgccgcacgccaccaccgggcaggagaatgctgcggtataggccgtatcctggcaggtgcggccgataactgttgccggatatcttgcgagatgct

SEQ ID NO: 71534 - DNA, 102 bp, Arabidopsis thaliana landsberg
taaacctgccttcctcgttcctttcctgaagaagcaccttttttcatttcaggaagaacaagcaaccggatttggaaggcgaggtaatgaacaactgcaggg

SEQ ID NO: 71535 - DNA, 325 bp, Arabidopsis thaliana landsberg
ttccttttacttgacgatcttttggtttcattgtgtttacttgtcgaccttatagttgttataaaaatatacgcaccagctagttatgaatgtttagattttcagagccgagctctgcagatgagcaaagttaatctttcttgggatgaagatgaaccgcaccggattaagaccttaaatcagaaattcaatcctgaacaggtctgtatacgggtttataatttatgtgattaggcttaattgcttgcttaaaagcatatccattgttgtagtgttattgttctgataaaattttttcaaatcatagtcggcatattttgagatg

SEQ ID NO: 71536 - DNA, 120 bp, Arabidopsis thaliana landsberg
  unsure (1)..(120): unsure at all n locations
aggtttacttactatgagatctttatactggagctctttttctattatttctttctgccctatcctgtataanagggtggtggggacacccacaaaccacaaatggaaacacaagagttt

SEQ ID NO: 71537 - DNA, 549 bp, Arabidopsis thaliana landsberg
tccttcatcagcaaagtcattatcagccatttttttttcgcttccattcccattaatcctcggggtaggggacgaataatccggccttatcaatgcccttcccgtcaagtactgcaaggcattaatcaccgcaacatcccgagcttcaatcctctccctctcttttgtccaaaacgaacgttccttatcgatcctttccgcttcaatccttctccattcctcttctctcagcatcctttgatgttctttgtcttccacaatcttcatcaacttctcaagccaaaaatcttgcttctctatcaacctctccatatgaacaccaatgaattccttgatcttttccttccaatgcatcccctctcttttagtagtttcgtttccttcagaggaagaagttagatccaaatcggaggaggagttgaaattgttagaaatgctaaggctatgactctgagtattggtattggtcatcaagggattctgatgatgagggacgatgttatgaatgttagaagcgcggacacactatgaagagcattggtcattatg

SEQ ID NO: 71538 - DNA, 510 bp, Arabidopsis thaliana landsberg
  unsure (1)..(510): unsure at all n locations
gttcgcccccctccctccgctntatatgaaccgggtttggtttgtggggacatgcttagctggttggacggtgacgtaacagtaggataaagaaaaaaggtggcgcgtttgtcccgacgcgattagtccatcgctcttttgatttgatcggaatgtgatgatatgttgttccaaatgtactctttcttccttgggccttttcaattatctctttcttttcttcgctaaaacgaccggattttaaaagtggtcaggtcttttctcactgagtttacttgcaaatatcaacatgactaaatcgttttaatttacgtaaagtgttttggacaccactatatctaatcttgagctataatttgtttatgcttgtccttaaaatcgagactaattcaatttccatttatctggtttggaaacgactaatcgaaatccaaaatcatcgaacgctatcattcaagacgttatattagcaagcgactctcactcgcgactgcattcttttttttggat

SEQ ID NO: 71539 - DNA, 438 bp, Arabidopsis thaliana landsberg
cctggtactcgactaccatcgagctcgaagaccaggagttgctcaccaaggcccgcgatccgcgcacgctcgtgatggattcggtgatggccgatatcgattatgcgatcgccaacctcgacgccagccgccaggtaacaaccgtcaccaaatacacggcattggcattgaaatcacgtatcggattgtatgaaggtactttccgtaaataccacccggagtttaacctgcctgatgccgacaaattcctcgacgcctgtatttccgcttcggaagacctgatgaaaaacagcggctattccatctacaaagctacaccggcaaccgcctatatgaagctgttctcttccgacaatgcgatccccgacgaagtgatcctcgcccgcgatttcagcgacgagttgcaggtttaccataacctgaattattacacgatga

SEQ ID NO: 71540 - DNA, 565 bp, Arabidopsis thaliana landsberg
tcagttacatgttgtttgaaaaacattgtataatatatataaatcatataaaaaataaattttcaaatcttttgtataaacagttaactgatgcagcccacataatataagcaccacaaaatttctataagattataataatacaaataataaaagtaatagaagaaaaagttggaggaagatttgtagcttacgatttgttccaaaaagacctatctgattattaaatctagccgtttaaactatatatcgccaaaataattgaagttgaatttgtattgatatgcgtttaatatttgatgtactcacttctaagttgacagattgaaatatcgcatggacttgagttgtatattctgttgttttcctgttggtctttactctatttcaactcttggtctcagattcccaattcttctgtctttttatgttatcatcaaaataatattccgtggattttctattattattggctgtataatttattcaaaataacatcaacgataatgtaggtgaatggtaggcaaagaacgtgagaaccgtcatgcatggttttttttttttt

SEQ ID NO: 71541 - DNA, 541 bp, Arabidopsis thaliana landsberg
  unsure (1)..(541): unsure at all n locations
aaggggtaggaaaccaggttggaaaagggaagactgctacatccaggttatactggtccccggtcacaacagtgctggtggtatgttccagcatatcggcaaaaaactcgtagtcttcacccatcacaacattttggggattcgcatcagccttcagcgtaggcacattgtttnnnnnnnnnnnnnnnnnnnnnnnnnnatatttgtattnnnnnnnnnnnnnnnnnnnnnnnnnnnnnnnnnnnnctccggttttaaacgtggcctgcgatctggccttgccgtgcatatcgttcagttcgcaataaaaaccctgcgaatacccgttgtacacataattgtcgtaaccaaaaggtatgttcagctctaggccattgtacccaactgttgtcagatcggtggattgtgtgaacaccngaaaatctttggcgggataaaaatcataaacatccctgccattattgttttcccgtacatcatcgggcgtgggcagacccggtaccttctcggatagggaaattgcttactataccctgaatat

SEQ ID NO: 71542 - DNA, 319 bp, Arabidopsis thaliana landsberg
  unsure (1)..(319): unsure at all n locations
ggaacctgaagggacctatcggattgctctgtatagggtatgnnnnnnnnnnnnnnnnnnnnggctatctggggaaagtgctggcgggcaaccaggtagtaaaccttgccggcggcatggaccccagcacagacggcgttgaaatggtgcaagaaaacgaatacctcgttagctgctggaaccggatcatctattatacttacagtgatggccgcaaacagaccctgatcgatacgcgtccgcaaaagatcaacagcgccgatatcgggtatgatgccaaaagcaggatcgtttatgtacctacattttccgggaacaa

SEQ ID NO: 71543 - DNA, 568 bp, Arabidopsis thaliana landsberg
atatttgtaatataaatgctaatcaactcaattaaaaatatttaactttgagtcagtttaaactttcttaaaagcaaagttaaaaacaattaaagtcattatttattggatggtttgttcacactttctcttacaaattttttgtcagttaaatcatttatttaatatattaaacaatgaaaagtaaagagaaagtagaaaaatctaatcttgcttaaaatttaagaaaaatatactaaatgttcaaaaatggttgtgtgtagatgaatgattgtataaaaattaagtttaaaagacaaaaagttgagctaaacatcattcaactcattttcttgtgaaatggtagatgaatgggcaaaacatatttttttatcattttattatatttttaagtttttagttaaacacactgaatcacttttccaatgttttttttatctcacatggtgaaaattagatgaatgtattataattttatttaacctagttttattcatttaattatacaactatttgcaccccaaaagaaaaacttcatatatgcttcagatatactcaaactacaaag

SEQ ID NO: 71544 - DNA, 210 bp, Arabidopsis thaliana landsberg
gcggattctcatccctagggcctaatgcactctctcccgacattctaaattttttttccctaaacaatgttaccaaaacttgttagtagttgcaccataaggaacacctgcaattgatggaaaggtcttcgtggctctaaatgatgcagtctgataccgcacaccctgagtgcctatatggactacatacattctaccgttttctgggac

SEQ ID NO: 71545 - DNA, 610 bp, Arabidopsis thaliana landsberg
  unsure (1)..(610): unsure at all n locations
gagggggttagctaaatcgtacggtaaaacaactattattttnnnnnnnnnnnnnnnnnnnnnnnnnnnnnnnnnnnnnnnnnnnnnnntcgaccaactaagtatagtaacacctaaaaataaacgagggagctaattaattgggtaaatagagacataccaaccattttggaaatcatcgaaaatactcatgcaatttataatattatacatggcctgaccaactggtcacatattatataacaagatacacgacttattctcaatgctttgttggtatctattatttattcagtagacttagtgcttatcacttcttcccatttcgttaacgagagtaatatgcttcctcaattcaatcgttgttggctgccatgttgtacatgtgtatataaatagaaatggttacattcaatatgatattagaatagaaatgttattcacatgacataatattatttattcggtagattaataactaatcgtcttttggggaccaagaaaaaacaaaactaatcatttttatagggttactaaccatttgcaaaatataaaattaaaaactcaattatagtcacgttccatgtggtatactatgagntatatatat

SEQ ID NO: 71546 - DNA, 520 bp, Arabidopsis thaliana landsberg
gccactcaaccggaaataacaactactaccaaaccacttaacccatcggttcaacattggcacatatgttttcaaaatcgtacagatgaataccataaggccaaaacagtagagcagcaattaggtacagactatgtgagaacaaactcaaaatcaattttcattaaaccggttttcaaagcttccaaaactcaccaaccgattactttgagaacgaaccaaattaaaccggaatttaactgattcgtcaaatggtctttaactcaacaactctctctcacactcttgtataaagttttgagctttaagtttcagagtcaggttttggtgggttaattctggtagacaagaatcaaacaaacaatgggagacgaagcaaagatcttcactctttctgaagtttcagagcataatcaagctcatgactgttggattgtcatcaatggaaagggttcattcttctttctccttattctcacctctgaaattagagatctcgtgcttcaaagatccccttttg

SEQ ID NO: 71547 - DNA, 586 bp, Arabidopsis thaliana landsberg
acaagattaacaaaatgactcaacggttacgtgtagatccgtgtttcactgttttggaacttctaactttaggcagcgctttgacaacgtttaccacacggttcctccaaagtcgaaataaaactagattggatcatttagcagaaagccacacacgtcacttcgttttccaactttcatcatcatatcatataaagcatatcattattttctttttccaaattcatcagaacgttatatttttgaaatgggaattgattttttttttttttggattaccccggagtctacctaaactaataccagtagcacttaccaaaaaaaaaaaaactaaaaccagtagcagaacttccataccaattgggaaatatttttattatttcttttctggggacttattaaggtgtatattacttaacattaaatctgcgtaccgtaaaatgatccatcattttatataaactttatgcttgtcataaactcataattcttgcaaaaaaaaactaaaaaaacaacaactcacaatgctaattcttatatatattggatgggtggatacgaattattaaattaagcgaaccccctc

SEQ ID NO: 71548 - DNA, 481 bp, Arabidopsis thaliana landsberg
ctaacgggtgatccgcgtgccgtcgtcgttggcgacggtcacgtagtccgcgcacgactcctcgacgacactccgccttctccgcgaggatgacgtcgccggcgtcggtggcggcacggtactccatgccggtgccgaccagcggggactcggcccgcagcagcggcacggactgccgctgcatgttggagcccatgagcgcccggttggcgtcgtcgtgctcgaggaacgggatcatggcggtggccacggacaccatctggcgcgcggacacgtcgatgtagtcgacctcgtccggcgggatctgctcgacctcgccgaccttccggcggacgagcacgcggtcggaggtgaagttgccctcgccatcgatcggagtgttcgcctgggcgatgacatgacagtcttcctcgtgcgcggtgacgtaatcgatctgctcggtgaccttgacgtcgacgaccttgcggtacggtgtctcgac

SEQ ID NO: 71549 - DNA, 590 bp, Arabidopsis thaliana landsberg
  unsure (1)..(590): unsure at all n locations
tcttgtctcccttgtgacgcatatctaatataaacataaattcattatgtatcatgtatgtatgatctttgttctatattgacgcaagaaaattcaagtatttgttcacttcgtgctacctatgaatgaacataatttaaaaaaaaaaaatatttgttactaacgatcatataagatagtattaagttattcagaaaacataattaaaatagaaattgaaggtgtaggtgtgtggtttagtcatcgatatagccaaccagtgacaaccacctcgactctctttgacctaattatttgaccactccttccactttacatcataaaatctgaaaccacttaccatctctcgtcacatagctagcagacgatcgtcttcattatgtggttgtgactctcattctaatgtaatcctggtaaaaatagcatgcgagtgtcttatcgatcctcgttgtttatatgataaatcatttattataaaataaacaaaacacaactaatattttttgcattaaaaatttaaaatattttaagaggagtgattgtttcgacgaaaatatattntatatagtatgaacatgaatgagtaaaag

SEQ ID NO: 71550 - DNA, 962 bp, Arabidopsis thaliana landsberg
actccagaggcttctggagcaaaccattgtactcatactctagagcacgtgtatcatctaccacctgtggagaagcaatcgaatgaattcccaccactgcctgtgaaaaatcatgctccaaacccttctgatcttcgctatttccaacttgtttttcaggtgtttttactccaaaggtagctgattccaaagcaacagacccattaacaatagaagatgaaaaggattcatctattaaggtatgtgccgtggcaactgtggtcacactagcaacagcaaactgagaatcctcagctgaaactgaatcataatccatcacagcaacttcatggatttgatgagccttttcttcctccaaaagattcacactttcttcctctacctttctgaaacctacatttatttccacaggattgccttcatgaatatctccatgaatttcccgccgattctcagcactattttttccgccatgaaccgttgcaacctgaaaagcttagctagtcagaaccagaattcttatcgaattttacaaaaagtcagcaactttatgcactctaatgaaacaaaacttaaaaattagttaaaacaagcaaaacccttcgctcagaaatttcagttacctcatcggaagatttccgcttcctgaaagtactttggcaataagcgaaagcaatggcagagaacgcagtgacagcaacaacaataagaatcaaaccagaatcgatagaagctctaacaactaaacgaggcgatcgaattgaagaacgacgagaattgcgtttcccggcgcgagttcgaagatgaggagaaggacggagactatgacaacaaccaagaaaatcacggcggagagtagaagccggaagaatcaccggagagtacgaagttaaggtaaggtatttagaagatctggtagtggagatgaaggtggtggaggtaacctccattggaaaggctta

SEQ ID NO: 71551 - DNA, 624 bp, Arabidopsis thaliana landsberg
  unsure (1)..(624): unsure at all n locations
caacccggactggaccaactgatcgncgccgagcgcgaactgccgctgagcctgccgccggattcaccggcgctgcacctgatccagcgcatacgcgacgaagcacatcgcttcgcgatcaccggccatcgcggtcgccgcgacaaggccaggctcagctccgatctggagtcggtcgaaggtctcggaccgacccggcggcgggccttgctcaaggccttcggcgggctcgcgcagatcaagcgcgccaacgttgacgagctcgcgcgcgtcgaaggcgtatcgcggactttggccgagcgggtttacgctcacttccactgatcgctactatcgacgcaagtgccgctccggacggcgacaaggatgccaaggattgcgcctgaacctgccgctgatattgaccatgctccgcgttgcgatcattccggtcgtgctcggccttttctacgtgccctgggaatatgcgcggcagatcgccaccgtgctgtacgcggccgccgcgattaccgactggttcgatggctatctggcgcgacgctggaatcagaccacgcgcttcggtgcgtttctcgacccgggcgccgacaagctgctggtcgcgatttgcctcgtcatgctgct

SEQ ID NO: 71552 - DNA, 4059 bp, Arabidopsis thaliana landsberg
cgtgtaagtaaatattttgccatgcttccttggatttatactagtcgtcatcaatatttaccattttatttacttttgtaactctcaaaatcttttctttgtgtttccagcaacgattgctagcctgcttgatgcggatcttctaaagttatataccttaatatggtcacgagctgtggcatgtcaaatggagcctgcttccattgcgcagggtaatatatgtgctatttttcactttaaatcatgcatagtgtcaagtaggttcttattgaccagtgagagaaaaagaaaggaaagaagagagcatgtaactgatattgaatggttgaaggtttaacattaggaaatccaacatatttctccaattttttcctgactctttccttcctcagatacaacttgatattggcaatgcctctgaatccatcatcttcagatcatcatgctcaaaagttgaattccttgggtaccaggcagtttacgaggtacgacctatttcatattttcgctgattacctagcagttatattattaggcgggtttctaatgcactgatgactccctagatttagcctttggagcaattcttcgtaattatttgcttctctttgctgtgattgtcatctgcatgtttatattgactgcttttgccttttgtggatttaattttgttttatatcaagcatcagctaatgcgtgatccttcttctctttggacatgtgctaaagcagtttttgttgtttctcctggtgatattgtaggatcctgaagctaaggcaatcaaaaataacgataatgatcagagtagtgagcgtgaggaaacttttaaaactctcagttcgttgaaggtaccatttctatcacattttttttttcacctgtgctttgtaattgtaccgtggtttcatttctttctgtcgtcagttttttcgtccattagagatgttgggactttattaggtgtccctccttttttcaggatggagatttgctacagattggtgaagtggagctcaagcagcaccatactcagcacccaccacgctattctgagggctctctggtataacactcctatttcctctgtgtcaaaagtatgtataatcccgttccagaatatgctaattaacaatatagcactttttgagaattagcagtcatggtgaattagttttctatagacgaagagatagaaatatgactaggaagatgagaagaggacactgacacaatagtttttccaaattgatctattcttttgtcttcttgtttctgtatacaaatctaacttacctttttaagactcaattaatcagcagatgcgtaatgaactctgactgttcgcgttttagtctccagtagctcattttggttccagttctccacacaattgtttcattattattgaaagttaagcgttgatcttaaacagttctcataaaagataaggagtttcgttttgtatgaagtgctgaatctggtggttgtgcagacattgcatgatatctttttgtactgccgtcaggtttcacaatacataatatgttaaatatgttttaatgtgtttcaggttaaaaagctcgaggagctcgggataggtagaccctcgacatatgcatctatatttagggttttacaggtatgtgctcgtactaggaaactattggcgtttttctagtgcttctgtttcatgctgaagttaaaaggcgctaccatcccttgaaattaacaatacccctcctttcatgtgaggcatagactggcagcattttgaaacctcttctttttttaacagcacagaaagtacgtaacaataaagaatcgagtcctgtatccggaattccgtgctaggatggtattttcttttaataaattgagctcacgaattgatgatttagtaaaccaaccattgcaacatatctttctaacctctgtactatctttccaggtttcagcttttcttacccactactttactgagatcacagactatagtttcactgcggatatggagactgaggtgggtaattagttcgttcttcacttgactctctgttgactatagcagtttctacattcgcatagatattttccaatattgcaaaatgagatactcagttttttcccttacgattgattttccttcagcttgataacgtttctggtggtgtaactgaatggaaaggtctcctaagagactactggacacgattcagcgcatattgtaaacgtgttgaaaatgtccaacgctcacaggtactatcttacaagaatgaactctggaagtttagtttctttctacaatttcttccattagtttcttacattgtcatacgtttacaggtggaaaaaatgttggaaaagaaatatgaggacgttctgttttctttgcttccttatcccagtaggacatgcccgaggtcagcataccattcatgccaatcaatttcaagatagagcaactgatttaagttgacaaaatcccatgctttcatatatggctgcccatgctaaagatactttcacatcagtgatatacagaggactaaataagacaaagtttctttatagtttgaatgagtgtatgttgatccttattgggtttctttccatgtttcagttgtatggaaggcaccttaagtttcaaagcaagtaagtttggtgcggggtatttcatcggttgtgatcagcacccttcatgcaagtaagtcgtacgctgttgagtctcttagtttttacacctacgatacttactcatgtatcctctcttatcagaatttacctattaatttttattagttttttatatatctatattgacatggtcgctgacataattggagctatgtggttcatatacaggttcattgctaaaacgctttatggagaggatgaagatgaagatgatcctccaaagaataactgcgtagaagagcccaaattgctgggtcttcatcccaataccagtgagaaggtatcgctgttctgacccttttctgttcacaatttgctaaaactttaatttgctgaatccatttccttgttcaggttattctaaagtgtggaccctatgggcattatgtacagctcggtgaagataaaaaagggcacacaccaaaacgagcaaatgcggcccatgtatgttggagttttgtcaatcaaataaatatatgtctatgtttccttcttacataaacggaggcatactgatcacacattcagcttaccttttcttactgagaaatctcctgcaaccttatttttcagataaaggatgtgaactccattacgcttgaaagtgctctcgaattattacgctatcctttgacactggtaagactgatatgaaggttaaagttattgcatttctggctgggctgtttcaacattttggagtgctgacgacttggtatactgatttcttaccagggaacccaccctgaagatggacagcctgtggtcttgaagcttagtaaatctggatttactattaaacatcgccgcaatatggctactgttccaaaggtatagctgtttgatgccttcttaatgatataggtatagaataagatgttggtgctatatttgatacggaaataaggtgtggatctgctaggatctattgttttctatcttatgaaatgagttaaaagtgttgtcgttttcattgtggataacttggtacttggcagaacacggaaccaggtgaggttactttagagagagcaatgaagctcttgtctggcaaaaatgtgagaaaaagtggcagacctcctaagagtatactgcctgaggaagagaaaggagatgaagaagttgtggtagcgatataatctaatccacaacgtgacgcatgctaataaacaattggtttgcgagcttatatggatggagaagagcattattagctttgatgaagagtattattattctttttttggtaatcagagtaataatcgtaatggaaaagattggactttttttgtaaaatcattacacattttttaatgatataaaaatatccattctttttatgattatggaagtgtggtatctga

SEQ ID NO: 71553 - DNA, 1197 bp, Arabidopsis thaliana landsberg
acccttgattaacctgcaaattcaaagaaccggtccttgggatttctctcgtaataacagggtcgaggaaacagtgcacgagtttcaattcttccatgaaggagtggtaacaaactgaactcaatcatgtgcacaagtaattaagtaaccaaggtcttctgatttataagagtgggcattaattgcaagaccaatttacaccttctcagttctcagtaaatgctcatgaactttgatttggggtactgcagagaaaattgaagagtatgcttacagtgttaccgtcaagatcaaactcctttcctagtgattccatgaccagctgctgcagataccgactaaatagcaataagctatccttgtaaggaaggacaaccatatcctgtaaaagaaagcaagaatagagtaataaggtcaataagaactcaatctccttgatagccttagaactctcaaaaaagttgaggaaaaacaccttggaaccaacgccattggaagcccagtaccaacacatagctaagagcgctgcagggttattcttgatctgaaagaagaaagaaatttacaggctagagtgagtcatggtagagactatctaaagtgtatgagtcaggaaacccaaccgtatgatatgacattctactaaaacctggtaagtaaactcatcttcaacacaagctgcaataagtactacttaccgaagttgtcctagtagcctcatccattaaagcagcaccagtaagcatctccctaacattaatcccctatatgatgacaatgctttcgtgtaaataacaaagaatggtcatagaaagtttacgcttatgtacaaattacctgtagtgctgctggaagcagaccaactgcagacattattgatgttcttccacccacccagtcgtacataggaaatctagctagccaaccttcaattcttgccgtattatccagtaatgagttttcttgggttattgcaacaccctgcataagcatacagcgcgaaattgctgctgaggaactacagtggggcagaagttgaagctaaattatatccaatacatctgaaggtgtctactgtctaatgatccatgagaagccagttttttttttttgttgttgttaatgagatgaaaaattagtccacttttctcagattatttccaaccgtgtaaaccagtttgaccattatcatacagc

SEQ ID NO: 71554 - DNA, 2533 bp, Arabidopsis thaliana landsberg
ctgtcttattcaaaaggttaaggttaaaaccttctcgacagttgctcgcctgtccgtcttagggaagtgagtttgttccacctgagatacgccgtcgttaatcctcccagctgccggcggcggagaaaattgcgtgctagaagctgaatcggtggattcatcttcctccgtatcaccatcaaatctaggtcccgtctgttcgcgcgcaccgaccaaagtctctcttgatgagctcacctcggagtaagtataataagaagaatttctcccgtagctgcgaccaacggcactggaaactctactgttctcgggagacgaatcgagagagacatcctcggaatttgtactcatatcgtcatcggaagtgacgtcagtatcagccactagggttctggtgaccggaataggagctgagggtgacacgcggtcttcacggaccttgagagcaggtaatctcaattctccgttggggatcattgtgaaatgcgaagttgaaatcgaagcacagtgtgagtaaaaggaggtggaggaagttgctaaaattgagctaatgaagtctttctctagaagagatttttgaagaactcagagaaaaccttcacagatcgagctagattttgcaatggaggagacgacgaaagcttaatcagaaagctttctcacagagagagagggagagagacgattgatatctgtgcacttcaaaatgatttttctttgttttttttgatatttttgctttttgttagtatttacttttgattttgaaaaaattgggaattcaaatttgggaaagggtagagaggaaaagcaatcgagttggtaagacctccccaaagcggtgtcgtttagtacgctcaccagcttgataggagctatggcataacgggtagtgatgacatgggaaagcgattcaacatcttggttttgaaaattgataaaagggattgtaacgttataatttttttgttgttatggtaggctactaaataggtggtggtggggacaatcgactcgacttatgtcttgttttcttacggtggatctaccattttcttttgtcaacatattccattcgaatttcaaaagtggcaagtgaaaagttattatggaaaattaaatatttagagttatcttggttagatctgaatggggttttctaagaaaattcagaagtgaatttaattgaagaaactatagttgatacaatctaaccacatgggaggaagttgttgagcatctctaacctgctgattagcttaagcttttgtttgtttatgcaacaaaagaacacctaaccaaaaaacaagcagaagagtgttgagatcattgtttcacatgagcctgcttgattgatgaatctatctccaatgttatcattacaatcaacatttgtaacattctgaaattatctttatttcaaaacaagtacacaagtgtttcctggctcttattgcaatctttttctttttcaaaatcatagacatggcagaaagaaataaggaatggagagaatgagagtttggagtttgagaaagtgttgggttttgttatgcgtacaggtcatccacattgcactcgcccaaatacactttgatacttcgtggcgatccacagtttccttctgctatcagaactctgtcgtttgcagacatgtgcgctatgatcttgtatatcatttctatctgcatattcaaagataaaaacttcttgatacgtgcgttcgaaaagttaccaatgaaaaaacaaatttcaaggatttggacgttacttcctcaggagcatgacaacgatcagctatctcttccagtgtcaatggctctaccggatctttacaactgcagccacagaaagaagtatataagtggtctctcatgagtcgagacaagattttttgacaaagaagcggactcggtctgattcttacgtggcttcattaagaactgacaatacccgcttttgcagggcgagaacttctgctgctgcctttttcccagcttccacacctgaaatcgttttttattcagattcagtaaacaaatatcaattaggcaattacagaacatcggtttctagatatgggaggaatatctctaccgggttggtggtaagcatttatgttcacaattgaggcatataaaccaacagctctttcataaagagctataatagccccaacagatgttggtgtcacttcctggattgtaacactgatggattctctaccgtttgcatataaagcagatctagttccctggacaaattcaccatatatagtgttactaaagagtgtatattatctctgactaatttgtgcgaaacgagattcataaatcagacctgtagcatcccaaagagatagtctccacaagtgacacctggctcaagctcccaatcgtgaccagggggtctgtcccgtaacacttctatgaaggttgcaaagaaattgtgcacaccatctctcagctgttgaatgtagctaatgaaataaacaaattaaatactgttaaaaagctccttatttgctatgctc

SEQ ID NO: 71555 - DNA, 401 bp, Arabidopsis thaliana landsberg
agaacccacagaacatacactgaatggcgttgggcttgcacggggtgtgaaactgaaccaacactttttctgttactgtcgaagatgccacaaaacatatcggtgtgggcatacctgatgaccagccggccaaaaacatatgcatagagcaagccccgaagagatatgctgaacagaaagtgaagacgtgcatctcccacgaacaacaaaccaacgaagtgtccgagtgactaaacatgcactgcataaacagcatggtctagagccggtacacacacttacatctactgatgatggctaatacagactgagatcaagcggtggtgcatgatagctgctctaggaaacactaacgtttaccacacccaaaaacagacatagatggtgcggagtctgggaca

SEQ ID NO: 71556 - DNA, 538 bp, Arabidopsis thaliana landsberg
  unsure (1)..(538): unsure at all n locations
atcccatgtgatgagatgatctttgcggactcatatgcataatattccgcttttctgcccttgagagcttctggggccgcctaggcctaggtatatttgcaatggtgccggttttattgaatcgtttttacacctataggatagctcgatgtgnnnnnnnnnnnnnnnnnnnnnnnnnnngcgcagacatacccatatgtagaaaggccaaaatagctccatttgcttcaggagaaaattattcgcctttctgacgatttggggatattatatctccaaaacggcgttcttctggcattttgttgagaatttgtgagggttgtaagaagaaggggtggtcgcgtcaagtggatactaacttttgaccactgactgtacacccaccagacctaggctgtattgcctcctgatctcttgatgcccgccatcctcatctttccgacgacttaagattcctgaagctttgcagctggtttgctctcatctggtcgcgttcctctttctctcaatcaacacatccaccacctgccacaacgaa

SEQ ID NO: 71557 - DNA, 615 bp, Arabidopsis thaliana landsberg
accacgtacacgtcccacatttatatcagtgcaaaaagaaacggatgatgaatttaaattttaaatttatttattaatagttgacagcgttttttaataaatagttatgatagtataatatttcgaatgatcatgttgatgtgaatataacaatttcttcacttctggtttatacgacggtgcgcgagacaacttccaattaatgggtccatttactaatccactagaggcagtggattacagaatccaaggctcggggtaaaaatgaataacaacagtaagtaagacgtctaaagtttgaacatatatgacttaaacccatcaactatctctaagggctaaataaagtaagactaagatctttggagttaaaaagggttcatcacttctatctttttcttgacatggccagtctctaatattacaataaatggaatacacataattgtttgatacattatagattagcaataggaatttaaacatctttccctacagtcaattgatatgtcgcactcatcactcccacgaccttcataatcacctttatgctcctagacaaaattgcttcgacaaatccctactttttgtttagttttgagttttgagtgaaga

SEQ ID NO: 71558 - DNA, 556 bp, Arabidopsis thaliana landsberg
  unsure (1)..(556): unsure at all n locations
ctaattagaatcttataaaccattttcttcaaattaatgtatattatcgtcttatctggttccgtacatgataaggtaccccacattctctgacaaacccatgttcaagcatgcactttcaaaaccttatgtatccattgatatgatcatttgacataaaattttcctctataagaaccctaatgatttagcaattacatggaaatttagtcttaagcgtttgtttaatgcttacagtgtcatacctatatttgtttgtaggagataaatgacaaaacaaaaatttgcacaagaatcaatagaaaatatcaaaataccagtgaaatattaaacaaatggatcgnnnnnnnnnnnnnnnnnnnnttaaataacttctctcacagaacgaagatctgtgaggaaaacattacaaactttatttacagatctaaacccatagaatctctatctcatacggatttatttctagttagacgagtcaattaactcgtaaaaaaaaccctagatgggcttaaaaataaaggaaaaaaaatcttaaaaaaagagaagagatgct

SEQ ID NO: 71559 - DNA, 583 bp, Arabidopsis thaliana landsberg
  unsure (1)..(583): unsure at all n locations
gattaaccagatgaatgaatgtttggttaaactttaaccagattcagatctccaaaagaagcagcaacatttgaagcctaggagcaactcaatacattgttaaacattaagcagagcttggtccagaagattggaaatcctcaagcaagccaaacaaaaactggacagcttcgcataaatctcatagcaagttaccaactctagcatcgattaagggtcagacatggaactttttctctcattcctgcaccaagtttaagagattcagacatatgttcacaaaacttaaacaacaaattcttcggcgtaggcacttgtctagtcaccatttctcagacaaccaattcaggttcagctttttctgcaggaacatgattttggaaaagtgtttggtaatccaagtttctagcggtttcaaagaaatgagccacggctntctctggtgtccctactaagacaccgtgtcctagattgagaatatgcccttttggtccagcacacttcacaactctgacacanaacatacatttctttcagtttcttaatttgaattataagcactacttttttattcagcttgaca

SEQ ID NO: 71560 - DNA, 564 bp, Arabidopsis thaliana landsberg
acctccgaccagatagcgggatctgaccgccgcatcccgacaccgcccgccggttatgcaccaacacccgctccccggccgccaacccgccgaggtccaccagcccgtaataggcggtcaggtacaccaccggcaccgcggccgcctgctcgaacgaccagccctcgggcatcggcgcgaccatccgccgatccgcgatcgccgccgtaccgaacgactcgaggatcaggcccatcacccggtcaccgggcgccaggtccgtgaccccgggaccggtctccaggacgacccccgccgcctcactgcccagcggcgcgtcacccgggtacacgcccaacgcgatcagcacatcacggaagttgagccccgcggcccgcaccgcgacccggacctcgcccgccgccagcggacgatcggcaccggacggaaccagggccaggccctccagcgatcccttcgcgaccgacgccaaccgccacggcccctcggcgggcacggtaggcccgcgtcagccggagtgccagcacccgtccctcgcgcagggccacctgcggctcgtcgagc

SEQ ID NO: 71561 - DNA, 304 bp, Arabidopsis thaliana landsberg
ctcttagtgtggttattttttaagtcttcaccttagatgttcatatacatgagtgagatcccattactcatactaagaatgctgcctgataatcattccttctataagagtgttttgaccacctctttgtggcttgtaaactatcaaagaccgaagctggtcctggatctgccctacttcagcacgatatcatgttacccacttgatgcacgaatacctattgccctagcgaaacgtcttgcccagatatatgttaaagccagatttagcacacaaaagcccgatgctgcctatcccaacacat

SEQ ID NO: 71562 - DNA, 484 bp, Arabidopsis thaliana landsberg
cctcttgatgaacggtgcgtttaaccgacttatcggaaggttaccatttggagaagtgttccaaagcttagaccagagtgctattcaaggaaacctaggtatttgttcaccgttgttgagaggtccttgcacactaaatgtcccaaagcctcttgtcatcaatccaaactcctacgggaatgggaacaatatgcacggaaacagagctagcagtggttctggaacattccaccgtagaatgttcctgagtgttttagtgattgtagcaatatcagctgcgattctcatcttctctggagttataattataacgctgcttaacgcgtctgtgagaagacggcttgcatttgtagacaatgcgttggaaagcattttctcggggtcttcgaaatcaggaagaagcttaatgatgggtaaacttgttctggtaaactcaagaactttacgttcctcgtctttgtctaaagagttcgaacgaaacccg

SEQ ID NO: 71563 - DNA, 537 bp, Arabidopsis thaliana landsberg
  unsure (1)..(537): unsure at all n locations
gaggtgctccggtaatgccgctgatcacagcagttacaggctttcggtttctggtgcaggaagtttgtacctgccagtcggaaaagaaataatagtaattgttgtttgaggcactgttaccggtaatgctnnnnnnnnnnnnnnnnnnnnnnnnnnnnnnnnnnnnnnnnnnnnnnnnnnnnnnnnnnnnnnnnnnnnnnnnnnnnnnnnnnnnnnnnnnnnnnnnnnnnnnnnnnnnnnnnnnnnnnnnnnnnnnnnnnnnnnnnntcccgatgtttacggtagtggattggatcacggtccctccgctgttgcgcagcnnnnnnnnnnnnnnnnnnnnnnngttcgaatatacttttaccgagagtaaagtaaaggactggaacgcatcaaaaatttcatagtgcgaagcagcggctgtgaaataagtgcccgtacccatggtattgtcgggtgcaccggctgctgctgttgccccggtaattaaactttctacataataattggtggtagcggataaaacgggcgtggtgtaat

SEQ ID NO: 71564 - DNA, 606 bp, Arabidopsis thaliana landsberg
aacaaccttagcttattggatatagttacttattatctattttatcattttgcgcaatcaataacattgagagctttgagtaatcattcaatttttgtatcataacgagagagaagctctactttccaagtacgagactagtttcctcttttagaaaagaataggacctctattttcgaaccctaatcccgatatatattagtcacaaaattaatatcttaagaaaaatatgaagacattagtttggtgataaagcctatagatgcttcactttagtaaattactaagttcccaccactaaccaccatcataacttagaccaacaaataatgatcttgaaaatattcaaaaggttaatttaccacaattttctgatagtaataagaaaattatctcatttacttttccattaggtaactatttatgatctacatttgcatttgaattttgccagtctaatatatcttcaatattgaaccatttgaattctacattagaccaagaattggtgcgaaataataagaagaagacattatgaaagatgtctcaaacggctgtcacttccaataatatataatctaacacaagtaactggtgtatgatact

SEQ ID NO: 71565 - DNA, 367 bp, Arabidopsis thaliana landsberg
gaacgcctttgacaagaacgcttccgtgatgatcgacgacgctcagctgttcgctttcgaggccaagtacagctccttcggggacaccgtgcactacgtcgatccaccgaagatcttccgcacctgcaacggcagctacatgtacgacacggcgggtacgccgttcctggacctgcagatgtggtactcggcggtgaacttcggttacgccaaccagcgcctcaacaacgtgctgaaaaccagaatgaacctgttgccgaagggggccagccagtccctgcaccaaacccgcatggagctggccaaaacaatggccctgaccccgaaaaaaaagtcgggcctgaccggccccgtgcccttcaccggg

SEQ ID NO: 71566 - DNA, 242 bp, Arabidopsis thaliana landsberg
agtgaggatcataaagatagaaacgataacaacggatctagtggcatatggtgtagtaaaacaccaaaactcttaaataatcaaaagtcaaaacatgtgatgaagattgagaaagtaatttacataaaattaacattttgagtgtcctaataaataaataaataacatttttgagtttcgagcgaggacattttttttttggggggggggggaaaaccacttcggggccctctaataaaaaa

SEQ ID NO: 71567 - DNA, 463 bp, Arabidopsis thaliana landsberg
ctaaaatacaatgctatatatcaaaaactaacaaaatttgaagttaactaattcatgttaaaaattacataaataagatgaaaagatctattcacataaatttcatgaactagtttactcaaaagttttgagtcaaaacacaagatctattattaatttctattttcacattcgtttagcaactacaaaaaagtttgaaagaaaccaaaaaagtgtgagggaatattccaaatatgatatgtatgtgtactaattcgaattaagaacattaaaagaggaaaatatcagcattaaaaatctgtgatcatataatttgaaactcaaaaaataaaataaaacatcagttaaaaaaatactgtaataaacaagggtattatcgtcatttcgcaaacacgtaaggtgctgaaaattgatcttttcaaaaattgaaaggtcagttgggggcaaaaccccaaagacattc

SEQ ID NO: 71568 - DNA, 607 bp, Arabidopsis thaliana landsberg
cgtggctattttgaaatacaaaatgtctctttttgtttcataaccaaggttgaccacagagcctagaacaaagggtaggagtgatgcgaataactaagttataagcaaaccataattagcctgagaacggcccacaaatttgctagataggcccaaaagatcctttttgttccgaaacgttacaaaataatgtttccaacttaactttctcagctacgttgactaatagaatcgagctttcacccatacatcaatggctcatctctccttgcaataactaaactaatctagcatctcgaggcgattttttcaaacttgtttacgaatgtaagtaacaggtatcattatgttggatatagaaaagtaatcatcaatattcatcatagttaagccatgaatgttaacacttatttgcttgcttctttttgttttcttttctttactggcaatattggccatctttttagagcaggaacaaaaaaagccttattaactcaacttttcataattcatttatgcacgtcattattaacataagatctaaagtccaatccgataagggtatggtcgatttaggatttcgactaactgacatcataatttgaat

SEQ ID NO: 71569 - DNA, 508 bp, Arabidopsis thaliana landsberg
atgatgcttttcttaatgtatataaaatttttattttatggacaaatatcctaatgcagggattggcgtttaatcttgttcggatataataccaagtttctggaagaattgggcttactataatgaaaaactgaaaacgttttgagttactaattctatgcaatatcaactcccatttgttgaaactccaaaaatcatttttataataaataaaacagatccccacaaaatggtggtggtggtagtataagttgtggtttaaattgcaaaattgatagtgtacttcaatttagtgcaagaagtcaaaatattatttgattgcaagagatccaaagttcgagtctctctatacgcagatatctgttttaatatataactcacaacaatattgttttcgttgtcaaatttcagttgtaaaaccaagcttaaagaaaaggggattcataaacgatgacaaattgacaattgaaattaacaccgaaaacggtattgttgtgggttatatatc

SEQ ID NO: 71570 - DNA, 577 bp, Arabidopsis thaliana landsberg
ctgtgggcatgacctcctgccctctctacaaggatacttacagcgttaatgccaatcatgatattatatcaacatcaccaatgcatgacatcaagtagcaaataacttgacaaaatttgaataggacgtgaataaagacatctgaagtgaaatgctgagcagtaggataaaagcaatcgctcaaacggatcaagtctacacgaagaaaacagtataaagatatcacaaactttaggacagtaaataatacggtagttcagaacttatgcagttttcttaccacggcatactaccttaggacgaaaacttgaaagacatgtaaaacggagaaaagttctcaacattattcatctatatagatgtgtgagccatagtctctacattaatatacaaatttagcagacaaaaggaacacaaaatcacttaaaactggtagaagatagtttctactttctagtttagcatcaaggaaaggcttttttcatgactacaacggtgctacaacaaaagagatgaatggtgacagtttttttttaaaaactacttaacagagcgagatttactgttgttagctaac

SEQ ID NO: 71571 - DNA, 309 bp, Arabidopsis thaliana landsberg
cgcgccgaggcaacgcggtcctcgcggttgcctacgtcgatgtcgtcggtcttaattgcgtcaacgacacgcacggccatacaggcggggactcgttactactgcgggctgtcagcgcgatccgcgcccagctgcgctcgtatgacctggtcgtacgtctcggcggcgacgagttcttgtgcgtactgtcgggcgcgacgatcgaggacacgacacgccggttcgccttggtgcaagccgggcttggcagaaaaacagacccgtgcgccattcgagttggcttttcaagcctccttcagggggacaccg

SEQ ID NO: 71572 - DNA, 481 bp, Arabidopsis thaliana landsberg
cgtatgcttaaaaccgacttgtaccgatataaatttctcccgcatgtaccgcagttttaccgtaccgcagtataaatccgcttttcccgcactgccaaatatgctgtcaccattcaaatccaaagactgatgtatattggaaatataacggtaatgttatcctggcctgcgtaggtgaactataagaatgggattcaaatgctcactgacaaaatgtcaaaatagttttaaaaaaaattgaaagaataaattaaaaaatggacttaaatggcggaaaacatatggtatttttatgttttcttaagaacaaatttatgatttcaatattttattatttctgatattcagaaaacaaatcccctatacattaatgaataacttcattcaccctctctgtaatgaccaatcagaatataacattatgacatattatactttattttaaaaaaattaaaactaaaatttggaaaaaaaattaaag

SEQ ID NO: 71573 - DNA, 546 bp, Arabidopsis thaliana landsberg
actaatggataccaagatagtggagaatttgtatttgttttatgccagaactgtttatattattgttatatacacctaaaagatataagaaaatcaagaatccgtgcactattaagataaatggatctagcgatgatacattattacataccagtaataaaacatactatatgtgacgcacatagacacataatgtgtgagtaaagttgaacaaatgtattctctctaacagaaagtatcttgatttaaaccttgaagaataattaaaaggcatatttaagtgattatgtccatgtacaaccttgcgaggtgttcacagtgttgatttttctaatctcaaagtcgtgtactgtcctttggtggatcattatttatgcaccggttattttccaagattattgaaccattgttacattaatcatgtgtgatgttactctagaagataaatttgataagaagaatgtttcttgaacaaatacaatggaagaaatgtcagaacaaactcttttccctgttccaaaactctcttagcttgtactacatcat

SEQ ID NO: 71574 - DNA, 519 bp, Arabidopsis thaliana landsberg
aagtataagtctataaccataataaaactaatctgacgacttttttcttatagctatattagtgattgaaaaaattgcatggtctcttgttttccatgatatttaagttgcgaaaaattaattgcattatattgtaaactaattaacggaaaagtttatctgcattacgagacaaacacatgctagtactataattttgtagtttatctgcattgttgaaatcggactctgctaattttattgattatacagattacatatcaaatctagtaaatatgtagcgtttaaaaaaaaaaaaaaaaaaaggttctcaaatatgataagttaaacttaaacgaatccttccaaactcttatgtattgaaattattaacaaataacagtgaacctgtcgatcacttgcctctgtgatctttcaagtttcaatgcaaagaacaatcgtcccgtgattcacaaccctcaatattcaactaaggttaccctaataagtaataatccaatatgatttcattattcataa

SEQ ID NO: 71575 - DNA, 3202 bp, Arabidopsis thaliana landsberg
  unsure (1)..(3202): unsure at all n locations
tctttttgagttttgtttgacattacatttgttaatatttaattgttgtaattagaaagataatgtaatgataatcattgttgcaacattcacttctctggcacaaactcattagataacccaaaaataatgtaaagtgtagttgtataatagttttgtgctaatcactttgtttcttaagacttacatatcataatgcagagtagtatataacattaagaataataaacttccactgatttttgttggaaataacttgaattatgaacaattttgaaaaattatacattttctactaaattagaaatgagtggaaccaaattatttctctattatcttcattccattttaatcaattcctcaatctctcatgtttttaccattgtaattttagattagactaatgggtgtgttattcggccaaaaaggtaaatgtgcggcccatgggcaagttagtttagcccagcccagttatatacgcaataatgccaaagtcaatgaatcgctagcagttgattggcgcattagtgaacctctatctaatcactaccacaaaaaaaatgttatgaaatatctttttcataatatttctcaaaggaaaaatctaacgaatggaagcattcgattattgaatgaaatattatttgaactatatgagaaaataaagtgtcagtcgtggggctttttacatctcttggtcgcattgataattcatataaaatatagaatatgatagggatgaatcatgaatgtattattgttataggagcatccgtggttagagagaagataaggaaacataagaacaaagctgtcacaagtctctctgtctctctcaaaccagccacaccacctcgtccccattactcacatgcctttctctgactattattcttctcctcccaaaaactgatatatttatattgattgcgctcatataatttgatatgaccgaaaatattgttgaaatattttcaaattgtgatttttcaatatttaattgacaaaatacaacaagatttttttgatgtaataaaatgttaaagaacatggctactacaacaacaacgacaccaaaaaactaatttacaaagacagaaccaaagccctctctctttctctctatctgaatttcacttctctcaaccaaccacgtaatgccacgtgctccacgtcacaatcaaatccaaccatggtgtgccacgtcaccacgaccttattaggactaatgtgataacgctgtaaagtaagaagtggaccaagtggtgcggatactgaagtgaagttggcgagccgttggagaattcggaagaatcgacggctaaaggcatgccgtcgctgccgagagcacatgaacgtggcacgccatcgtggttcagcatgacggctcggaggacagaagtgacagtggggaaataagcagtacggttcttagcgagaagccaagtgagacccatgaggacacagtctttgttgtgcatctttgctgttctgtttcggtcttcctttgatgggtttcttgtccctgaagttttcttcggatttagctgcaaaatgaagcagaagtgtttgttttgattagggtttgttgctgctgactaaagtaatgattgaggattgtagaaagtagaaaggtggcaactagttgctaagcttttggctatggtgggttggtgattaagatgcagaagaatgaaatcatatgatggaagacaaaacgtcgcgtggagatcacggattctgttagcgcgtatatgtgtgtcagactgtcagatagaaagagaacaaaaagctaaagaacaaaacttttcccaaattactatcattcgccatatgatggatagatcagaaagaatcctaaactacataattccaaatcttcactcactcatatagtaaaaccctaatccttaaacaccaaataaatatcattaaaaaagggcttctaaactttggactaaaccttacatagttaactactataactagtccatcaattcctcattactcatccaaaaaattgtcttaatcagtcaatcaaacaaaatccagaagctaaacaccaacaacgcttcagggtatctatagattatctaaaagttactagatttgcacacacattttaccaatttagccaacctaattccatttgaacttcacagtggcagcttctaaatatagcagcaacgttagtgactttaccttatagagactgttcaagcacttgttgcaaccaagaagaggtgagaatccatcagcattgttgtggcttccactcaaacaatcagtctctaatctatcaactctctcgtctccaacgagtctcccttcatcattcactctaaaagcctcggaacagctcaacggatgcaatctgattccacagtagcagtaaacgacgtcgcaagtctcgttcggtctagtgagctcaatccctctctgcctcagagatttccctaatccgtcaacgcaagtctccgagtcatcgggaagcaaaggcatatcttcttcaggagtcgttaccgcggcggaggaggaggatgagtttcttgcggcggcggaaatcgaacggcttagagcagtggttgagtaagcagagtagagccacgcgcctagtacggggcaacattttcctttgtggagctttttgccgctgcaagctgacttgatgccgtggaagaggtcttctggtaaatcgagtgggcagccggagaaatcggattgctccgggaaagcgggtatggttgcgggtggggatgatttgacccggaatggctggactgtgaccggttcaggtgaaacgggtgatagaatggtgaagaggaagatgatgatgagggaaatggaagaaggcgcgtgttggaacatcgccggaacagaggagacagagtaatagagaaagagagagggacaaagagtgagagactggaagagatgtgtaataaaatatcacaaatgggatctcgatatataccaatttaatactactaagtcagtttttttattagctttaataatgtaaaaaaatcagtggaaaaaaatttgtgatcaaacattcttaaaattacaaaacatttcttatgcttcgttaacactccatttttcagtgtgtaggacaataatagaaaaaataaactttttaatcgtnatccatgctggcgactattttatgaataatgaaatcatattggattattactta

SEQ ID NO: 71576 - DNA, 1418 bp, Arabidopsis thaliana landsberg
agaataactccaatccttcatgacacatcccattctcaaaataccctgagatcattgcgttccatgagattatatctctcctaggcattctatcaaaaagcaacctcgcgctcttcacatcatcacacttcacatacatagtaatcaaagcgtgtaaccacatcaatatccaattcatatccgtatcgaaccacatgaacatgaacctcttttcctcgagctagatcaggtatacctccacaggttctcaacacacaggggaacgtatagacatcaggcttcacaccaccaacccacaacattctatgatacaaacacatagcctcatcgaaatagccttgctttgcatagccaccaaccaacacattccaagaaaacaagtttctctcagacattttaccaaaaacataccaggcatcaaccaaattaccaaacctcacaaacatagcgagaaacgcgttaccgagttcaacaccaagactgctcatggaactgagagcaatagaataaaccttagaaccttcctcctgtgctctcttccactcgcacagcctaaccaaagccacaaacacatcttcgtctaccgcaacccgcaactcctgcatagaattgagaagcttcatagcttcctccagcttcccattcgcgcagagtccatgtaactgagaattcgaaaagtgggtactactcgaactcgagctaagaacagatagtccttgagattttctcaagaaaagtctccgaattccaaaattccaatagaaattaacgtttctctgtttataagctttgctctgaaaagagttggacttgcctggattgagataaaaatgaggactttgagcagaagacgccatcgtaggagagacagagcaaagaacatggtcactctcgtagaggttttacatttggggttttaaggcgagaagataaagtcgacaaatttcttcttaactaacggatcatcttcaacttcaaaaaactacgtcgttttggccttaattgcagtgtctcccaaagttggttaaaatctcaatgatgattcttatgttatattactgagtttaatcaacacagagaggagaggattgataagattactgaacttggaaattttattactagtttggtattggtatcatcaagagaacaataacaaccaaaaaaacatataactaaatgattaattttagtcttctcactatcaaaatattactcctgaccaaaacattaaaaccaacaggtaaccaaatcccaaaacccttttattcatcatcgtctaaatgccagtaggagtagatttctccgatagttggctcgtagtttctcctgatggcgcattcttctgagatacaacaggaatcttgactgatgaagctctctccatttccctctcaagctctttctcagacatgaga

SEQ ID NO: 71577 - DNA, 1640 bp, Arabidopsis thaliana landsberg
  unsure (1)..(1640): unsure at all n locations
agacttatactaaatctaatggctaacatgtggatagtatgtatgtactctgtaacagagcacaagcaaatttatcttatggcgtgtatccaatattcagacagtctccttggcaatattgattgatccaatatgaatgtcgtcaactcttagatacatcctttatacgcggtgagacatgcaatttagccccatccggcaaacgtttcttgaggaacgtcaatttccatcggctgatgtgtacttacttaaacgcttgttgctctcagtgcgaccaaaggagttcgtgtaatagaatcggtcgttttcagcttcggtctttcttttgtaccctcctatatctttctgtatatcatactcatagtcgctttaacaaatattttaaacaatatatgaaggtgatttgcttattctattttttttttcatttagataagacgcttactctaagttttacatggtgttaagtaagtacaagtttgagctataattttaatacaaaccaaaattaataactatgtttaggagttcaaaacttcaaattatatgcaatgaattggcttatgtgaagggtcaaacaaaacaaatgtcaaaattgattataactttattttaaagacaacaaaaatgcgtttatatgtatattttatccttttatgacaatgatattttcatccttttgttggagaaaagtaaaagaaaattttgaatattgtttatttttgtttgcttgtttaaataacacgaatatatatatatatatatatatatatatattcaaaattccaggtaagcccaaaaaaactaactgtgttaaatgagtttttttcaacgcgttaatatgattatacagttatagagtgaagatgaacgccattcaaagtaatcataaagactgttgaaatagttttttttacaagttgtttcaccactctcaactgcatacaagaaaaatgttttcaataaaatggatttctagtttaatcgacaagtaaaactagataaatgtagtgcacacaatagttttctatatattacaatgatttaattatttttcttatgaagatgatattttaacagtttacgtctttataatgccacgataatagcaaaataagtctgctatggtcgaacgacgcttaagtagcacatcaaaaacatagtttttacaagcccatatatactttcttcaagttgcaaaacatccaactgaataaatgtaccagcataccaaaaaaatgattcttgaatttcacctgtcatataacattttaaaaagttcacaacgcatacatgtaccactcgcactcagcacacaagatctaagatgtcaactgttgactcacacggtcacaccgtttattacgattactgatttgtacgagtcgtcgtcgtttacaaaatgcaaaaaaacaataccaattcttatatatatatataaaagattcaaaaatataaaagacaggtgaaataattaatcagattggtttcgcgacgtttcttttgcattttagtattttcgtgatatcaactttagcacattaacattatacattgacgagacgactctcatgagcttcacttgttcattctttaaanagacatatctggtacgtatataagaattttgtggaaatttc

SEQ ID NO: 71578 - DNA, 606 bp, Arabidopsis thaliana landsberg
ctaacaatcaacaaatcgagtaataattcataagggctccaacgttttacataatttcataccatggaaagtaagaaaatttttatcttcacaatattttcttaatttattatctgagttgcaaaagacaaggtacctaaagcaaacaaaaaaatcatatctttgaataatgaaaaatttaattcaaactttatatgtaatttttaaaatatttctcattagttcatgaaaaagtttttttagccaattgtttttgtaatgaaagtgataatagcaagatgacgtattgattggcaaaacatatatataaaagattaaactcatattacatgtcaggtctgaaaccattagatatagtagagatgggcatgtatcaacttatcttggctagtattttgtatcccttggatccaccaatatccgtgggtatccagatctgatttgaagcagccagtgataccttaaaaatatttaataatcaagattaaaaataaaaagaaaagaaatgaaataaaatgggttcaaattgagttttaaattttttaaaacatatatattattttctggaaatatggttaaaatacgcgaatctaaaaaattaaacct

SEQ ID NO: 71579 - DNA, 206 bp, Arabidopsis thaliana landsberg
aagcgattattattcgggagggctgggattacaatttggttgaagaattcgcgttgatccgcgagattgttgacaaattcagctatatcgctatggatactgagtttccaggggtggttttgaagcctgttgctactttcaagtacaataacgatcttaactacaggactctcaaggaaaatgtcgatttgttgaaattgattcaa

SEQ ID NO: 71580 - DNA, 307 bp, Arabidopsis thaliana landsberg
  unsure (1)..(307): unsure at all n locations
tatcttattgaaacatcacatgggcagagggcgataatacatctgagaacaacaacatctattacancctacaagcactactccttacataggcacaggacatcacctttcgtagaccagctccatctagatcttccaggatacgagcaaaaggccaaaggctcttataaatacttaggtcactaaacttgtaaaggtagctgatagatactttctccaatgactttagttaggttatagcaacagaagaggcatgactcaacactgccgcttgaaattatgttgctcagaccaagctctttacgaa

SEQ ID NO: 71581 - DNA, 497 bp, Arabidopsis thaliana landsberg
  unsure (1)..(497): unsure at all n locations
cccggttagttcgcgctgcccgactggttgaccgtcgggttccagtttgtgttgttgccaccggtattgttgtgcgggtgctgcgcctgatagctgctggacgtgccggtgccgaccggacggatgaccttgccgctgcggtagcgctggacggcgctctgcatcacgatgccgtcgtaggcgatgttgcggtcggccgcatgcggcggccacggatcgatcatctgcacgaccttgttggtctgcaccgcatcgccgccatggaccgagatcatgtcgcgccggtcggtatattccgaacagccggcgagcnnnnnnnnnnnnnnnnnnnnnnnnnnnnnnnnnnnnnatggcggcatcggaaattccccccttcggcagatcgagcatatggccggtgaacggccggctttcggccgtggcaaaggaggcttncagcgctcctcccttgcgcgtttctcccggcgcaacttccatcttgcccatcaggaagaagt

SEQ ID NO: 71582 - DNA, 474 bp, Arabidopsis thaliana landsberg
aacgaaaaaaaatatgttgtaaatagatactattaagatctgagcttatttttttttttttccgttaacatgaaggatcgcatgccgaaaattgtccctaatttgtcttactattggaaacgtgtacatatgcctaagctgcaaaatgtacgttaaaaaaaaataaaaaaaaatttgaaaatgaatcgatcacttgccttcatagaaagatttcacatatcaaacgagagtgactaatccaccatagtttaaactaaaagaatttgcaactgaaaaacgttgatcgctcgattttttttgtcaaattaaagtcggcaaatgttcttttagtattaaaataatgacgtcgacgttttgaaaatcatctgaaatctttattgtacagattttatgcatccataatatttgaggatccttccccatccatacttttgttagtgatttttaatacattcttttctacatattaccgtc

SEQ ID NO: 71583 - DNA, 303 bp, Arabidopsis thaliana landsberg
accacctatgcgaaacccatgtgatttaacattttcactttcttggacaccacaaagggtattggagacttatgcaagacgatctctacgccaccaggaaaccctactgatacggatacgaagactgccaccttaaaccgccaaatcataccgcttgccgttcccatttctggaagtgtcaggtccaataccacccggatctcctgcttttgagataacaactccgacccatactctgtacatactggccatggtgtgatagaaaaccccatggccatcaggacggaacaacctgaacaaaaa

SEQ ID NO: 71584 - DNA, 537 bp, Arabidopsis thaliana landsberg
  unsure (1)..(537): unsure at all n locations
tcaggttggggcggacgctggcgaggcgcgctcctgctgggcgcgtccggcgcgggcaagagcgatctctccctgcgctgcctcgaccaggggttccagctggtggcggacgaccgggtcatgctgtggacatccggcgacgggctctatggcgcgccacccataagcctggccggcctgatggaggcgaacggcgtcggcattctccaagtcccgcaccggccctggactcgcatatggctggcggtggactgtgtggcttccgggaagcctgaacgcatgcctgatccccgggccttcgcggccctgaatcatagtcttccacagctttctctcgcctgcagggaggcatccgcgcctgcgaaactacgccacgcgttgatcggccttggagtccgcgatcagacggcgtaaacccgccgcttcgcacgggcggccagccttcttttccttaactggccgcgtctggaggatgtcctttgaggcgttntnnnnnnnnnnnnnnnnnnnnnnnnnnnnnnnnnnnnnngncgaaga

SEQ ID NO: 71585 - DNA, 567 bp, Arabidopsis thaliana landsberg
aacgcaacatcaaaaacaaaataatataaatactctagagaaagttaagttcgtttctcaagatcaaatcgtaaactttatatagtatgtgtaagtatctaactaaagatattccgcactgcacacaagacaacaatagtaccgaatctcagcagaataatgtgttgtgaagatcagcacagtggaatttcagaaaaaaacccacagaaacttcttcgaacaatagatctgcacgagtactgatagagtgatagagtgatactattcgtgtaacatcatttttagtcagtaggcttcaccagcattagacggtcatgacttgttaaagacactgatcattctcgaacaatagatcagtgtttttttaaggaaaaattggtatgacttgttagttagtcctatcatcataattacaaattatactttttatttactctcatatgtattggattttgcttttattctttgggggtaatcagtagtattagttctagaatcatgaaagtaataattttgagaagataactatatcttagtagcagggatgcccattaagacgacaatatt

SEQ ID NO: 71586 - DNA, 556 bp, Arabidopsis thaliana landsberg
taccttctcatcgatccgtatccccatcatcgtcttgatggtcatgtgtgggatgtggctcaccttgcgcacgtttctcacgacgtttcattgtcttcctgttcaggcttattgggataagtcgattacgaatgcgcggtgcattacccacgtcgccaagttctatctcggaacggacctgacccattgtttgatggactttatcattttggggttacccatttgggagattatcaggatgaggttgccctttggccaaaagattgccgtccttggtctctttgctcttggatctatgtgcgtcctcgtattaactacagtgcctggccagctgctcacatgatatctagcgttggcattgcgtccatctttcagatcattcagtcgcagacctacaaccccaaaaccaatgagttgccctatgagtttgctctggcaatggtttgggggagtgtcgaggttcacttggccgtgtttacgagtaagcagcccccttccttcttctacaataggtgttaatccactgcccaggctgtctcgccttctcagacccatc

SEQ ID NO: 71587 - DNA, 882 bp, Arabidopsis thaliana landsberg
aggctactgacctaaaataaacgtcgagtctaaaccaaacaatttgataaactttgtacattgacctcaaccaaccacaaaataccatagtttttacacagatactgctgtatgtaagctaatatccattggaaatgaaaaacaccaaaggtcttacgagaaagcaagaagaaagatgaatactaagatataaatcctcatacaaagtggatagacaagaataagatctcacagcatgcaaaggggttgatttgagtaccttccataaaaggggatcttagccttggtggcattctgtttcagctgatcaaaagcaccggccctgaaagtatccgcacacactagagctgctttgtaccctttcttctgatgatagtaagcatacttggtacatgttgtggtttttccagcacctaaacatagtcaaaaactcaaatgtgatctatctactcaccaaactcaatcaaacactgtgcaaaaaacagtatagcatcttacagaaacctgaccttgtaaaccgacgaacatcactacactaggtttggcctttttgggggcaaaggcaggctttcctggatccagcatcctacagagttccttgaagatagcctgaaagagaatcatgatcaattatacagaattaacccctctgttttggaaattgattaggaatgaatctgcggtaaaactaaacctgctcgatgatcaggcgtttgttgtggccagctgctagatcgtcgaggttaacgatcttcttaatattggtctgcatcttttccacaaggccaaaagaaacatcggactggagcaaagcgcgagtaatctcgtttaagaaatcattcaaaaccttttcatcgattattgtcacattgttcatctgct

SEQ ID NO: 71588 - DNA, 476 bp, Arabidopsis thaliana landsberg
ctaacatacaaaacgcaagctaaattttcagttcaaatataaaaacacacttaatttagcatattttgatagtagaacttattaaaaaacttatttaccctccaaaaacaacactttttgcctgcaacgaaaataactgcacaattccagtcggagattttgctgtttatgccaacatgtgcttagagactgagaaattagcaagacaaccacctgcgtgttcggggttttagcaatgggagcaaatctattggttttctcattcttttgcacactagaaaccaatttcatttattacaagtgtatattccattgcccaataggctccgattgatgaaaaggaacatacacttgtcgtaatatatagctttcatagtgcgatccttctaacagaatgtgttaatagttaatggatcacacaaaatcccacctgggattcggaatatccagtctatagccacatattacgcgcggat

SEQ ID NO: 71589 - DNA, 201 bp, Arabidopsis thaliana landsberg
ttatatttatttatattttgtgtgtctttttgtgtgtgtgtgtggatggtaccaaacagatacagaaggagatgcgaaaaagactatgatgtgtgtggattcatgttcgcatatgtgcactagaaagaaatttaatccataaaaagttgttttattctgtaacaattcgctggttgaataaagatgtatgaactttttttt

SEQ ID NO: 71590 - DNA, 226 bp, Arabidopsis thaliana landsberg
agatctataatgtcgttttcaaaactatataaagagttggagggtccaaagaggaatttgggaaccaattgagtaatagtgttaccagcttatatattgcaaaaatatcattagtcacaacgtctatacactgaaacacataaatataatgtctatgtcaatacatctatgtaagaacagacgcgtcgagtgaatatctaatatgtttctattctgtcgtatacac

SEQ ID NO: 71591 - DNA, 478 bp, Arabidopsis thaliana landsberg
  unsure (1)..(478): unsure at all n locations
aagtttgtttcatttgcatacccaaatgctaaattgtgaataaagtcgaaccgaaaattttgaggagcactaattccataaccatatcctgaaggattatcttgctgatctgtgcaatatcaaacaactaagcggtgagaaagaagattaaaataatgataatgggatatataatatgaagaaatcgtgggtttctgaacagctagctaaatcataaaacactgagtgacttgtaaagctttgtcctcattagagatttgtgggacagtgaaacatgggcagagaatgtgtctcacttactgtccaatataactattttctattcaaagatgatggctaattaggcaagatcaaagtcttttaagaaaactaccattttagttctacctcaccaatgatttgacacaaacaatgtttttttacaaatgatttaacttcacttaaatatgagtaactaaagaacgcatnagttttattg

SEQ ID NO: 71592 - DNA, 276 bp, Arabidopsis thaliana landsberg
cggagctgatgacataacctttgaacttacatgagctgaaccaggacatgtaccgctcatatgctatccctcgatgaagctggagaattgtactctttgttgcatatatcccgcccatacgcaactatactgaagatgaaaaagcagaccaacaggggtataccatacctgaggtacatgatcgccatacaaactctacgaatgatgtccgtggatgagagcaaactctacatatggtcgtggggaatcattacgtggatgacacatctcctatac

SEQ ID NO: 71593 - DNA, 207 bp, Arabidopsis thaliana landsberg
actggtaaatggttttacttgttactcaagttatatttttaagtttgtttgacactgaagtctttgtgtttgtttttgttacagctgagactttaggcttcactaagtacccaccagcttatctaagtcctgaagcttctggtaagaatcttctcattggtgctaatttcgcttctgcagcttcaggttatgatgacaaagctgctc

SEQ ID NO: 71594 - DNA, 489 bp, Arabidopsis thaliana landsberg
ctcccggataaaggaaggacgagccaatctttaacacccaacatgttccagacatgtttcttaccattagattgtgtcctatattgagaacatcattgaggaaaataacaaatccatcacttttcatcgtgttcctcttttctaatttacatagataacttttgtgggaaagaaaatgttggtgttgtgtttcctgtttgtgtactgtgacaatgattccggtaaatttcgataaagaacattcgagttatcttatctggttagtctcatactaattagtttcattagctgattagtatcagagttaattatcattatttgaatacttctgtttgtaattgtagatactccaattttacacttgcatgtaaacaagcttagatgtgagaaaaaaaaaccccttacaaacgttcttgttatagtaacacaacgatgaatggttccaaatttttctcttctctatgaccttgaacttttcagaaatacctc

SEQ ID NO: 71595 - DNA, 4543 bp, Arabidopsis thaliana landsberg
  unsure (1)..(4543): unsure at all n locations
cctactcttcagtaacatacctggtcttccttgctcccaatgcaactctctgaaacaaattcccaaaatttgacaaagaaaaaaacaaattggttaagtaatttgcagaaatagtttacatgctttgatttacttctacgcagagctattaatcgtcttaactgagaatattttggtgtaggnnnnnnnnnnnnnnnnnnnnnnnnngtaagtcggcttcatagatccgctagccggtattgcccttatgtttgggacaaggtactcagccacctgcaaacgaatgtgtgatcatgactcatggggctagagattagagatcgtgtcaaattgttgtgctaaaaagaattaagagttaatgggttcttaccacttcggctggctctgccaaaacattaatgaagaacttggcctgcaatagagaacgtattagagagaatctcttgaaatggaatctaaatatttcctcagtgttaagtcatcgaacttgttttgtagttgctccggacatgagcagatcagttgtgaccattccaggctgcaacaataatccagagaaaacacattagaattatgatcatgtttagatcctgaattcattcaaattgttcaaataactataatccatccattctattcatctctatgcgcatgtctgtatcagtgtatctaggaagacactaaaaacaaccaaaaatgaaatgaagcaatatattgtattcataccgatagattatgcaccacgacatttttgacatcttgcatctgcaactctgcctatgaaagacaggaattactagagaagtcatataaggagaagggaaaacgaagaagagttcaacagatataactctggcattacctgtaatgactttgtcaggtgaacgacactccgtttagttgcaccatatgcagcaaatctgtcaaacgttaatcaaaaaaatgctattagacagtacagagaagagagcctaaaggagatttactaaagcatgttcccaagaaacttaatgaatctagcaaacctgggtgttggtctcccatctgaaccagctccatcaatattgaagatatgaccacctcgagattgggtcaacatcatattcattgcctaataatcatgaacacatgtcagtaaatccaactgataataacaaaagacacgctgaattcatctccttataacatctttgactacctctcgggaacataacatgagacctagagtgttggttttcacaacttcactgcataaagatttcaaaaagtaaatgactgaaaccaatcacatagaaactaaagagaatgatcaagcttaacacaagacttacataacatcctcatttgaggcctctgccaaacgtttaaagctatatgcattacatcccgcattatttatctgtatcatctcaagatggtattataagactatttctatggttacaaaattgaaaagaaaacatagtaaaatactgtggacaacattaacacagatgtcaccaacaaatgaacgttcttcatagttgagagagtgtacccacatgtcaatgtatttaagattcttgtgactatcagctacaagttccctcacatccttcccttgcgtagacatcacacttagttccctactaagagaaaatggtctcatgatatcaatgcacataaagcaaaaaccttggaagaccacacgaatggaaaagaacagtaaaagaaggcggtacccacacatgctccccaaattcttccttaagactctgaacagcagtctcaactcgttcagctgcaagacaggaacagccataacagcaaaattctactgaagattggttctattacttgcttgcatgtttccttacagacacacaaactctagaaaaggagttcaagacaacaatggggacaggttctaacctgatctagagcaaatcacaacattgtcgcctgctttcagaaactctctagctaatgcatatcctatacctgaacaatcaataaatcaaaaaccactctttagagacacaatgagataaaaaaatatgttttttcccttctgaaaattaaaaactcgagtcaattgacaaagacagagtgaatgaaacctttggttgagccagtgatcaatatgttatacggaggcgtcataggttctcttttccctgagatacgagcttccaccgccgcagacgacggagtaaccgtgaggttttggcgcgtaacaacgacagttgcgagaccaaagcgttctgccagtaaccgacgccggcaaataggagagagaaacggaagcttagtgacatttgagacggaggaagaccgaagcctaagcaacggagaagaagagacgttgaaaccactccaagtagccattacagaagctcaaagagagagagagagagagagttgcgtaagcgagcaagctcagagagagttaaatgccacgtggcggcatataagatgataataaccccaattattgttcaaaatacatcatagcccctaaagtttctagattttatgtttataaccctacactattgttctgccccaaaaacgacactatagttacatagtgactactgaagtataatttctctatctgctttggttggtatttgagatcgtccaaagcacagttacacaaaccaaatctgtctgcgaaaaaacctacagagattcaattacttgcccttggatcgcctgcgccgtcctccaaggagtttaagcatgttatcagtaacatcaggtggagaatctgcatcctcattgtgttggccagtactattatcagaggtatgagtcaaccaagctaaggcctcaacagcagcatctttctcagcgagcgttttattcctctgaggcttcccaacgaactgcattcctttaaactccacaagtgctctgaattcgtttgtcttgagatgttttgtcttgtactttggaggtgagtgtccagctctcatcaaaagtgtctgaaggagactcttcgggtttgtcccgtctttggagtgtttgttctctcctatttgcggttggcttggcctctttgtgtcacggccaaagacaaatctgccttcgcattggtctccagccacaagttcttgaactgcaagcatgaggtacttgccttctttgtggatgtccatgcttggatcttcaagctgcaaatcgtaaagatactaaaggtgttaaagtgctgcactacgaacactttttccttttaaaattgaaaaaaactcgcctttttttgaagaagcttatcgagttcttccttcagctttacataggactcagccaaatttggatccatgaagaaatcaatgtacccgtcaagcatttttagatgtcccacctggaaacaacacaacattcaatccattcgattccggagtattccataatctgactagtgtaagggttaaaaagaggaaaatgagagaaatcacctgtactcccgtggtcaatgaaccaccaaaaaggatcaaactggaatcagggacaccagtggagtcccgtatgagtaccgcattgacctttactttctctccaaagactagccaagggtatggaattgttgggaaccgcgaattaacagaattctgaaacatagaaaccgtaaaaaccatttaaataaaaaagatggccatatcgagagactcaagtaatgatgttgggaaatacgaatgaagaggctcaccgcgtatagtgatacttggccatcatccattgtcttgaatgacatggaagtctctctgtgctgtgcaaagaaaaaggacaacaaggttatttcaccgaaatctctgacacgagaaaggagacttagccagagacatgggtcttagacttaccacaacagatgctattccagggaataggccagagcaaatgacagcacgaaccagagactggttgtgacttagcttgttgttgagagctaaatcatcatgaactaagccagcttctttcaaaatatagttgaactgcttcctcagagaatgtatcgcctgaagcgtctgagctgacaggaaattcctccaacaaaactcataagccgatccttctctttcagcatctttccacccttcaaaggcacgaacgagtgccatatggtcactgtagtctttggctgagaatctcaacttggctgataaagctaactaaaataaaacaaggaaatcatctctcagtttgagagattaaaccacaacatacttcataaaaagttatatatcgatctatctattggcttaaaaccgcctataaaaacccactcttcaataaaattcaaaagaccaaaaagtaagttttaaaaacatttatttgccaattaatcaaccaatcaccatacatcatgataaaaataaatgtttgtccatgagtccttatacttacgtcttttttgtcttgaggtagaaggaaaggatccctgacacttagccctgatacaattgtcaggatcggatcaaagcagcggaagatggcacccattatcagcattttccccaacttgggatcaacaggaagaatcgataagagttttcctagt

SEQ ID NO: 71596 - DNA, 476 bp, Arabidopsis thaliana landsberg
  unsure (1)..(476): unsure at all n locations
acaccgtcgacaccctggcggtgtacttcgccgcgatgcagaccgggctgacattggcgttatcaactggcatctgaccggcccggagatnnnnnnnnnnnnnnnnnncagcggcgcgaaagcccttgtcgcccatgagcggcacgccgaggcgacgaagatcgccgacgacgaggccggcttggtcgacgagcgccggatcgccgattgcgatatctacggtttcagcccgctgtcgtctctgggtgcgggcgaagagggccggcccgactctgcgcaccatgggcgcgggcatgctctatacctccggtgccaccggcatgaccaaaggcgggaagcgcccggtgaccggggccgaccccgacgccgtgccggtcacctgggccgggttattcgcgctctatgacttggcgccgagcgacaatcacgcgcacatctgtgggtgtgcgctggaccacactgcgggactggacttt

SEQ ID NO: 71597 - DNA, 597 bp, Arabidopsis thaliana landsberg
tagtaacgtccgccagtgtgctctaaagaaaatcaaattgcggttcttgagcttcttttttatgacgatttcgtctttttttactcatgagtatccctttctattttacctcttgccgtttgacacgctgaccaaaatattgatataaatccactttcaaggttccgttgtataacttacgcttcttatctgcttggctaccatacttgctttcaaaagcttcatcactagtcaggataaatttgctccaagttttcagcggtgcaaatacttgccccatctcagcatagagcttggtcacccctgcatcatctgacaaacgttcaccataaggcggattggaaatgattactccattgattttatcggaacgtaaatcctgcacgcgcatctgcttaaaagtaatgtctcctgcaacaccagctgcctgagcattggccttagcaatttccaccatgcgagcatcaatatcacagcccatgatatccagctcaagctcacgttctacttttttagccgcttctgtgcgcacttcttgaatcaagcgatcgctgatccagttccattcctcaaatgcaaaagagcgacgaagacctg

SEQ ID NO: 71598 - DNA, 482 bp, Arabidopsis thaliana landsberg
tactcgggacataggttccgtgttcgcttcgaatttccattatgaagaaagctccgtctttgtaaaggacaggggcatgcatcttcgaaacctaaaccaaaacataattaaggtcgatgactagttctctttacgtatctcaggtcacactatcagatacagagtttatatacctgagacgaagggatcacaatgcgcattccaggaaaatcttgatctgggtggcttctaaaatcaacagacgttttaaaagtttcaaactttaagactctttaatacaaaggcttctaagttctccatagactataaatgtgagaggaactcagaatggtgcgtggtttaatacccgacgatgcaaggctgatgttcatattagggtagacatattgttatcgatacgcaacaactcgccggcgcgtggaatgcgataccatcgtgttaagaagctaagactcagactcagaccaaagcacgttagagag

SEQ ID NO: 71599 - DNA, 440 bp, Arabidopsis thaliana landsberg
agccttccataatcatccgttgtgcacatcagtttaattggtctgctactgcgggtaaagcaccaagaaactgtggtaataaagaagcctataccctacaggtaactgaacagcagattacccttacggccggcacacgacatggtatttataacggtttacagaccctaaaacaattgatgcgagatggtagttttatagataactgtcaaattagtgattatcctagctttgcctggcggggttatatgattgacgttggtcgcaattatcagcctgtgagcctgattaaaagacaaatagatttgatgggagagctgaaactaaacgctttccattttcatgtaacggaagatgtggcctggcgactagccatcaatcagtaccctgagttaactgcagcagcatacatgacacgggatcagggccttttctatact

SEQ ID NO: 71600 - DNA, 614 bp, Arabidopsis thaliana landsberg
aatacattacctcaaagataactagattaataaccataaaaccaataatcattaagtcaataaccccataatcttataaatgaagtcagggactatatgttcatgtaaaaatgcgtaagttcatagctagatgtcccttttttaggagcacatggattgacacattaaacattcatacccgatttcatggaattctatttgtcattatcctttcccaaaaacttagttgtttcttagttattaaaccttgaaaaaaaatcaattcaaaaatgaaaaatgacttatatgtatgtcatttttgaaaactagacatcaagctatgaaaagaggaatctatttaccgaataaaggaggaggaatctacattcatatgtagtgtttttggtgactggattgcaaccatacactgagcacaagctgtcacgtgtgatgttgtgctcgtagcataaactataaagtataaacctaattaagcttaaagttaaaaatagtacaagattaaaaagtaaacgtttgtgagagttgactaacagaactatagaagacgcatgggggtgacttcaagcggtctgcaaacggcatgaacaatgcattcaaacgatatataaacctta

SEQ ID NO: 71601 - DNA, 714 bp, Arabidopsis thaliana landsberg
ccataaaaaatcggaagagaagcatcagacttttctcttcaaaagcagctacatttcaatctgatgacaaaaaaaaaaaaaaaaaatgcagctacatttccttgggaaaacgaacagatcgtgagaaaccatttgcaaacccatgaatcagagctgcaccattctacataaatctgaaagaacccacaaaaccctatgcctaaaatcaactcacattctcttcctttttcttcacattctacttgagaaaacctttcaacatcgacaaatttgcaataaatcccaaaaaaaaaagttgaaaactttggcggctcaaacacaaaacgaaatgcaggtacgcggatgcacaagcatgagcataaaaatcgaaactttctgatagaaataacaaaattaagttaaaaaaagatttgagatttgacctgagaagctccagaaaattcttcagggaagaaagaagaaagataggagctttggacacagatcgagatggtgaatcctgaatccgctctttggggaaagagactgtctttgaaagtgaaggagacacgcacacactagtgtggtttaaacgataaagaagacacatttagaaataattaaggaaagttaaaaagaaatcaaaataataaactttactaacgacattaaatcaaaacagtgttttttaaaaagaaacattactaaatgttttcatgtacagagaatataatg

SEQ ID NO: 71602 - DNA, 545 bp, Arabidopsis thaliana landsberg
aatctcgttttcatttgagatgctaaccagaaagccttggttctgcatgattctgtagatataaagataaaatgtcaagtgaagttacagataactgggatcacaaagcggttggactgtaatatatatgtcccaagttcacaacgcaagttgatctatccagaaaggaatggactagagaaaaaaaaaatctgcccactactcaaataagatggctcaaaggagatttgaacatgaaagttagtatattatgtgatcgaacttcttgtaaaccattattaagaagaaagagatctaagctaggaagcacatcaggaaataaaaaagggaactacacagaagctataatcagagatcaatattttgaaactgaacatgattgtaggctctcaaaatatcaagaggtgaacagaataccacaaacctttaagtttttgaaaggtaactgcttaagagatgcaagaattgcctcgatgttatcgccaccaatcacttttatccttccatctctgaaaggggttagcaaaaagtacattactttttaa

SEQ ID NO: 71603 - DNA, 129 bp, Arabidopsis thaliana landsberg
taaagtcatctttaatggaaactactcctaaactcctaagttgatgtacgattttttttctcttttggtgggtttccgattatatgaaaatgattccccaaaagaaattagaaaaaaagaagagaaact

SEQ ID NO: 71604 - DNA, 172 bp, Arabidopsis thaliana landsberg
ataatttgacctattatgaatttagagtataaattaattaatcaaattttaagcgtgagacattcttattattttgtgaggtggtgcttttaattaaggttctttaaatttgactcacaaatctttatttatgtttgggcctctattttcacattggtctcaatcattttac

SEQ ID NO: 71605 - DNA, 406 bp, Arabidopsis thaliana landsberg
attgcagtcaaatataatttatgccagtacacgggccatcacagtacagggtcaactatctcattgggtggcaacgactgaataaaacttctcagatatgaatggctattgcctacatgaaagaaagatacaatcgatggcctacataccaggagaaaaaactctgacttatcatcgcggaattttacaacctggaaacacaacttatgagagagcaaggtcagccacaatctagcgctctacgaaaatgtcatcaactaactgagctttaaccggtgggcatagctgtcgctaacccatgtcaagctccaagaaaggagcacgaacagagaaagaccatgatacttgggctgcctgaggatgcagataatggatcagatctcaaccatgattgacccatagaaga

SEQ ID NO: 71606 - DNA, 349 bp, Arabidopsis thaliana landsberg
  unsure (1)..(349): unsure at all n locations
ctgccgctgcaaaaagacggggaggagggtaaattaaagataannnnnnnnnnnnnnnnnnnnnnnnnnnnnnnnnnnnntggttggactatgcaagatgcaacttcttggcctgcatacagtgtacggtaccatccaggactgattccggtaatgacattgtgatcatgaggattcctcttatggaaatgaacacgctgaattatttttgggactggacagttatcttggaacacagccgcattgtgtgatatggatggaaatgagctacctcgttcggtggatgttgctcgccagaagcgaccggtgtttgggctccttaagagggcgggagctctgaatgccttgg

SEQ ID NO: 71607 - DNA, 4197 bp, Arabidopsis thaliana landsberg
  unsure (1)..(4197): unsure at all n locations
ctatcttgtttagtatacatgttctttaaagaaaaagaagaagaagacacgttccttgagtattgtgcagtctaaatcttaatcggatctgtgtgtgctttgtgaatgtacaagaacctgctttttgtgggggaaaaacaatgtttaaaatatggaaacagttaagtactattttaaacattgattgtaactttttatttccgaattatgaattgttttttttatcatctgaaatattttatttatgaaacttgttttgaaactaaggtgaaatacaaatcccaaacaacggaagctaagctgacggacgaaagaaaaatcttcggaaactaaagccgacggacgagagaaaagttttcggaaactaaagccgacggacgagagaaaaattttcggaaactaaagccggaggaaaacgtgaatttcccgaagtctaaaatcgtatgaaagagaaacataaacagaaatttaaaagccgaaatcgaaagagatcgaaaccaaaacctaagcatagaaacatacaaactaaaatccgaagaaaacacttgacccaagcaccaaagaagacctttttttttgaagaaactgtgaatgcgatttaccaaagctgcgcatagccaaccaatagtaacaactgcttcctcccatcacaatgagagatgatttctcgacatcaagtaactaagacttcataacccgacaagtagagccgagttatgaattgttgttacagtttttccattaaaacttaatgaaaatgtaaataaagcagaggctccccgggatttaaatactaaaaatagagtttggtatttgatagctagaaaaggtaaagccttaaaactagggaaaagacatacgagctcaccagtaaaaacattgtacgtccaactgattctgtccatcaaatgacattaatgccctttcaaagtgtgattgttttttgtttttcttttacctcattcgataccaacacaacacataacctaatctctatttcgcaagataatcgttaacacttgattaaaagcatttctatggtaattgattataaatggtatcgacgaatcttgtaagttatacgtataacataagaagaaatatttacttgtattttaagtttcttggttttctaatttcattttgaaataaagaaattaaaagtgatggaccggccgtagtcaatttaataactaaagcaatcagtgagtgtaagcctaaaaatatgttttaattttgaatagttaatagattgatccacatggaagaatataaaattaaaaataatgcgtcgttatagtcgatacgcgtaactcataataacgtatggtccaaatggtccatacttgttcaggctaaattattcttggatcaaagaaactcaatgatgaatttacactttaaaaatcataatttagtgacactaatggagtgggaacaaaatcaatactcttaatcattatgattctacaggctcggtgccctcaattataacattaaacatttgaaataacaacaaaagattacagatttaattaaaacgaaatttatacatttacaaagtcctccagatcccatataccaacttttaaaaaacctctaaacccctcccaaaaaaaaaaaaaactgatctaacacgaaatcgatttaatcgatcacattcacatctaatccgaatttgcaataatagatacgtcgttttcgattttaagtattagacatcgacttacttaaccacttaaccgactaattaagtaattaaaccggaaaatcttactaaaccataaaccttccttttgacgaagaggctttagttgagtcatcttcttcttcgtcgatcatcgtcttcttcttcagattctgagaagatagatactaagctcaggagctccattactatcaggattcatcatatagaaagcttctgaatcacgcgacccaacaattctctcgaatttcgccctcatatacattatatctcctccgccgccgccgccactaccaccgccgtcgcctatctcctccgtctccggtaaaactccggcacccattgaaaccatctcaagagctttcaaaacctttttctccttctcaccacactctctcctcgtagcaaatccacactttttcccgttacaataagtcctccacatcggctcctccaccaaccgccgtgaaaccgccgccgtcgtcgtcgtcttcgtcttgtctcctccgccgtgacgtaaagttccgtttttttcttctccttcttcttcctctttccccttatcacactccaaagcgattctaacgagtcctgaagccatttctttgactaacccactaatcggagtagcgagttcgattaaaaacgccggtggagaattaggatctttctggatagagaaatgcacgtgaccacgacgagacccgaaaagtgtacccacgacccgtgacccgagcccggagttttggttaccgggtcgtgctctgcttagagtagcgataactgaccggagacgagaaacggcgaaagattgaagcttttttttgtgagtgattacattagaggaagatgaagatgaagaagaagaaggtttagtgttgttgtgatgaggaagaggtttatgagaagaaacgtcgtcgttttcgtctgatccgacttttcttgtccagtggaaactattgtgtctcttggaggcaaagtctttcgccattgaaagagaagctagaagctctagagagaaagagagagagaatgtggtaatgatcaaagttgttggtgtgaatttaacttgagggtttggtctatttggtgaatataactctctttatctcacttcttctctttgcttttgtctctctctatctcttgtcgttgtgagtgtgttggtgtgagagagaagataatacaatttgacagagaatccgactgtgattggacccaccattttcatctttgtagaggatttcggaaatcaaaattttaaagtaagaaaaagaaaagagaaaaaacaatagtttctgaatataagtgtagatttggcttttgctttttagttcaatatttaaccatattaggtgtcaagtgattcggcttgggattagttttaagactttttagctcaattggttgcttattctagagatatttttggttttttaaaacggagtatgctcaattcttgttagacaatttgaaaatgtaaaataactgattctatcaagtaaagaggagagaaatattttttctttcatttacatctttatctctttcattcctctcaacaccaccaataaaaccttttgccaatatgaatttaataaatgtgagccaaggcaaaatatgtatttaggagaaaatatataaaaagtataaatatacaagaaaagcttggtgctgaattttgtaaatgttgatttttgtttattttagttatatgaatggttgattcggttgtattaatataaagttaagagaataagtggagaggaggattgtgtttttgttgaatactttgggagaaacacgagaaatgagacaaaagaaaggaatctggggacaaagtgtgtgtgttgtttcattttctatgtggggtaatctacaaagagcctcaattttgtttgactcaaaaaccctttttttgacttcaatcttttatacagtaaaaaaaaaaagtggagtgtttaccaaaatatagtacagttatatcaaatcctttcttcgttatatcaaatctctattgtacatattatccaatctctaatcatattaaagattcgtagatgatttcaaacttattttcaaatcaatggacagggaaaaaaaaagtaaagattaagtatcaaaagcaacatagaatataaacatttctaaattgaaacaaatgcaagtgaattgttgaacctcttgtactctctatttttccatctcactttttgaattgtatgcggttattagttttttttaaccatgttaaagcaaatagttctgnnnnnnnnnnnnnnnnnnnnnnnnnnnnnnnnnaagatttttttttccaacttttcctggtaaaaaacgcaagacaataatttggcacaagcggcttgacgtcactatccttatattactgtaacaacacttactaatacgaaacttaaatcgtgcatgttagataatatagtaattagtacacatattatccatacaaccactacaggtttccaacaatc

SEQ ID NO: 71608 - DNA, 503 bp, Arabidopsis thaliana landsberg
cgccgtcacggtgcccgatgcggcggtaatcggcggatttggcttcgcttcggccgctggtgactgttggcggtcccggggataagcggccaccgctgtcaccacatagcgatagagcgtgccgttggtcaggcccgtatcggtgtaggccgtccccgtcgtcgtgccacggagtacgtagctgctgccactccaacgataaaccttatagctactcgcattgtcgatgctggtccaacttaacgctacaccgccgtcgcccgccgtcgccgtcaacgaaagacgttgaaagctcgcgcttcccgaggtctaatactcgatctcgctttcgatctggttactacataccaccgtgacacgatactgccaggggccactgggtggtgtattcggaggatcctccacttcgtaatgggtcgtgggggccggtacattccagatatgcccccattgtccgttcgtggagaaaccccacacgcgggtagtctgcgcatccgggatcg

SEQ ID NO: 71609 - DNA, 504 bp, Arabidopsis thaliana landsberg
gtccggatcctgcgcgctgaacatccactgttttttggagatattcaatgaacaaaactgatctgggcaaccagagtcgcctacgaatgcaacatctccaagactgatgcggcgcatgcagtcgatgcggttaccgaagccgtcaagaaagcgctgaagaagggtgacaccgtttccctggtcggctttggcaccttctccgtgcgcaagcgtgcggcacgcatgggtcgcaacccgcgcaccaatgagcagatcaagatcaaggcttcgaaggttccggcattcaagccgggcaaggcgttgaaggacgcgctgaactgagtttgcgcaactgcaatcccggcaagcccgcgcggcgttgacgggccagcgattgcaagggtgcttagctcagcggtagagcgtcgcctttacacggcgagggtcgggggttcgaaaccctcaacacccaccaaaagcgatggccagggttcgggtagaatacaaacccggtgacggagattt

SEQ ID NO: 71610 - DNA, 603 bp, Arabidopsis thaliana landsberg
gcgcctttgtgcggttgatggcacttggtaccagagtcacgcatacaaggaaaaaggctcgatggggggatatgaagttttgactcaatgtgaaagcccgttactcaaagaggtcaactggcgaatgaaggtagcaagaatgcagtccccctcctccaaaaaagaaaaataaatcacgccgtcgctgtagccagctcgtcaaacgttggaaaaaaggtatacgatacaaattttgtcccaaaaatatttgatcaacaacgacgcgcagttttgccccgccaaacgtgacccacaagaaacccacaaagggcaacgccaaagaataactccccaaaagcaaatcgctacaaaaaattaaaaaatattatccgccagcatactacaaacccgcaagacttaaatccggccattgtctaatcttgcagactcttttccgagtagtggcgcgtgagctttccaaactgcataatgatgccgtcaataatctcaatggggatgggcttcagcccgctcgtgcggctctcgttgcgcagactcatgtggatgcagtacatcataaagacaaagcggcgaaatttgggctcaaaatactgatggttgtgc

SEQ ID NO: 71611 - DNA, 365 bp, Arabidopsis thaliana landsberg
ggcgacgtgctggtctcgcgcgtgggcgccggcattacctgttgcagggccgctctacctccatgatggggaggggggagactgtcgtcatcctgacccaggccagcgagcgctccttcattattctagatgaaatcggccgtggcaccgtcacctatgacggtctgtgcatcgactgggcctaggaggaaaacctgcacgaggtcatcaaggcacgcaccctcttcggcacccattatcacgagctttccaggctctgaagagcgaatgaagcaccttaacaacctgtcactgaccgcgcatgagcacaatggcgagctgatcttactgcacgaggcgcgcagaggctcagccgaccgctccta

SEQ ID NO: 71612 - DNA, 733 bp, Arabidopsis thaliana landsberg
gatgatgtatattaggagaagacgatgaagctttagcgtaaagaaacagaaacaaaagaagaagaaggatgatctttgcaactgtagtgatgtgtttcctagattttcttctagagtagtaatttcccatctcttaggaatcttcaagatatgaagagtttctctataaggtatagattatatatttagaatcgatttttgcaagtataaaagatctgatcaagatctcttaaataaattctctctcaaagtctgtaagaatgagaagagaggaatgaaagtgatggaagaaaaagctatggggcttttaacctatgacttcctctaaaagtttgttgctctccctttcttattctccaccactttctacaaataaagagaagagaaactagatagaggtttgtaaatatatatatcattaatttttaacgaaagttttttttgtgtgttgaatcatttccaaaggtcttagctgggattactaggtcaagtggtagtaattagtgcggctaataatatacttatagcggctagttttaaagagtaatgagggtgtgataataaagcatatacaggaaggtaattatgtgaagggggccacaagttgaaagaaatacaaaagagagaagaaggggccccaaagggaattggagtggatgatttttaaaaaccttactttttttttggggaaaaaagaatgtttggctttcacttccctttttttctttaaccc

SEQ ID NO: 71613 - DNA, 285 bp, Arabidopsis thaliana landsberg
ctacacacggggtcctaggaaataaaactcggatatgcctacacaaatagttatgtgcacattctttatctctacatactatccgacgatgacacagcctatacttttttacacgacaccgacagtattacacaagtgcatggatcttatgaaggatgaaaactaaagtgagccttccgataagaatgcatatactggaacatcaaatctcctttgataatgcaggcatgcttagtgtgtgactagtaggatcaggactagatgccgattatttaagctgaagca

SEQ ID NO: 71614 - DNA, 506 bp, Arabidopsis thaliana landsberg
acgctggaagtcctggagaataacgcctacctgcttgcgctttgtggtaaggtcgtattcccgtaggtggatccgggccagcatgatgcggccttccacgggatcgtacagccgggagagcagctttaccagcgtggttttgccggcgccattctctcctaccagcgccagcttttcgccggcatgcagcgtgaagttaagatggcggatcgcccatttgtcggagttgacatatttaaagcctacctcttcgaacgtaaacccctgccggataggctgcggaaaaggccgcggatgcaacggggacgacattttaggttgtatctcgaaaaatgcaaaaagatcacgcaggtacagcgcgccctgcgttacggcggaaaaccggatcaggataccctggaaggtagtgcgcaactgctcgtaggagccggacaggaataccaggtcgccgatgctgaggtggtccgtgatagtttgcaggatgatgatcacataagcggtataat

SEQ ID NO: 71615 - DNA, 1008 bp, Arabidopsis thaliana landsberg
ttttcttattgtatattcgattctgttgttggtcttatggttaatgctctgaagaaagggcaaattggagtctgggattttggaaaagtgtatgagaagaatgtgtatggaaacatacattctgttcaagttaataatatgcggtaagtttttaaatctggctttcaatcttacagtatatgttgtggttttactttctgcattatagtatctggaaacaaaagctcatgtcttttgttttatcaaatttatcttcttttgttggtattgcaggtttagtcccacaaatgatgacatggtttattctgcatcctctgatggaacaattggttatactgacctggaaactggaacttcatcaactttgctgaatctcaaccctgatggatggcaggtcacaccatcgtctcgtttctctaatttgtcttctctgattcatttaacttattacgacatatcatcggtttatagggcgcaaacagttggaaaatgctgtacggtatggatataaactcggagaaaggtgtagtgcttgctgctgataattttgggtttcttcacatgtaagtgatttcatccccttgaactgtttgtagactagcctctttgttactgttttaaatgagtgccaaactgattttctcgtgattgcttttgtaaaaggatcgatcatcgtaccaataacagtacgggtgagcctattctgatacacaagcaaggaagcaaagtttgtggcctcgactgcaaccctgtccagcctgagcttcttctcagttgtgggaacgatcattttgtaagtctatcaaacaaaaccaagatcatgctgtcactttggattcgtttagatgtttatctgaattctttcagaacttgtttaatagattttcctggttatggtttcaggcgcgaatctgggatatgagtaaactacaacctaaagcttctcttcatgatcttgcacacaaacgagtagtcaactctgcttatttctctccatcatcaggcacg

SEQ ID NO: 71616 - DNA, 567 bp, Arabidopsis thaliana landsberg
cacaccttggccgacaggccccaatactgactgaaacccaattgtgctggtgcatagcatcatccgcattgtagttctctaacgaggaatacctaaacagcgccagtcatcacacagggtagactacctcgctgggctttgtacacacaccccgtatctactacccatggaatgatccgagaatgtgatcacagcgcgtggacaaaaggggacacacgtccgccccctgactagatgctcactatgcctcataatttaacgtatggagaaatcctccccagggccccaactgcgtaccatctaaccgatcattgtaattacctgaccgatacagagcgacgcgcacaccactaccatcctatatactgctgccggatccatagccaaaaacgttgccgctacgccatccttggacatccatatggatcagcacgagtagctttgatctatgtatcaaagagccataagatttcgattacaacataccgcgtgcacaactagtgtattggaccatgcaatctaacggatgacaaaccacatcactgagacagaagagatactgatgca

SEQ ID NO: 71617 - DNA, 546 bp, Arabidopsis thaliana landsberg
aaatgtgaatagtgacatcaaaggccgtcattatcgtttatgagtacgattgtctgtttcatggaagttcgggggttctcaatacgaaagagatgaaaaaaagaaaggcgctgaagaagagttgaaaagagcaggcggaagataaaaacaccagatatttatgatccgaagaaaaataaaacccctgaaatcaggggttttcgtcatcaattggaggtcccgagcggattctaaccgctgtaggagcttttgcagagctcagcctagccactcggccacaggacccggatgtttttaatttgggtttgcaaaaataaggaaaattttacttatccctaattattttttgaatcctttacagaatattgctccaaacatttaggacacaagcaattatcatattcttctttcaattggtccaaagtatttttttctaccaacaaacctttacaccagcaaccctgtttatcacagccgctttcaaaactgactttgcacttcggacatgttttttgcggctttttcagacagaattatattacttac

SEQ ID NO: 71618 - DNA, 555 bp, Arabidopsis thaliana landsberg
  unsure (1)..(555): unsure at all n locations
tggaagaagcaggttgttacatccatatatgatcattacttgttgctttatcattttatctttcaattaattttgaggggattgactggatcttatcatttcatgcagtgtgatcaattaatatatgaattgtgacgagtagaggcctagagggcttatctgaaccatctcttaatcaaggattgaatcctgctaatttttggccgtctaaccactcatttacgagtgcttcttgtaggatggcgcagcagtactaccgagtggcaggagaagtcggaatattatgccatcttaaacattgattagtttgtatctttgtcgaaacggttacgaagtccgtacaattggcttacaataatactacagctaaactatataagtgacgttaaaagattgacataattaatctttgctacatatatgattggttgttaaaagaatcacctaaatgtttttttggaaaatcaaaacaaccaaattacttacttgatacttggngatgtatatatatttccgttcaagttttttaaaaatggccattgcagngatttatga

SEQ ID NO: 71619 - DNA, 433 bp, Arabidopsis thaliana landsberg
tacggaccgcccctgaaaacattcgagaataacattgagttcacacaaaagacccttccaagcgaggcgggggggcattacgactcttatgcctaggaggtctggctacaccagcggcttctttcggaaaaccacatcgaacacagcggggacagcccacaagcctagatactcggacatcaataccactgcccacgaaccctccttcggactaatgatacaccacaatcttctagtttaaaatgacgagccaaaaccaacaagaaccccctcacatgcagctgtatactatatacccttctgaaacaaacaattacaatgaatagagtatgattgatcgtgaaatagcaactactatgccagcaatcacttaggaccctgtgaaagctatagctaaagacaccgtacagagcttctagaaagtatctgatag

SEQ ID NO: 71620 - DNA, 319 bp, Arabidopsis thaliana landsberg
cacacgggcctgtctcgaaggatatccttgggtccctgacccccagttgcttcatccgacttgcaaaaaatgggtcttcgcacatgcacatggattgattcagagctgctatcactaagacagggtggaggatcccaacgattatgtcggtgaccacagatacctccacgagtgccgctcgataatacacagagaccctctagcatatttcgagtgggaaccaaagaggaatacccaacaactggagaattgagatccatcttatataacgtaaacttacgagcctttgcttgagccattcatgattaaggcacatgtg

SEQ ID NO: 71621 - DNA, 542 bp, Arabidopsis thaliana landsberg
acaagctgaaccgtcaccccgcgcgcactttgcgtcgttcgccggctgttttaccctcggtcgcagggggcaatgttcgagacaccgtgacaccgatggcgatgcatccaggcgatgtggcggttcgcgacaaactgctacccgagggagaaacaccgtgtacggacatgccgcctaagccatgccaacgatggcccgcttccagcaggatcaccgcctgatccgggtcacctcctcacttgatcccgaacccttcgtggtccaccgcttccgcggcagcgaagcggtttcccgtcccttcgcgtttaccgccgacctgctctcgcccgatgccacgctggagctgaaacaggtcatcggccagccgatgggcttcaccctgcagacgcccgaaggcgatcgccactttcacggctacgtgaaggaattcgcgcgcaccggtaccgatggcgacctggccacctaccgcgccgaagtcgcgccatggatcgacttcctgcgtcacaccagcaattgccgcattttccaggcatgacggggct

SEQ ID NO: 71622 - DNA, 552 bp, Arabidopsis thaliana landsberg
aagcaaaaacaaaaaagacatagataactttcaaaaatgtaacgatttaattttcttgtcatatttacaataccaaggggaggaacactagatgagggcttgatctcttatcccgactaacaaaacaaatttttacttattagctcactatgtttgctaaattgtataaaaccgaaaaaaaaagcagaattttataaattacactttgtttattttgatgtttttatcataaataattacgtcatgtaccatgtttaatacaagttgttttaagaaaaaaaaatcttcggttcgttttcattcaaatgtatttgtcaaagacgcaaaccagctaaatcaatggactatatctctggacctgaatgaaattatatattaaatatgcggcaaatatgaaaaagtacgaggctattttataaaattatttaattaaaccaagagtcccggaccttctcaaaccttcctctgcctttgaaattatccaaactaaaacaaatctgcgatcagtcttcactgaagaaaagcttttgcaaaagaagaaaccgagacact

SEQ ID NO: 71623 - DNA, 534 bp, Arabidopsis thaliana landsberg
gaccatcaaataaaagtaatagaaatctttctaatcatatttcattttattagatgtatctagtttcattgagtggggataagtcaaaagatctaactttagttactgtatgaaaatatactttttgaaaatctttacttgttttttaatttttttttttctttctaattttttctttttttaaattgatatgtcatcaaataagttttccttttttacaaggcataactctctttttacacaatagatttaacattatgtttgatttccagtcaagattattttaggtggtttaaggttcaagattattttctcaattcggtttataaaccggttaacttgaaccaataattatgtctagatattgccaatgcaagttgattacacgtgctagtttaaaagttgaggctatttttgtaactttctattgagaggatttttattaagtttatacctctctcccttgttcacgaacccgtaaccctagccgccttcaaaaattcccaaaacaatttcaaacaaacttgctcagat

SEQ ID NO: 71624 - DNA, 466 bp, Arabidopsis thaliana landsberg
  unsure (1)..(466): unsure at all n locations
actcaattcgactgtgtgatctcggacttcccactttgggatcnnnnnnnnnnnnnnnnnnnnnnnnnnnnnnnnnnnnnnnnnnnnnnnnnnnnnnnnnnnnnnnnnnnnnnnnnnnnnnnnnnnnnnnnnnnnnnnnnnnnnnnnnnnnnnnnnnnnnnnnnnnnnnnnnnnnnnnnnnnnnnnnnnnnnnnnnnnnnnnnnnnnnnnnnnnnnnnnnnnnnnnnnnnnnnnnnnnnnnnnnnnnnnnnnnnnnnnnnnnnnnnnnnnnnnnnnnnnnnnnnnnnnnnnnnnnnnnnnnnnnnnnnnnnnnnnnnnnnnnnnnnnnnnnnnnnnnnnnnnnnnnnnnnnnnnnnnnnnnnnntgtctcaaaaatgtgttaatctgacctactggcagcgaccagtcgggagaaacagacacagcgacgaccttgtcgttttttcacaaccggagttaagatact

SEQ ID NO: 71625 - DNA, 434 bp, Arabidopsis thaliana landsberg
aaaagaagatcttttgaagcaaatgaatgttatgttccttctttagaatccctcctagcagccagaagacaatgggttctctgcttcggttggctcagtttgtaataaaagacccaccgatgggcttgggcttgggcttattggatcacggcataagtataatttatgtttgcaatactaagtactaaccacttcattgattttagttcataacatgctccatcacgcatctaccttttgatgatatggcttctgcacagcaactcgaaaattattatattactatacctaacgggctttaccgccccatatccacatgcgttctttagatcggagcacaaacccaaattatattatagtaacatgatcatactgcttatggatatcaatctatggcgtatatatgcccacatggaccctggtgaaaaaagaaa

SEQ ID NO: 71626 - DNA, 172 bp, Arabidopsis thaliana landsberg
acaaaaacaaaacaaaaaagaagccttgactgattgcctatataaattaagatatccaataattctgtggggtgatttcacttgcatcagggcacgccagataatcaacaacggcagagaaagtataaatgatccatgcgtacgcataccttatttgataaagaggaatggg

SEQ ID NO: 71627 - DNA, 324 bp, Arabidopsis thaliana landsberg
tctaccatcccgtaattgattgacgtgtcaaactatctgattcccaactcccaagctttataaggaatgatgtagcatactcagcactcgcacctacagcccctatggtaagagccgtccccaatatcagactggcgctcttaagacctgaatttactatcctgacatattccattactcctgcccccttacaacactcaactagtctccaattcctcaaaattcggcgcagaataacttccaataatagaggctcatcttgtctataaccttactatcaatatgtctccattactcttctatcactccttggggggggggggg

SEQ ID NO: 71628 - DNA, 393 bp, Arabidopsis thaliana landsberg
ttttcatcgaggccgcgaagctctcgctcgacacggtggcgtcgtccttccacgtgaaccctttgattatcaggccgaacgactgaccgaactacagggacgggcgtgagttcctccatatgctctacggcgacacactcggtcccctgctcgcgcaggtcgaggcacgcctgaacacgttcctgctgcccatgctgggtgccgaccctgaaacgttctacgccgagttcaacatctcggagaagctgcagggctcgctcgacgagcaggcgccgtcgttccctaaggcgaacggtggcccgcggatgctaggttccgagggtcgctccctgtttagacctcccacaaatcgacgggtccgtacaaactgatcgcgcccctgaacgatcatca

SEQ ID NO: 71629 - DNA, 297 bp, Arabidopsis thaliana landsberg
  unsure (1)..(297): unsure at all n locations
taaatgacttccaagtatataattcatcttgttaacatgttaaatacaaatcttagctctcgagatcatggaacaataattaagaaaaaaaactattcgtggtaaatacaaatcttaactctcaagatcaacacaccttgggtgactcctgccatgttagagagcaacggtcaacttgcttagcaattaaccaaatcaacacacttaaaactattaagagtcctccaaatttgaacattttaattttaagctacaaatctttatggcaacatgattgaactgtgtcttctatncctt

SEQ ID NO: 71630 - DNA, 729 bp, Arabidopsis thaliana landsberg
ggaagataatccatttggttatatgtgactactcaaaactgaacttaaccccaattgaatttatcctattccttttggttcgggtattatgcccatgactagctctaatatcctcccccacactactactcacactatttgttgcccaaaatccatgttctcttcaagtcaatgtaggagagctgaaactcaccctttttggaatcatctcgtgcttcgcctcctaattatccagactgttttcctcaaattagttagagtcttttgtaacaatctatagtgagtgagtgaccaagaccattgaacaacttatcattcataaaatatcaaaactaaagggcatgagggcacacaaacatggtgtgatcctcatgatatctacagtctcaattccaaagtgtccctccattaatattttgttagcaagtgatattctctacgacacaccttaatgccacacttgtttttataatgaaaaaggtacttcctcatttttgatacccttgcaggccaatatacatatttcactgagtgctcgattagaaaacactacagcaatagccatttctctacactccatgagacgtttttggaagaaaaaaaacatttgatcacatttgatattgatctgatcatatctacctataattccatttgagtatctactaaaatctaaaatattaaaaaattgggtaatgatatttctggaaaacaactttctactaaaat

SEQ ID NO: 71631 - DNA, 1401 bp, Arabidopsis thaliana landsberg
tacgaattaatatacgttcattttttgtattatttttttttgtataagcttgtgtatttcataagatccccaaaatgcaacgacgtggtttgatgtttcctagtttcttggaagtgactctactattttattggttatgaatattatacgttcgaaacccaaaaattttaatttacaatgacgtgttctttgtctagggatcgtggaccgatccaaacagctagcgtgtctgaactgtccttaaaaccttatccaattttaaatccaaaacgttagaagattcccaaatcttttgaaagattcaaataattgaagtctgaagaggattccaatcaaaaagtccgatagaaacatttttggctacaagagttttttcccacctctaaagtcaatacttttgtgtcattttaatatatagttatttataaaacaatctatctatataatttaccatcttaatttttatatatcgtacagttgcaaaatcatttaaaaaagttttatgttgttaacatatctcaaaattagttatattcgcaaacactgtgtgtggggtgaatgtcctggtaatcaaatcggaacaaaacaaacgtattaaaacaaactttgagaaagctgaagaatcataagtcgcaagaaacaacggtctaaggatgattcttgaaattaggtctgattaccctcgggttaatacccactcaagagatttggaacaacaagtaatctcaatggtagaagcaagaaactctacgtgtcaatcttatatctagacgatcactgcctaagcaacccaattgtgtgattgactgatttcctccattaaaattttgttgatgaatgctaatcctcatttctggctaaagaaactactcaataatcagcttgtgtcgatctatatcaagttagttacagcagaaacaaaaatgacacaaacccgccatcggatggcaaaaccaagttcttaaagaatctaatgataccaccttgatctcatccagtgactagaaaacaaccagaatttaacctacaatatctcaggatctaggtctccctaaagagcttagaagagtaagtaatttcatgtaacacacttagctttagatatcaagttatatgacactatccttggtggattaatttaccaggatcaagacacttgcatgaactagcggatcaaagccttgggattgctcttaaacatgattggttcctgagaaatctgtgcataagattcgccatactcagattaaccctaaagcgaagcctacgacggtcgtgctcgtgtgttctctcgtaatcattgaggtttttgtggagtctgaatcttcaaaacgacgttttgtgtttttacgttataaacttctaaacgactacatttcaggttccattttggtgatgaga

SEQ ID NO: 71632 - DNA, 382 bp, Arabidopsis thaliana landsberg
ggacgaccgcgtttgcattgtgtgcgatcatctttttctctttttcgaggtccgtttgcacgagggagccggggacacctactccggcgttgagcaacagtgcatctaggtggcggttcgagttgttgaccgccgcgacgagcttctcgcagccttcgaacgtcgagaggtcgcaatggacagcttcgacgaccgcgcccgcagcgccgagatgccgagcggcttcgtggattccttcgtcttcggcggcgatcatgatgtcgaagtcgtgctcgatgcattgccgcgcgagctcgagcccaatgcccgacgacgcgccggtgataacggctaacttgcagttggttgctgtgcccataagtcagtcttctcggcgtttatc

SEQ ID NO: 71633 - DNA, 4297 bp, Arabidopsis thaliana landsberg
tcagccgatacagcagcagcagctctttccagtaagaccaggtcagcctgtgctaataacatcatcccgcaggctgtatcagtcccgtatattcaaacgaacacgattctcacttctggttctactcaagcacagccaaatgcacctccaatgacgggctttgctacatctggacctccattttcttctccatatactgtgagcttctgctttttttttgtattagttattcggataactttttatatatgattcgttttcactttgctggattcttgttcctgcagtttgtaccatcatcttatcctcagcaacaaccaacatccttggtccaaccaaattctcagatgcatgtagctggcgtccctccagcagcaaacacttggcctgttcctgttaatcaaagcacatcacttgtttcccctgtgcagcagactgggcaacaaacaccggtcgcagtttccacagacccagtaagtgactacgtttactgatcacagatatgttttggtgacttgtattgatgcctagacctactattaatcatgaaaccatctcttactaaaatgcgaatcatatcatgttgagttgtattatcatataaattgtgacaaccaacatatgtcttctgccatttgtagcatttcaatctttttcgctgtattattttgggatagtgtttttatctgaatcgagtgttcctcagctttctccgaattctttagacttagtaatttcatgtacttcctctggatcgttacttaggtcaaactctgattaggtttgaaaacgtaaggttttgatctagagaatcgtcaaactctttgaagcctcaagaagcccctagcacaaattatttcagaaccttgtcctatttatactcaattactaacttgctgatgtggcatagttgatgaactcttatcgaactcatttgtctagtcttaatgtatgcaattgtagctaaatgtgcttgttggattttggtaacagggaaacttgactccgcaatctgcatctgactggcaggagcatacatctgctgatgggagaaagtatgctactaaactattatttcagatttaggccaaatatcttcctacatgtcactctttgtactgtagatttgtgttcatgcagttccaatttgaaattgattacttttagttggaaattgtttgtaagcttctcactttttgtacctttcataaggtcttccatgcttcctttttttttgtttgtttttgtttttccatgcagatgtctgtttcatggttttgggtctaagaattcgctttatctgatatatacttatctttctaggtattattataacaagcggacaaagcaatcaaattgggaaaaacctcttgaactgatgacaccacttgaggtaatacttacaaagtagtctgtcttctaagatgattttcattttactggttgattaagcttaccaggcttttagttggtgtgccacttcactagtgatgtaaatggttgcagctttgtctggaacaacgttgtttaatttgtatatctttttcactgattcagaaactccatggtaactgtggagatatttattaagactgctacgtgctcatctgaaagcagctttcactttattgaaacaggctaccgatgcttttctgtttctcatttcttttttttttgtgtaaatcggtgtcaactttgtaggcagtttggggataatttgctaattttttatgctcgttggattaagaatctcctgataatccttatttcgtttttatattaagatcaaatataccgtatctatgcatgattttacagtttctaaaatctctttctgcagagggctgatgcatccactgtatggaaggaatttacaacacctgaaggaaagaagtatgcatctttaaatttcatttagtctttgtatcatgcttattctctattgttgcaactgattagttgttttaatttacgcagatattattataacaaggttacaaaggagtctaagtggacaattccggaagatttaaaggtctacctatttatctctctctcatgcacattccccaatgcaaagcctatgttaaacctgggtagttgttgtatgcagttagctcgggaacaagcccaactagctagtgaaaaaacgtccctttcggaagctggatctacccctctatcccaccatgctgcatcctcgtctgatctagcagttagcactgtgacttctgttgttcccagcacatcttcagcacttactggacattcttcaagccctattcaagcgggtttggctgtacctgtcacccgtcctccctctgttgctcctgttactccaacatctggtgcaattagtgacactgaggctactacaatgtactatttttccttgggaagttttgtttgatgtttatacactctgtcaagcctttgaatttaactgttgtgcctatcataacagaaaaggcgataatttatcatctcggggggcagatgattcaaatgatggagctacagcacaaaacaatgaggcatgattttaattttcctttttacaattacttgccttgattctaaaagtctattcttttgtattccgtttacctgctttctacttcagcttcatgaggtcaataataacttgtacaagttattggaagacttatgttcaataattactatacgtgtgatgatgtggtggtgtcgttaatatttatggtctagcgttacaccttggtatgctttctaattattttgaattttttgttaggctgagaataaggaaatgtctgtgaatggaaaagccaatttgtcacctgctggtgacaaagcaaatgtcgaggaacctatggtatatgctactaagcaggtactttcttatcctaattttctcctcctgatatctctcatatctgtaccataatgttttatttgccattcatcaacttttgcactgttatttttttctaggaggccaaagctgctttcaagtctcttttggaatctgtaaatgttcattccgactggacatgggaacaggtaatctggacgcatacgcaagtatttgtgtcactgatccatatggcctgcattctctccctaaccttctatttggttcattgctgacctgatccatccccttatagacattgaaagagattgttcacgataaaagatatggtgctttgaggacactcggtgagcggaaacaagcgtttaacgaggtatatagtttcttagttcctagctataatatgcaaatgcattttaatagcctgtctatataatgtaatgcagacttccagtctttatttgtgatgtaattattttattttaagtagctttttgcttacatctgattgtcaaatattttttttcagtatcttggccaaaggaaaaaagtggaagctgaagaaagacgaaggaggcagaagaaagctcgggaagaatttgtcaagatgctagaggtatgtactaaaggagtcagaagttagtgtttggtttgattagtgtgactgattagctgattatgttatactaatattgacctcaggagtgtgaagaactttcatcatccctgaaatggaggtgtggctttcagttaattacaagatctttggttcatgtctttattttatatgtgacatatgtgctaatgggaactattccctcaccagcaaagcaatgagtttgttcgaaaatgatgagcgttttaaagctgttgaccgtcctagggatcgtgaagatctttttgacaattacattgtggaacttgagaggaaggtaaccatcagactttttcggggagctttcgttttcatttgttgatttggctctttgattgtttggtgtgatactttgctctgctaagcaaaacaatgcatgcctatgaacatgaaggcgttggacaaagttttttttttttttttggttattacagtccaaatagttttcgacctcagtatgatcacaagagacatgtcatatttacggcgaagcaattatttgggtgggcatttagattgtggctgagataagatctggtgcaccagcatggtggctttaaagcttctatagagaatatcgtttgttgctttgtagaagaggcaaattcattgtgtttgaattgacattatgaatcttttaatctgcaggaaagagaaaaggcagcggaggaacatcggcagtatatggcagagtatcggaagtttcttgaaacctgtgactatatcaaagtatatcattgtttgtgaagcttattcctgcgaacctttctgtttcatagacgttgttt

SEQ ID NO: 71634 - DNA, 549 bp, Arabidopsis thaliana landsberg
gaggggccgactgtctcaacagaggaaacccagacaaacattgactggaactatgcggttcaggtaataagccgtctgggataaccaagatctcatagtcacagccctgtccctacccttatagcttagggggaaagggtaggatagacccaaatgcctgatgcacaggtatgagactgactcttgtacatggctttctttgtcttcggttgtctgcaaagtgtggctggtcatttctccgtcttccttatgccttccctgcaaatgactttgcagctcatgtcctctgcaaggagatattcatgatccaggataaagtgttaatgaggacagtgaagggttagctcacagtgagctttggtgaaaccgaccttctggtcattcaagggacctctagcctgagtctggggcacactaattttgacttcttagtatccatttgtgttcactgcattgctgagaatggctctgaggtcctgaccctcttgcctttgcttcccatgtgaaggattacatgcatataataccacaccttgcttcttttacaca

SEQ ID NO: 71635 - DNA, 497 bp, Arabidopsis thaliana landsberg
cgtgggttagaacttcctaacgcctgccttcttgtatctacagtttacattttcatgtaagatagggtaccaaaacatttcagtggtttccaagttaagttaatgtgactcactattatctcccctggacaataaagtgccaaagcttcttgacggtaagtcattattctcctttggttcctgctggtaggtagaacattaattatgattaggaaaaaccttagtccataatgaatagatataaagtgttacaaagagacaaaactttttacttcatcagctgtgttggaccttctcatcgttctcaccataaacttcttgtacgcgtcattcaacttttccactggctttgcatccctgcacaagttcccactttcaaatcagaccaataacttggagccgaaacatgaaagtaagattacatgtctgtccatttacctagagattccaagattgaagatctcattagcagttttgaccttattcttaaactcaat

SEQ ID NO: 71636 - DNA, 548 bp, Arabidopsis thaliana landsberg
  unsure (1)..(548): unsure at all n locations
gttttatgatagttcagaagcaatggttataagatacaatttttcatgcgaaaagatggtaaatcgaaaacacaggtatcaggttcgtctctaccccatcgtagattagacaaatgctatgtgttaactactaaactatagacaatctcacgagtgaaaaatttgtctttgttgaaagacatgatgatggtaaagaagaatatgtaacctcaaattttgccggtacaagacacattacaaattgtttgtacttatgccgaaaacttgaaaatgttcttcataaaaaaaatttcttctaataaggactaagttttttcagccatgttcgaaattgatacttgtacttccaaattaaagatgtcgatatataacttgattggtgtcatctgcctttcaagtcatagtagtgatgcatcataataaatggaatagaccatgcatcgtcaaagacctcaccgataagatgcgactgaagtccanaaattgaaatatttactttatctttatctataaatattttgagatcgcttttagaanaatataattta

SEQ ID NO: 71637 - DNA, 540 bp, Arabidopsis thaliana landsberg
tgaaaggtctctacaaagctttgaaaatcaaatgagaaaagcaaagtaataaattgcttaaaagggttggagaaagttcaaaccaaagtggccttttagagtgtgatttttcaggtattaattttgtttttaactatataaaatgaatttatatagtttttaactatatagtaatacaaagcttttaactatataaaatgaatttaaaaaatgataaaaaaataaagtatttttagtactaacaaattcatctttggttcgtctaggccctaaataaaatctgatgaacaaaattcagatataggccgaaagactaataataatattacggtccaaatgaatggcccagttatatttgaaaatcgtatgtagaatttttttaaaacaaatgatgatttaacctacaataatgctgaccaattattttgtataaatagatgaaatcttatcttgtaatgttcacctcttcgacgtgaaaacatttatgatatgtgaacacattccaaatccatttacacatctaatcaggacagtcatgac

SEQ ID NO: 71638 - DNA, 324 bp, Arabidopsis thaliana landsberg
aacaaaaacatgaacggaccctataggggaatctataaagctctacgggtaccaatgctaaagggctataactatacatacatataaaagaggatcggtgaccctccctatggatatgtcatcatatatcccatcacttaccccataccggcctacatatgacaaatgctgtagggaataactaaagaacattgatgatgacatggaagatagcagagcttgcttattatttactatgtatccacccacagtgcactaaatacttgagtgactgtaggcgtcatacattgtatgagcggcacgaaaagaggaagacgcaacgat

SEQ ID NO: 71639 - DNA, 5280 bp, Arabidopsis thaliana landsberg
caccgggatcactctactctcatcaagattttcaacgacccttggtttatccgattctgctagtttgaccgacgaaattcagagattggaagacgagattcaggatcagatcgacgacagatccaaatccgcagccgcctctcttatcggactcgtccgttactctaagtgcgtcttatacggtccctccacgccggctccagatttccgccgccaccaatccttatctgacgctaacatccccgcggatttccggtgtccgatcacgctcgagctgatgcgggatccggtggtggttgccaccggtcaaacatacgatagagagtccatcgatctttggatccaatcggggcataacacgtgtccgaaaacaggtcaagtcctcaaacacaccagcctcgtacctaaccgtgccttgaagaacctcatcgttttgtggtgccgcgatcagaagataccgttcgaattatacggtgacggcggcggagaacctgcgccgtgcaaggaggcggtggagtttacgaagatgatggtttcgtttctcatcgagaagctctccgtggcagattctaacggtgtcgtgttcgagctccgggcgctcgcaaagtcagatactgtggcccgagcctgcatagccgaggctggagccatacccaagctggttcgttatctagccacagagtgcccgagccttcagataaacgccgttacgacgatcctaaacctatccatcctggaacagaacaaaacgaggatcatggaaactgacggagctttaaacggcgtcatcgaggttcttcgttcgggtgccacgtgggaggctaaggctaacgcagccgcgacattgttcagtttggcgggcgtctcggcctacagaagaagactcgggagaaaagcacgtgtcgtaagcggattggttgacttggctaagcaggccccacaagctctaagagagacgcgctcgtggcgatcctaaacctggtggctgagagagagaacgtggggaggttcgttgaggctggggtaatgggagccgcaggagatgcattccaggagctaccggaggaagcggtggctgtcgtggaggcggtggtcaggaggggaggactcatggcggtttctgccgctttcagtttgattcgacttttgggggaggtgatgagagaaggagcggataccacaagggagagtgcggcggcaacgctggtcacgatgtgtcggaaaggagggtcggagctagtggcggagatggcggctattccagggatagagagggttatatgggagatgataggagctggaacggccaggggagggaggaaagcggcgtcattgatgagatatctaagacggtgggccgccggagatacccataacacggcggcggaaacgcagagcattgtagtgccaacgccaagtaggatttttagtccagttttatgatttttcatttttttgttttcccctcttcttcttgtgtaaagtttaaatgttttttttttctttcctgatgatttgaaaagaaattgattcttttacaaagtattaaaagctgcaattgtaaatgtaaattcgagaaaagaacgagagattttttcccttttactggatgaactttacacagtgttatgatgttgtttactaatctctcataactcataactagtgttttgacaggaactaataaaaatcttgaaagcatattagagttatcatatgtgtgtgaataaagagacaaaagaattggcacaaaatttcaacacaaaagacagagcaaatccacaagagatatacacacaagcatgttcctaaaggagtgatgatgattggaaatggaactgattgcaaatagcaacaatctttcttcctagagaagcaaacctttttgtttgttgttgtttttacgttttggatctttcgaagcattaaataaaatatcttcttcttcctttccctcttttttaaacggttaattttattacagaactattacaaaaccagaaaacacatttgaggaaaagagtgacggtgttgagaatttatgaagcggagtgagagacaagaaatatgttcaaaccaaagagtgaggttggagtttttcatcgaagcagagtagttgatgtttaaggaaaagctgttctgtaactttttacaaccatcagttaaccatggcagagaacaaatacatagagatgtaacgtgttatttttttttttttgtttgaacgtgtataaaatgaccatgaataagttggcaaatttgtgtctctgtaatattattatttttggtttcaatttgacagattctttagttggagtttaaaattgatgaagaggaaaatataagaggtgctatcgttaagtgaaactattgggccgaaaacatataggcccattttaaaattttggtttgttttgcaagagatcccagatctcgaagcgtgcgataaagtgagaaaaaagcaggtttctctcttctttatttggtgtcaaacccaaacacctacttacggaaactgtaacacaataaagtgagtgaccactttctttttttacactatcgatgatacaactttttaatatcatcgtggtgcacattttaaaaggattacaatgaccacgattaaactagtaattagtacatatacaaactagtaattactctattatttatttctttggtaagaacactacttgtgtattactattactaaaacatataataaaagtgtcagtgtcaaatgtcaatgtaatttaatttaggggaaatgaaatggccaacataatctaacacaaaatcaatgaaaatggagagagcatcttactcaccttataataacccttatatttttccacgtacgtgggccccctcacataaacctctctttcctttataatctctccactcttcacactctcacttttgttcatgtaccaaagaagtccccaacaaacacaaaataatcaacagagagagtcagagagataatgggtaataactatcggtttaagctatcggagttaatccctaacgcttggttttacaaacttagagacatgtccaaatccaagaagaagaatcttcagagccaaccaaatagcaccacctccaagaagaaacaccacgcagtctctactcctacgtccacaacgccactcagtcctaggcctcctaggcgcccttctcactcttccaaagcgccaccctcccatcctcccaggaagtcctccgggaaccgtcttcgtcaccgagccaccgtcgactctaagtcttccacgacttccggcgacagcactaccacagaaacaggttctttctcaccggactttcgctcggatcaagttctcctccccgacgagtcattaacgggctcctggcacagcccttgcagctccaagttatccaaaaccgcaacctttacgccgccgccggaactcgaactccggcccatcattaccaaaacggccgccaccgcacggaaaacggcggtgaattctccggcgggggtgagacttagaatgcggtcgccgcggatctcggtgagcagcagcgcaagaagaagcgggtcgtcggctcggcggagcagggcggtggtgaaggcgtcggtggatccgaagagagactttaaggagtcgatggaggagatgatcgctgagaacaagataagagccacaaaggctctagaggagcttttggcttgctaactctgtctcaattcagacgaatatcacgctattatcatcaatgtcttcaagcaaatctggcttgatcttaatcttccaccaccccattccaaataattttattattaagaaaaaaaacatcttcttatatagtattaattactccttaataattaatcgctctactgaataaaaatgtaaatatatatgatgttgatgatgatgattcttgtactaactatatttatatgtaataatggtctagagagagcctacagtcttgtacttgcataacggccatcgttgatgatatcaagtacaggaattttctatccggattggtactcttctacgaatcttactttgcacggacaagcaagtgttactttaaatcaaattttgaatgtggacgactataaacctacttttgcgtcatcaatcatactatatatacagctcactcttcaagtctaaattttttaaaagagatttaaaaatgattggaaactcattcattgtgatcatgagttagcaagtgttcatgttgacaagttatagactaagactaatagtgaacgttttatatttagtgtatccattatattagacctacgatgccgacaactcattaaaacagcatctgcgcctattttcagacctaactttggatatgtgtgtacgtgtgcatttctcaatttcacacatctatatttatttattttatatgtgtagttaactttttaaaaaataaaaaaaattgaccacgacgtattgttttgtataatatttatatgtatatgcatgcagtgcataacacatacaaacagtgcgacaagcaagaagaaaacaaaacatttttacttttaggcatataagtgccaaagaaaacaaaaaatccaattggctgttttttatttatttatatcagtgatgggtgacaaatgacgagaatatataggaaaaggtaacatatcggaaaaaaaaatatatgaatatatgtagatattatagtaaaataaaataaaattagtgatgaatggttcttactggcaaacttttgcttctgtgttttatggttgtatcgttatcatgatattgatgtcattttgttttatgtaaatcttccatgagattttggtttaatagagttaaatatcaatcttaaaagaaaattgtggaattcttaaaatataaaaataggaactgaaaaggaatcttacgcgacagtaatctggcaaagcatattttaggttttatgggtttccaaggaaagcagcagatttcatagcgagacgtgctcgttgatttctccccgttatagaatggataaatgccaacgtatcctgtattggcaaactcctcaataattttttttgccaagtcttactcttagatctttaggtaatgttgtaatatcttttcatttcattttcaatggagtggcattcatagaaaaaaaagaaatgctgtatatcggatggtatgttcaattataaatgttcacattcaacccagaccaataattagtacatatgagtgaataaagaaaaatgtggtaagatttttattgccattcattacagatcatcagccgata

SEQ ID NO: 71640 - DNA, 599 bp, Arabidopsis thaliana landsberg
catatataccccataggttggtgtttgatatatatccaattttatttatatatttacgagtttggtgtttgataaagtgctactttgggaagactattctactgacctttgcatataactataagtttataaacctgtgtgtaatatgtgttcacatgttatactatataagtgattgcttaattgacccggaatgcccatacgtaagaagaagatcatcttgacatatatgatatatcatattgttctagacgtctacagttctacttcttgtactaatctaatacagtaacttttgtttcaaatgtccatcattctgatattttttcacacatgcaggttccatatttttttaattatactaaaatggccccattaaggcattaattaaaaaactgaaaataacactactacgatacttttacgaactgaaaaatagatattgaaaattatagaggctcttcacacttcattaatcaaaattataacgttgtagagttatgtatagaacgcaattagatccattctttatggacttaatgaactaactctatctaccatgcatatacatgtatcttagtatttatacattaacaaat

SEQ ID NO: 71641 - DNA, 509 bp, Arabidopsis thaliana landsberg
  unsure (1)..(509): unsure at all n locations
caacgcaggtcatcggatcgacgcgatcgaatttctccggttttttgccggctaacttctcgnnnnnnnnnnnnnnnnnnnnnnnnnnnnnnntggtgccgccgaccaacaagatgcgatccacgtcgcgcggccgcagtttggccaacttcatcgcttcgtcgatggccgtgcccgatttgacgaccaacggcatgatgacgcgctcgaagtcgccgcggctaatctcctcttccagactcaaatgacgttccggcaccaactccgccttgcgcgccgtcgccgtttgctccgtggaaaggtcgatcttggcccgttcgacggcgagcatgaactgttgcttatagggtgaattgagaatatcgaaaccggtcttggccgcgaagcgctcggccaacacgccggcgatggccgcgtcgatgtcatcgccgccaagtttgccgatacccttgctggagacttcctcgaaaacgccatgatgaattntcaaaagggtcacgtcgagcgtg

SEQ ID NO: 71642 - DNA, 451 bp, Arabidopsis thaliana landsberg
cccttatctccgagaaatgctgtgtgcgatgagtgacgccgaatatattggccttgtcggcgatggcaatgggcttgggcggctggggcttatgcaacgggatcgccggaagaaaatgagcgtcagaatcgtcttcagactgttccgcaaaaatccgtttcggatggtccgtcgaccgctgcatgccttcgcgctccccattcgctatcagtggcctgggtggcgttgataacctcagtgcatatacggcagggcctgccttcaggcgcaacacagcctgaaaaccccctgtcgcagtcattgcgtcattccccgcgggcattctttcgaaaactccgccggacatcaaggggatagatcaaattccatcaggaatgatgcgaatttggttgcaattctcagaaaaactcacagaaaactggctgcaagagctgcttttgcgtgcatagct

SEQ ID NO: 71643 - DNA, 551 bp, Arabidopsis thaliana landsberg
ggtctcacatattattttataatgttgggtttgggagatagaggtctgtatttgtgttataaaatcaggattgcatgcatgaacaattcattaatacagcaaaagaagatgaatgtatataaatttaatttaaagaaagacttatgatgttttagcatcttaattatttatagttttataatgcttagattgcatatgtacattaattagaagatctataattctttatagcttaacaggcttagattccatgtaatatattaatattatcacacacatgcaaaagttgatgcttcgatggtattgttgtcacttgaatacaacacaaattcttagctattacgttacggatgttcaataacttgttatgcaagaaacataactaaggcaagtttcacttttttgcttttggcaactgttactctactcgagtgaatatgtaaaagaaaaagaaaaaaaagaagcatcgatcgttcaaatagattaacagataccattaggttccattacacaatacacaccgtgataccgaacccccaaaaaaggagaca

SEQ ID NO: 71644 - DNA, 514 bp, Arabidopsis thaliana landsberg
  unsure (1)..(514): unsure at all n locations
aattcctaactgaagagagatttagtgtctgtatattgtttaatgcattacattcagtggcttcttttgatggtgcacaggcaaaaatccaaagtaaaacaacgtttctcagtctcgaaattcggttttatattttggtctaacacaacaaagaaccattctcaccttcctaaccgagagagctcaggttcagccaacaacatatcctgcagcggttttgcatccatgtacctttcactacttctgcagataataaatgttatttgaatcagacatttcatgaaacaagacgattttgtttagggatgaggataaaatagagagaagtctactcgcagatgttatcgatcttgagttgcttatgatgaagagcgaaatcatgaccgacataagtcacaaccaaactaccagcatcagggtgaggccaagttcttgaaatagggaaacgtagtatgaaggttcctggntcttggccttgaagcgaatgttcagcttcttccttggtgatgaatcc

SEQ ID NO: 71645 - DNA, 561 bp, Arabidopsis thaliana landsberg
  unsure (1)..(561): unsure at all n locations
gatcaggctggtgtnnnnnnnnnnnnnnnnnnnnnnnctgcttttgacgtattcgatgtcgagcgcgcgttggctgccgacgatgtagtcgagttcggcgcaggccggatcgacgtggtcgaggttgagcgtgggcgcgaagcggccttcgcgcatcatctggatggccagccacgcttccagtgcgccgcacgcgcccagcgaatggccgaagccgcctttcatcgagctgatcggcatgcgcggcccgaatacttcgtgcgtggcttgtgattcggccacatcgcccagttcggtcgcggtgccgtgggcgctgacgtagccgatggcggacgcgtctaggccggcgtcggccagcgccaggcgcatcacggcggccatgttgtcggcgctgggctgggagatgtgcgcgccgtcgctgttggtgccgaaaccggccacttcggcgtggatggtggcgccgcgcgcgcgggcgtggtcgaggtcttccaagatcagcgtgaccgcacctttcgcggccaccagaccgtctcggtcgcggtccaacgggcgcggcgtgag

SEQ ID NO: 71646 - DNA, 495 bp, Arabidopsis thaliana landsberg
aaactcttatatatgttgcgtatcttttgactcggacgttattgtccttttcgatttatttactggtacccacgtacttttccttgcagctctggagaaatcagacaacagttagaagaggatgcaaatctgctgaaagagttttcctctttagaggcttaaatattagtatgtatgaaaacatttggtgtatgtggtgtagacccttcaactccatctaaaattatatatgtgtgtcagttactttctcgtgtgattcaatctcatgatttcctgaccttgaagatttctcctttggattcatgtttcattagtattattgaggtgattttcatggccataactgaaaacctttgagaaaagagttaaaagtcactggtcttcataaccttttgtatacaaaacgcaagtacaacagaatcgtccaactgtttagtgtgttcaggctcgggcaagagttttcaaatcttccaaacgaacggttaaaataaaatg

SEQ ID NO: 71647 - DNA, 573 bp, Arabidopsis thaliana landsberg
  unsure (1)..(573): unsure at all n locations
gacaatttctctgctttttctttcttctccgccagattcaatttctaaaacggttaggtatatataccgacgaattttatttcattttgcataaacaattttataataaatatcgaaaaatggtcaaatgatataagtttgggtaattgggtgagataatatacccaatgggcctcgattaacggtgagaatcgcaattctcacaacacgttacatttcctaagtgttacatatcaaccgataatgattcttcattcttctaaaaaagcttcaacttctaatttctgccagcaaaaagtcattccagactttttatcaatcttgaccaaatttggcatccattaagaaaacttaattccctagaatgtctcatcattctttttacttttatagattactttgactgtaacttttacaagaattacaacaatccccacatgtttacacttttacagattttggggcaaatctcaaactaaaataagaaaaggactccataggcttactgtgtattattttcatctaccattactatntcatttcacttcaattctatntttttttatttttttg

SEQ ID NO: 71648 - DNA, 582 bp, Arabidopsis thaliana landsberg
accggccgctctaggccattgagccgcaccatgtggctggtggcgctgatgttcgtgccgatcgccatcttcatgattcacctctaccagtgggcggcctatcccaatccgggagcggtggccgaggctctccagcatcacctggtgaccctggaacaggccatgacgatcaacgacaagcacgccatgttgaatccggcgagcgtcatcgtccagaccatcatcatcttcggtgtcctgttgatctttacgtatttcctcaacaaatggtccctgcagtgcgatgccgatccgatgcacggcacgcaggagagcttcaaccgctggcggaccaagttcgagaatctttgcgggatcggcatcttcatctatgttgttctgctgacggtggggtcgatcgactggatcaagtcgctcgatgtcacctggtactcgtcgatctacgggttgcaattcccttggggacagggctatgccgttcttgcgcttggcgtgctgacggtcatcctgctctcgaagtacgagccgatgaagacgctgctgcgcatgacggagcagcacgacctgggcaagctgatgctg

SEQ ID NO: 71649 - DNA, 287 bp, Arabidopsis thaliana landsberg
agtccttgttgggagggacagatgctgtcttctcatctcttgtccattcatttagctgtttggttcttattttcaactttttaaatcaactgccttggacattctttccctgctatttattttctgaataattatggggagaatgggggttccggtttttaaaaaaaattggataatgagcacaattttactggaattgctagaaaagtttttatgggttcatgggtcagtttcgtctgttagaaaacaactatatacgtgtagtatacagggttttaagggttagt

SEQ ID NO: 71650 - DNA, 737 bp, Arabidopsis thaliana landsberg
cgcgccagcagacccgcgaggacgcccgcgaagcccggcaggacacgcgcaaggacattcgcgaggaacgccaggacgcgaaggacggcaccgccgccgatcgccagaaggcacgccaggacgcgcgcgccgcacggcaggaaacacggcaggaaaaccgcaaggatcgccgcgagaccgtgaagggcgatagcgaaaaccgtcaggagacgcgtcaggacgcacgcgccgcacgcaagaacgcgcgcgaaaatgcgcgcgaacgccgcaaggacgcgcgcggcgactgagctcgttgtccgtccgccatgccggcgccgatccgcgcgccggcgtggcgcgcgctgctgtcacgatcgcgcagcggaatccgtggtcgcccgcaccgtgaaatcgatcgccacggtgtcgtcgaccgccagtgcgccgccgaggatcgcaaacggcgtgatgccgaaatcgctctgccgcacggcgaaacggccgctggcctgcaacatccgcgcatcgtgttcgatgcgcagcacgacgcgccggacctgcgtcacgccatgcagcgtcaccgcgacgtcggcgaccgcgagcggccattcgccgctgatcgccaccgcgttcagcacgacccacggataacgatcggcgtcgagcgacttcagcaggttgctccgtgtgccggcgatgtcctcggccgaacgcggcgtcgcgaaaccgccgccggtcgcggcgcgcaacgcggg

SEQ ID NO: 71651 - DNA, 444 bp, Arabidopsis thaliana landsberg
  unsure (1)..(444): unsure at all n locations
cgccgcgcccgggacgtgatctccnacagcgcgttttgcatggtccatcgcgtcggcgctnnnnnnnnnnnnnnnnnnnnnnncctaggggcggatcgcccaactgatcacgcaatcgcacgcgtccagccgggacgacttcgaaatctcgtggccgcaggccgacgccacggtggaggcggcgatcgcggccggggcgtacggggccaagatgatcggcggcggcttcggcgggtcggtgctcgcgctggtcccccaagcgcgcgccgccgcggtccgctcggccgtcacgacggccttcgatgagcgcgagtggcgggcacccgagttccttgaggcgatcccgtccgcggccgcccgccagatcggctgaccgtcgggcgcgagctgagcgtgggcgcgggctgaccaccaggcggcagctgaccaccaggcgcaagctga

SEQ ID NO: 71652 - DNA, 527 bp, Arabidopsis thaliana landsberg
  unsure (1)..(527): unsure at all n locations
tggcctgctttgtttccaaatgtgcatcaatagttcctaaatcttactatgttcagatcataagtcggtgcttgttaaatttgcctcagataaagaagattttagaggccaattttgttttgaaaaaagatgggctgaagatccaaagttctttcatatgattaaaaggtcgtggaatgtagacaattcagctcctacaaacacctttattgttatagcagcaaactgtaggaaagctattaaagagtggatgagattatcttggtctaattcacaaactcggattaacaggttaagagcagaactgacaattcagaatgagactcgaattccttgtttcaccagaatgagagaaatcaagaaagaattgattatagcttttcggggtgaagagatcttttggcgccaaaaaattctgaaaaaatggatgcatgagggagatataaataccaaattttntcagccacagtgaaatatgctacgacataggatgctatgcagtctttgaatgatgattctggaattga

SEQ ID NO: 71653 - DNA, 528 bp, Arabidopsis thaliana landsberg
aaggactgttcgcggtgaacgctttttcgaaccgcacgccttcgcttgcaatgcggtccagatgctgtcttttcggcttgccgtacccgtaacagcccagccttgaagctctcagcgtgtcgagcgagatcataatgatgttcatcttcagacccgttcctcccgcaccgcggacttcggcagaggcgaatggcgttccatccaatcgaggacggccgctccgttttcctccagagacgcagtcgatgtgcatagtgtaattcctgggttttccggttcctcgtacggatcggatattcccgtgaaagccgtcagctcgcccttgcgggctttggcgtacaatcctttgacatctctggattcgcatacctgaagcgggcatttcacatagattttcacataacccggaagctcattccgggcgaattcccttatttcgctatacggcgtaatcgccgatacaagcacgttgacgccattgcgcgacaataatttggccaagtacgtaatgcgtctgatattcttgat

SEQ ID NO: 71654 - DNA, 829 bp, Arabidopsis thaliana landsberg
aaaaaactttttttcttttgaacttatgaataagttacctttttatccgatcacaaagctcagtatttacactcaatgccactcgtcttcacactttctcttttctctctcccaattcctcaatctctctccctcgatctcccaaaatctctctctttctctgttagtttttttttatttcttctgcttctgggtttttttctccgttaactgtagttgggctagggtcttgagctccgttcctcgataatggcggtttctttgagaagaaagctcgtgtcttccttctattaaaaaagctaactttccccttttttatactaactttcaaaatgggaaatttctgaaaaatgtgttgcaagttaagcttgtgaaagtttcgatttttcgttttggggttcttaaattttaggacaattatttaactttttaaagattataggataattattatccgttgggagtaaattggaagctaagttagtgtatctctttgatctgttgtaaagtttggtgagcaatgaatcgaagttttagggcaaaagagtctctattgctggattcagcagagagacaaaggcaacagcttagggcttctatgatggctgagaaagatgaagagctttctttgtttcttgagatgagacgccgtgagaaagagcaggataatcttcttcttaacaataaccctgatgagtttgaaactccattaggtatgtaatatgttttctttctttctaattttgtggaatcaggtttctgatttgagcttggaggttgattagttattgatggggtttggtctatttaggttcaaagcatggaactt

SEQ ID NO: 71655 - DNA, 669 bp, Arabidopsis thaliana landsberg
tcgtcgcaagatccgccagcgcatttgcattgttgttgcccgccgatccttcaccaggagcagccgccgcaactgcctggggatcgttcgtcgtaacctggatcgacgccgccgcccctgccgcagtaggaggaagagtaaaaatcgcggcacccggattgccattaccgtccactcccagcgcattctgcgcgttcactgacgttccgattccataggcaaggctatcgagcgcactcgcatacaccggcagttcctgggctctcgcctcgagaatgccgcccagttgtccgcccgtcagtcccgaggtcacatcctgcgctcctcccccggcgagcacatggaccgtccccgccaccagcgtcgtgctcatcgcatacgactggctgccgctcaccagcagcgcaccattcgaggtcgtcagcgtaatgccgtttgcctccgtcgtcatctggtccagaccgacatactgcgacaactgcgtgatggcatactgtcgctgatcttcgagcacgccggcatcggtctgcggatcggcatgagcaatctgctgattcagcgatgcaatcgtcgtcgtcaacgtgttgatctgcccggtgacacccacgatctgctggttcagtcccgatgtcacctgcgcaagcttgatcgcggaagagttgaagacgg

SEQ ID NO: 71656 - DNA, 674 bp, Arabidopsis thaliana landsberg
ttacttttggatatcacgcgatttttttaatgttcaccatcataagctctatctaccaccttatttccaaaacataatcttagttgatttgtgaaaagaccaaccaccacgattctaatggcctataactgtaccaagcttaaatgggccacgaataaacctaccagcaccaggtaactgattaatctgtaatcttaattatataatggccgacgtagactttgggcccataaagtttagttgccatttctattaaataagagaaggaagtaggaagaaagagggagacaaatgtcatgtgagaatgggtgcacaattctcgaaaccaaactactaactaccgttacttcccagtgacctttctctttggtcagttttatcggcgctcctcaatgttttcgctatttactacacatcctttcgcgtctcccaaactttatctatactacattttaaagcaaatatatgcatgtcttttttgtcaactaagtataataataatatagatattttatgtagagaaaatatttatgaagttgataactctctttttttttagttgataaactctcttcttcaaacaacttcgatcatgccctttgtatattttatttttagaaaatattaacgcctgtttatttcatcattcatcattttcatacaaataatctatt

SEQ ID NO: 71657 - DNA, 568 bp, Arabidopsis thaliana landsberg
gaaagagcacttttccgctttaactggggatccacccccagcattaacgtcggcttcgagtaccgaaataaaataaacggtgtagtaatgacgaaatatcataaataagtgcataatagcttcaacacgtagaacatacgcaagaaaacaaatgttaaatggtcagtttatgaagatataaaaacaaggagtatcaaacttgaattaaggttttaagaacattttgagtgactcaattgcttcttttatacaaaaagtttaaactcagattacgtacgcccacgttcccttgaagtatatttttaattttttcctaatgcggttggaatatatttttatgaagattttaattaaatggtgatcaaatgtgttagatactctaaccaccacaggcgtggtaactaaccactgagcactcttacgtgtaatacaattttagaaatatacatacttaatatgtggggtattaggtttttttgtagtatttctttatgctttaagagctacacgtttgaattatgaagtttacgtgtacgggtcgccacatcgcaatatagtttttatgatg

SEQ ID NO: 71658 - DNA, 666 bp, Arabidopsis thaliana landsberg
gccttcaggaattgggttcaaaaaccacaaaaaatattgaattcactacaaaccgagatatcatacttaaaaaggaaatatcttaaagtgtgaggccgttaagagaactttcaatatgttgagtaactcgttttcgaatttgtccttcagagagattcttcatcattcacaaccttcatcattcatagtagaataactgtatgatcaatatcaatcaccaattctctcattaggaatcacgaaacaatcaacaccacattccacattaataaaggcttgctagtccaagtgcgcgggtacctttgagatgattaatacacaagttacacaatacgcttggtttatataaaatcgatctgttttcttaacatttgtcttgattttgcatagtaaagagatactattagatataaatagatatacaagccaattattttaatatgagatttgctatataagttttagaaaacgaagaaatccaattcttttaaaatgtgaacatgagattatcgaagtgatactacagaaattaaaatacattgtgattctctagatcaaacgaagagtaccgtagcgacaacaattacaacagtacataccttgaagactatggtttgaaccacaggaggaacagcggtaaagtaaggagtaaatgaagagaaaacc

SEQ ID NO: 71659 - DNA, 499 bp, Arabidopsis thaliana landsberg
  unsure (1)..(499): unsure at all n locations
atggcgcgcacccgcgaaagcctggccgccaagcgcgaagagatcgcgctccggtctgccagcgccgcgaagtagaacctacttgtcgaagagcttcttcggcagcaccacgtggacgcccttgttgcggtccaccagtnnnnnnnnnnnnnnnnnnnnnnnnnnnnnnnnnnnnnnnnnnnnnnnnnnncgggtcatgcccttcgcggcgacgagaaagtcgatcatgttccgcagcgccttgcgcgtggcnnnnnnnnnnnnnnnnnnnnnnnnnnnnnnnntataggcctctgggctctcggcgcgcggataggggctcttttcgcccttgtgcaggatgaactgaaaggtcccggtcagcgaggtctccagcgcggtgatgtcgacctctccattgccctgggcggcgtgaccgtcgccggcctggaacagcgcgcccttggcgtggaccggcaggaacagggtcgtgcccgcgaccagcgccttgtcgtccatg

SEQ ID NO: 71660 - DNA, 540 bp, Arabidopsis thaliana landsberg
caggccattgtcaactataataattggaataattgacatattttgattttaccgtaaccttgcttggcttgacgcaaatggaaaacgtaaactacaatggattttttttaataaatagatggacccataattcaatataaataattttgttgtagataggacttgaaattttactatttcggcttcttttcctccactctctagtgtcaatgattttgtacgctagctgggtttcacaattatccaactaaaaatgatttttaacttttgggcttttacatattaacacggacttatgataaggcccaatacgttacctttcaaatccagttattatcatcccgaataaatatgtactttagagtttgagcccaacacaattttagacaacatacaaaaaagaaataagttgatgttgaatatatatatatgagtacgaagatgaacttgaaaattgaaatcatcagttgtttgagggctttattaagttaccatgataattaacaaaaagtcagtttataaaataaaaaaaaaaagtca

SEQ ID NO: 71661 - DNA, 591 bp, Arabidopsis thaliana landsberg
tatacactatagactaagaatgagcttaatctaagattcttattgtaaacaatcgggtaacatttgacatttttaagaacaattaaatatagcgtatacgagatctatgataccgacttataggtacatatctctaacttgatgaaaatctatgaaggaagctaagctaagtcaataaacatgtatttgtgtaagtattttctaatgacattgattaaagaaaactagataacatatatatgtcctccaccgtttgctgataatacgtgtaaaagatgtgtttaatttcccaaatacattgttttttttttacgtcaatttgcatacattgtttatttagacatcgcacatttgtattttcatgaattatagttactaacattttttgatacattcataaactttgtgtgttttataagaaacatttatctacattgtcggctatattaaaagttaaaaatgtaaacgcccaaaccaattaaaaacaaaatacacaccattacacaatcgctagacaataagcccataacttatctatatactcttgtcggctagaaaaagtcgactttgactttaatttttaaaatgacc

SEQ ID NO: 71662 - DNA, 774 bp, Arabidopsis thaliana landsberg
gttagattctataagatattactgctgattatttcttgtctgacccatcttcgctgttgagtaatgtatcctttaccttcaactcgaccagcgtctctctactgtggacggaggtgatactttctctgcaagtgattctggttctttagcagatccttatgatatcgaacaggcagaaagtggagaatccacagtggaacatcccatgacaggaggaaaccgttcgaggttctcagggtgcttgcagcaacatgatatggtaaagactgaaaagccaattgatgtcttgacaagggtattgggtaatgagagatgtgcagactgcggtgctcctgaacctgattgggcctctttgaacctcggtgtccttatttgtatcgagtgttctggtatccatcgtaaccttggtgttcacatttcaaaggtttgcaattaaacctacacatccagcaaacatttcactctttccacaaaggggaaagcatgaactatcattttcccattttttataaatttggtataaattatccaaccctgtcgtgcaggtcagatcgctcactcttgatgtcaaagtatgggaaccatcggtcttgacgttattccaatcgttaggtaatgtatatgtaaactcagtgtgggaggagctgttgaactcggagagtagaacttccagtgctagtagatcttcggggtaagtggcttaagtacttgtaattgggagaagaacaaaactacttcttacatgtatttacagtcttaaaatatttctattta

SEQ ID NO: 71663 - DNA, 1601 bp, Arabidopsis thaliana landsberg
taaactaataaataccagtcaaatttccaaaactgttttgttagtcccatctgcaacaaacccttcgaagcctcaatatcaagttttgttgacacaaaaagacttgtttcatccgattcagagataagtaagatgtgggtaacaccaatgtcatacaaaccagagattggtgcacatatatttcaaaattttaaagctgacttaatatagaggaatttatttatggaataaggtatgaccattgaccaacactaaacatctgttagaagggtagttaaaaagccaagtccaacctgacccattcttatttaagttatttaataattttagattaacataaacataattttgtgttagaagataggacatgacatgtcccccattttttcactaagaaaaatcaccagttttgttttccaccaacaattttcaaatttcctctaaaattttatttagatcatttttgttgtttgtaaaaatattacgtaggtttgaatagatggtgacacaacgataactttagcacaaatcacttgctcttgtatcttgatttttgttcagttttacatgtaagccttgtaaacatataattattgtacacgaaaacttacgtagatcatattaaaatcgggatataaacagatacataattgttacaatcgtagagaaaagatggccttgagaacatagtttcactttcaaacgcgcaagtgatgctatctgagatcaatgacatcaaacttgagatttgggttcatgtaaacttccttacaggtattgtaaattggtcctccgtcctccggtgaactgtgcgcatgaaacccacgccggtcacaattccttatcaccgtcattcctcccggcgtcgtcagccgaaatattccgtgattcctacatcaacgaaaagaatcttcttaggcattatactttctcgaataatttcatttctgatacttctggtcttttgctagtttagtaccttgaagagtcttgtggcgccataacgattgccacagcttctggtaacataatctgaaaacattgtaactccatcggttgatatcgttctatatgcattatatactaatttttgaaagtagatagaaagatgttgtccgtacctggtatgaatagtgtgtgtgaacatcaatggatgacatgaaacaagactgtgtcggatgcgtctgttgaaatgaagacagtgattaacgagtcagtacagaaataaatgaaaagaatgataccgtattaccaaagaactgatattcaagcataaagcaataaaagctagtgaaataaaatcatatattactcacatgaatccatccgagtgggaaaagggattgcttgtcctgtacttcaaatatctcttcttcgttcgtggcctgacactaaaaaagagcgagccaggagtaagtgaatgtatacgaggaaactgggttgatataacgaaaaaagactgagcttaccgagtcagatgtcgattcctgctttggtatgatgagagctgtaatgtaaaaatttctggttttctgccaatagtgattcacaaatcattatgctgatccattttcattacctaaatgtcatatcgcattttc

SEQ ID NO: 71664 - DNA, 567 bp, Arabidopsis thaliana landsberg
tctttatttatacattcatctaatgaaaatggattaccaactatttatagtgaatattcgagttcagaaactagactttgatgaataaccgtcaatcttttgcctcttcttctttgttgcataacaaatagttttgttttatcaaaacagagtatttttatcaatttaacgatatatgttgagctgcgtagacttgtaatcaagatgttcgatgtaaaaatgtttttggattggttatgggtcgagaaaataaagtttgctaatggtgggttttatttgggcccattgtagtttttttggtaagaggcccattgtggttatatattcactttgttccttacacaaactttgggccaacattgattcaacagctgattagaactaatcttcaaagcctgtgagagaactcagaactggatgggtattcttgttttcaatccatttatagtcatggttaaaacttaaaatcatagtggaaaaactcgaattttggtcttaaaactttcaaggcaaatattgcaactactgactgatactacattgaatatcttatattaatgttttaag

SEQ ID NO: 71665 - DNA, 681 bp, Arabidopsis thaliana landsberg
ctcccagtcgagctgtgctcaccccacagaagcaattgtccggatgatttgatttgatcaatggcgggagcaatttcggccgaaacgacggtatcgggcgcggcaccgcccaggccaagcataatgccgatatcggtgccatggccgcgacctgtttcggccaacgagccatacaggtcaatggtaagcgactgtaccccggccaacaggccgcgatgcttgaggttgtgtacaaagctgcgggcggcacgcattgggcctacggtatgcgaactggacgggcctatgccaattttgaaaatatcaaagacggaaagactcatgatgcaatgccctcaattcctgttcgatattcctacaatatcaaagatttcggtcgtcggcatagctgtatgcgacaacggcagggcactatttgtctgcaggcgccgcctggtccagggcgtaggaaagaacctggcgcacggcatcgaggtcggcccgcaaggtttgaaattcgttggcgcttaaccgcacggcggcattctggtcgtgggcggcatcgcggccttcacccaggcggttgcgggccccactgatggtaaaaccctgctcgtaaagaaggtcgcgaatacggcgaataagcagcccttcgtgatgctgatagtaacgccggttgccgcggcgcttgacaggcttgag

SEQ ID NO: 71666 - DNA, 556 bp, Arabidopsis thaliana landsberg
  unsure (1)..(556): unsure at all n locations
ggacgagggggtacgtctcaaggcgcgcgttcaggcagcacatgtctgtcatcatgaattcagtgaacttctccgcgatacacgcgcagcacaaagcccgattgagcttaccagcgatcaaatccttccctttgagcgtgattacgattcagcggaattcgatcgccttgatcaggtaattgaagaacgtgtgcagcgtaaggccggttcgcgccagggccaattcaccgatatgggccgcccgacactggcaaaggttataccgcttcgacgcgcataactgataagagtttaaccacgaagaacattactatcccctcaccgtcctctcattcctctcattgtgcactaaacgatgtgagtgcactaaacggtgggagcagcgggtacggtgaggggaaaataccccgaacagcttatggcttcggggtgctcaggccgagcacctgcgatacgtgttcgcgctcgtgatcatcgacccagaggcagcaggcgaatttaccttcgacggccatggcgtctactgcgcgcagattgatctngtcgtcggcgagct

SEQ ID NO: 71667 - DNA, 385 bp, Arabidopsis thaliana landsberg
aacaagagaacgtcacccaaaagcccaacgaacaacttatcaaattcacaagcaccaaccaaacaaagaggagcgggacccgacatagagaccaccgcgacaaagaaagagaagctgacaagaagcggaaacagaaaggcaaagaggacaaccggaaaagcatctcagaccacgtgataacatgggtgcatgcacaagagaaagacgcggcgtcgaaaaacaggcagatcttaagaagaacgcagctacgtggatcccacacgccggtccacaacaatgaatccatccgagagagggaagacgcgaaaaaaaagaacctggcacacaccagcgcgggggaggatcacgatcccgaaaatggcaccgggcacagccaagagccgag

SEQ ID NO: 71668 - DNA, 540 bp, Arabidopsis thaliana landsberg
cagaccgccgccatcatatggttctcgaaccctatggcttccgctggtaccgcgccggcggcctggattaccttttcaagcgccggcgagcgtaatttagcttccaaggacgattgcccggggcggcgtgtgatcccagttggtcaggcaagtctaccgtcgaacggcgcctgcggtaaagaatttgatcgatcagcaacagcgcttatgtgcgacaggtggggttatttgtctggttgccttccgcgttagacgcactgtctgtcaagatgcgttgcgcgtcaaacacttggacgccatgatgttcataggctccaagaaggcttttcccgggccgctttgccaagcgctgctctcacttcggaccggggaaagcgccgtaatcccaaggtggcattccactgggtggtatcactgccggcccgttcatacgctgaaagataaaacaccggtcatggcttcactttagcatgccacctgcaggcaatctgtccggcccgactggcgacacatgacattcccgtcgaggcgacacttgtt

SEQ ID NO: 71669 - DNA, 638 bp, Arabidopsis thaliana landsberg
atcgctggttgcacatgatgatggtgttttgcattcttttttacaccacatgaattctattctccttgatacatcacctctcgcataagttaagtacaaactaaaatatgtatggtacaccgtttatcccggaattctggaccgtataaatctttagattccgtgcgtatagttttgactcatctcaatgtatagcgactaccgtgcatcgattcaattcaagttttcggaacgttgtttaaagacgcaaatatttatatatggacgatactcaaattttaaaaactaaacatgacgtttcattattttcaaaatttatatagataattttaaatacaaacgtagtccgaacgagctatttgtcttgaaacaaaatatccaattatttatttatataaatcgaagaaaccatgtttaatttcttcatgatatatatatatatatactttaatacaatcataacgtaaaagagagctgcgggctacattaatctttatcccaaccctttctttctgcagccgtttcagcctttttacttgactacataccaaacaaggacacaacaccacccaaaaaaaaaccaaaaaaaaaaaaccaattttaggccccttaaaatctttttaaaaagttaaaaaccc

SEQ ID NO: 71670 - DNA, 609 bp, Arabidopsis thaliana landsberg
ccgaccgccactgaagcacacggaactgtctcccgaaacggtttccttcgaagactcttccgtgctgttcaccaacctggtttggatatactaccagtgagtatctctaccatcttccttgtcttatcgcatgctaatcgccgctagtgctgcacgagtggctctcttcaactacgaactacatctcggcgtcgtcctaggactggtaacaagaaaagcaacttcaaatttggagactcggttccttgaagagaaccgaaagggcctgagaagcgctaccagaagcatcgccgactgccttggccaactacacccacttcgtctaacacgttggctaccgagtagcgcggttgcatgcaccgcactccccctcgccatgcacatggtcgatattaagatgtcgtctgcctcatctccaggcgagatatggtcccggccaggtatcgctgcgaaacagtctcggttaaacgtgcttatccaggcattcagagaacttcaccccaagtatgacggcgtggactcgatttccaagaccatcagatacttcatggaatgcacctatctccaagactcgacgccgacaccttctatcagcgagaataccgacgt

SEQ ID NO: 71671 - DNA, 568 bp, Arabidopsis thaliana landsberg
cctgccagcgcccgtcggggcccggttcgaggtcgaagatggcggcctgtacgcttcccgcgtgcagcaccctccccagggtgagcccgccgagaccggcgccgatgatcgcgatcgggtaatgcgaagtgctcatagtcgtgccttcccccttgtgcggccctcgtcaggcctttcctgattcctcatccggtacgggagtgcccgcgatgccgttgatcagcatcaggaagcaccaggacacgcggtcacgcggtgagcccgcgagcaggctccccgccagcccgcggatgtgcgggtgcgtggcttccgggacgtcgcgcagagcccgggtcaggctgtcccactcggtcccggacccgggcgaccgggcgtgtccggagtgctcggccgcggtcgccgtggcgacctggagcaggacgttcactccccaggcggcccgttccggcgggacgccgccggcgtcgagcagcgccagcagccgctcaaggagccgcaggtaatgctcgccgctcgggcgggccgtgaccgcggagcgggccagtgtcggatgcgcgagcagcacctg

SEQ ID NO: 71672 - DNA, 554 bp, Arabidopsis thaliana landsberg
  unsure (1)..(554): unsure at all n locations
taaactcccccgctttaatcttatcatatacttcccgcgccttgttaatctagggcagatgatagtgcgatgcggccagctcgggattcgcgatctccacaggtgtctttccctcgccatagtccttcagtttatccggatcggcgaacgacatcagcacgacatccatccttggattgctcgctcttgcgtggcgcacgatcccttcaagagaccgcagttgggtgaggctgtccgtgccgttgacgcggtcattgacggcggcctctacaaacatcacatccactttaccggaatcaagcacgtccctttgcacgcgaaaggcatgcggcaggctcccaagagagggaataccggctgagataaagnnnnnnnnnnnnnnnnnnnnnnnnnnnngtaaatacccgatcaccaggttccgccatccgggattataggtgatggagccgcccaggaaagcgaccgttcctgtcttttgatgctcgaatttctctaacgccgacggaatgccctnccgcgtgtgaaaataatctttatacgccagaggggtctgt

SEQ ID NO: 71673 - DNA, 181 bp, Arabidopsis thaliana landsberg
tgttttaacccccgacactgcttcgtactgacatactgcgtcataactgcccgtttctgttctcaagtgccactggatgtttgagggtcaggtttgattcctacaaagattccttacttgtcgcgccgtagtccaaacgtgtaacatcttccttgcctttggaaactattgagattaccct

SEQ ID NO: 71674 - DNA, 591 bp, Arabidopsis thaliana landsberg
ttctttaccatttccactgccatatgggtcctttccctttctttctctcattagaaaaggacggctttctgcaagataacaactaaaggacaaaataaaatataataagataaaacaaaacccatcataatcaattggacaagatgagccaacagaaaaatataaaagacccaagagaagacacaagaattagagtctgacttgttcacatattcagaagacccataaaagaactatactaagagcaaaattatatatgcagaggacctggtactgatccctggaggccctgagagtgctgcctcagtgtctgtaagataaatgggattcaaagggctttgttttcctgatgtcctccatcccctctgtctccctcatggcttctgctatcttccttggggctctctgaactctgagatttattggaaacatctcatttagagctgtgtgtttgaagatatctctctgtgtctctgtctctctgggtctaaatctctctctttctctctctattgtctgggttttgatctctgtatttattccaagctgttgcaggaggaagcttctctgatgataactgaataatgtact

SEQ ID NO: 71675 - DNA, 604 bp, Arabidopsis thaliana landsberg
  unsure (1)..(604): unsure at all n locations
caagacattgaatgatgttgatatggatggtttgattgctgttctttcaaccgtaatccctgccgaactgcaacgtaagtcggcttatttaacacacgcgctgttcaactcacatcattcggaacatgagatgctgcgctatatcaaatcattggaggcaaaggacttatccctttgtcactctatgatcgcccttggctcgtgcaccatgaagctgaatgnnnnnnnnnnnnnnnnnnnnnnnnnnnnnnnnnnnnnnnnnnnnnnnnaccccttcgcgccaaccgaccaggtgggcggctatatgcaggtgtttgatgaactgaataactggctgagcgaaataaccggatttgcggccatgagcctgcaaccaaacgccggcgcacaaggcgaatatgccggtttgatggttatccgtgcttatcataacgaccgcggcgacagccaccgtaatatcgcacttattccatcttcagctcacggcaccaacccggcttcggcagctatggcaggaatgaagatcgtggtagttcgctgcgatgataacggcaatatcgacgttgctgacctgaaaagctaggcntgagcatataaaaatgag

SEQ ID NO: 71676 - DNA, 548 bp, Arabidopsis thaliana landsberg
  unsure (1)..(548): unsure at all n locations
ggccggttngaaccttctgtatcttggcgtagcatctgttgccggtttacttgttttgactattgctttattaaaattatataacttgcgccacccattcccagcaaattggggggtagaaactccggcagaaataaatgcggagcattattgatctttattttattgcatgaattggcccatattttttaaaagattaggttccgctgttgtatttgctgccgtaatgatggctggcttattgatttctgatccttacgcaatcatcattttggctttattaattcagtttttgtgtctgcgtgagtttttagcaatgatggaaaaaattcatcaagacctatatttttcaaaagtgttcagatggggcgttcacgtattgggtgtatgggcattaataggctttatttttttccaaatgcaactagtcattattttacttccggttccactaatcatttttttgccctcagtattatccaaaaaaacgaaattaatggaggtattgtttgctttaacccggcttgttggatgtatgcctgccctat

SEQ ID NO: 71677 - DNA, 576 bp, Arabidopsis thaliana landsberg
  unsure (1)..(576): unsure at all n locations
gatcatgccgtttttgacaataagggcacctacttttttttttctgctatgtgaaagctgcgcccactcagcggggattttcaggtaggccacatcataacgcaattgcttggacactttctccatgggcccaaaaataaccaaaaaaaggccggtacaagcgttataaaacgttaactgaccagcggcacaggacagcgacagtcagggattacaatggtcctgcgcaattcaatgatctaacggcaaatcgcacagccctgacgactgttacatggccgctgattaacggatggtgaattccaccctgcggttgagctgcgcgccttcctcggtgtcattgttggctaccggttttgtttcgccataccctttgtaagtgatccggtccccggcaatgccttttgacaggataaaatcggccaccgccctggccctgtcgttggaaagctgcagattaaaagcatcagaccctttgttatcggtatgtccgccaatctcaattntcatcccggngttttccctgaggatttttaccagcctttgaagctcgttatcggacgttaggcgcagcgt

SEQ ID NO: 71678 - DNA, 590 bp, Arabidopsis thaliana landsberg
  unsure (1)..(590): unsure at all n locations
acacgaaagtgaaatttcttcatgagaatttgcaaaagagacaaaatttgatgtctacaacaactaagattataataacgagaatgatgaactgaaaaaagagacatgttcagtcttttattgctttatatctttctgcagttaataaacgaatttgactacaatgagaagctttttctttcctattttttttattgtgatcttgtaagaaaaaatagtgtttaacactgttatttactattatagtttgaattatgttcttgatcaccaataacaagtaaagttggagatgtggtgcagtgataatgaaaatatactaaactaacaaaattaatttaaaaggctcaatggtttaagcatttaagtgtaaccccaatgtaaactcatttttctgcaattgggccaattaaatatagacaaccacaaataaatatcaatgacatcatcactgtatatcctaatgcttctcaaagaggcatataatactgtaatctccaatttttttgtttgtcaatttcttttaatcccaccctaccattgacggctgtggaggaaaaaagagagacaacntatgaagtatgagtaattat

SEQ ID NO: 71679 - DNA, 474 bp, Arabidopsis thaliana landsberg
ttcactggcccagcagtattgctgcttttggccctaccactctccattaaaaacactccgcagcacaccatcatggacggggctacagtgtatggcattagtaagcaggctggtgagcgctggtgcgaatattatttccagaaattcggggtggatgtgcgcggcctgcgttatcctgggctcatcgggtacaaatcactgcccggtggcggcactaccgattatgccgttgatattttttataaggccaaaaagggtgaaactttcaattgtttcctgggccccgataccattttgcccatgatgtacatggacgatgccatcagggctaccgtagagatcatgcaggcaccggccgataaggtcaaaatcagatcgagctataacctggcaggcatgagtttttcaccggccgaaattgctgccgccattcataaacacattgcggggtttcaggattacatatgctgctga

SEQ ID NO: 71680 - DNA, 3455 bp, Arabidopsis thaliana landsberg
tacatcaatcagccaaatgtaggaacatttgccatgtacaaaatgagaccattacaaacaatgtaccaaccaactgttgtgtgaccaaaaatcttaccctgagagtctgattttgttgttcgcttgagtttctttgatgactttagaagcaaaacctggatcacaattaaactccagcctcttcaatcgcagcagacattgaagctgatgcttcttctagcgttcgcctcttttgaactgcgttaaaggcctcgatgatgtctccttctatccaatcatcgtagtcatccataccaataccacattctaatccagcactcacctaccaagtaagaaagttgaaaaggttgataagtcaaaatttggtttagatttggacatgtttcagcgtgtgaaatagaagtcgatagtttaggatgactctactttctccttccatgttctatgcatgtaagatggaagttgatagtttacctctttcacgttttctttaacccgtttaagagaatcaagaacaccgacatggacagttttacccttccggaccaccctgatgccacaatctttgacaaattttccttcattcaccatgcatcctgtcactcgaccacttccactgctgaaagtagctcgaacttctgctgagccaattgggatttgttcctatcaaatatcaacagccacatgaatcttcagtttcaaaactccaaaaaggctcatgaagtgagactaaaacctatgcttttatgataatctatgacatgatacagaggtttccttttcaggcaattcaattattcaacccaacaataaaaacagttgttatgccaactcatgtggaaagaagacaaaacaaagatctcatcatgtgtaactctaaagagaaatgctgatcagattaggcaataacaaaacgcttcaaattgctaaagaaatcaatgctaacctcaacagactcaagaagtccttccattgcgtttcgcacatcgtcaataagctcatatataactctatatagtcggatttcaacacctttgttttctgcagctttcttaacagaaccagacgctttgacattaaatccaaaaacgatagcttcactcgctgatgctagatcaacatcactgttgctcacatcccctgtcgcttgtagcaagaatttcaaggtgacattctcctgagggaggacttgaagggcttgtcttacagcttcaatggatccctagtagtcacattgatgatttgcatcagcataaataagaagagacagaggaaaccaaaatgtttaaggcgatgagtggatgaatccaaagtgactatttacctgtacatcgaccttcaagatgatattaagctgatgcaaatctaagcctgacatctttttcgctgatacagcagaagctaaggaggaaagcgtgacctttccatccccagcctttgcagatattccttcatctcgtagtgataccgcacgtgcctctgccatctcccgcgccacatcaagggaagagacgatctcaaattcatcaccagcaatggggacattatttaaaccaatcacctgcaaatgtattttagatcctcaaattagatatctaaatcatctatacatgagaacatagtatcaaaatcctgtcaccaagaaaataaacatgacctgcatagagtatttctattagtctgtgtgcaatgacgtttaacttagggtagattatgaaactacaaacctgtacaggtatggagggtccagcttcatcaactcgttccccactgtgatcaaataaagctcgtacctaaacacagaaacagagcaagaccaaagtaggtaagtttttagcgtttatatatcatctgcgcaatgtgacttgaggaaaacccaaatttgggatagacctttccgaaagcttctccgcaaacaacaacatcccctcttttcaaagtccccttctgaacaatgaacgtcgcaaatggtccttttgctttatcaagtccagcctcgattacaatgcccttggcatttctgtgtggatttgctttcaactcttgaagctgaaacagcaaaatacagtcagcccacaagcaaaagctaattgagaagcaaaagcagaaagtgggagaaaaaaaaaatgaatttatgtaagcgttattagtctttagccctccataaaacaagattttgggccgactttggagcaattatgtaagtcatttcgtagccactatgtagtgcttacatgaagagaacaaaattgagcttcattatgcatctaccgaaaacagaaacggaaaaatcaagcaaccctgttatcatgggatgaataacaaactaacctctgcaacaagcatgacagtttccaacagatcatcgacattttcccctttcaaagcactgatctgtcaaaggcaaatatagagcatgatatgagaacccatggaacatttggaccctgaaacatatacgtgatgaaagtatgtattccaacctgaaccattggaacatcaccaccccaatcttcaggcatcaaaccaattgaagaaagctcttgcctcactctatctggactagctccttctttatctatctggaacatgaaatgaataagactgggagaaacttaaatatacacaaggtaaagaagaataacaaaataccttatttatagctataactattggtacagcagcagcctttgcgtgagctattgcttcatttgtttgaggacgaattccatcatcagcagcaaccacaatgattgcaatgtcagtgactcgtgctccgcgagctctcattgcaccaaatgcctagatgaggacataaaagtaagatgagtaaaactatggtatgcctagcaatagatgtgagatagtcaataaacatgctacatgtaagaaagctcatgaagtataattaatgatacttcagcatcagaaatgaacatgcgaagattcaattgcaagaaaaagaatctacctcatgtccaggagtatcaaggaaaacgcaggactgcaactttccatcaacaggcactgacaccttatatgcaccaattccttgtgtaattcctcctgcttctgacgcagcaacctgcatgtatccagcgaagggagattagctgacaacgctacttagcactaatcttgacaataagcaaatgaacaaacattaattgccagtagacatgctttagaaatgataagaaactgaagaggccacaatgaaatttcttaaataacaaaaggcaaattaatagctaatctcatccataccttgctttttctgatatagtccagaagagtggtctgcaaaataagcagcgaatgcattaggaacaacctactgctaagaaataggactctatatatccttttaagggtgggtaggacatgagaacataaacaaaggcaatgataactgtgcctaccattccatggtccacaagaaaacattatcgtta

SEQ ID NO: 71681 - DNA, 687 bp, Arabidopsis thaliana landsberg
tgggacgcccggtactggtggattgagacaatttaacagattctaattagttttctaatggctgattgaaatattggcacaattcgtcaatttcaatactattggggagcgatattaaataaatattattgtagtacaaaaaataaaagtttgaatgttcaaaggaaaatgttgacttttttttttgttggtaggaaggagagaatgtatactttttaattttacggagtcgtcgctgaaatcctaaccaatgataaagcgctacgttcacgtgagtctgattttcaattattaacataaaaaatataataaagattctcgaaaaagcgaacacattgctatcaaacggggctagattggtaaattacgtaattgtctgttagaggagtgcgtcacccaccacggtctttctcaagacaatgaaacgataactaaaataaaaaggagacacgtacttaccgttttgcccacagccgtcacaaatcagattatttactggatttgaattagagatggtactgatccggttaaactcggtttggtcagagttgaagtcttgacttggttttgtttgaagagaagtgaaaattgatgagaaaaccaaaagaaacccgttaagaagatccaaccgggaatgggcggcgaatggtcagaaagttaagaaaggtagttaaaaatgagagaatc

SEQ ID NO: 71682 - DNA, 617 bp, Arabidopsis thaliana landsberg
  unsure (1)..(617): unsure at all n locations
agacgacgactacaaccgcacgctgcgccgcgccaagctcgacgtgctgtccgagccgtatccgatggcggtcgccggcacgccggacgcgtacggctacgatccggacacgcacacgttcacgctggactacacgcccgatccggcgatcgccgcgccgacgctggtgttcaccgcgccgcgccagtatcccgccggctatcgcgtcgagatcgacggcggccgcgtcgtctcggccgacggcgccgcggtgctgatcgtgcaggcgctgcccggcgccgccacggtcagcgttacgctgcgaacggccggctaggcgcgtcatcaaatggcgcctcccccttccgcaagcgggagagggaaattccagtgacgacgccctctgacccgtcattgcgaggaggccgaaggccgacgaagcaatccagtgcgcagtccgatcgggccgtgctctggattgcttcgtcgctgcgcttctcgcaatgacgagtccggtgggtccggctcgttcagaaagatgaggttgccgcggtcgcgggtgcgatacagtcggccgggaattcgcgagggaaacggaacggatggngccatcatcgagaaatcggctcgtcaccggc

SEQ ID NO: 71683 - DNA, 352 bp, Arabidopsis thaliana landsberg
ttggcttctgactccctctaacattggtgagagctcgttttcgctgatgcgtgttcagccctggtttttatgaccaatgcttaaggaagtacggaagcgcaactgtggggaaatcttttacggaccctttcaattatactcctataacaacactcatgaagagacagagtcgagctgaactagccacccatcattctaccatctccgcactttacttcatctactgcattaagcgacaggtcctatgttggcatggtggcctttcaccttgtttagataccctagacaatacccaacgcttgatatcgaatacaaaaagttttggtgcgagcatagaaacctcgatgtgcat

SEQ ID NO: 71684 - DNA, 2650 bp, Arabidopsis thaliana landsberg
cattaccgtcttcttatttgtcttttcctttgtaatgaaactatatattataatttcaatatagaacaaaagaataacataaattaagttttttttgtccttttctgcctttacctttccttctactcccgaaaaagcactgactttgctctgtttccttcgttcacacagagaaagagagaaatcttctgagcgaaattctgacaaaagagatgatggaatgggataatcagctacaacccaataaccatcactcttctaatcttcaagggatcgacgttaatggcggctccggcgccggaggaggaatgtacgtgaaggtgatgaccgatgagcagtatgaaactctcaggaaacagattgctatttacggcaccatttgtgagcgtcttgttgagatgcataaaactctcactgctcaacaagatcttgcaggtttctatcctttcttctatcatttagtttcttcttctctgttcatctaaagataaaaaaaggactccttttgaaatttttaaaaaaattcagaatttttgtgtggtttaattgattttttagtgattcttcttcactttggtgtatgggtaattgaaaattctctgccttttaagcatttgttggcttaaatctgattcaaagaccaatccttttcgtggatttttgagctaagaataaggaaaataatggttcttgaggaattctagaatcactcctttgaatctttcaattgagcttcgagaatttcccaccaaaataggtgtttttagcttgatgatgtgttcttgagatataaagtttcagtttttttatttagtttaacttttaacaactctgctcatttgtctgttgttggtaacaggagggagaatgggaggactatatgcagacccaatgatgtcatctttaggtcataagatgacagctagacagaggtggactcctacgccagtccagcttcagattctggaacgtatattcgatcaaggcacgggaacaccgagcaagcagaagatcaaagacataacagaagagctgagccaacacggccagattgctgaacaaaatgtctataactggttccagaaccgacgtgctcgatccaagaggaagcagcatggtggaggttcttctggaaataataatggtgagtctgaggtagagactgaagttgaagcattgaatgagaagagagtagtgaggccagagagtcttcttggtcttccagatggaaatagcaacaataatgggttagggacaacaacagcaacaactactgctcctaggcctgaagatctttgctttcagagccctgagattagctcagaccttcacttgctagatgttctatcaaacccaagtaagtaacaaagatacctttttagttcacacgtaactgaaaaaaacagagacattggctttgaagaaatagtcaagtaagttgtgtctgtctcagataatttcttgtgatttgtgtttgtaggggatgagcatcttgttggaaagatgggactggcggaaagttacaacctttatgatcatgttgaagattatggcatgtcaggctgattgaatacaagctgaggaaacttctaattatcagagagatcaatgaaatggatttggtagtcagtcataagcagtattagacttttgtttttcttaaattgtttctttcagggcttattaaagaaacaagtagtttatcttattaatcattttcagagaaacatttacatggattgttgaatcgtcttgtgatgcttgctttgataatttctgcattcagaacgatttttacatccttaaatgaattatactgtaagaaataaaaaaattccaagagaaaaacatttcaattcaaacctctccagagttgaaaacatgcaagtctaacaaagttttgtaatggcctttctctatttcttcctcattcacattgtgtaagaccagagtctgtataaccaaatcctcccaatcaatttcagatcctttcttccttttcttcttgctatgttcaagctccaaagacaacgcaccttcactaacattgtcagaaggatgttgtattgcattaatccgcaacttagctgccttaatcttttctcttcgtctttcaactgcaacgcaaccctttatgtaagaaggaggcaaagcttcaagccctacatctttctccaacaagtctttgagcaaaagccttttactcaattccgatttccctttccaccaattttcagttgacaccattccaaaaacagatctcctttgccacatactctgactacttccctgacttcttttcgcaagagtcccaccacaaactcgatcctcaaattcattatactttgtagacaactgattctccgatatattatcatcatagttacataaactaagctgacgttcaccttctacatcaaaataccgagacatagtatcttgacgagcatcatcatcataacaatacatagattctttgcttaggcagtccatcactaaatcctccacacaaaatccatcagttctaactaattctttcccagtcccttgttttctctttttcatggacttggcttccattaaagcaaacaaagttcctgaatgtttcaaaacattcttcacagtaacatctttcgcccaggcaaaccca

SEQ ID NO: 71685 - DNA, 235 bp, Arabidopsis thaliana landsberg
atacttttggaccttttataacttatatgaaaaataagtttttcctttgaaatactaacaaaactaccacatggggcccggcttctttccaagtctactacatttaccttcacatttccatctataccacatttgatttgtgcattgtttattttaccctcattatctctttcatctttatctttctttctcttctctctatctttctctctcttctctctttctctctttctct

SEQ ID NO: 71686 - DNA, 335 bp, Arabidopsis thaliana landsberg
gttctttcttaaatcaaaatgtttgaaaaccatgaaatatattgatgtatcttattttcttatactttttcactaaattttaacatatgtttttagaaggaaaaaagatatattgccttttagatagtattttagatctgttccttctacgactgtatatttctctctcatatagaactttacagcatatgtggatttggtgtcaaatgttctttggtctatatctcggaacactgaaaaggatttcactaaaatgtgattgcttgaatattcttttaagctttgacaattgaccctcacgggatgtttatatttttttgggctcaaaagggccc

SEQ ID NO: 71687 - DNA, 363 bp, Arabidopsis thaliana landsberg
  unsure (1)..(363): unsure at all n locations
nnnnnnnnnnnnnnnnnnnnnnnnnnnnnnnnnnnnnnnnnnnnnnnnnnnnnnnnnnnnnnnnnnnnnnnnnnnnnnnnnnnnnnnnnnnnnnnnnnnnnnnnnnnnnnnnnnnnnnnnnnnnnnnnnnnnnnnnnnnnnnnnnnnnnnnnnnnnnnnnnnnnnnnnnnnnnnnnnnnnnnnnnnnnnnnnnnnnnnnnnnnnnnnnnnnnnnnnnnnnnnnnnnnnnnnnnnnnnnnnnnnnnnnnnnnnnnnnnnnnnnnnnnntgccatgaccagcgatgcttgcacacattgggctatgctgttttccttattacctaaccttatgtagctgttatggctcctaactcccgttatatt

SEQ ID NO: 71688 - DNA, 509 bp, Arabidopsis thaliana landsberg
ggcgtctctccagggcaataccgctgcaaagcttctggccgccgccgtgacggcgctggccctggaaggctgcgcctcgcagcccatggaatacgccgcgatgccaccccagcacggccgcgccgaagtgcggcccggcaacggcagcacgctgaattgcgtgcctttcgcgcgcgacaattccagtgtgaagattttcggcgatgcggtgacctgttgggaccaggctggcggccactatgcccgcaccgaggcacccaccctgggctcggtgatggtgctgcacaattatgccggtcccaagcatggccatctggcggtggtgcggacattggtgaacagccgcgagatccgcgtcgatcacgccaactggctgaatgatggcgccgtttatatcaacgatccggttgtcgatgtcagccagggcaatgactggtcacaggtccgcgtctggaacattcccaacaatgcctggggcagtcgcgtctatgccgtgcagggcttcatcg

SEQ ID NO: 71689 - DNA, 283 bp, Arabidopsis thaliana landsberg
ctatatcttgattaactatgttgcgccaaacgaactatggatacaaggtaataaatataaaaaacttttctttttatgattctgaaccccgagagttatatgttttaatgcctattcgtttacccataatcggtattgggatatatccagattctgtgctctcattaacaagtgacagggtcggatccattttatataattattcctatggctaggtttcaggaaaaaaaccagccctacagtgaattgtcatcagaagactttggactgtgttttgtgagaa

SEQ ID NO: 71690 - DNA, 479 bp, Arabidopsis thaliana landsberg
tagatagtatattattgaggtagtggcaattaacccaaaaaagttgttgagggagtgggacaaaagatcaggggtgtgtctctaccactctctacaataattgattacatttactatatagtatacagtgtattgttgaatgttggtctttagtttaggagacgataatggtaaaatgttgctgacactctgtttcggttagagggttagtttatttgatcaagctgaagcgtgggactacaacggcctgagaatttgaaggctatcagcattaaaaagattcgggccattcattattgaattttttgaaggaaaaattattcaggatcatagtcagttttctaagatatactatacgactaagcatatccggccctctattgaaaacccggtcttcggacttgggtcacgttttgtttcctatagataccttctttattaccttcaactaaaaaatgagatggacatcaaattttgat

SEQ ID NO: 71691 - DNA, 239 bp, Arabidopsis thaliana landsberg
aatatgtgtaccctataacaatcccgagctatatttttctacccccccggagggaaaggtgggtcctgttagggccttcacagggcgaggagggactctaacccagaacaccagaacattataacacttgcctctatgaactctgaattgcacggtgaaccagtttaaaattggaactcaagctaggaccacccaccatcatggatcgctttcttctaaatctccaaattctaatgtat

SEQ ID NO: 71692 - DNA, 490 bp, Arabidopsis thaliana landsberg
tagaacgtctaaagctacattcttaataatcatccatatttgatttgatcaatcataaaattcttcggtttacacaatttgcatgtaatttaacaacgggatgtgtctacaagtaattaaaaatgataaaacacacaagaaagaattgacactttttatttagaaaaaaaacgagtatgcatgcttttatttcgttgtttggttatctatttaactataacaaagtcgctaactgctacactagataactcggaaacattgagagaaatggaaacgtgggtttgttccaaagagatagggaacataacttcaataattattttgcaactcatcaacctactacctcttgcgaaaaataagaaaaagaagaatgacttttagtcccgagaataatgtactacactaatacctcatcaacgtcgaacacggcataactttttatgggcccttatattaggcccattaagataaatagaatgaggttaaaaat

SEQ ID NO: 71693 - DNA, 506 bp, Arabidopsis thaliana landsberg
cggcaaaagcatattttgagtttgatgcttaaaaaaaaagctccacttttcattcttgtctgaatcctcctttgttcggggatcggggaacgctcttgccgcaggatcccatgttgcggcgcactaagttcttccagtgtctcctgtctcagggtctcttactctatgaccttcctcttaaaggtcgcactcttgagtgccctttgctcccgtgcgccaattgccttagcgagcagcgaggcagttgcaaagtcaatctcgcccatcaaaacaaagtctgaatccaagccccttcactcccaacactctccctgttatcgatactctcggcgttataaaaccatcaaggtctacttggttcggtcatcggaacatagaagtatagagggttcataactcctgagaaccctctttgatcttgaaatcggtatcttaactatccctgccatagcaacgggttggttggttttccatgtcatatcctcgcgtatatttaaggcgcatta

SEQ ID NO: 71694 - DNA, 558 bp, Arabidopsis thaliana landsberg
actccacgccatcaatgttggcattgaccatgtgcgccacggctattgccgccacctttcgcccacaccgatcaccttgatcaccgcattcggtgcgattttttcaaccagctcgtacatttcccgtcctccaatctattgctgttattggtttgtgccgctttccgcccggaacctcccggacggcgttggcgaccgtttcgtgccgccgatgcgcctcctgcgcgacctgttccatgcatggccggcccaagcgggcgccagccatgccatcccaactagaaattgcgactccaccagctgcgggccttgcccacccagccgccgctcaccgaactcatcacgccggcgccgcgcatgccgcccacgctggcgccatgcagcagcaggccgacgccggtcgcgtacagctggctggtgatcacgtcacccatcccgaccacgtgctgcggcaggcccaggcgcaccagcttgtgaaacacttcctcgggcagttcctgcgcgccttccatgcgcgcggtaccgtcggtgagcacgatgccggccgcgatcaggttt

SEQ ID NO: 71695 - DNA, 293 bp, Arabidopsis thaliana landsberg
  unsure (1)..(293): unsure at all n locations
tgctggtctctaaggtgcgatttcacgattgtttttcttattctttgnctagttgcggataatatgggctatgtgttagtggaggaatgtttaattgttgctctgaatacattatggttatttttctccttaagagctggtggatagtggtagaattttgggacgtagcctttttctaatcacgttatatgtttgtattacaagatatgggtttcttgatgatcgtggttgttttatcgcaggttttctattatttgggcgagctaaatgattcgctgtcttacgccctagga

SEQ ID NO: 71696 - DNA, 244 bp, Arabidopsis thaliana landsberg
tagggatgtccaataacgaagaagcgttcgttgaatttaaaatcccctcgaaagaaatcagagaatggtttatcgatccatttatttggttatccacttgacatacgaaggattgaaatcatcttcccttccgaatgtcattacttcatgagaattggaatgggaatatggttggtcaagtacataaccaatctttttcattaacattcaataacaatcatcaacaacatcaacatcattaaca

SEQ ID NO: 71697 - DNA, 513 bp, Arabidopsis thaliana landsberg
ctggttcgatgttgttctcctttgtatatttgcgtccacgataagcatgttgaagtgattgtgcttttatctcttcgttgaatttacctaccaaaattctaaactggttttcagaaattcccaagtgccgcacagccatcagccctttcttaccggttgacggttcaaatccgtcttcaaccatcgcgtgggcctgacaccttgcgaacttcattgccgaaaccgattttgaatcaaacaaaaacggagcgctttcaggaacatcaacttcatcatttttgttccattttaccaacccgaattcatcaagctttcttaagtacttgtaggtttcactctttgatagccgcaaggaacgttgtgcctcgtttaaatccattttttcgatcaccaaattccagtataggtgaaaggctctttgttctttagccaaataattatcaacgtccccacgtaacgccttaaccttaattccgccgacggtatccttttttattaagtctgccgggatct

SEQ ID NO: 71698 - DNA, 571 bp, Arabidopsis thaliana landsberg
cattttttgttttaggttgcatcaagatttagatacccgtcatttagtaccattcggtttcagttttcaataaagaaacttgacattaaaacaaattctagcatctagcaagacgaaaggttcacagaaataaattataaagagatctatgaggtgggattagtaactcgaaccatgagattcctacacacaaattctgtatagtaagatcttcgccacaatgttaaggttcatgggataattagattacctttgaactgcttttggctatccaataagatcttttccacaatgtcaaggttcacgcccctaccatgcacctaccaaaagaaaaacattatctggacaggcagagcagttttgaacttaggataccctaacaagaatgggaaatccaatatacatcacttgtttgaatgtagtcactgactatttacatattcacaaatattaccaatataattctttgaaatcaatttgcacaactttttgaaagacccgaatcttatttatccttagacaatagcatttttactgataaaaaacaatgccttgcccatgggaaacaatt

SEQ ID NO: 71699 - DNA, 434 bp, Arabidopsis thaliana landsberg
ttctcttcttcttggagacaggttcttggtgaagcttaccaggttctaagtgatcctgttcatcgtgaagcgtatgatcggactggaaaattctcagctcccaagtaattttttcttcttttttttctccttttttattatgtgtttctctcttctttatttgacaatgtttaatggtgtttttgatcaattagagaaacaatggttgatccaacggctgttttcgctcttcttttcggaagtgaactattcgaggattatatcggtcacttggctgttgcatcaatggctttcactcaaatggcttctgaaatcgaaaactctgatcagtttcaagacaaactagtggcttatcaaaaaccatatgttataactaatataacccatttcttgatctgatcttaccataaagaaagatctttgtttctttttgc

SEQ ID NO: 71700 - DNA, 418 bp, Arabidopsis thaliana landsberg
agacgcactcttctatgctgtagctggcgcagatttgtgcctaatatacgacccggtgtcttatcttctaagccggaacaaactacccctggcattgactcgggcatagcagagcctccgagatgtgactctcggacttgccgatttgcgcgagcttgcagttgagtatggtggctagctcttgaacgagccccgttaggtgcctatcggattcttggttcaccattatacacagatctgcaccccggaaatgtagcgcgggccccaccatatgctcatggcgtcgaacactatctctctacatagcagcctttcagccacgagattcgtcgaaaagatggcaccccaacgcacccaggactgtcttgtcgagtgactgaacccgaagatatctgctctggggatgctggtcatacca

SEQ ID NO: 71701 - DNA, 158 bp, Arabidopsis thaliana landsberg
  unsure (1)..(158): unsure at all n locations
gctttcttgcacttctcttcccctgcctccatctccaccggggaagtaaactccaaggttacaagctcggcggnaaattgtcctaaccggaaaaacgacctaactcggagttatatccacagaacaccgtcgtatttgattttcggtctctgtatccg

SEQ ID NO: 71702 - DNA, 353 bp, Arabidopsis thaliana landsberg
ggttggatccaagtacccccccccccccaatggcggagaaaccggttctatggcggatgaagcggctgaacaagaattgggcggagcggctgaagcggatggaatgacgccgaagaagagtggttcgccaagggatagtgtggagcacgacaaagctccatctattattgggagagagttctggtctcaattagaccggatgccaacctatataacaacgatgcgcattgcacgattagtggtatgtgcctatgtggatctggaggaagacaatccttgattatatagggcaactaagactacatgccgatgctcttgccactcccctaatgcttggtttcagaagtgatcta

SEQ ID NO: 71703 - DNA, 519 bp, Arabidopsis thaliana landsberg
gtgatctttttgctttgactctaaagactaaagttatactttagattagacttacgaatatattccaaaaatattccaccttaccattaaaagaaggtggcatcttttgagaaaatgtgatccactgatgatgcaatgtgtctattttaaactgaatcaaacagaaaagcaaagtatttaactatataaattttgtttgattaactcggatagaaatccagtgattccgaacttaagccaaactcaatttaacttcgaattgtttctcatgagagcatctttgtagtttttaatctatataattgcgatcgatttcaatgatacaaattagttctaattcattttaatcatatgaattcatcatattaggttaaattttgatgtgtccacattgaacacgtttagcatacagtatttgtcttggttgttccgcattatttcaccacagttttaaatatatatatatataaatatttggtatgtatttgttttaaattcgaaatgatgttgagactataa

SEQ ID NO: 71704 - DNA, 595 bp, Arabidopsis thaliana landsberg
  unsure (1)..(595): unsure at all n locations
nnnnnnnnnnnnnnnnnnnnnnnnnnnnnnnnnnnnnnnnnnnnnnnnnnnnnnnnnnnnnnnnnnnnnnnnnnnnnnnnnnnnnnnnnnnnnnnnnnntcaaacatcattggaatgggagccatagggattgtttacaaagcagaagtcatgagacggccattactcactgtagctgtgaaaaaactgtggagatcaccatcaccacaaaatgatatcgaagatcatcatcaagaagaagatgaagaggacgacatactcagagaagtgaacctacttggtggtctacgacatagaaacattgtgaagattctaggttacgttcacaacgagagagaagtgatgatggtatacgagtacatgcccaatggaaacnnnnnnnnnnnnnnnnnnnnnnnnnnngagaaattcttactaagagattggctctcacgatacaatgtcgccgtcggagtcgttcaaggtctcaattacttgcacaacgattgctatcctccgatcattcacagagacatcaagtcttataacatcctcctcgattcaaaacctgaagcgaggatagcaaaatttcggattggcgaagatgatgctttat

SEQ ID NO: 71705 - DNA, 533 bp, Arabidopsis thaliana landsberg
  unsure (1)..(533): unsure at all n locations
annnnnnnnnnnnnnnnnnnnnnnnnnnnnnnnnnnnnnnnnnnnnnnnnnnnnnnnnnnnnnnnnnnnnnnnnnnnnnnnnnnnnnnnnnnnnnnnnnnnnnnnnnnnnnnnnnnnnnnnnnnnnnnnnnnnnnnnnnnnnnnnnnnnnnnnnnnnnnnnnnnnnnnnnnnnnnnnnnnnnnnnnnnnnnnnnnnnnnnnnnnnnnnnnnnnnnnnnnnnnnnnnnnnnnnnnnnnnnnnnnnnnnnnnnnnnnnnnnnnnnnnnnnnnnnnnnnnnnnnnnnnnnnnnnnnnnnnnnnnnnnnnnnnnnnnnnnnnnnnnnnnnnnnnnnnnnnnnnnnnnnnnnnnnnnnnnnnnnnnnnnnnnnnnnnnnnnnnnnnnnnnnnnnnnnnnnnnnnnnnnnnnnnnnnnnnnnnnnnnnnnnnnnnnnnnnnnnnnnnnnnaaaatattataaataaaaaattttgtaactttttttggagtacgaagtaccttagtcaataaaaaaaaaaaaaaaatgtatttcccaaa

SEQ ID NO: 71706 - DNA, 513 bp, Arabidopsis thaliana landsberg
  unsure (1)..(513): unsure at all n locations
gatgatactctgactcattgcatttttttttttttnggnctcttcctgtctacaaaaattgataatatatctgaagggagaaaataaatgttgagtgggagatctttacaaaactaattttaaatctatcaattttttttaaaaaatattctttgattaaaaaataaaataataataagtctatcttcgatctacttttttttttttttttttttttccgacctacttatatatggggattttatttgttttgggcaaatgaatccaacagttctctttttgaattctcttcctctatagcccctccttgttctatatttagatatataaattgggaaatcctggaattaaagaacaattaaatcaaacttctaaaaactaatctcggagagttcataaagttgatctccggttagggctggtttcttaattcatgttctttgcaaaatatttttggggttaatttaatagcctatatatatataattcattttgttggggtggattatttgg

SEQ ID NO: 71707 - DNA, 429 bp, Arabidopsis thaliana landsberg
tgaggacatcagcttaagtgctggcaaatctgagcctttgtccaagaggaagagggttgctaaggaccacagtgagcaatgagatgtcactggtgatgacattaggccttgtaaacggcagttcttctaacttcgaactgatctcaatccaagaagaaatgcagaaattgattggaattctcagtattttgaatcattctgttgggatgatgtacgtccttaatctaactgtataccgtggagcttacagcttaatggattgtcggtcattctgtatgaaccttgagactgctttcaagcaagtttaatgattgaacgcttcccttttcaagggaatagtttagttcttcatattcttcttaggatgctatgatgagtacaacaaacaggttcaattagatgtgagaccctattatccaaaacatgacc

SEQ ID NO: 71708 - DNA, 532 bp, Arabidopsis thaliana landsberg
ccgcgtaaagacggtaacaatggttggattaataatcgtggtgaaattagattcgatggtgtcattgttgttgttttcatctgttcctgtattaggaccggaaacgtacgcattgaatacgtgagctccgcctgcaagagtagcagaaggtaaagcaatgacctcgctttggtattggtttaatgaacccgtccatgcataagtttgactaaaatccccgtcataaccataatgaacggttgcacttgtcagcgcagtactgccattgtttaccaatgtaaacgacggagaaaccgaagctgaacagatcgttcccgaagctcctgaaatagtagataatgcagcatctaatgcaacccccggaccagccggatcaacaccgtcaatggttaagctgcctgtatttgacgggtccagccaaaatttaagttgagatgcatttgtaccaccccctaaccaggaagtatatagttttccgtattgatcagacaaatctgatcctccgcaaatagaagcacctccgtgcaattga

SEQ ID NO: 71709 - DNA, 410 bp, Arabidopsis thaliana landsberg
tgcttgtttctatttaaacaaaaaaaaaatccacattctgcctaaagatatatgatatgagaggacatcattatttgaaagagaacattcgtatgtaaagttgttaacggacattaacttaaattagaaatgttcacggaaacaatggttagaaactaaacaaaataaaaatatcctctaacctttcctttatctcgaactaatgtcttttttttggcagcaccttggacttgaactaatgtttcttgagccgaaagtaaagcttcctatcattgggccaaactcgtgattcttgtgttaatggctttctgacttatgcatttaatatggacgaagcccaacaccaacatagagataaacaatgtcaatatgatgtaactgtccacaaatgttttccaaattttatttgc

SEQ ID NO: 71710 - DNA, 228 bp, Arabidopsis thaliana landsberg
gcatgaggatattggtgcgacatacaggcagaaggggactcggaacgggttgaagaccagactcacacttgtgacccatagcgaagactgcaatatccagggtaggcgacaaatattgtgaaggttcactacttgtgcatatagatcagctaccgaagcacctactgctgatgaacatcactgtgaaaaatatacactaaacatgtgtggagttgaagtttgaccaaa

SEQ ID NO: 71711 - DNA, 537 bp, Arabidopsis thaliana landsberg
ttgtggctggccgtgatactggccggtttcgcctggtggctggtctgcctgggctggttgcgcgtctacacgttcgccgcctcgccatcatccgaacacacgcggctcaagctgggcgtcggcctgctggtgctggtgccggcctgggttgccgcggcgacgttgcacggcagcgcgcaaggtccgtggtggacactgctggcactgtgcatcgtgtggtccgccgacatcggtgcgttcttcagcggacgcgccttcggcaagcgcaagctggcaccgcacatcagccccggcaaaacccgcgccggcgcctggggcgcgctggcagccggcatcatcgtggcggccatcggcggctggttgctgggcctgcgtggcgcggcgctggcggaactggcaattctgggcgccgtcacggtgggcgcgtccatcgtcggcgacctgctggaaagcctgatgaaacgccacgccgagatcaaggattcgggctcgctcttcccggggcacggcggcttgctcgatcgcctggacagcgtg

SEQ ID NO: 71712 - DNA, 306 bp, Arabidopsis thaliana landsberg
ctgtctatccaacccaccaagaacgcttgcaaatcagcgggaaagaagaccctgtgagcttgacttgtccgactttgtgaaatgactgaagggtagatagtgggagcttcgcgcaaggaaataccactcttttacgtatttactactccggaatcggagcgggtacaaccctgtttggtccaagctcgttcggggtcgaccggcggagactgtaggtgggagtggctgggcggacatctgtaaagatacgcagtgtctaaatggcttaacaaacgaatttcggttaacaaaaggtaaagctcgttg

SEQ ID NO: 71713 - DNA, 467 bp, Arabidopsis thaliana landsberg
taatccctctttaacatttaattctaatccagctggaatggttagatgggctggtttattttataaccattatttcctatagcatcgtcatactctgcaatattagttaaatcccatggagcatttcgctcgggatcaaatctaaaagcgcaaacggcttcagtaattcaatgattttgaaattccattttatggaactgccttctatcttaaaattatggaaatataaattaagagcttagagaatattgtttagacgcttaacaaacaagcaattctctcttttacttaaatcatacgacacgttgctcaatttgttatctaatccaaaatattacacattatctttatcaataattcttgataaagataataagacttgactttattaaaacatcgatttggggatgaaataatccatctgttttctgaaatactgggtacttcaccatcctagaagttttcta

SEQ ID NO: 71714 - DNA, 608 bp, Arabidopsis thaliana landsberg
tttttttctattgaaatcatgtttaccttggccatgtgtagtagtcctatcattgaatttgggatttgaatgaggttgtttatttaatatacttgttatttaatttatgggattgtttttacactatcaataagaggacatctaaacatgggtgctgccaacttactaatacgttttacatgtctatacacaaaagtgtaaatattcgtttggtaaatgagatgaataattggcaaaaataagcgagaaataacattttttacagctcctcacacaaataaaaatagtgtctttcccaacagaatagccagccttcgctatgtacctagaggcgatttaggaagataaggatgaattttattttttactttatctttaattcccctaattgtaatgataaaatggatcacttggtacgaaatatttgtatccaaccacatcttattatctatgtaaacaatattctttagtattgtttgagttaatctaataaaagtgtcgaaagaaaaaacaagatctgtaatcagatttagctatttaaaattgggataatctccattattatacggtgaatttgttgagtgttaaaattaagttgacataaccaa

SEQ ID NO: 71715 - DNA, 536 bp, Arabidopsis thaliana landsberg
  unsure (1)..(536): unsure at all n locations
ccggtctgggtagcgacgtcgacgcaagcgaggatgcgctcgttctcggcgcgggtcggaatccacggcagccgtgccaggcgctccggggtcttcacgaactgcacggcgttcccggcgggcagcttccgtcgactcaccgcgtacttcacgagcgctttcgcgctgagcagcttgcggcggcgcgtgttcgtcttcatcccctgcttctcgagccaaacctggtacgcctcgaggtcgcgcggctgcaggcggtagaaatcgcgcttcttcgcgcggaggaactcctcgaacaagtcgaggtctcccttgtaggacgaaatcgtcgacgcgctcttgcccgtgccgacgagaaatcccacgtagcctttcacgagcagcgcgacgctcgggcgcgagcgcttcgccgccggcgtgtcggtcgaccgggcgcgttctttcgagtccgggttcatgggcatctcctaccgttctaatttgacaagatttttccgtttcaagcanaacatacgtacctaaaggagacccaaatgacc

SEQ ID NO: 71716 - DNA, 618 bp, Arabidopsis thaliana landsberg
cgtaccatatctttttttattaaaaagtcacatttattatgggatcaataatttactctccatggattatttcatactataatttacacgtacattatcataaagccaagataaaattaaaaacgccttttactacgtgttagtctatataatatagattaagtctgaaacccaaatcacaaacttcactcaaaacctaattaacttagagagaaagagagagagagaagggttgcaaaatgggttcttcgtaccaagaatctccaccgttgcttcctaagatcttaaggttacgatcaaagaatcaacactcattttcccatctgaagaaaccagcgagagaaaatccatgttcttatccaacgtcgaccaaattctcaactttgacgttcaaacagttcatttcttccgacctaacaaggagtttccaccggagatggtctcggagaagctgagaaaggcgttggtgaaactcatggacgcttatgagttcttggccgggagactccgcgtggatcctaactctggacggcttgatgttgactgtaacggagctggagctggctttgtgacggcggcgagtgactacacgttggaggaaactggagatttggttta

SEQ ID NO: 71717 - DNA, 588 bp, Arabidopsis thaliana landsberg
gtagatggttagctgaatccgacaagcatgctgctgattcaaaagaatccagttcatgatactttatccccatgtttttcgaaataacattgataaattgtcactttaaagaagattgaacaactcttttggtaggaaaccataaagccataaaatcacagaatacaaagtagaacgagattgtattctttattcaaaaagtggaaggaaaataaagaaatcatcatttcttcttgaagaggaagtgtgcaatcatccactcgtctccattgttgtatgcgaaaagctcagcaagcgcgatgaagaaggttctccagtaaaccgtccacttcactgcttcttctttcccataagtcactttcattatctcttttactgcaactatctccttatccattcttttcagccactcttcactgcaaaatgttgtattataaaagtaacaaacattacaagatcattatcatcttcacttgctttttacaacatattttttcaggtttttaccttggctttgcataatgcgtcccgttaacgagcccatgaaccataatcgaaaccattttcttgaacaaaacaaccaacata

SEQ ID NO: 71718 - DNA, 276 bp, Arabidopsis thaliana landsberg
acaaagtattataattaaatagtatagtatgatgaaactactttttctcttatatgtaatatattttgttgtttctttaacgacttatacttttgtcttcttcgtctaaataattgacaatgaaatttaaaccttttcatcactatataaaattatgacataagtacgccatcgaacatttaaacccaaagaaaaaaaccgaggactacttgtagggagtcaatatcaatatatcatggttctagaacctagggttaaaagtaatcttttacttaa

SEQ ID NO: 71719 - DNA, 3236 bp, Arabidopsis thaliana landsberg
tgttttgatgttttgctaacgtaaagcggggatctgttcatgtcgttgacaaagttctgatccaatagaacatcgtcttcgccattagcagaagtggctgtgaaacgagcatgtagagcgcctttgagatcatactggcgagtaacttttctgctaaaactcagattctccatgaccatcaggtcgtgccgtatctctttcccgccaccctttggctgccttacagttacctgaaaataggaatcaaagatccttagaactaagaccaatccattttataacaatgattaggtaaaatgctcatggtcatatgatcaaaagatgattctaaatacctgatggatcccaagaactttggcaagacaagtctggttgcctaaatcatacgagtccttcatgtatttgaaatactccgtagcaaaagtcacaaatgattcgtactctgtcttcttgatctcttttacgatgaacctatcatccaaagtcttagcgaacacggatttgctcttcccacctttggcatcccatggcttacagcggcttagtgaagctatatagtcaagctctgatgaacaacagcgttttctgaggtcacggaaatcatctgcatacagggacacgatagagtacttgggttttccaactgatttgactgacccaaaagtaacgaggacctctggagggggtagtgtttccaaccgatttgtactctcactcgagaaacgggaaacgtctcggtcagtttgcttagaatcctgattattatctaagaacccttgaagagatccatgtatacaccttgaaagaggctttttgctctcttcattgttcagatgggcaagtgcacaagcaattaggctggacagctcgtcttcatagtctgacacaataaaatcatcatccctcaacgagatgcgcagacgagaactttcctcggtgattatctggttcaccgtctgtaggttttcttgggtaaagttgttaacatactcgaatttcaacaagtattccttctcaatatcaacaatccgcttcgagcgtagttcctcaaatggcagccaaaaccattcatcccaacctaagatgtgtggcccattagaggtagaaacctcatcatccaaagactctccagtaactggaattgatttgtccgcttcttgtccattggttgaatgtacattaacagccaaatgagtgtcaaaatgattgttgatgggagaggttgtatcgggactggagctgcacaaagtttgcgattcattatcttcaggcacataggattctgccatctgatcattgtccccaacagacgctccagcgattggtatatccttgtgttcaacaagtggagtgtctatgcctccattgctaccagaatcagaaactttgttatcattttcatatctggtcattccagcctcggaaacagtcttcaaaccttgttcatatatcttcgtctcatcacttgaaggtagcaaacgatcagataaaaccagcgactgcaaccggtagttccagatgagagcttgaagcagaagttcccacctcatgcggtttaagcggagcagtctgtgcgaaacatcatctatggttttagccttgtccaacgagttcttgatgttttcctatttgtaggcattaaatattaataagcctgtctctaacacttaataaagatagttgtataccatatggaactgtcacaaagctaacctcaaatatgcaacgctcgtgcttcagcaactcctcaatgttagaaaggagtttgcgtgcacgctgatatctgagatctgaatttgtgaattgtgatcttagtctcttaagaaaaccagcagcgtcctcgaacaaggagatccctttagtgaatacctgaacaagaaaatataaacaatcagcacaaaaattgatcatcttgcgtattcattttgcaatttttttgccagcccttgacccaagcaagacatactatttggcagaaaatgtaaactgaaaagaaagctgatggtgggcgacaattgtttctagcatcatgtatgagaaaatacagctacaatactgtttactcagaatagaaacttactgtttgaaattctttctcaagccaacctgcttttattaaaatgctagattccagcttcatgggtggtagagacactgtgtaggatgcgacttgggagtaactgagcatagcaaccatggagcctaatctgcagttgtgtacaatttaagatatatgattaaagctaatgagtcactaagttcccaaaattttcatgaattttacgttgtagcactagaaccaagatgggacattaaaaaaaaactacgcctaaccactattctcttagaataagtgaatgtcactatctcgaaaggccatattatagagttactaaaactatagttaattacttagttagaacatatgaagcaatatgcagagcaaaatagattaaaaaaaaaaaaaaatacccaaagaagtgaaggaagtcactgtcgaaagagtgcccacagctagacgatctgttcagaaaagtttgctgagaaaagctgagctccaaaaactttccaaatgacaagctacgagcagcagttgatatcagcactcgttttgtggatttccgggacgcattctttgttttacactttccacaacgactccacatccagatttttccttttgcctcaccagccaaaccttttgctactggaattcgcttgatttggattgttagttgcttattttgatgagcataatagtaaagatgtgcttctggaaattcaacacacgtttggcatagatttctctgcatcatgaacagttccataaacaaatttgagccacaaacacatatgaaccttggcaaatgagcaaaacagcattttatttaaaatttacaagtgcaccggagtcgaacctgattaaacatatcgcgcagttatttttccaagggaacatcaaagtgcttgtaaaacataatgtgtgaaaaatgcctctgttcacacattatccccatcagggcgttcctatatgacaatggatccaatatacacagagagtcagtagtgctccagagatcccatggggttttgaacctgaggattcagtaataagcacttttgttgatggaaagccaagaatcccgtatgagcggctggtgatcataggtcagaaatacagcgtcttcctcagactcaggttagaacaaaaatgctggaggtcgattcatctgttc

SEQ ID NO: 71720 - DNA, 337 bp, Arabidopsis thaliana landsberg
tgccatagccagtgtaaccaccatagtacgcattagggtcttgagttggtggttgagctgcataaccatagccgccctgtggctgtggagggtatccatagtatccaccaccgttccattgcgcttgatcagactgtgacgacaaagttttaagttacgattttgctcataatatcactaataagattgaaacgtatagatttgagaaattgtgggagaacaggtaacaagctaacctgcttgtttggactacgtccccacgaaagacggatgctttgtccacctaattgtgttccattcagcaccgaaagtgcatgctctgcagacgccctgaagc

SEQ ID NO: 71721 - DNA, 510 bp, Arabidopsis thaliana landsberg
  unsure (1)..(510): unsure at all n locations
gccgccctgctccgggaggtcatacacctgcttcttttactttgtgccgaacagctgcttcttgaaccagtccagctgccgctgcatgacctgtagctgctcacgcaacagggcattctcctcggccagtaccgagtaggaaggggcgttggaataggacgcggaagccattgaattcatggccgatattataccggaacacaacccgctacgtgccccgaaaacgcttgaactgacggtacttttgcacctcgataccgtcaatcagcaactggagatcagtcaggtttaaggggcgctgtcccgaagaagacggccgtacccggaactgcccctgctccagtcgcttggcccacaggcagtagcccgtgggcgtgaaatacaacatcttcatttgggtcttgcgacggttaacgaagacaaaatactgcccgctgagcggatcttgcttgagttgattgcggaccagagcgctcagcccncngaaggatttgcgcatatccgtgggct

SEQ ID NO: 71722 - DNA, 1050 bp, Arabidopsis thaliana landsberg
  unsure (1)..(1050): unsure at all n locations
gtatctcttcatcatcactttgatctgaatgcattacataggacttctcaattccatcttctgcttggatgcaatgttttgtctttctttcatgttctatctcttcatcatcactctgatctgaatgcccatcttctgattcgatggannnnnnnnnnnnnnnnnnnnnnnnnnnctcttcatcatcactttgttctgaatgcaatacagaggacttatcaagtccatcttctgattcaatagaaagttttgcctttcgtccatgtccactctctgcatcatcactttgctctgaatgcagtacaaaggacatatcaactgcctcttctgctctattggaaagttccaccttgcgttccttttctgtctcttcttttctgtcagcctatacatatgattttacatcaatcaaaaccagatacttttttctacgtatccctacatgctgagtaattgaaaacacttgatactaaaaacaaacgtgcagggattggtttgcaatacctgctttgactgtcccaactgttttctggcaattcttcctctgagattacttttacaaagaagagaaactcttttcagtttcttgtagtcagatatagcactgtaaccacgccaatacgcctgcaagttgattagagttgaacgtcatttatagttcttgagatagaatgattccatgagaacttgttaagtacgaaagggtagtaatgagaatagaacctgaatcacagttgctgccctagtggttaatttataacggaattcatgacgtgcagccattgtgcggactccactttgcaaggtgagtgcggaagatttggtcttcccgtaatctttctttgcaatctgtctacgtaagtttttctggattttgatggcagcttcctcccttctcatttccttagatatctttcgtgcaatatttcctaaaatatgaaaaagagactttatcagcattcctaatttcctctgcatatcaatgaaaccataacgccattaaaaaaaaaaaaatttaaggccctcacctctccaattagcttgtatatt

SEQ ID NO: 71723 - DNA, 311 bp, Arabidopsis thaliana landsberg
aacataatatttaaaatcctatctccacacacaacactgaattttacataacataaatccaacacaaacgaatttatatttaaaaaaataataccccccctcacaaatgaaaatatattaaccacaacaactaatatagtaaaattaatatccttttccatctaataaataaacactataccaactctatgtaataaaaactaatcaaattcaaaaaagaaacacaatatgtaatgctaaagctctacattaagaaaaatcttatcaaccttccttacaaaaaagaaaaacttactccttatttaaaaaac

SEQ ID NO: 71724 - DNA, 317 bp, Arabidopsis thaliana landsberg
gtgacatctacacctatggtccaactttccgtgcagaaaactccaacacagcccgccttttggccgaattttggatgattgagcccgaaatggccttttatgagctggaagacaacatggacctggcagaagccttcatcaaatccgttataggttacgtactggaaaacaaccgcgacgacctcgacttcctggctaaccgcctcgtggaagaagataaacaaaaaccccaacaggaacgcagcgaaatgggcctcatagaaaaactggagtttgtgctgcacaacgaatttgtgcgcatcacctacacagaagcc

SEQ ID NO: 71725 - DNA, 564 bp, Arabidopsis thaliana landsberg
cgatgaccgtaacgcgtacgtaaagttgaagtttgttcaaagttaggcaaacgtattgtttgtcacatacaagtaggaaaccatcacaatcactcatcggattaatttgtcatctaatgtaacactcgcagtattatatgtttcttgttaatatttcataaatgtactaaacaaatgtatatacaaaagtgttatgtgcacttacaacaaaagtgttaacaagtttcattgctttgtcagtttcgaaatttaaatctgatagattgcatgttgttgaaaataccctactatgatacaaagaaaaagattatcctcagtttacgttgcatgaaccattattttgaataattaactgaatcgagattctctacttatgaatggggtattaacaacttgagtttatagaatagatcaagttcatagaatcttttcacattttataagttatagactagtatatgtcaagagatatttttttcacatcttccgatcgaagagtctcgatgcataaccaatctctattacgcgggaaaacacgacttaatagaatcgaattccggtgag

SEQ ID NO: 71726 - DNA, 589 bp, Arabidopsis thaliana landsberg
gaaatttacttcttaagcaatatatcaattatctgccggcaaaaataccttcacgtttttttgtacaatagttgatagcgtcaattatgtcatgctcatcacaatctttcaacaaataattctttatcccgatattgataatttttcttatttcttctacagatttttcatgagagatcaccaggatattcgtttccggatattcttttttaattctgtggatttcagtcaatgaaaaacagtcgtcacagcaatgatcaacaattaaaacatcaggatggtgctgcttcatcgctttgcgcaaaccaagggcatccgatacttctgtaatgtacctgaaaccgggggtttcctgtataagtgtgcgtaatcccttccttacaataaaggatgtatcggcaattattatacttgtttgctgaggcatagccaatttagattaattctaaacaacaaaagtattcctgctggctaatcgttacaataccccaatattggtattttcattttacatcattaccgccttggaaactcgtctacaacaagccaaattggtgcaatgctcgcttactgtgtggtattattagca

SEQ ID NO: 71727 - DNA, 525 bp, Arabidopsis thaliana landsberg
aaggatgaatatgtttgcaaagataacattttccaatgaacagatgggcatatttacgtagggcggattactcaccattgatgcagagacgaagaaagcactcaccatccaaaacgtttgccaaaaatccaaggagttccctgcaaaaattaggaggaatcaattagactaaaaagagaacaaacattttgacagcagacatcataagagaatgtgattagggaaggcctatcagcatcaaaagcaacaaaatcaaaacaaacatttaacagctcttattgaacagcaagtcattaagaaaatctaaacacatatatgaaccctagatatttatagcttctaccaatatttatatctatacaactagatctaccaattcaagagcacatatatgaacccttacatctagccatacatgagcgacaatcaattcgagctaaccaatatctaccaattcaagagcacatatatgaacccttacatctagccaaaatcaattcgagtgggaccaagagctagagccac

SEQ ID NO: 71728 - DNA, 706 bp, Arabidopsis thaliana landsberg
ctgcccatgcagattacgcgcatacgagcacgttgttgaaagagctcatgcctccttacataatccttgttcactgtgattctaacgagacgatgaggctcaaacagaagctcttaacagagtttcctgatggaaacacaaagatcatgaccccgaagaactgtgagtcattggaaatgtattttaattctgagaaattggcgaacaccattgggagattggcggaaaagacacctgatagttggcgatacagtaagcgggattctggtgaagaaagggttcacttatcagataatggcacctgacgaactccatgttttctcacagctatcaacagcaaatgtaactcagcgaattacaatcccgtttgtaggagctgttggtgtgataaaacatcgcctggagaagattttcgagagcgtggaattttcaacagatgaggaatcggggcttccagcactgaaagttcatgaaagagtaacggtgaaacaagagtcagagaagcacatctcacttcagtggtcatcatatccaataagtgacatggtttcagactccattgtaactctgattctcaacatcagccgagaagtccccaagatcgttatggaagaagatgatgctgcgaaatccgaggaagagaacgggaagaaagttgagaaagtgatatacgcactttttgtttcgctttttggggatgtgaaac

SEQ ID NO: 71729 - DNA, 575 bp, Arabidopsis thaliana landsberg
  unsure (1)..(575): unsure at all n locations
tgccggccaccgttgccgtggcattgctcgcattcgtttgtgcccatttcctgtatctcgcgcaaacctggccgggtgagtcgtgccaaccacaaaagtgtcgccatacgcatggctcgcgatttccagcacggctatccctacgggatgctgatcaccctcggcgcatggtggcaggatcattcctacatggaatcggccacggcaagcctcagggatttcaagtttcatgcccgtcaaaaaacagccatccggcaacgccagatatacgtgctcgtgattggtgaaagcagccgccgcaaccattggcagctgttcggctacccgcgggccaccaaccccgagttgtcccacatggaccatctcgtcccgatcacccacatgatctcggcatggccattgaccgctggagcggtccccgacatgctcacgcgcaaaccggccgcgatgccgatgtccgagatcttccagaagcgtcaatcgtcgaactcatgcgcgagcggngtttgacacgtggtggctctccacgcaagccggatcgggacgctggattccccatcaccattatgctgacg

SEQ ID NO: 71730 - DNA, 586 bp, Arabidopsis thaliana landsberg
ctaatttttaaaacgtaagttagtacttcaatacaaattataagtggtcgcgtacgggacaatacagcggggtgagtatacattagcgactaaattttttaaacagtttttcgacatcaatggcttagtttatatgagctcgagtcatctccaaatcttatcaataaacaatcatattaatcacgtaagtgaacaacgaatcacctaatcaaacaacgaaaaacaaaccgtaaaaactaataagctgtcaaatcatatattttggtaactctatatatttacaaaataaaatttatttataaaacatgaaagtcttatccacctataaaaacccaccatgaggactttcatatgaaatagtgacgctgacagtaagccgatctttagagccgcaaaacgaaatttcgaaattttcatagcaatctgaccactctcaacgagccaatcatataactgacattctctaattaacatcacttaaatacagagccgtgcaaaaaaatgatgtcataggcaaaacaatatggtttaatatatagataaattatatataataaatatagtaaaatatatagtttaatgtttt

SEQ ID NO: 71731 - DNA, 560 bp, Arabidopsis thaliana landsberg
agccagctaatagtaaatgaaaaatattggtcgattggatttcatcccatacttgggatatcttctggcaggtcccaccggtaccaggaagcgcgccggattccatagataggtggcttcccttactcgcgttgtaaggcgggtcggcaataattatgtccacgctctggtctggaatatcttttgcaaactccaaaaaatttccgtgatgaatacgctcggtctctagcgacccgaccttaataggatgcagttttccctcgatggtacgaagtgacaccgatagcgcacccctcttcacttttgatggctgacgggcctgcttgggtaaaacgattgtggctacggttgctgcctttgtcattcggcaatctccgccctgcgcctacttttgaagagcagatttgtcgcttcgatcatcaacgcttgaagagatgcgttttcatcaactacgatgttccggagctgcttcatcgccccccgatgaaagtaaaatgtgaccccctttttccaattcggcttggagccagacccgttcgcagcgttaccggttttaagct

SEQ ID NO: 71732 - DNA, 286 bp, Arabidopsis thaliana landsberg
agaaaacaaggaaactgccatgaatagcacccatgtcatttatgagctggattctctgttaatagagggtgggctgctgtcaatcgccaaagggctttaactcaaattgtgtggccacctacccaagtatggagatgtctcaaaaatgcaaccacacatatatcagcgctctgtgctgggaggggacatgtatatcacacaacctcaaagacttactactaagaactggaggactcttgcattatgctaagctgaagataactgcactctacttacgaacgatagg

SEQ ID NO: 71733 - DNA, 693 bp, Arabidopsis thaliana landsberg
aaaatcatatatgttatcaaaattaaactaaaaaaagttttaaactttaaacgttccgctttggtctttgctactacctagtattttttttttttttcacagactactgtctagttcatattttagaaacttgcgtgtcattaatatcttagagagcatctctattacaaaggataccacttaaaagcttttatgttggacattgaaattgtaactaaagatagaggatcagtgcaaagcatcatgaacttaaggatatactctggatcagataccaacttacatcaaaacattattatttacttttttaaatcaaacatttaacgtacaaaataaatttgtcacaacaagagtcacagatttaacaaagtcgagcaaaaagacaaagtgacaatatcataaattaaagattttccgtaaatgaattgatatttttagctatactgaaattaaacaataatgcatttctgtaatatattttttttacaaaacaaattaaagacattttacaccaaaatattactcttataattcatatttttaatatgtaattctagtagttaaattcaaaatatgggtcattctaataaatttccttttgtttatttgcattacaaagtatcatttcgaccaaaaatttaattttctatcattacttatatagcataaggggaaaaatgccccctcccctat

SEQ ID NO: 71734 - DNA, 403 bp, Arabidopsis thaliana landsberg
  unsure (1)..(403): unsure at all n locations
nacaaaaaactcaccatctttggcaagcgcctcttcagtgctataagataagaagcactatgagccatccattagcactatttaacaaaggcactttgcgacaactttactaagcatagagagacaacggctccaataagacggacagaactgtccccttcacttcttgaccaccacttatcgcctggaccaactaaacccctgtcgctatttgaaacaggctcctttgcataaaatgatcctgcctaccacttgagtagactacctctcagtcccgagatataatcgagttgccatgtgacttttttcgctttccgcgcccgcaacctatgaaaaagacaaggactgatgatgacaatactcaagttccgatctaatagtgggatggcagtgcattatatcg

SEQ ID NO: 71735 - DNA, 558 bp, Arabidopsis thaliana landsberg
  unsure (1)..(558): unsure at all n locations
aaaaaaagaaatgaaaagaagaaaaggcaaaacaaatttgtatgttaaagagagagctcggagaggctcttgtgaacaaggaaagggcaataaagaggtgaaagatggataaaaaaaaaaaacacaaacttcacattcttcttttgcctttttttctgaaatttcgatcacacatttcttatttcactttgttacgaaaggcttgattataaaaaaaaagtcatgaaagtttccttttattcaagtgggtattacatcagtaagcaactaagcataatggcatggcctaatttgtttcttcttactagcccaaacaacatttttggcccaagctttaggtttctttttccgcctatgaaaataaaagattcttcaattacctaaaagctccaaggctaaagagagccaatttagaggttggagttttgaatagttactctcagttcttgtcactgtcgttgatacttacaggacaatgaggacataatcaagcatagagaacagaaccactttctataagaatattacatcntgaaatatgaaaatatttcttacctc

SEQ ID NO: 71736 - DNA, 489 bp, Arabidopsis thaliana landsberg
  unsure (1)..(489): unsure at all n locations
atcctttcgattgtagactaggatatagcaaaacagatctgttttcgtactcccggcgtacccaacctnnnnnnnnnnnnnnnnnnnnnctaggctatttgctcgacaacagtgatagtatctattattattctcgagccttagctacataatgcgtcgtcaagccgcatgggttatatatgctagccattccacaagactatattgtactggggtacatctttgcttgaggaagactgtttcgccaatggctcttgcgtaatgcggatgacacgcttgagtgcgtatactaaaccttattggaactactctgagcatgtgggaagataaacagcatggcgagccttaccgagaatctgctgctgacatgcgcaccctcgagacctagacaagggtatgcatataacnnnnnnnnnnnnnnnnnnnnnntagcatcttgcatcaatctccttcaccatcaagcctagtggttatatatactatcaaaac

SEQ ID NO: 71737 - DNA, 501 bp, Arabidopsis thaliana landsberg
  unsure (1)..(501): unsure at all n locations
acaaagcgtaacgggcctgacccgcgaggagctgttcccggtgcttttcgtgccgcttctgccgggtcaggcgcgggagttgtagcgagacggcacaaccgaagaccgaataaccttccggtaggcttaaaggcttttttacccgcggcgtgtttattcgaactctacgtatcatgcgtgtgagtgagtaagcctatgccgcgtctcaccgtgccgtcccggtcccgtacctggccgcgtttcgcaatcctcgctgtggtcggtgtgaccgccgccggctgtgcggattcgggccgcttcgattccaacccctatgcatcgaaccgccacgctccatcgcaggacgtgaccgggtcgatcgccacgcgcccggtgcatcgggtcgagacgcaggccttgccggcgccgaccccgacacggtcctacagcgtgccggcgggcgtcgccagcggcgggcagggcctcggcgcctaccggncgagcggacagagcgtcgaatat

SEQ ID NO: 71738 - DNA, 528 bp, Arabidopsis thaliana landsberg
aaaggtcctatatcttacttgctcaaaaaaataaaaatagagcggggttttccggttaaacacgattagggtcctatcagatttcttgtgccggtcatcagataaattttctttcgactgttcatgaattttatttcgaaaactgttgttcatggtttaaatctttggttcgattgatatcgatctccaagctgtttaggatcgggtttaggctacgatgtaaggctgaaatatccctagacctgtttggactcgacaagaatatgtatatatggtccaattgataattaaccgttaagtatatatgcagtaggtatatatatttacacgacatcattcgacgacatgacattctatttcttttacattcaacatacatatataattattcattttttgatcttaatgtgaagaatatatataattactttgtattaaatactcttttttatttatgaaaaatttttaggtgtttgatccatactattttcggcttgaaaacttccccaagttaaattagttcattga

SEQ ID NO: 71739 - DNA, 499 bp, Arabidopsis thaliana landsberg
ggctccctcacgtgggctctcacggtagatgcggcacgattggaagatttgcttgatagtgcggtagatgagctgtggggcaggctagctgaagtcaccggcgtacttctggatagttagcatgagtagctatgtggttgaggggacttacaatcgcaatcactccgtcaggcttcaagagagcaccaaatacttgcaggaacttgagggtaaacaggttaaccggctcagcaccgcctgagaagacgccatggacaatggacaccatactacttgctactgaaagacgaggatatctcaagtcactgacagagtcctcaatggctggcagggtcgatctggcgcatgtttaaatactattgggcattgtatgggctcaaagcgtcgaattcaaaacctgagccgtaaagcggtttgatacaagacagaatgattcaatccgtgccaacggcactgatactgctagctagatacgagcacgacgaatggaacggacaca

SEQ ID NO: 71740 - DNA, 505 bp, Arabidopsis thaliana landsberg
aggctcgactacgcgttcttttggaggggtctaatactcaccactagtccaatactcatgtgtaatataataactcaatcaagctttttttagctactataaatcatataaaactagtcaaagaagatgttaaatatgacgttgttatactcacatgcaaaataaagtacatttgtaactgtaaaagttttaataatcaacgaatcatggattgagaataaatttatgaatgtagctgggagtcattaaaactttactgcatgttaatttttcgagttaaagcatccttaatagactaatggttgaaagtttggtttgttgatattagaaagagagtatcatttaaaccaaaaaaaaagaaatagagtatcatgactctggatttaaatcctgaattgataaacggcaaatgcgcagtaaaatgtgtttgtagttgcattactacaagagtcaaatccaaaactactaaatttgtacaaactaaatagacatgcggccgagaata

SEQ ID NO: 71741 - DNA, 413 bp, Arabidopsis thaliana landsberg
acaggattgagcaaagtgggagggtctgacttacagtgatcctttatcaagcaatgacaatggtggttaggtgattggacagacgtaaaccttgaagttacgatgctgactggacattcatcaagagcctctaacgaattctgagatgaatacatgctgtttactcagaatgacagatattacctgctccttatgagaccatcactcacacactgactgcgtggggagctaagaggaagcatggcccgtgttatggaagacccttatggctcggcgtagcgctattcccctctaggagtatcttagagctcggttcgatccgagctggacgagcctattgggtcagggacgccgggacaagctcctatgttccggtcattacagtaatgctgaacaagtggctggatgacaag

SEQ ID NO: 71742 - DNA, 109 bp, Arabidopsis thaliana landsberg
aaaacaacttaccatcacaaatctccactaacattgtgtttctcacctcaccaccaaatacttccccgggccgggcatactactctacgctactccatctccttacttt

SEQ ID NO: 71743 - DNA, 573 bp, Arabidopsis thaliana landsberg
ttcctcgacctggtcgacgatgactgtggcccgatagatttttctcgacaattagacctcctggttgacaaatactctgtctagttcgcaaataacaacatcgagaaactaatgagtgaattcatcaaaagttctttttataagttcttttcatttctgatataatttctgtaaaggttattatcatcacatatagtttgtgttttaggacggtggtaaaataaatgtctcttcctcattggattggcatattatcatggaccctacttgtctcgaataagtaggatcatattcatttcatcacaaaaatttcttttcatttcatcgttggtcagatgtatttatttatacatggcatttatggtaagcttaatgatcacttatttattttcacaaaatcgaggttctagtatcattttcgaatgacagttcgtgctattttagccagtagttcatcataattaacagcctaaacattacctgtatgtattttcatatacattaactgaaacttaagctttaccaagaatgtgcctatctatgaatctgtgaatattccaaaagctttacacg

SEQ ID NO: 71744 - DNA, 111 bp, Arabidopsis thaliana landsberg
ccgaaaaagtcatcatatggactggatcgaaggggtccgccatcctaaaattaggatacatttctcggcgcaaatattcacttgttgcacaccaaacctcaacagattggc

SEQ ID NO: 71745 - DNA, 396 bp, Arabidopsis thaliana landsberg
  unsure (1)..(396): unsure at all n locations
atacacttaaagaactcgaggttggcgctcgattgcgtaagcccttaccctgctttatcgggacacgtgncgttctatattgatcacgcctttggcagggtcggggttaatattgttggatgatacaccaaaacggtcgatcctggtacgcaggatgcggtaggtggtctggaaggcaatatcggactggtctttcaggtaccttaccacggcatcatcgctcgcatcgatcttgatcttgttattgctgcgcgcggcaaagaagggggcgagctttatgcccggactcgtctttgcaaattcttccctgaacaggtcgatcaggttggcgctggtattggcctttcttacatcggcattntccagcgctttattgaactgcggatctttggtata

SEQ ID NO: 71746 - DNA, 579 bp, Arabidopsis thaliana landsberg
acgactataaacaaaaacatttctctccaaaattgaagagaatattttttgaacagaaatcataaacgttttttcttgttgaataatttcaaatctgttttcttaatacgattagggcctttcatagttttattacatatttgtggaaaatgtttttcttgctgaaataattcgttttaaactaatcttatgactctattaaaaataaaatcaatattgatagttacgtagatttaagagatcattttcagaacaactaacgtttcgaaataatttataattaacaactcaaataatttataattttatactatactatcctattattttattttaagaatatgaataatcaattgtcaaacatgaaatttataatatttgagcaatttctttcatttaaatttgatttattagtcttttgttaattctaaaaaaatacattcatcgcatggttactcttcggatcaaattttcaagacctataatggttgaatttgcttgtagtggggaaacaccattgctttgaaatattttgcataaaggagatgattcaccaccaataaaacaaactaaattggc

SEQ ID NO: 71747 - DNA, 571 bp, Arabidopsis thaliana landsberg
aaaaaccttccaccattaattatataaacacaatccaacatatacgttattcttatatatatatagcctgcggattggcatgttgaagcgatctccgacggcggacaggtaaaatcggccgaaagaaatggacattaggttcttcttattcttctaggtattctttgttgtcacttttagttacccacttccgaaccttattgcccatattgcggatacgttttgccacattacccacaatagaaagctcatgtggcttgctgtgttgaggtgaaactttttttgcctttagctctttcgaaaattcaggaggaatatcctgaattgtatttgaatcttcaccaagacttgaatcaccttgtgaatccataactaccctgacatcacagtctgtgaccacacacttttcacctaagcccttgttttccccacttactgtgtgaaattcgaatttgagttcatcaattgacatcatgtgatccatgcctttaccaacacatggatgcatattggcatcatagaagacaaatatgtgatccctttcaactcttggagcttcttttggagccca

SEQ ID NO: 71748 - DNA, 513 bp, Arabidopsis thaliana landsberg
taatacagtagatcttcacaagcaccaagcctttgtatcgtttattcacgacggtggttgttccgggggccggaggtggctggttggtctcctcttcttcgtcgccgtcgtctatgccgccgtgagctaggatcaaggagaaacagaggaaaataatagagaggaagacgagagttgactttagggttttggaagacaaagccattttagttattgtttgtttgtgttgtgctttttcttcacttcatgaacattattagtgtaatgtttatatatgttggtgtttgcagtacagtgttgactttcttgttggagattttctgtgacaagtacaacggtaaagtaattgggaagttgtactacagaaagtacatacaatgtaaataagttaataactaaatcgccggcgaccaaaggagctggttctttgtgaaacgccctgtaccggatacaattatcccctatgattagaagtgaacgttgacaaaatttgtaatattaacatgatacttt

SEQ ID NO: 71749 - DNA, 537 bp, Arabidopsis thaliana landsberg
  unsure (1)..(537): unsure at all n locations
gacaacactctgataacctgggcaggagttcagcgagctgttttttttggtttcttacccttttttcaagctccaccaggttgggggctgccgcctggttacggagggcgtgactggcttcctgcgccggcgtacctataaaggatttgttggcttcggaaatggttttcgatatcccgctttgcgcagcgatcttggtgccatcggctatatgaatatggcctaccacacccacctgtccgccgatcatcaccctttttcccagtttggtactgccgctgatgccggtttgcgcggctatcacggtatcgcacccgatctccacattnnnnnnnnnnnnnnnnnnnnnnnnnnnnnnnncacctttatgtatgatggtagagccgatagtggccctgtcgatagtggtattggcgcctatttccacgaggtcttctatcaccacattacctatctgcggtactttctggtactgaccatccgtttgcggcgcaaaaccaaagccatcgctgccaatcaccgcacggcatggatcgt

SEQ ID NO: 71750 - DNA, 515 bp, Arabidopsis thaliana landsberg
  unsure (1)..(515): unsure at all n locations
actttcatttacagngacgtgcccgatgcgtatgcagagaaagtggtgcagaaagacggggtatttttttatgaatacgataaacaattgcgggctgttcagcaaaaaaagataacggtgcggtatctctccggcggtaatatactgtcgaaagagatcgttacctattacacacaccatgggcctgtaatggcgaaaaggaacgggcagtggatatcggtgcgcgcgaataacagggatatcaaagggctgatacaatcctggcagcggaccaaggcagccaaccttgcagaatttacgcgaaccatggagttgctggccaatacatccaacaatactgtgtatgcggatgataaaggaaatattgcctactggcacggcaatttcatgccgaagagagataaccatatcgactggtcaaaacctgttgacggaagcaccagcgccacggaatggaaaggattgcacagcctcgatgaattgatacaggtacacaatccctcacaggatggata

SEQ ID NO: 71751 - DNA, 546 bp, Arabidopsis thaliana landsberg
  unsure (1)..(546): unsure at all n locations
ccggcgacgccaacctgctggtgctgcccaacatcgacgcggccaacatcttgtttaacctgctgaagacggccgccggcggcgacgtcgcggtcggcccggtgctgctgggttgcgccaagccggtccacatcctgacggccagcaccacggtgcgccggctggtcaacatggccgccctgacggtcgccgacgccaacgcttcccggtaaagctttgtcacgatagcaggcgccaacttcatggcgccgcccgggcttcccgaatggccttgcnnnnnnnnnnnnnnnnnnnnnnnnncttgccttttgggaccacatgggtcacactagccgccttgaatttccgggtaaacccggaggtaatgaagagatccggccgcctgtggcgaccgggtcgaggaggtccggccgcctttggcgaccgggtcgaaaaggtttccggcggcttcggcggccgggtggcgtcccttgaagatcttcccgcaagctccgttcctggctcgcatcgcgtcgatcaagtttgcgcttactagctgcttgatcg

SEQ ID NO: 71752 - DNA, 387 bp, Arabidopsis thaliana landsberg
atggagagctaactagagaaaaaaggtctttgaagatttttaaactttccacgaccatgggcgcactgggtatattctgtctaagagaaccagactgtatggacactcctggtttgggcttctaaccgatggccatcgaattacagatgcgacgctattacctttgaactaatctggctgatatgaaatatcacatgcatacagattcactaatctactggatcgtgacaattaactatactattgaaataagagagaaggtagttacaagggatggaacattatatgtgcttgagcagtagataactcacatgcatattgactgttattcatcttttaatgaatatagcatatccgtaatgctgtcggtagatctctatagacatc

SEQ ID NO: 71753 - DNA, 377 bp, Arabidopsis thaliana landsberg
  unsure (1)..(377): unsure at all n locations
aagcaatcctaggaccgtatatacggcgcgtcaccggtttcttcgcggtcctgtataggggccagtcttaaccttcgcctggcagcgtaccccatctggtctacacttgggagacctggtttgtaacagtccccggcctggtactggaccccttgtaggggacccctttccaagtacggggctatttgcgagttcttannnnnnnnnnnnnnnnnnnnnnnnnnnnnnnnnnnnnnnnnnnnnnnnnnnnnnnnnnnnnnnnnnnnnnnnnnnnnnnnnnnnnnnnnnnnnnnnnnnnnnnnnnnnnnnnnnnnnnnnnnnnnnnnnnnnnnnnnnnnnnnnnnnnnnnnnnnnnnnnnnnnnnnnnnnnnnnnnng

SEQ ID NO: 71754 - DNA, 665 bp, Arabidopsis thaliana landsberg
  unsure (1)..(665): unsure at all n locations
atcaattcgtcttatctaacacaaaggtcgtatctgagtgttgttttctctatttgatatttgtttgtttatcgcgctttaggaggtcgaaattgttcttactgctcatcctacccaaataaatcgaagaaccttgcagtacaagcatattagaattgctgtaagttagttctaatgatgttaacatatatggattatatctcttaattttacttgagagagttaaaagtatatggttcttgcagcatcttctagaatataacactagatcagatctaagcgttgaagatcgcgaaacgctcattgaagatttggtacactccatctcaatatcttccatataaattttatcagcagagtaacttataaactaagagttacttatacttaaaggttagagagattacttcactgtggcaaactgatgagcttagannnnnnnnnnnnnnnnnnnnnnnnnnnnntagagctggtattttaaatataattgtaaagtacagaaaagtttcactctaaaaaactatttctctttctttttcattcatttaggtctaaacatagtggagcaatccctttggaaagcagtaccacaatacctgcgtcgtgtcagcaattcctagaagaaggtattattttacccttaggtatctagaatatatgaataa

SEQ ID NO: 71755 - DNA, 440 bp, Arabidopsis thaliana landsberg
ataacacacaagtactatgtaagggatgaatcacatttcaaatatgtgaactttatacaactatcacctattcattatacaaggattaaattaaataatggtctatttgccccattaatagaatcgtaaaaacttccaaatcctatgtatatatgaataatgtattgaataaaatactctatgaattactgggttttttctttttttaaacagaattgtcagtaacctgctttttatgttaataatgattttagcaagtactcaggatttaatgagatgcaacacattctttcaattcatataaatctgaaacagtataatcgccattagccagagaggcccataacttttttctccgaaccgggtcgagttgtatattactaaattacccctaatttctctgggtatgtatttatgtgggattaaacatgggcaatacc

SEQ ID NO: 71756 - DNA, 553 bp, Arabidopsis thaliana landsberg
tatagccgtaaagatagcttaggctagtaattttatcttaactccaatattccctcaactagccggaccttcgacagcgagtaaactctcaagacgaagagtctggttcagtactctgcaggagttatttatgggttaaaggtatataaatcagtggatacctgctgccctatgcaaattaggacccgcccacgtcaaaccgtatccgggtcaggatttgatccagaaacgtgcctcctttagtacatggttagagtcatgatggtgttatgccaaggcacctgccattcaagcgctttgtgatgcacttgcgacgctgaagttgcgatgctctccctgtgattactgtccaggcgatgcctgcgcaaagcaccaccataacaaagcccaaactagttcttcaagttatctatatctcctgacaagtttgacaggctcagcactcgaagctattcttaccataaaatttccaccgttgatcgacaggagatacgtagtgaactgctgtcccgttcaaactggaccttcgagtatctcggatcggtaatacaag

SEQ ID NO: 71757 - DNA, 442 bp, Arabidopsis thaliana landsberg
aaaatccgccgagaaaagtttcaccatcaatgcgtaactgaaaatcgacgaatcaaagctataatacacttaaacggatcatcatcatcatcatcgttgtcatgatcatcactgccgtatttatagaaaccaacaaaaacatgaaaaagcccactcattttccctatttttcgctttgcgtgccttcttatcaacttgtaaacaaagctacaaatatctttaaataaggacccaactctttttcaattcctcccatcaatcttcttcatttgttcttctgttggtggtggtgatctactttcagagaatcgattttgccaagtgggttcttcttgacaatctttcttcttctttgaaatgggttcttctgaggagcagaacattcttgatactggtggtgctggctttatcgggacgcatactgttgttcaacttcttaaag

SEQ ID NO: 71758 - DNA, 280 bp, Arabidopsis thaliana landsberg
tacaacactaacactaacctaccacattaaatttctactatactaaaagacaaacatcatttaaccccaccaattacaaattgagccaaaatcaaatacaacaataccttttaaggaaaaacttactatactactgcattaataataacattcatctaaaatagtactaaattgaaaatttattacatcaaaaatactaccacccctatttcacattcacataaaatttattatactttaccaacaaccactcaatgtgtaccaccatgccctacagacc

SEQ ID NO: 71759 - DNA, 570 bp, Arabidopsis thaliana landsberg
cgcagaaactccatgtccacggtatactcccggattacatcgatattttcgattatatcctcaaggcgtttgctcggggttttggagggcaacgacccgatcccgttcaagctcaagccgcaggcgctccttttgtaccggttctgaaaggacatcaacgctccggccggtgatatcctcgatccgctccttgacgatctccattgtgctgaaataaccgaaaccggactggataacgcgatcctccagcgatatcgcgacgtcgatgtccgattcggggccgatgtttccgcgcgctaccgaaccaaaaagcgacatatgcctgatgccggcagcctagaattcgctccggtgctccagcagtttcgcgatgatctcgtccttcgtcatggcctcattctaccatgacgggcatcacccgtcgagcgggtcggccccctgccgcttgccggcgcggtcgaggcggatcttctcgatgcggatctcggcggccgagagtagcgtatcgcaatgctgtttcagtgcctcgacgcgctcgtagatctcgatggagcggtcgagcggcacgtc

SEQ ID NO: 71760 - DNA, 542 bp, Arabidopsis thaliana landsberg
  unsure (1)..(542): unsure at all n locations
ctcctcgccggagncgccgcgctcgcctccgcaatttctgcactttttatgggaaaggacgatggggcggaagtagtcacggatggagccatccagactccaacgggagccacgaccgttggagtcccgtcggcggcgcccgtgagtaccagtgggacagtctcgggcaggaaagcaggcggaaaagtgttaaatgtgaaatttaaatcttttactgaagaagacatccccaatacattgacaccatcgacatcaagagaaccgagatctgcaagcatggggggtagtacaattagattgccggaggatgcatcgcggaagccaagtgcaaggccggcgaagttgaagttggacgtttgtttgcaggaaaatgaaggacttcggttttttctgccatctggttgggagtgccgcaagaaggttgagttcaatcgtggctgtgatttgttccagtttgtaccaaacatagacacgcttacgagtgggtatcaaacatttgagactggatttggcccttgtggcaacaaggaatcgatcacctg

SEQ ID NO: 71761 - DNA, 566 bp, Arabidopsis thaliana landsberg
aggccattatgcaagacgaaattatagccaacatattaaaatttgccatcctaagcgttacggccagtagaagggagaggctaaatctttttctatctacgaatggtgcgctggcacatgctgatattgagcaggaggcagacgagaaaatggaccggattaccatttaccggaccttacaggcttttgttcagaaaggcattatccatatcatccctactacagacaattcaatcagatatgcattatgcaaggatgaatgttctgaagggcatcatcatgaccagcatgtgcattttgtctgcagtgaatgtcacacaacctattgcctggagcaaatcaatgttcctcatgtgaaactgccctctggttttacagaatctcagacggaagttattatcaacggcctatgtgcaaaatgtcacgcgtaggttataaataggcttaaaattaagtctgataaaagcattaaggcccccagctgggggctttttctattaaatgcagataggcatattacggatggctggtatttattttcatttattatcaattattcccttttt

SEQ ID NO: 71762 - DNA, 552 bp, Arabidopsis thaliana landsberg
  unsure (1)..(552): unsure at all n locations
tacgccccgccaaagggctcatggaatcagggcaagagaatctcatttgagcgttgctgtaagagcgatgatagccaatccccagtaaataaaaacctattgcagtattcagcagttcaccattgaaccctaatagcggcatcgctgaagcatcaggtctgtgcccgcatggggtataaacgatagtttgctcagggctggcagatgtttgcaatatactcgctgagtcatctgtcgagtaaagctttgttgtcgaatcaggctcgtcttgccannnnnnnnnnnnnnnnnnnnnnnnnnnnnnnnnnnnnngggtggcatttttgctttttatatttaggggaagcccgttcatgtagaagactattctactttcactcatgggcagtactcatcattgatttgagttttcatcatgagtattagctggacgcaggggggccgcaactggcaaaaatgttaggtatgcatgggcaagtgcgatgtctacaagcttggcgtagcaatgtgtgattgctgctgcagtcacccgacagcggcggactggaggcg

SEQ ID NO: 71763 - DNA, 177 bp, Arabidopsis thaliana landsberg
  unsure (1)..(177): unsure at all n locations
acttgactttgaagcttggatttnnnnnnnnnnnnnnnnnnnnnnnnntaaaactttggaacttgggatcgcaaaggatggaatcaaattaaagctccaaggtagtagtcatcttggcagagaaaagaaaaagcacttcgagttcaccatcttgattttgatgtattcaactacaaa

SEQ ID NO: 71764 - DNA, 2003 bp, Arabidopsis thaliana landsberg
tttgcattgtctgaataatttagaaaatatccaaatatccaatatttgactatttttgttggtcaaagtcaacgatgataaagattgtcaaatcttatattactattacacttaacgtgagagacttgaaactggatatatttttaaaccgaagtcaatcttcccatgcttttaagaatacatcattgatcattatactcgtaagataaatcattctgcaaaacataattttccttttaacaaaaaaaaaaccttttatcaacttagtttatactcgtaaaccactttttagtttgatagtctctttataaatggcccgctggaagattggattcattggaccacttgaccaagtcaacatattcttttttgctttatcagaacttaaaaagaaatcatatatatatatatatacacttccaagttccaactagtgataaatggatattgacggcttattatgaaaaatcaaagacagcgagttatcacatctacctaattcatacgcaaacaaaaaccatcttattcgatatttatatacgtattttattaaatagtatgaaaataacgttgattatatagtatttttttgtcccccacatagtactatagtataaaataaatgtgcataaatttattctatcagaattcattgtttgggaaattaatttttaaaggagagagtctctctgctccataactccattgtcaaattaattcaatgacaacgcatagtatcgaacattttcaaaccacattgctgtaatcgctattttcttatacactacaaatcaaagacttatcacacacacaccacatctgaactacgtacaaataattgaaaatcatataatctcactccaatttcttgttattatttgagttcaagtagtactagtagtagtcgtatataaagtgtgaattgaagagtaaacaaaggtacgcatctttgacctttcacactcgatatagaaaggacaggctgtgacttaatgttgggtacacagttagtaactcaattccctaggcctcaaccatttgcatttataacttcacccaccggtccaccactttcaacctctcaataagctttatggttgttactaaagaattattagtaaatgacaagattatatgcctatatataaataataatatgcccatacaatagaatcatagaattacattttacatgattgtcaaaaaaaaaaaagaagtgttacacaaacaaaaaactagacatacataattttttagagcatgttaagccgatctaaaattcaccactactatttttagttaacaaatttctctagttagtttgttatatatctttccatcgatattgttttatttgtgtccatagtagttaaatcacgatgagactgtcattactattcaactacaaatgactataattattacgacaccacatttaacatcttctcctttggtttcttccggtatcacttggtcccagtttatatacatacaactagaaaagcttatgtatgtccagacaataatgtataccgaataaaaaaagaaaataactattataagtgcttgtttaataattgtaaacattatgcaaaaagctttgtcttctttttataaagataataagcataaaacaaagtcactttctataggaatgagtgatttaaccccacaaatttttaactcatgcatatcaaaaagaaagattcttgtatataacataacactactgttactctctcacttacctattctcactaacaaactctgaacaaaccaaaaaaaactcttcttttttctatctttcacgcgttgaagattcttgattttctttcttctccttccttacacgaccactgatatgtgtcggtgactgaaaccatctgttctcttttgcctctgatttatcgatatgttttaaagaaaaacggcgtttgaaactttagtaattaaggtactactctgctcttgctctgcatattgatctgctctcgtactactct

SEQ ID NO: 71765 - DNA, 136 bp, Arabidopsis thaliana landsberg
cccggctgcaggggggggtaaagctacgttgtgttcttaaaatctctgatgttacattgtcacatgtataaaaatttctctttttgaaacaataaaactggctgcttacataaactgtttttaatgggtgttatat

SEQ ID NO: 71766 - DNA, 358 bp, Arabidopsis thaliana landsberg
atcacttcattggctcggaagcgctggaaggcctacaagaccatactgaggggttcataagcgtacccatgctgtgaggttgggctaagagtcatgcacttaaataccccataggacgttggcacttactgatcactctgcgctgctctaacgcaaatgtacgaacatataccttttggcttctataaggagatagcggtgaaacacatacccttataaatatgaatatattctaactctcataggcggaccggagctcaacacgaaccagatgtattaactgataccattctatattacaggaacatactatgtctgcatatacacggatatatagcatatgaacatctacggatca

SEQ ID NO: 71767 - DNA, 503 bp, Arabidopsis thaliana landsberg
agcccggctgcgagcagcctctggccggcgttgcccatgactggaatgtaatctttccatcggcaagcgcaagcgagatggcgccgtattggaacctggccagctcccttcctagcacaagcaagccctggcgcgcccaagcagcgcgcatcgccgcagcccttctgcaacgccgcgggcatgaagcacgcaactatctggccaacccctacgtcatgcatctggcacgtctcagcctgatgttggccgaccaccactattccagtctcggcatcgacaagaacaatcaaccggtcagcgcacgccaacgtttcgtgcagaagcaacaaagcgtcgccgcgaataccacgcgtgatgccgcgggccgcagcgtgatcaaccagtctctgctcgaacatctgcttggcgtgggctacaacgccggcctgatcgcccacgcattgccgggcttcgagcagcacctgccccggctggccaaccatcgcagcttgcgcaaacgcagc

SEQ ID NO: 71768 - DNA, 720 bp, Arabidopsis thaliana landsberg
  unsure (1)..(720): unsure at all n locations
agaaaagctaatctataaatgataaaacagagtaaccaaattcttaaaatttctcattttggttatactcaatctaaacatgagaggaaatatgttgaacttaatcccccaaatttaatttcctcatttttccccaacaattcaacttcaatcgaagctacaaccaaaaagatggtggattttaccttcaacagcttcctggtgacctaattatttccaggaagaacttcgtcttattttttctgtcattttgttatgctctttgaattaaaaattcacattttgaaaaactcaaaactaaatccttagattctttacgaccatgattcgtaaaacacaaagacgtgattcgaagagcataacaaaatgacagaaaaaatgaaggaacgaagcgaaaacatgagaaattattaacaaaaaaaactaattatacatatctttaattggaagatatatgtgcactttaaaactttggttctattgtgttctttcctttttattctcttgatcatcaatcttttttctttcatttttattcttggtgtctttttaacaccatatcaaaaaataattcagtcaaaataaatagaaaaccaaaactcacttaagaatgttgaaaattgtataaacgtcatcacaaattagatattgacattgtgcatagccacattgtgttaggggggaacngtaggtgaactcaccgttatctcaaacatacaa

SEQ ID NO: 71769 - DNA, 565 bp, Arabidopsis thaliana landsberg
ccttactgattatgaacattgggccaataggtttttggtagtgtgttaatagatgtttacgtactatgcatttatagcccatcttatactctctttcactttacacctattaccctgcaccatccattatatgtgcctgtctatctatatattaaaatattaggtttctcatcgtacaattcggttaattcgaattgatactacagtattttacttgttaacttgtttggaaaaatcatgactagtttcatcaaattcgttattcggtaaaaaaactctaaccattgtattactttggactaggtacaagtattttggataggtttctggtatagatggagtttgagtttggatatttgagaatttagaacgattcatttgatgcttgtgacatggttgtttgtcctttgtattagtgttttttgtagtgcggctgttataactagacctggaccaaaaaaccggatacggaaaaaaaaacctgattccaaccgacccaaaaaacccggtcgatttggtttcggatagcctatattaatcagaacaaatccctaactaattcttt

SEQ ID NO: 71770 - DNA, 142 bp, Arabidopsis thaliana landsberg
atttttaatatattaccacctatccccaactaaaccataaaaacaccatgtcttattaagacaaatcacctatctagaagcgtcaaaaaattataaaaactcaccataaactatgaactaaattccttattatgcatgccaa

SEQ ID NO: 71771 - DNA, 491 bp, Arabidopsis thaliana landsberg
  unsure (1)..(491): unsure at all n locations
accgcttgatgccttaagcaactggcttggacatctatttctacataaaagacttgtgggcatggggacagggtccagttgtggaagagattctagcgacgtacaccacacccaccgaaattgaccttgtacacatcctcgtgacgggagagtcagctggtggactgctgatcatcaattctgccctccagcttgcgaattcagattttgaaggatttcccgtgcgcgctgccattggcatgtacccaactgtagacnnnnnnnnnnnnnnnnnnnnnnnnnnnnnnnnnnnnnnnnnnnnnnngcagcatttcgacgaatccatcatcagcgcgattctatacaccgattcagacgggcctatcacttcaacatgcggagattacctccctctgatgctggccgcgatcgaatactggtacctgggggattggtacgcgcgagactcccatcactctgaaacactataccccgttcatcaactgaaaaag

SEQ ID NO: 71772 - DNA, 460 bp, Arabidopsis thaliana landsberg
  unsure (1)..(460): unsure at all n locations
aaactcatgtcgggtttgtcgcctcctttggcggcttggaattcatcgccttcttcgccttcatacaggggcggtaacccaattacggcaacggtaatatcggcattgccggctgcccaaatgccgccgaaatgcgtggtatcggtataatcgctgccctggtcatattcaacccgcgttccggcatccactgcattggtaatgccttccaggaagtttactgcctgtttgcttacgccatgatagttgcccagcagggcannnnnnnnnnnnnnnnnnnnnnnnnnnnnnnnnnnnnnnggatatttctttttatcaagcggcaataactggttatcgtttttcaacagcaccatgctttgctgcgccatggtgcgggccagggctgtatgcccggcattagcaacgctgtcggcgccataactgtgaaaaggattggccgcaggatcatcataaaaac

SEQ ID NO: 71773 - DNA, 512 bp, Arabidopsis thaliana landsberg
aaaagctgaaacaggagccagcaggatatctgcgcgcttgtatttctgttgtaccaattgagggtactggggttggtgacatatcaccaaattgccgaggaacctcaaatgtcatgatatcattgcaagaaactgcctatgtgccaggttttcataccaacatcatctctgcaagccgcatgaagcgggcaggctttatatgggattttgcagaagatagggtggttaaaaacggccatgaggtctgtcgacttgcagaatatcaaggactttgggtggtggagcagaacggcggaaatcgggcttatgcaccggccaatgagaatgctcatgcagttagaccaaagacatctataaaacactccagcaaaccactaatattagcaggcaacacagatatttggcacaaacaatttggtcatctaaatcatgaagccatccgacacctaccagatgctgttaaaggcatccaaatcgacgatgtcgaaccacccaggagctgtgagacatgc

SEQ ID NO: 71774 - DNA, 440 bp, Arabidopsis thaliana landsberg
taagtttgaggaatattgcaaatccgtgaagcaaatatatgatagcaatttcaaatgggaaagatatcaattcctttcttcatcgcttgttgcgaataagagggaggtagagggatcactgcttgtagcatcgtttgatttgcttcggtactagaataaaacattatttccacatcagttatcatgaattcatgatcactgaatatgaatcggaaatttgctggagtgaaagctgttttacctttgatgggtcaagtcctaaacattcagctagacgttcaggacttgttccttgaatctctgcgcatagacgagacaccaccggatgaatctgttgtgctaagtagtaatctatgtcaaccaaccatctgctgccttctgatttcacctcatcaggatgcctagcacgttcggcaattcctgctgaactagcagagcta

SEQ ID NO: 71775 - DNA, 554 bp, Arabidopsis thaliana landsberg
gatgggactttttattcttctttcctcccctccctgctcctgaacagcaacaaaaggtcgagggctggtcaacccgtttctcaacattggattgtttcgcctacctgcctaccgctcccacgcatggcgtcggaagctggccccccccttgaggtatcatgattagaatgggccgcaacagccccttccgcctgctcgtcctgctgtccgccgccgtcctcgtctacgtcttcttcccctcgatccggcaatggggcgactgggtgcggcagacgaaccccttctcgggccagaagcacatcgagtcggccttcgtggccaccgaggccgagctcgcgtgcctcaacggccgtcccctccccggcgatgacccttcggacacggacgcggccgacctgatccccaacgtcgtccacttcatcttcgggctcaagaacccgctgtaccaccgcgacgccggccgcttcgatttcttgagctacctcgccgtccgcagcgccgtcgtctccctccggcccgacgccatctaccttcactacacctacctcgccgag

SEQ ID NO: 71776 - DNA, 536 bp, Arabidopsis thaliana landsberg
  unsure (1)..(536): unsure at all n locations
gttaagtatcagtatgaacagaactcctcaacttgtggagcacatatctcttcatatttcgcagctatcatcatacaagccacaccaagcaactgaagtttctgtctactaatcacattcccagataaatacctatctatatagttcacagtcaaatacaacgtctccggtacaagcctatactnnnnnnnnnnnnnnnnnnnnnnnnnnnnnnnnnnnnnnnnnnnnnnnnnnnnnnnnnnnnnnnnnnnnnnnnnnnnnnnnnnnnnnnnnnnnnnnnnnnnnnnnnnnnnnnnnnnnnnnnnnnnnnnnnnnnnnnnnnnnnnnnnnnnnnnnnnnnnnnnnnnnnnnnnnnnnnnnnnnnnnnnnnnnnnnnnnnnnnnnnnnnnnnnnnnnnnnnnnnnnnnnnnnnnnnnnnnnnnnnnnnnnnnnnnnnnnnnnnnnnnnnnnnnnnnnnnnnnnnnnnnnnnnnnnnnnnnnnnnnnnnnnnnnnnnnnnnnnnnnnnnnnnnnnnnnnnnnnnnnnnnnnnnnnnnn

SEQ ID NO: 71777 - DNA, 730 bp, Arabidopsis thaliana landsberg
caaaaacagcttttatggcatgacgacacaaaattttccctaactgaaactttccacatgaacatatctttctttccaagtcaacgacgtagttagatgactcacctttaacttgaaatctgtattcggtaaccggataaactttcagagttttacctttttctatcctaccatcaatctttttctccacttcaacagttaaagggtcggtatgctttgcacttaaagctctacgctcatgaaaccatcgtgtcaacatttaatgttgtctaacaaaggaattattggatactctttaggagatctcaacgctgaatttattgactcagcaggattgttggtgttaatgtcgtacctatatccgagaaaatgacaccaaacccattttttcacattagcatcttgtaggtatactccaatcgctggactaatgttgctaatttgcgtcaataaaccctcaaattcagtaatcctatatgtttttgacgctttgacaaccatatcaaccaaaccccttccgtgatagtatgttatcacattattcagcaagtggtggatgcaaatcatgttttgctaatgggaaaattgtagcaattgttttaccaatcgagagatgtctatctcacacaaaaactaaatctttctaatcgtttgtacaaaattaagttgcatgaaaaaccactcccatgaaagatcattctcagaatcaacaatcccgaatgcgattgga

SEQ ID NO: 71778 - DNA, 624 bp, Arabidopsis thaliana landsberg
  unsure (1)..(624): unsure at all n locations
aaatttctagaaaaataagtagtattaaaaaagaaaagagataaaaaaaatttaaaaaaaagaaagaagaagaaaatccaaagcgtgagggtagctttcggataaacacagaagattgtctccattttctttggaaattttgggatcatgggcgttttgtaggacccattactctctcagccctgcttctgccactctgtgggcccaatttaaaagcccactcttgtttcttttctaaaccacgtgaaaacaaaccacaatatgttatattcaatcaaacaaaaactctattatctctcaaagtatctgtcatatgtttttctagaaaatttgattataatttttcttttaatctgcattcatttgtccactaatgatgtgttccaacaaacatgttcgctctcattgacgaagagctaagtcaacaagtcaacttgttgagagttatgagatgtctaatcctaattatacacatcattagagggatacatatatataggctttcattatttntatttttctattattatttatccccataatgtaagttctttattaaacacatctttcattcgtaaagaaaataaagttaaaaaaaaaaattagaaaatacaataatttttt

SEQ ID NO: 71779 - DNA, 476 bp, Arabidopsis thaliana landsberg
  unsure (1)..(476): unsure at all n locations
aaactcgaagacgaagcaattggtaaagactatcagctttattttgcttgcggattggggttttcattggctggaatggaaggtttgttgctctttgttcatatctcttcccagatttcctttttccccgtctgagaaaaccctagatttggcttcttcagaattggattcctcactaatctattaatacacacttgtgtttcttcttactgtcagcattattgtctnnnnnnnnnnnnnnnnnnnnnnnntcaatctcatacttttaagagacacccgaattaaggggagatttgaatgttgagattgccactaacttcagtttgaaatcttgcttgttcatgctcattgcctgacttagatctgatgagactaaagtagtcttctttagaaccattatagtaacaattatgcaaagaagattaaagtttgtttgttcttacaggtaaatctccagacctggcatcgatagggtc

SEQ ID NO: 71780 - DNA, 619 bp, Arabidopsis thaliana landsberg
aataaaacagtacatcgaacattttagttaaatttaaaccaacataccgtaagaatgctaagatatgtgtaatcggtgcattaatgttagctttcgaggtttctaggaaatgtgaccacaccactaaccaagtcttggaatatggtgaatgtgagcaattccccaagtctttttagtcttcacttctcactttatgatctctcaatcaacgagaatggaacacgccttcaatttcgattctctatatatatgcatcaaattaaccaaaaaatagtgtttattccaagaaatgttcagcaaccacgtacccgttatccacatgtagagcttatttcactttgatagtttatagttataatgatatgtgactttttgtgttaaataataaattgtgcctttttcaatatgctgactagcaaaagtgttgagttacgatatactttttggtaaacgagttatgactacagaaatggtcggtgaaactaaaaggtaagaacttccgaatattctcgagaatttctattcaattgttcgtcgattatccgattatatatggaaattaacactaacttctctgccaaagcaagcgcatattggttttcctctagattggtgcata

SEQ ID NO: 71781 - DNA, 524 bp, Arabidopsis thaliana landsberg
caataaccacaaaaaggagaatgaaagcattacacatactttgtttcattgttaaaggacaaagaatttaaaaccagtgacaaatgcttgagtaactaaactaaaactattattcgattttaagtttcttctataagaaaagacagacagcattttattttaccaataacacattgtgttccatgcatattaaacaataccctctatcgatgaacttactatactactgcattaataaagatctctatcgtagttagtctgcatttcttttttttttaagtcaagactatccccaccaatgttgtggttggtcattgagtctaatggtgtgtaccaactaccaacctgggggtttttttttttgatcatgagtgattcctttttctaaaagggggccatagtggtttccttaaggctgcaaaaaggggattaatatataaatatctgggaaaggctaccaaaacaaaaaggttattgggttttgtatatggactatggactatggagtccaaagtaggcaaaag

SEQ ID NO: 71782 - DNA, 629 bp, Arabidopsis thaliana landsberg
gttgtgcacgaacgcgttaacctcgaccggaattcgttaatcgtgtttaagccgggccaaaccgccttgccgaggcgcaaggccgtccggattgcaggcggcgcataaccgctttgcaggaaagcgcattgctttcggtgtggggctcccgtatacccttacgtaaacgtaagtgacatcgaatgatgccgcctgcgaagcatttgttgaaacgcgactggaagccaacaccccgaccgcttccgacaggcgatgcaggccaggccgcgccgccctatccggggaaaagtctaaatccatgaacatgatgccgaccggccagtccgtggccaatgcaaacgacatggcgaacgaagccaccgaggatctcacccgtatcggcgagatggccaaggtcttcggcgtaacgctgcgcacactgcgcttctacgaggacaaggggctgctgaagcccgtccgcgacggtgccacccgcctatacacgcgccgcgacaaggcgcgtcttaagctcatcctgctcggtcgcaagatcggcttctcgctgcgagacgtgaagcagatgatggacctttacgacccgggcggcacgaacgcccgccagcttcgcgtgacccttggaaaatcggaaa

SEQ ID NO: 71783 - DNA, 456 bp, Arabidopsis thaliana landsberg
cgaggagtggccggcgccgtcgtgtctcgtgtgggctttcgtttcggaggcgttctcgaacggtctgggcgaggtgcatcactcgacgaagatcgcgatcgccgtcgggctcgtcatcggcgttggcctcgccatcatcgagaagttcgcgcccaagaacgtcaaggcgttcgtaccgtctgcgaacggaattggtatctccatggtcgttcccggtagcaactccatcgcgatgttcatcggcagcgcgatcgcggaggtcatgcgccgacgtcagctggacggcatggccgtgcccgtcgcgtccggcctgatcgcgggcgagagcctgacgggcgtcttcattgtcgctctgtcgacgatcgtcggctggaacctgcaactctggcatggcaaggcttggctttgccggaccgcgcagcgccgtcgtaggcggtgcgtgcccatgaagacaaa

SEQ ID NO: 71784 - DNA, 302 bp, Arabidopsis thaliana landsberg
cgactcagttcttgagcttattttgtatttttaaatctatatatgactgagagcggaagggagtaacacctatcataaatgcctatggagagattaatgctatataccaaagactatgtatgattggtaagggaaacgcctgtgtgaacaacctcggggagagtacattgaattcattgcgaatatttaaccacattgttcaaaacgggaataagaactatgacaggttgtggactccggtggataaaaccacgaatggggttgtctgccataaataatcaatgtgggtcaagcatttcaca

SEQ ID NO: 71785 - DNA, 383 bp, Arabidopsis thaliana landsberg
cggtgtctacctcttagtttgagggtccctaatacattttcagttggagtgtggatggatattcactaggctacttcttatttgcagggtaagggcctgacatgactgttggcagataatactcttcgagcatatgggtgatcgtgtctcgcaatatcccaactggggtaacgtctgataatgcgtgaaactcattacctaaaagacagtcattttgtatattacgaattacaactacactgtcatgcggataccaacgatcaagacgacattgtatttacgaaatgagagtggttcatcatccattatggtgatgtgatggttcactgcctacctacttgacaggatgatcctgactcaggccaataactgtctcttgtgta

SEQ ID NO: 71786 - DNA, 528 bp, Arabidopsis thaliana landsberg
  unsure (1)..(528): unsure at all n locations
ggtggtttcagggtgacgtctacagagcacacagagttgcaattgaggtgtcatcatacatcctctggcgtgcaagtgtccaccccaccagtcaatttagccataatagctgttgtggattcaaaagtggctactaggacaggtggacctggaaaacatccagacctaaggggaacataacgcggtgtttgttagggcttgccgtcatcaccatgtcatccaggttgcctgaccacaaccctgtttgattcctgctcactgatgagatttatggaccatcgagaagtatttttgagacggagcctctcttcctgccttgtatcacgagtctagagttgcaaatgatgcccgctaaccaaatatgacgtcatattggttatattgtatgcctgggactaagtacactaagtgtgtctgaggcgaccctcgctgcagtcctcgagatgttccatcgaaggcatctgtgtaaatttgagaatngtgctagtatccnnnnnnnnnnnnnnnnnnnnnnnnnnnnncgtcagt

SEQ ID NO: 71787 - DNA, 517 bp, Arabidopsis thaliana landsberg
  unsure (1)..(517): unsure at all n locations
taacttctacctgttatgttgccgccgctttggttcgtaaggtggggaacgggtacttggctcattagatgtttccccccctttaaaaatgggcagggtgtagaaccgcttactccacgttgagaactaatagttctgcagtttgccgtcctagtcgggagccggcacatgaccatccgagtgcagtcgtggtcactttttaatgggtcggtggcaggaagcaaaatagttggcctaaagctgggtctacggcggtcgtgggtagaaagttaacaagggtattgtgcatgagcaaagatcaagctttttcatgcgtttgcggaagtaggatgttcagtttcaaccttaatataagaccagtcaaagttgagcagcggagtttagctgaagcgagnnnnnnnnnnnnnnnnnnnnnnnnnnnnnnnnnnnnnnnnnnnnnnnnnnnnnnnnnnnnnnnnnnnntaaggaacattaccactcgagtcttcattcacccataacttcattaagctatatt

SEQ ID NO: 71788 - DNA, 514 bp, Arabidopsis thaliana landsberg
aagatctgactaattgaagagtggaaaatgcattagaaattacggatatttgtgatcaccactctttaggaggccccaaatcatcgacgataatatttgttcgattaatccggtagaaatatttaaacaatttacgcgctaatttatttgttttaggtacgctagcaattagcaaactaggtgctcattagacgtcgttccttttttgttccttggcaaacaatatcgttgaagtgttttttttttttttactgtaaaaagggtattttcgtccaaaattataacgttttaattttggggttgaattgaaacagaaaaatctcaatcactggttcctctcaaaattgcaacatctccagctttttctccgctgattaataatttaatatcaaatatcggagagaatttcttagctagttttcgagttcaagctagtcatattttcggatttgaactagttatttaggggttcctattttatgaatatctaatccctccctttgttgataatgtc

SEQ ID NO: 71789 - DNA, 627 bp, Arabidopsis thaliana landsberg
agtgccgcgttacttgttgcctacaatatctatgcaccctctagtatcaacacacaaatttgtcaaacgtttttcatgcagccagggtttgaatgcaccttcaagaactatgttctgcaaaagaagcaaattacaaaagacattttaatccatggcgcaaacgactcttacattcattttgttatgttgataaaataatgcataaggtttgatagtaacaagagggtttcacgagaccaatgcacactcacaacgatttgcacatgttgtagcaaaaaaagaaaaatcaatgaaactgaaaactccacctctaaataaaagaaaaatccgcgcaacaggttcaaagctctaggaagatccttccggtaacgatgatacgtcttgttgaaatctgcagaatcaaaccaaagtaaactcaatatgtttgcaatcggagtatatgttcagtggaaagcaaaggtaaaactaccggaaatcccaccaagagagtatcatgaatggaatacaccacttttggcaatactcagattctaatactaagcagatccaaacaagtgtgaatatccaattgaagatgtatgattagcataaatgtaagaacgccttcaacaagcttccccctagaga

SEQ ID NO: 71790 - DNA, 607 bp, Arabidopsis thaliana landsberg
aaaaatactttattgtaattcaaccgattagagaactcaaggattagaacaacaaagttaaaagcattcaacaatgcaacacagagataagcaagataacttgattaaataagaactcggagacatgagctataaagcgtcttgccacatgagagataaagttagtcgaagacacatccacgagcaatttaggaagttgacgattagtcgttctcatttgaccttgtgacaataaaaatggatccataacattgagtcttgtccgcacaaaatacacaacacaagatagtaaaaagggtgagatacacaaatgatttctcgacttaagagttggaaaacaaataatggtaacttgatagaagggttctccccatgaaagaggaggggaaataattctctccataaaagaggaaggttgcaccaaatgtctctcactaatggaggatttgggcgaaattggaccctctatgtaggatagaagactgtatgaaattctaaaccacagttcagaatctttctcgaatagttcgaaagctttttatgtatgtggaatctaagtctgaaagttcataaatgtttgtaaattgctaggtagaggcgaatttta

SEQ ID NO: 71791 - DNA, 271 bp, Arabidopsis thaliana landsberg
ggaatgacttaagtttgaaggcaatctggttagattctacgaagtgtttaggttgaaccaagacccctatgcatcacaaagaaacatgtagtatagtcgctgctttggaattatatactccaccaccggagcggaactcattcacagcactagaccaactggtcgagtgactctattaccatggacttgatcacctaccacctagtttggcagcagcatccttatagattgccttcacagtcgaatgacagggccggaggaaaagatatgg

SEQ ID NO: 71792 - DNA, 601 bp, Arabidopsis thaliana landsberg
  unsure (1)..(601): unsure at all n locations
aggtcacggaaaatcctgcctgatgaaagccatttatggtagtctgcgctgcgaaaagtcagtccggtttgatcgtatttcaattgttgaaagcttcaaacggcctgacctgattgtatatttaccgcaatgcaattttattcccaaatcactttcactatcgcgtgtatttcaggacttcgatttggagtacagcgaattccaaaatcgatttctggaatttgcaaaaagggagaaagatgctgttggcagcctttcaggaggagagtgcaggttattggagttgtatataatcgtcaggtcccaatctttgttcgctttattggatgagccttttacacagctaaatcccctgcaaattgaaaaggccatgcagttacttacagaagaaaaagcgcgtaaaggcatactcatcaccgaccacatgtaccggcatgttattgacatttgtgacactttgtatgtgctgaccaatggaaaaacatatctgacaaaaagtagcgctgatattgaggccttaggttatgcaagacttcaataatctcttagagccaccttcgcgccgctgntagtcgcagactacagcatgggcaggcgagtg

SEQ ID NO: 71793 - DNA, 603 bp, Arabidopsis thaliana landsberg
aaccttattaactagaaagataatattatagtcttagtcagacaaaattatcttggattaataagagtaaaatgtacattctaacaatctcttacattgtatatatataaatttataaacgaaacttaatttaaaatggaaagactattatatagttatcgtttcctttgtttttctttgagtgaaaacttttgattgaaaatgagggttttatctaatttttgaatgtagaagaggagcttggagtcacaaaactcatgctttgtgtttggaggtgggacaaggctttgtcctggtaaggaactagggattgtcgagatctcgagcttcctccattactttgttacgagatacaggtgtgttcttggtgatgatttaatttaatgtatttgttttgatttaagttactgttgtttgatttgagaagtttgtgttaatgcattaatactttttgatgtattactataatggcagatgggaggaaataggagggggtgaattaatggtgtttccaagagtttttgcaccaaagggcttccatcttaggatttcaccctactaatttctaactttttaaaataaaaaaacgtctagaaaataata

SEQ ID NO: 71794 - DNA, 813 bp, Arabidopsis thaliana landsberg
aacctcgatcaatacgtttttccagaatgcttaaatttgaaataatgatgatatgtatatgatcaatgatcaatcgtcgaatgaatgtaaagattaattattatcatgaaatgtacaataaactcgttatgttcatgaacgcgacgtaccaggcccatatcatgagaaaaatggaaaagtaactatgggtatagaattttcgttttttctcttcctcatatcaaggcccatatcatgaaactggatacaatagtatgtaattggccttggccttcatttttgggcttgaagcaacttaggctcggaccacaaacttacacaacattttttgacaaatctgaagaaaaaaatgtttgataatatctgaaatattataatacatttagaagttaaaaaatcttgaaaaaataaatcgtttgataatatctgaaatattataatatttagaattagaaaatactgaacccatggatttgtctaattgattaataattgtaaatataccaatctgtttaaatactaggaaatttcatttgacaaacctgtaagtaattttaaaataatgaatagtgatcagatttatacgtcgatgacacggaccttggagaccactttccacacaaaatccatattttttaacataccgacccagcccaccttctcacgaaaaccacctgtaccaacagattaagcacgattttaaaaaaccattaaccaaattttatattattaaagaagatatttaatttatagaaaactattgacccaaccttatccaataaccaataccacacgtcaaagccacactatata

SEQ ID NO: 71795 - DNA, 425 bp, Arabidopsis thaliana landsberg
aaggatcggcgacggttcgaccgcgtacactggcaagcagcccaaccagccggccgcgccggtccggttggagccgggggagacgccgccgcagttcgtggtcttctcctggaacggtgcggccgaggtcggcaacgggctcttcccgcgcttcctgaaggcggcggaggagcacggcgcggcgatgacgttcttcctctcgggcctgtatctgctccctgagtcgaagaagcggctctaccgcccgccgaacaacgcggtcggcgcctccgacatcggctatctcaccgacgaccacatcaaggagaccctgaagtacgtgcgcaaggcctggctcgaaagccacgagataggcacgcacttcaacggacacttctgcacgggctccggcgcggtcgcgaactgacccctgccatgccacggat

SEQ ID NO: 71796 - DNA, 749 bp, Arabidopsis thaliana landsberg
  unsure (1)..(749): unsure at all n locations
gtggcaatggccaatggcagtgccgggcccctgaccaggtttccccccggccatgcccgtgactttttggatattcatgaatttgatcccaccggttgaaggaacaccatccggaacccggaggcgcgattgcggtgtacgtcatgacgggccggacagaccggccatgcgtcatggccgcggtacgacctcgtacttccccccggtcgcgtgagcgatggaaggcgtacggacagatcgatggatcgggcccgtcaggcgcccgatgcaaatttcaatcgatctaattcgagactaggccatcccgtaacaaaatttcaacgatacaagtctcgttttgtcacacttccgcgaaaacctgcgtcttcgacgcatcagacgccattgcggcgtccggaacacggcccggcttcacccgtcacgaaaggccggcggatacccggctcattcgccctcgatatcttcctcgaagcgcagatgcttcacgctgcgtccgttgcggcgcaccagcttcagcgcctcgatgccgatgcggatgtgcgattcgacgaactgcgtggtcacgctgcggtcgctggcctcggtcttcacgccttcggggatcatcggctggtcggagaccagcagcagcgcgccgcatggaatgccgttggcaaagccggcggcgaagatggtggcggtttccatgtccaccgccatgcagcgggtgcggcgcangtaatccttgaactggtcgtcgtgctcccaca

SEQ ID NO: 71797 - DNA, 610 bp, Arabidopsis thaliana landsberg
agatacccacttaattttctattattattattattttttatttttataaattatttatacaataacaatactgagacttaagaaaaggaaaatattgagatatgtctgactatgtcccgtatatttaccgatacatttgctgtaaattcctaatatttgattagttacattgattgtaaaacaataaaaaacaaaaaatattcgtagttagcaatctacaatgctaatgtcgctatggatccatccctgtgtaaacttgcataatgtatatcacaatattgaaaacagaaaaataatgggcattaagtagtagtaaatttatatacatatttttattttttgggtgcaaatagtactttatgtacaagaaactagtgattgccataagttagagatgtctgatagacttgcctattcatctacaatgattcataatctctaagaattagtgaaccacacaagttatgtactattacaggtaatgtacttgtccacttcgatctttcttcgaccacttgtgcatcaaatccatatctcaattcaaatctcgatacttggcccgtgcatatccacatcatcttgtttcaatatcaatcaaatacaattcatc

SEQ ID NO: 71798 - DNA, 648 bp, Arabidopsis thaliana landsberg
ccgagatgtctcagctagccacttaactcgacagatgatttgctgagcggtcatggttaaaattgggtaaagtgtctatcaactccaatttgtagttaatttgttattgtcattttctcaacaatccttgaaagtaaccttctttttaagtaacactaaagtccaaaagacaacaacataacaatttgaaaatctggaaatatcgactttaatcatcaaaacgtttttaaaactttcgtatttattatgatgatgtactgtatttctcatcagctttggactaaaaaggtgtagctataatacattaatacttcttcgacaacttcaatggttgaatttagtttgctacttgttagtgtgagctgggctaactaaaacaatttatgggctttcagaactaaaaaactgagctgggcctgacgtaaactaaacgattggaacataaatattcggctagtcgcagttgacagatttttcgtaaattttctcaagattttgcgacaaaaggaaagttttagataccaatagggatcataatctctcgctatttctgatccatttggttttttttttttttaaactcatagaaaaaggtatgatttaatttggtatccttaacaaaaagcccaaagagagtaaattttttgc

SEQ ID NO: 71799 - DNA, 971 bp, Arabidopsis thaliana landsberg
atgcctgatggaaatctagatgatttcttgtttaatgaagaagggtctaaccttagttggtcccaaaggtttcacattatcaaaggagtggcttcagctcttctttatttgcatgaacagatcgttcttcaccgcgatgtaaaagccgcgaatgtactcttggatgaggatttaaacgggcggctagattacggtctagcaagatttggtacaaacaggaacccaatgctaggaagcgtaggttatgtggctccagagctaataataacaggaatgccgacaaccaaagccgatgtttattcattcggagcattactacttgagtttgcttgtggaagaatgttcattgagtatccagggaagcctgaagagtttaacttaatcagctgggtgtgtcaatgctggaaaagagggaacttggttggcgcccgagacgctagattggaaggagactacgtcggcaaggagatagagatggtactaaagcttggtctactatgtgcacagtacaatccagaggataggcctagtatgtcccaagtggtaaactatcttgaaggaaatgatgttttgcctgagatgcctccagacactcctgggatcagtatcccaacaccgtaccatgaagttcttgcgtagcagcacttcgtctagtgcccggcaaataacagaacaaatcgcttctctcaataacctacaaaaatatgaaccaacttaccagaaactatcattggaagaacggtataatttttttcgcaacatttctttactgtttttcctcattctttaactcacaatgtatacattgaaagatcgaatacaaaccctatggccaggacacgacctgtaatgttgtacatggtatgaaaatattcaacaatagtgttacaattatgtcataaagtagagttttcctataattaaagttagcagttttgtcatcattttgttatataaggaatccatgcgtt

SEQ ID NO: 71800 - DNA, 1030 bp, Arabidopsis thaliana landsberg
  unsure (1)..(1030): unsure at all n locations
cttgttttttcgaggttcttggacaaaccataagaaaaaaaaaatgcttaaaatagtcatggtctcttattggagaagcatgaagggaagacaaagtcttggcctgagaaattgacgtttgaagctgaattataggactcacatttagagttttctagagaaaaactgtaaccataaataacaaagtacactgtttaaagaacttaagcaagacttgtctctgaactttaatgaccaaaaatattacgacttctgtgatacaaagaaagaacacatctgaaacttagttgaaatacatagacaaaacctgcattgttgaaagtaataataacctctgaaatactaaaatacatagcagaatcatcacaaactggaactgcttgctgtttctaactaaattaaacggcacacggttctattctaaatacataaaacagaatgtagttttaaaggaaagtctctctctttacctgcttaaaacccaaaagtacattttctcgccgaagccaaaaatcttcacttgcttcttcttctctctaaaaccttatcttctccgcccatggccgccttctccgtcnnnnnnnnnnnnnnnnnnnnnnnnnnnnnctccactgcttccacctctctctcatcccgtcggaaaattctctctccttcatcgtctcgcctccctcgcatctccactcaatctcctcgtgtcccatcgataaaatgcagcagtagcttacctaagagagatacagagactttctcaaaggattctctccttaaaaacctagctaaacctctagccgtagcctcagtctcctccgctgcttcattctttctattccgaatctcgaatcttccgtcggttctgaccggtggtggaggaggaggaggagatggaaatttcggtggatttggtggtggaggtggtggtggcgatggaaatgatggtccctttccccggaaattgttttctccttcaccagcgagatgctgatgaagaacaatcaccggattgggattctcatggtttaccggcgaa

SEQ ID NO: 71801 - DNA, 511 bp, Arabidopsis thaliana landsberg
  unsure (1)..(511): unsure at all n locations
agctacagcggccagatcattggttccctggccaaaagtggtttagttggcttctccggtcatcacataggcgagatagcatagtacagcacagtgcagatggccagggcccccaggataccannnnnnnnnnnnnnnnnnggattgcgggtttcctgtgcagcggtggagacggcatcaaaaccgatgtaggcgaaaaaaacaatcgccgcagctctaataatacctgaccacccaaaggagccaaaggtgcctgtattagcagggatgtagggagtcaggttttccgggcggatgtacttaaatcctatcacaatgaaaacgatgacgatggatactttcaaaaggacaataatgttattgacccaggaagattcccgcgtaccacgaatgaggaccagggataacactatcacaataaatacggccggcaggttaataagtccatggattacacttccgtctggtaatgtaacctgatcgaacggtgtcatcaataaatggcgcggga

SEQ ID NO: 71802 - DNA, 4268 bp, Arabidopsis thaliana landsberg
aatctctgaagagttcgactacacctctggaccaaccattgtaagttcatctttgtaatcaactttggtaacacacttagcacgagtcacttggcactcaatttgatgatatgcttcggtttggtattgtgtaggaggtagcgaagaaagttggggaagtgatagcaaaatcttgcttggagaaaggtatcacaaaggtagcctttgaccgtggtggttacccttaccatggacgtattgaggctcttgctgctgcagcacgtgaacacggtcttcagttttaaccgtcgttttctttccttgtttctttccgatgaacagcagtgtatgaatgtagagaacccattttccccaattgaaatgttgagatttttctataactattctacagcctaaaccaaggccctgaacaaaacatttatccaaacatttcattaaagtatcactaggtgcataagaactctgcaacttcagtgaattaagcaagagtgtttccagaacaactacaaatttcaaagaaacgtctctgaatcgctttaaagatttttgcatttaatatttttcttacatatatatatttttaaccaatgaaaaaatagagaaaccttgaacaaaaagacaaaacagaaaaagaattctccgaccaaaaaatatcaaaatggtaaaccaaaagggcaaagaaagaaactgtagcgccaatctaaagatttcccgcgtcatcggcaggaaatgctcaccggacgggagagtttgctccggttgattggaaagcgccggcgatttctccccaatcgccaccttcttctcaccgctcatactccggtattaatcttttgcccacaaatttccctcattttccccccaattgtatcaaagaaacatccttaatcccaaatttccactagaattcgttaaatctcgagttcaacgactatggcaatcttgtctcattagccggagatgattgtcgtttatcagaggatacgacttcttcagatgacccgagtaaattctctggtgggttttaacaattgttttgttgtctatttgctcatcttcttcattagggattttgaagttaacaaattgcctcaaacttccttcagatgatttgagtttatccacgaggaagaaacggagattaactcagaccactcttcttcagtcaagtttcttgtcagtgccaaaacaattagaagatggtcttgtaatttgtactcagcagaaatcgatactcgattctgaaacttttgaattcagtttggtgcaaagaagtgagcctagtgagtctatttgctgcaaggttgaagatggttcatgttctccaagtagggaggagagtttgaaaactgtgactttagatgaagacaatggtgaggctattgaaaccttaatagttggtaggaagttcagtgatgttcaggatttagaaattgggggtgacatttttcttttgagacatcctgagaatgtcaaagatcgaaacgctataaaggtttttgttttcgtttctcttaacattgttttcttgagtgtgaattattgtctctgtatctgttaacattatttttgccctttcacactaggttatttctggagactctgaaatgcttgggtatctacctaaagatatatcccagtgcttgtccccgctgatcgatgactatgaccttaagtttgaggttggtgactgatttcttcttgttatgcttgttctgatatacgctgaaaagttgaggtatacaacgtcaggtgcaaatgatgtagctatgcattctttgcagggaacgataacatctgttccgaagaaatcttcccagctcgttctgatcaaggttgtttgtcacaagatgagatctgatggttggaaggaatgtgaattgtatggagattttaaacctctttgggagaaagttcttcaggttgttgagcatcagatgcaatttccgcctaaaacaacaagatatcagttgaacttcaacgtattactacaagaagttctaagaagctgctctcacttattcacagccgatgaaaaggcattcttgggtattcacctatgattgctcaaattttgtttggtgtccttcttgatgtttttggaatgaatgattaacttttctatactctacttattttggcttacagaatctttccccacactttcagaggatagccagagacttttcatccggctttacacacgaaaaggtatctgatctattacattatctttccccttgtaattttgtttgtttgctctcgttatggtgtaaattgtactagacaatctgatatgaagcggcgttgaaacaattgaaaacaagtatgcggacatagttaatgaatctggtgtctctttcgaatgaactttcagtgatcattgtctgatctgatgggcacttgggcaataggtagaatgatgttaggttttggagaaagctatatggtctcagttgtagtgtttggacaactggaactggctttttttttaatcctttcttgtttagaggtagttggactggtggtggccacgactcttgtctgctttttacagatacctttatttgaaattgtagtacttcgggaacactcttgcttgattcaccgaagctgcagttcttatgtaccttatgatcttttgtgaaatgtttccatacctgttcattcaggaccttggtttaggctatcaaatatatcataccctgaggtgactgattctcttcaagccctgaaggatctgacaggtgaatgatatgtgcttgaacacgttcacacacaaaaattcttttagttgcttaacttagtgcattgtcaaaagctaatatatatatgattttcagtcaggggatttatgagttcagtgaaggacgcaaatgaactcgataaccaaaagatgaaggaaatcacagagttgcttaacgtcactgaacttcgtgatatcttatctatgaacaaggttagaccacactatcttaaatttgtatgctttgttcattgaaagttgtcaaggattagttctctcatgggtttgcttgaaatatgttggtggtccaggtgttcagtcgcacctcaagaaagagagaccttattaattctctttgttcttgttacaatgatggaacgaggtccgtttgttttactttatagttaagatttataaagcttctttcctttcgtagaagtttctgtttcactttgaggttgatttgttttgtttaaatttagaataaatctagcaacagtaattctagaaagaacaggactatgtgctaagatatcaagtacagcagaatctctcatatggcgcgttgaggtgaagttttggtttttctacgtacttgggttttattttgggaagaattaacttttggttttatgttgcagaggcttttcttcctcaatggggagcaagatctatcgtcttttgttctgctggatcttggtattatcaaatacccaacttacaaatgcattgactcagagcaaatattctcgaatcggaccaagcttttagcatatgaagaggtgtttacttgtctatattgaaaaaaaggaaccgggttaatttttctacaatattataaagcttcaattacaggccattgaagtggctcagttgatggatgagtctcttgacaatgaggatcctcagacagtgttgaaatgcattataattgctgaaacccgcatatccagttcctctttggattctgctcacgctgctgcatttaatcgctttacagctccatgggttaactcaaaggtggttctcttaggagtttccttttttgagaaccagaagaggcatgtaaacaatccatctcgtctttttagttattcagattatctttatctttttgcctgttgagatttgtttctttggtttcaggtacaaccgagcagtttatctactgaggcgattgctcagctgttttaattgtgatgggagacgaggatactggacagtcaggttatcaacggatttggagcacatgggacgtccaaatgagagtcttacagttgcagagcagggactattggatccttgggtgcgtgctggttcaagggtagctttgcaaaggcggattcttcgtttggcaaaacctccaagacgctggaaaactcccactttttcaaatctcgtcgacaacaagatccccgaggttatacttctattcaaagtgaaaagataaaatataaagttgttcatcttcttactttgtcctcaaatgtgcaattttgcatttcaggttactattcaaggg

SEQ ID NO: 71803 - DNA, 602 bp, Arabidopsis thaliana landsberg
cttactataatatcccaatttattttactcaagtcgctgttatttatcctttctttgtcttttggccttatactgttagtttcctcaactaccaccctgtcgattgtcgaaagctctctcttctcaaatctttctttttataaaataacaacgttagtaaaaaaaaaagtgcattggataaaattatgataagaaaaagtatctttcatagctagtgaaatactacaactttaatgtcttgtattgcgacaaatagaaaatatcctctagttgatgtattttatcttttattattcctctataaaaaagtttgtaatttttttttacttttcggagtaagagataaaacccatgcttgtgtttggatttagctcaattacattttaaccaagtaaaagccccatagcaaaacgaatgaagtctttagaattgcgtcattagagaaagacagaaagtgaaaactgaaaacttgtttccatgtagaataatgagcgtatgatcaatcagatatccatgggtgaaatcacggcttacagtaaatttgtaaaaaaaaaaaaagaagaagttacttgattttcaaccatgtgtttttgaatcaattt

SEQ ID NO: 71804 - DNA, 406 bp, Arabidopsis thaliana landsberg
ctgtaatgcgaatccttaactcgggatgatcttgaggtatgaatcaaacctcttgcacctttccgttttgttcttccagcgccatgacggtagccaatctaaggaatgcaacattaaacctattctgggtggccagcctagagcatcgactagctttgagtataaagaataaagactacaccccggaacttttgaccacaacactgaccccgctctttggggaatctaacatgcctaccagatcaacgtagacggccatacccctggctgtcccatcccgacacactaccaggacactgtgtgcttgttcttccttgaactttttgagatcatcaaccctgcctagactgatgcaacccgactttacacgttaatactaaccacggtgttatgaaagaaatgggtc

SEQ ID NO: 71805 - DNA, 594 bp, Arabidopsis thaliana landsberg
  unsure (1)..(594): unsure at all n locations
gggaaattctggaatccaaatccaagttaccgacaacaagcaatctattatcatcttcaaatgnnnnnnnnnnnnnnnnnnnnnnnnnnnnnnnnnnnnnnnnnnnnnnnnnnnnnncaaaataatatttatgttctaatggatcgactagaatcttgcaagaatgttggtgtgatcttcgattctgtgatcgccactgttgaggttgtaaactcacaaaagactcaaatccaagccaatggagctgttccttccattcaactcgacaaatcacaaggtaaagaacttcgtgtcatcagaactaactttaatcaggagcaaccatcttcttgcaaagcgctgatggaaagaatgttgaaattgttacttccagcagcactgaagtcaatgttgttactcctggaaagagcccaaatgatgatccagtaagtaaaacttagttccttgatgactcatcgcagaccgaacaagccatccctcatcaatttgttaccaagttcaacgccaatggaaagttggaaaccagacccagtaagttttatctatggctattctcatcatttctttcaggtcgaacaccgtggagtttaattg

SEQ ID NO: 71806 - DNA, 331 bp, Arabidopsis thaliana landsberg
aagcacactcaaaggattgtttttccagcattcttactccttggtatgaaaaaggaaagagggtggtgttccacgctacggaacacttacaattaacctgagcccaagctttccaacaaagtgcggacagcacttatgggattacgtgccacagattatacacaacctagacaaaggacatggtttatgagaggctaacactatggactgagaagagccattggtgtgctgagaaatatttcatgcttatcacgcacaagaaaggagccaatatcaccaactgagaaatccgtgctggatgctatacacaatgggagcgcgctaggcatta

SEQ ID NO: 71807 - DNA, 3557 bp, Arabidopsis thaliana landsberg
ttgttataaacacaaacataagcttgtgaccaaatctagtgtttgtccttctttttcttttttgctcttctacttgttgtggttattgttatcgtaaataggatttgtactgaatgtgatgatgatcatagacccaaacaacaattgttcattgtcaatttctttaccaaaaaatttcttttacgagtcactaagtttcgtcagtttttttatatttataaatacattaaaattacttaacaacctttttccatcggataaaactaagattgacactcaccattaataattttatatatactcccattttttttagtgagtgttaacataagattaggaattattcgtatattgttagtttcttttattctaactttcccaatcatattgggattgagctcatcccaatatgtataaatagcgtactcaagagaccaatcatcaagtggctagtaacgtggctcaagacctaatttcgtagctagctactttttttatttgtattttgtatataacacattaaaggcttttttttcctttgattcaatgtaaatttcgttacctttcaaatttctgatttgtgatgatctgaattagtttttggactcattatgtgaaaatcagttagacaaatacaaaaacaagaaaaatatgacaagatcaccaaaatcaggacttgtttacatcatcaactaaacaaacacgtgaaacaagaacacacaaatatataaactaccgactatttaattcgacaaccaacttttaaataaataaaaaaaactcaacaatagagggaaacaaataatcctcatttactttcccccaaaaaccataaataaaagattcacaaaaaaaaaaaacatggaagaatagaagaaacaagaagtgaaactatagaagccaagaagaagcaaacaagcagagcaagctcaccaccaaaccagccttagctcctccgatgatcctaaccgcaccagcatcatctgccgtcgcatcatcggcctctccgtcaggcccttcggcaggcgaatccgagtcaccaaaaggatcattatctggcgacggtgcagccttcttcttctttcctttcgctttccctttagccgcttttggagaatccgcaacatcaccatcctctggtgccggagcaggagccggagcttcaacagccgaagccttaaacaactctttaggcaacaaaaccttatcagtcgcatatatagctaaaggctgctcatcaataagagtatcaacgatcttgacagtgttgatccttgtcttgagggtaaccttctctccatcgttctgtacagtaagctcaaacttgttagctccatctgtcgcaagtgtgttcatcggaccattgttggatttgagcatcgccattgagtaatatgtcgggacagcgaggaaatcgagaaatgcttctttctttggagctgtcaagttcttgtatttgggcaagaaacctttcattgcatcatctcctggacagaacactgtcatgcctccttttaaactctcctgttacaacataaacacaatccaaaacccggttttaatctctcaagatcaatttggtctatcttgaagttgacttgattaagatagtgaagttgaaacttttgtagctactcaattataatggctagtgtgagttagtggagacaaattattgttacttttcatatttgaaaaagatgaaccatttttaaaaatttagttaatagaatttggtttcataaatttgaattggaaaactaactaattatgttccgataattgaggtaattaagtctatatgtttgactatatttgctcattgcttacgaaacagtcaacaccttttgacctttttctttttgtttcaaaaccaatgtggcaatagctattggctacaatacaacagtacaatcacatgcatcttttctgaataagtaacttctcatttaacaacggaaattaaaaggataatcattttagatagagctactaatcagtgttaattatgtaagtagtaaatatctgatttctttttttaataatttctaaatttatacagacacatgcatctacttattgattatttatgttataaatggaaaacagaaaactaatacttttactaaaatcagggttagtagtgataagtgtaccaattacatttattaattagtacacagcgacatgcatataattattgattaattaaacagaagattactaattatcgtaattaattactaatcaggggtttagtaaagtacctgataggtttttgaagctccagggttagtgagaagagtctcagcaaacactttgcatccatgagccgacattattccggtaagattcatctccgacggagcaggagtcggagccgccgcagtctccgacggtaaaactctactgatctgaataatggagatgttatacggaacttcttcaatagatttaacaaagaaagaagacagatctccaccgtcaggaccaaacccaactttaccacctctcagatccgttatgttaacgaatcctgaggttccaggagcagctccggtggcttgaaacagagtagcggcgagagcagagccgtcacggatctggtggagttttttggttccgaagtaatctaaaaggacgtggagggagagaatgtttttgagagttgagattgtgtagccttttgaggttaatgctgacatggcggcgttatcgacggcgcaaacggttatggttcttctccggttgatttcgtcggcgaggtgtgtttgtgttaggaaatggctgaaggaggagaatgatgggtggtttgctaggaggcgcgtgacgttgtgcgcgtgggtttgagttgtgaggagaaggagaatgttgaagatgatgatgagagaactcatcttcttggccattgttggagagagtgaagagtttggtttggtgatttttgagagagtgtgagtgaagaagagcttaaagtgaggggatgaagaagaaggtggtgtttagttttaaatggacgtggtttttggttgtaattacgattgtgccattgtatttatttattgtgatgacattatttattgtatttattgcgaatttaagcttatgggcttttgcaagttttgtgaccatgtcatatgctcttctttccagccttccacgggttccacctagctactattttagaaattattcaactattgttaaactttttagaaaaatggaagtttttatgaactaggtatctatatatgtagacgaaattaaatatacggatgaaacaagtgggacatgttaatctttctaaagagaaaaagtttatgattcagaaattgatatatttgtgcccatatttgtattattgtggtctagtttcgacattaagcatcaagaggaaaccattatttgaccacatcgccgctacaaatgtttgattgcctttactagacattattgcttcggattttaccctataatattgatactttggtagactaagtgtaggtaaaaaattgtaagtttatagaaaagtatgagggaaattaaaaacaatagga

SEQ ID NO: 71808 - DNA, 537 bp, Arabidopsis thaliana landsberg
  unsure (1)..(537): unsure at all n locations
taactgcaagcatggccgctagcataacccttgtgtcgctgcgcggggtgtggtttggaatagcgcctactattctgacgggacagagatttgcggtataagtcgcttgatgggctacgcgggctcgccgcctacaccgtcgttatcagtcactttggaaactccacggatctgttcggagccttcactcgggggtcgggacagatcggcgtcatgctcttttttgtattgtcgggttttctaatgagcaagcgttacatacagacggattttaacggaaatgccgtgctcgatttctacttgaagagaatagcccgggtgattcccctttatatcgttgtcgttctcgcctcttacgctatgctttcaatccagggttacgcatggcccctgttcagggttacgaatgacaacgtattaaatcatttgttttttataaaaggcgaaagcgttctgtggacgataccagccgaagttcagttctattttcttttttccctgctntggcttatatacaagccggtcggngtgatgatt

SEQ ID NO: 71809 - DNA, 582 bp, Arabidopsis thaliana landsberg
agaccatcggacaggtctatgcctatattggtggttcaccctcgctctctgtatgattttcgcgtgggacaacaacattgcggggcggatcatcttcttcttcgctcaaacagtcgtgctgtgcatcattctctacatcctcgaagctagatctcttaaagtgaaagtcactccactctctcccgacgctcaagatgccatccgtcgatatcacgtccctgacgatcccgatgtcgctcgtgaacgagagagaatcgaccgtggaacctccgatctggttatcatgcgcaatgtctacaaagcctacaccagaactccagtggtcaacaacatcactctcggaattcaacctggagaatgctttggctacctcggaccaaacggagcagggtatgtctcgcgtctcaccacctgaactcggctttacacttgaactcactcttccctctcttgcgtcgatttccagaaaatccacttcgattgcgatggccactgcttcagtcggtccctcacttggaaacattctgttggaaggaaacaccacgaccaatgcgaatcaacaggatctctacactcgagctc

SEQ ID NO: 71810 - DNA, 609 bp, Arabidopsis thaliana landsberg
cacaaacaactttaacatgttcgttctgtttctgaatagttctctcaaaggctgtgaaaagggggaaggaggaaggttatgatgttgtactgtgcgacacatctggacgtaagcatacaagagtttgcttgctgacttaaaaaacatgcttatgtaccgtctttactgaatctgaggaacattacacctctttatgtaaggtctccatactaattacagtttgatggaggagttgattgcgtgcaaaaaagcagtgggcaagattgtctctggtgcacctaatgtgagtgagcctttttacttatcctattctgttatcttgcttatattattacactctgttagtctccaatttcgatcatgcgttagctaaaaataatattttacggaattgttaggagatcctacttgtccttgatggaaacactggtttgaacatgcttccacaagctagagaattcaacgaggtaccatacgaaactacctaaacctagtgattctggctccccaaactagaatttcttcgtaaaatcttgaggtttctgggttacatttctttcaggttgttggtatcaccggtttgatattgacgaaactagatggctctgc

SEQ ID NO: 71811 - DNA, 554 bp, Arabidopsis thaliana landsberg
  unsure (1)..(554): unsure at all n locations
gggtgtaacattctcactctgcctaatcaacttagctctagaaaactgtatnnggcgcttaagacgcgcgacctgatacccggggcgtctggggcaacgagtccaggcctctgatgagataggagtggctgcggcgtgtctgctgcaaaactctaggtgcgcgaggcccggtgcggagacggcccgatcggtgccagatctattggnnnnnnnnnnnnnnnnnnnnnnnnnnnnnnnnnnnnnnnnnnnnnnnnnnnnnnnnnnnnnnnnnnnnnnnnnnnnnnnnnnnnnnnnnnnnnnnnnnnnnnnnnnnnnnnnnnnnnnnnnnnnnnnnnnnnnnnnnnnnnnnnnnnnnnnnnnnnnnnnnnnnnnnnnnnnnnnnnnnnnnnnnnnnnnnnnnnnnnnnnnnnnnnnnnnnnnnnnnnnnnnnnnnnnnnnnnnnnnnnnnnnnnnnnnnnnnnnnnnnnnnnnnnnnnnnnnnnnnnnnnnnnnnnnnnnnnnnnnnnnnnnnnnnnnnnnnnnnnnnnnnnnnnnnnnnnnnnnnnnnnnnnnnn

SEQ ID NO: 71812 - DNA, 589 bp, Arabidopsis thaliana landsberg
  unsure (1)..(589): unsure at all n locations
ctgagcgccaaagaagaatacgtacatttttgctcgtgttttgttgagttgaatagggcgtacaaacgggcagatgatgtgatacggcagacgacatacatacggaagctttactgtacaaagaggccctcatatacacaagcaagctcgagtctttttctcgctcatcaccctttactccttcatcccctatccctcattnnnnnnnnnnnnnnnnnnnnnnnnnnnnnnnnnnnnnnnnnnnnncgaagccgtcgccaagccgtacggcggcggtgagagcttcaccaacgtcgactggtatcgccaactcgcccagaagctgcggaaccggggcatcgaggccgttcacgacgacaactccaggtacagcaagcaccccgagtactacggaggcaagtggtttgtgaccagagatggttcactgaagagggagcggcccatgggtgagtttatatgtccatcctccaactttcacaagtcgtgatatccttgtctagttcgccgctgacgtcgtcactagtttgcatggaggtcgtctccccccgcctcgacacaacccaagaggtcagcagcatccttcgcgagt

SEQ ID NO: 71813 - DNA, 3319 bp, Arabidopsis thaliana landsberg
gagacgtttgtgtgttgtgttgtggcagtggaagggaactctttacttgaataagatgtagagatgatggagaattcagatgtaaggaagacagtcacagatgaagcttctccaatggtggagccgttcattggtatggagtttgaatcagaagaggctgcaaagtctttctatgacaattacgctacatgcatgggtttcgttatgcgagtggatgctttcaggaggtcaatgcgagatgggactgtggtgtggcgcagactcgtgtgtaataaagaaggatttcgtaggtcgagacctcggagaagcgagagtagaaagcctcgggctataacaagagaagggtgtaaagctctgattgttgtgaaaagagagaaatccggaacatggcttgttactaaatttgagaaagagcataatcatcctctcttgcctctctcccctaatgttcgccggaattttcagctccctcaaacaccggtacgtctacgcacttttccttggggtaaaagtaaaacagtgattattggcattgatctaagagttaccaagaacataaagctcaaaaaatgatatcgaaatcttgtacaaatgaacttttcaggacgagaaagacgcaaagattagggagctgagtgcagagctgagccgagagagaaggcgttgtactgctttgcaacagcagcttgatatggtccttaaggagatggaagaacattccaaccatctcaccattaacatcaatagtgttatccaaagtgttagagacattgagtccaatactttcaccaaacaacaaacataatgcttcatttctgttcataaaagcttaacatcaaattctcataatccaatgttctgtatcttgtgattgattcttcattctccgaaacaaaaaaacaaaaaactagattggaaggcattgatgatgaaattacacattggctaatcaaaacaaagccatggacattatccaattttgacatagcatcaatgccagaaagcgtaaatggcggtagagatgtaaatcagcagagcagaggaaaccagagtgacgagcgttgcaacagcttgagccgccgatttgctgccgcaagagagcaaaccaagacggatctgaatcacattaaccatagagagcatcaagaagagacagcccattacagatccgacagcagaagccatcattccccatctcaaaaccttgatattgatgtgagctctgaaaatctcgttgacgtctttgctattaagaaggtttaaggcaagcttaagaccctgagctacaagagaggagaagaggaagaagctgaaggagacgacttcgaagaccagtagcttcttggcgacgtcagcacttgcgtcgcagctggatcgttgttcgaggctgtgttgtcctggagtcgctaaggaaagaccaacgaagacggcgatggtgaagagagagttcacgttcacgagtccgtcgagagcgcttacgtggacacttgtggtggcgagggaagatgttgaagacgtctctggtgacgtcattctcacgccgttctcagcgccggtcatgtagttaaccttcggctcagatctgctcggaaagggaaaaaaagaaacgcaatggttaaaaaaaagatagattgattttagggagagagagagagagaagaaagggtttagcttactcatccatgagggaatctaattaagcaatgagtttagcttttcgtcggggcttagcttgaagaaagagatggattgtcttaaagagagagcttgtcggaaacactctctctctccccttatctttgtacaaaccagcttctttgaggcatttcttttccacgtcacattaagttgttgacttttttccgatttttcttctctttttgaattttgtttttctgtatgcagtcaaatgttaatggatttttgggtgaatttaaaagatttttttatgatttagcaacacttcataaataatttgaatgcacttttcaaatcactaataagattttctcttaaaattaatgattaacttgagatttttcaatctaataagacaaatcatataggatacattcccttttaagtacccaattcgaaggttaaagataaaaaattgtctcaagctatggatgggattgacacatataagcatataacgatgtacaaaaggagaagaaatatgagaattgcatttctgaggtaagtgataagaagatgtcaggcttcagatgactgaattctcattttgcctgtttggtgtggtgggagaaggacgaatttctcttgcaaatcgatgactaacataacggtggaaatgtttaagcacaacttgcctttgtttctcgttccaggggattagatagacgatgagagcatacgcagaagaaactcctgtgatcataaacaaaccgcgaaatgtgtatacagtgagaggatggaacgtatcctcgcttgtggctgacgtcgtttgtctctggaaccaccaattctctatggcttttagcttctctgttctccttagctttgcgatttctcttgacacctgtgaaccaaaggagaacctttctggaaagcctgagagagagagatggattaagtcaaataagtgtgcataccaataatgtaataatagacgaatgttttgggggtaaaagctttacaaatccaaagccgttggttacgctttcggtttcgacaatgacgaattctgaagggtgctttgcaacaaagagctttacatatggaacttcatcgacgataaacgagatagttccattccttaaagcatttgtaaaatcgtcagctgtctttaatcccttgtatctcggtccttggaacgtaggattatcattaaccacatttgctgcaatagaggcagaaaagaagccaatgttttcgtttgatttcaacccgcgtatctgttgaaccgtcatcactgatgtcaacgttgcagtgtaatttgaagtcaatataagcactgcaaatatccaaacaataactacaaatcttgacatattatgttgcagcctctcccctatatatcaacaatatcaaagcaaaaaaaatggtcagagagttcttgtaatagataaaatcaagaaggctaattcgatcttctcgtacttacgatgggcaaagacaagggtcgagaacccaaaacatagcaatgttccaatctgttggaaacaagagccttggaagtcagcgttatcatgccgctctatcaaccaaactatagcccccgtcaagataaagaaacttgcaattgttagccaaagactaagtgtcaaaggcttaaagataatccacatgcttttgt

SEQ ID NO: 71814 - DNA, 615 bp, Arabidopsis thaliana landsberg
ttataagttataaattgaaaggaatctcttgagagtaactatttagggcctaattgttgttactaattacgtgtagggctgaaactaataacaattcgtacgttgggtcactattaaatcatcaaagatctgtagaaaataatgaaaaagtggccccacacgctccaattaaattacagcagctccacaaagtagctcttaaagagcttccatcacggaccagatcccgaattcttcttctgaccaccgaacgattgagtttctccgatcagatctcagtttctgggaataattcgaagttagtatttctctacttcatctctatgaatctcattcattttatctttatgtttctctttacttgttttgcgattagaactcgtttgatcatttaggtggttctttgttttgtgagataagtggaactcgctgacttttttttttctttttggataatcaacgatcgggttcatttgctattggcctctagtgttacactgatacgatctttagttttgagttagatcagtgactttagtttcactattcaactagtgttccttgttttaggacaatactgcgaaaattagctgctctaaaatttgataccagatc

SEQ ID NO: 71815 - DNA, 503 bp, Arabidopsis thaliana landsberg
cggatctcgtgactcaaaaacaatccaaagtttgaaacttacattgttaaaatgatttgtttgcaggaaggagatgagagatttggtgcaaaatctccggaaggagtaaattcaacattccagcctgtgtttagatctggaagttggtctgataaaggaccaaaacaatcaatggaagatgaattcatttgtgttgatgatctcactgagtatattggatcatccactggagctttctatggggtatataagatttgcttcatcgaatatttcaaaaacgttctcttttttaaaatgattgtttgcttatgaaggtgtttgatggacacggaggtgttgatgctgcatcattcacaaaaaagaacattatgaagcttgtaatggaagacaaacattttccatccagcacaaataaggcaacaaggagtgcttttgtgaagactgatcatgctttggctgatgcttcttcttttgatagatcctctggcaccactgcactcact

SEQ ID NO: 71816 - DNA, 563 bp, Arabidopsis thaliana landsberg
  unsure (1)..(563): unsure at all n locations
actgggaaccgtgcgagctgcatctccgcgaagaagagcatgttctctgtctcgtgacggcgcaggaggtcgtggacatggtcacctcgtctctcgattctgataatctcaacgcctcgagcgagctagagttgcacatcctccgcctgaagcgtgcttacccacactgcacagtaatctacctcatcgaaggcctctctgcatggatgcgcaaaaacgcgaactcacgcaatagagtctaccaagctgagttccgccgcaacctcgacgaagtccagggcttatcgcagccaactacatcaacatccacgactcgccgcaagagaaccaacaagcctgagacaactcccattgacgacgacacgatcgaagacgccctcctcaatctccaagtcaaccacaactgcctcatacaccaaaccacggcaccgcctgaatctgccgagtggatcaagatctttacagagcatatctccaccgttccctaccgccgcgagcgcatgaaatgacacgattccgctntctgcatggatagtggacaggtcaaacccggtgagaacgca

SEQ ID NO: 71817 - DNA, 2648 bp, Arabidopsis thaliana landsberg
cctttcttcttgaactccttagtgattgtcttcttcaattcttctgttttactctctttctctttcaaaacttttccctaaaaaccaacaaaaccatacaagtgttttagagaaaagaaagaaagatctcggtttccttcttcttcatgaaagtttaacccaaagatttgaacatttgaaaaaagaaactttatgtaccaagttcttgggaaacttatcatcttcttcctcatcttcatcatcgtcgccatcatcatcttcattaccgatattccccttctctatatcttctctagagtataccttcatgccaggtgctcctggcataccctgaacatagcggtaaagagtaagcttaagatcattccttgcttagtggtattgattgacgtcatcaaagattacctgcatagatctcaaaatcttgtccatttcagcatcttttgatggttttgcaacaaatggttctccaggaacccgatcctggcaaagataaagaaacacttatcaaaacgtcatctccacagcaacaacataagaacattcacggacacaaatcaccaaagatccacatttcagtttcaataaaaggtaccttgggaacaggaggaggtttcttgctgcaagcatcggtcaaatctttgcatagatgattcaccagtgaaacaagatcaggcttagacttgtaaatatactctgcaacatcagtgtctgagtaaccaatgacctgcaacacacaccaacaaacagatgaaaatcacatttatccaactctaaatactcaaagaaatgcaaatccaattgtattaacagctgaaagaccacattaagctaaccttttgacaagcattctcgatcgtcttgcacttggaattacacatcccttcttctggttgctcaaccagctacgaacccaaagtcaaaacaaacaaattgttaacagagtcaccagcattgagattcaacaacaaatgtacaagtttccacttatttcaatctcaaagctacaatgtaatattttcggatcaaacaagaagggagagaggtagagaaatctcaattaccacaagcttatcgcctttctcaacaatgtcaatcttaagcatccaatcagcttcctctttcttcaaattgcagacattttcagcaatctcaatgatctcatactccgagatctaccatttatttcccaccagcaaattcagtaagcagaaacacatcaaatcaaactagaaagatcactaaaaatacattaaaaactcaacctttttgggagagatctgttgttgcttctccttcactagctggtgtaaccgagaagatagtttctcgcaaacctgacactttatatacggaacatcctcctttctcggcgtcgaagaaggtttcttcgcggcatcggaaacaggtaataacgccgacgaagctagcagagctaatgtaagagctaccagaactcgattcatcacaaccattgaagtcagaagcagagaagctttctctatctctcttaaatatggtaaagtttgggactttaataaaattctttcacgggttctatatagaagatcatgggtttaaagaattctctgggttttgatcctgtgccgtgttcatgaagtggaatcgatgttacgcttgttaacgtgtttcctgcaatcttattggctgttggaatgctgacacgaacttgggtccactttctcgaccatgttaaataattactgttttgtttttttgtatgtgtggtaaattattcggatcacagcacaaaatgggccaagcagtaaggcccattaattaatacgactggatggctcaaatgtaattaataggatggagagtggtaaacttgtcattggcaagacgaaaagtggcgtcggacaattggatgttgccgtcgaccaattaagaaagaggagaagtgatttgcagctccggcgagaagcagagctccggcgttgcgtttatatctcagaaaatggcaaaaatcgtgatattatttgatttcgatcggactttgatcgacggagatagtgacaattgggttgtcactgaaatgggactcacagagatcttccatcagctccgtttcactttaccatggaatcgtcttatggtatttcatttattaaagcatccaaaatctcatcctcttcttatgatttacgcatattgaaatcaaaatttgaattggattttgaaaaggataggatgatgatggagctacaatcacaaggtagatcgattgatgacattgaatcttgtttgaagaaaatgcctattgattctcacattattgaagctatcaaatcagccaaatctttagggtatgaacaatgattagttcacttaaatggtctcagtttctttctttggttgagtgttgtttgtttggttcaaatttgcagatgtgatttaaagattgtgagtgatgcaaatcagtttttcattgagaagatactagagcaccatgatttgttggattgcttttctgagatctacacaaatccaacctctcttgatgataatgggaacttgcggatcttgccttatcatagtgatgcattgcctccacatagctgcaatctttgcccttcaaatctatgcaaggtactcttatctatctttgttaactatataagaag

SEQ ID NO: 71818 - DNA, 319 bp, Arabidopsis thaliana landsberg
aatgtatcttgttttaaaattttaaaaatggtacaaagaataatatttggttgatttttgataaggtgtgaacggacaagtaatccattcgtggtatccacttcttgcaaaaaaatttcatttgtcgctcgattgatttgtgttctgatatgtccataagaccataacttatagttttcttttgtcggtttattttaacagaaagtccatgtataggtaaactaggttcgggcgattagaccggactacaaactatgtattttgatgcatcacttgatcatattttgacaatgtttttatagctagagcaaatgctaat

SEQ ID NO: 71819 - DNA, 294 bp, Arabidopsis thaliana landsberg
tactccgtatatgggatacggtcatgcggactgatcgctactggggcgtcagtgaacacacccatgtatctgctttacgaacacttcaccttaatattaactggtgaatgccgagtgtctgccggtccaaagggacagggcgtgggccatgctagctgatcactttacgcaaacttggaatatactcccggtagaccaacaaatcggatgatctatgcggattaccatgaacttggacagattactatggcccgtatgtcatggggagaacccgatgcttacttcagcgtgata

SEQ ID NO: 71820 - DNA, 457 bp, Arabidopsis thaliana landsberg
tttgacacaaaagagataattattgttctaataatttcatctttataatatttcattataattgagaaagattcgcggtccaaaaaaaactagaaagtttattaattttttctgcaacatatgaaatgttccaaactttcatatgctgttaatgacatgtggaattcactgaaatataaacattggacataacaaaatcaaatatatattatcatgatttcctcataagttaacgtgttatagacaaaaccgaagatacaatgtcttcaagatattatcacacagctactatgcacaaaaggtggcaacgaaaaatcaaactgtcacacaaaaagtgagagccttttggtgtcctttgtttcttatctttcaagtcaaaagcgctctgagtcttgttgctgttcttgttcacgttttgtcaaggaatcaaatccaccagaaatgcttcttaagagct

SEQ ID NO: 71821 - DNA, 535 bp, Arabidopsis thaliana landsberg
atttgaaaaaagccgaaatccatatctcatgggactcaaacatccaatgttgattcaataattgttttccttaaaataaatcaataactaatacattttcataaattgtagtactaatacacaagttagcattttgttttttaacatagctgaaaacagaacgtcacattatttggagaaacattaagtactaaatatttagcatgaaataaatttcatatggatcacaaggtttttttttggcaaacatagattataagtcacactagtctaaattcttgaagggcttgtatgacttgacactattaattaagccaatgatggatcctaccgcggcaagggccgagacgatcaagcaaaccaatacgaggaggttcaaggccaaccatctacgagaatactttttgactttagcctgcgcaatgtgcattgccaccggaaaataaactgggagtggccaaaacacaagtgcccctagcaaacccaaaatcggattgaagaaggggattttaatggttccaaaggtggtaaaaac

SEQ ID NO: 71822 - DNA, 1773 bp, Arabidopsis thaliana landsberg
aaacccttcatgtccttcaaagaacttttcccacaagccttccaattgtagtcttccacctgtcatgaacatgaaaggcaccttcacagccatcttcccatcattattatgtctcctccctaaccatgatgatgacgataaggatgatgttggtgatgataatgacgaggccttggtgaagagttcttgatcactcatgttgtgttgaagtacttgtagttgcaactcttgtttgatatccatctctgtggtgtggaccgtgtggttgaataataaggtagaccataagggttgtcgttgtgtcgccgtcgtagacatgtgtacggcttttagttgcagacaaaggaagagaccaaccgagaaaccgaatacaaagaagagtgagcttaagacataacttcccttttgtaagagaatcaatctcaagggctttgtgatcattgggtactgttcttcttctttcttgctcttatgatcactaatgctcattgtagagatagagagggagagggagagagagaaaaagagagagagaggttgttgtgatcgttaaggattttgcaaccagttgttataaatgtgttattacaagttgtataagaaaaaacaaggtttttggagtgtattggacaacgtcaaaaggagctctcttgcaagttatataaatgtatattaaaagagtagactttggaacgaagacgtgacctgttgacttttagttgttctcaggtcaatatatgtatataacgatcatgtgttagatacaaaacttaggttttagatcttaacatttacacgatttgacgaaattttatcttgcccataggacggagtgtagtaagagattgcaatttcaagtaagggtgatatgttgtcaaaataagctaagggtggcatgttgccaaaatatgttttttttcctgttgctgttgaaaatatgaatatttgaatctactcttaatttaacccgatcacattgaacaccctggtgagaggtggatataaccgagcagttctgtatttcaaacctatacttgaatgatctattgaattgtttatctgtgtgcgtgggttcaattttgtctaatttttctttttgaaagtctaacttaaaccgaaccaatacaatagcaaattaaataactcaaaccaaaataatatcaaataaaaaaactaacctgattactccaaagttaaggaattcttcataaataacctggacgagttaattattcaaaatgttgcagtactgagatggaagagagtgcgaaatgttcggtgctgacccacaaaccatggaaggaacaatatttcatgcctaactttaggtgcacttgacgacacattgccagaaccttctttttgttgctaaatagtcaaatatgaagttttgattacaaaaatcattaatacagagagtaagcgttgcggtcgtgatcggcatgctagattagtggatttttaaaggtcgtaaggtctaattacattgcttagtcaaggcacaaaagtaattaaagaccaagcttgagagttttacttgtactcaaagctgttagacatagaccatttattttcggcacgatctatgatacattaattaagatttctcattaatatagtaactcactaacgccaaaaattccaaaacaattgggtgtaaataataattggagaaagtgttaggtcaattatgtattagttcaaaacattcgggtagttagttaaactagcataatattttagggaaatttcggatttaatcccccaacaaaa

SEQ ID NO: 71823 - DNA, 131 bp, Arabidopsis thaliana landsberg
gagccaagaggatcctgcaggaaggaggcatgtgcttgttatattctttcacgttgcgcatgtgggccattctggttccgaaccagattccttttacgggaaggaaatgattgcacctagggaccaaccaa

SEQ ID NO: 71824 - DNA, 1302 bp, Arabidopsis thaliana landsberg
  unsure (1)..(1302): unsure at all n locations
tcaatctctttccaatcctggcctttctcagccagaacttcctctctaggtcttgcgttcccaaaaggattagcacctttaggtttctccacaatgaccaagaccggactctccggcttcacgacctccacaacggccacgggaagtgtacgtggctgtaacaccaatcttgggcgtgaaccaccgctcggtggtggcgagccattagcagcactgctttcttctcttcttctcccccaggtatccgattcagaaccaccaccaccaccgtattgagaatcccggtttctagacaaggattcaaaacttccccttttctcaaatctgtcaccgccgccgccgttgctagaaacgaatctccggggctccgatggcttagcggagacccagctatcgacttcatcagccttagactgagactgagattcgaagaatccgccgccgctgcctctctctcttctctcgaatccgtttccgccaattggtttcttggcggcgggccagttatcatcctcgtccgcacgcgacggacccgaatccctactaggttccctgtctcggttgaatccaccgcctctcctttccccatcctccgaaaccctagacgaaccccacctcgagctggacgactcatctccataacgacccccaccatagctccggaaaccacctccaagcttagatctatcaagctcctcagcagagcgttcacgtggaccggtcggaagagcgaccagctcagcctgagtgagacgctccgtctgtggagccggctttgccttagcagtaccgtaggtagcgaattcagcaagagagatggtttggcnnnnnnnnnnnnnnnnnnnnnnnnnnnnnnnnnnnnnnnnnnnnnnnnnnnnnnnnnnnnnnncggcagaggatttctggttggtgggagagggttgttgtttgagctcagcttcgtgttcctcggcttcaagagcccaagcaccaggctttgcccaaacagatgatacagcagccgccatgattggattcgtcttctcttcttctgcttcttcttcttcttcttctcttcttttctcttcgtgtgaatcaaaaacaatgaatggctcaccgaatctcgatttcctttttatagttagatctttttgggttttgatcggacggttataaattcatcatatcaatagggttttattatttagtatattgccataccttcacctacaaggagaaggaacagtattgttggatccaataataatagcaatgtatatgactatatatggtacaaactgtctaagagccaaaaaaaatgat

SEQ ID NO: 71825 - DNA, 568 bp, Arabidopsis thaliana landsberg
  unsure (1)..(568): unsure at all n locations
agtttaaaaggtgttctagggattgaacccaggtcatgaggcttacacgtcaagtacttttactgttccggccatttccctggctccactttgattataaagccgtggtgcctgagacacggtgtcccgcaagctttcatggaagtaagccttcctgcctctttcgtgtacctgcattggtggaagtcaaatgagagtctaccgtgccttagccagagagccatgggacgctaggtgctgtcctggactttctcagtctaacggtgaccatggctttgttcccagccttctctatttgacttagccttctttttagataaattntatccatgaatgtaaacagccttctaatagccccatctcctcggttcctcagagtttcttactcataactgtcttccaacagtatacacagcgtcggttcactttcgagtcctcctcctttttacccctgcgtgatggagacagctgtataattagtgttgtataagaaaccacccccaaataagcgttgtagcaacaaccgtcttttttccctcataataatccctatgatctactgtcaccg

SEQ ID NO: 71826 - DNA, 582 bp, Arabidopsis thaliana landsberg
  unsure (1)..(582): unsure at all n locations
tccagatacaccagtgcttcatttttttctcccatcgcaaacaggtatgccaccatccggtaatttatgttccgtcgcatcgggattatttttaataccatcggctattgtttctgatgcctctaccagtttgccctgttcatataatacggtcgaaaannnnnnnnnnnnnnnnnnnnnnnnnngattatattcaagaaccttataataagcctccacagattgttctatctggccannnnnnnnnnnnnnnnnnnnnnnngcaaaccaaaagtcggggttctcatcatcaaggtcaatcgcttttttgtaaaaatgaagtgattcaaaaaaacgttcttcaaagttgagcgtcaccccaatgccaaaccaggcgtcggccattttgggatccatctttactgatttcttataataactgcgtgcttcatccatacgctccagcttttcatagcactcccctattgcgcaataggtatctgcgtttggcttttcatattcaaaggtctgtttataaacctcaattgcttcggcaaagcggtcaagctgaacaagggcattgcctttattataataagcaga

SEQ ID NO: 71827 - DNA, 396 bp, Arabidopsis thaliana landsberg
agatggagaaaatgacggattaacactaaagatttgttttctttggttccgagttgtggaaacttatttggggatgcgacgcgaaatcggctggatctatcttaagtccgatatactaaagggcggatttcacattataggcccagatcaattcgaacaactgagatccgttcgatgaagacagtagctgtacgcgcctataacccatttctctctcatgaaattcttgtctcactaacactcgatcatgggactctacggactcttgtctagagaggagcccttctgtttatctacggagcaaccggcttccacccgtgcatatgaatgagaggagactacattcttagttacagctgatgaaatccatcattccttgtgaggcaaagatctggt

SEQ ID NO: 71828 - DNA, 400 bp, Arabidopsis thaliana landsberg
  unsure (1)..(400): unsure at all n locations
nnnnnnnnnnnnnnnnnnnnnnnnnnnnnnnnnnnnnnnnnnnnnnnnnnnnnnnnnnnnnnnnnnnnnnnnnnnnnnnnnnnnnnnnnnnnnnnnnnnnnnnnnnnnnnnnnnnnnnnnnnnnnnnnnnnnnnnnnnnnnnnnnnnnnnnnnnnnnnnnnnnnnnnnnnnnnnnnnnnnnnnnnnnnnnnnnnnnnnnnnnnnnnnnnnnnnnnnnnnnnnnnnnnnnnnnnnnnnnnnnnnnnnnnnnttatacttttctatttattcgttttttcaaatcgttattatatcctttaattttttatttgatatattcctcttcttgttagtacttattctcttttattttcctgtctactccttattattctcacatcatgattttctttttttttta

SEQ ID NO: 71829 - DNA, 642 bp, Arabidopsis thaliana landsberg
caaacagttcgattctacaaatccaacaaattgatcttgcgccatttgacttcaacctattgttaactcctctcaggctacaacacacccaggaaatccacgatatttcatcaagttccaaaaaactcacttccaatccgccgattcaggttttagaagcgaccagtaaaaccaaaggaagattgagaattagaaaaaagattcgacagtgatcgactcaagaatcattacaaaagaaggcggagttaacccaatggatatgatgactaaaaaccctaggaacgatatgtatcaattgaaattagaacctacgttttgtaccttctaaatgcgagagtcaagtcctccttcgagcggtcgctcttccaacacgctttcttcttaagaaaatcgagaattaggatcttaacgcattagatcaatgggctattaatggacaaataggatactgctattgaacggatataaggaagctttagagaatcaagtgtttgagaaaagagtgactaacccttctcgccattggatttacgaatcggtgggtgatcgagcatgccgatgacccgtgaaactgagaattagcattggagcatttatatgacagctgaggtgaccggtccccaatgtttaagctttctacct

SEQ ID NO: 71830 - DNA, 578 bp, Arabidopsis thaliana landsberg
acaaagcatgatatgcctatacatgaatccagacttccttaaaaaacgatatgtatttggagaaccttttgggatgcaatatgaatttttttttgatgagaaatggttgaatatgactattactgagagggggaaatgatatatacatagaacaaatgttgtcaaaataaacatattggttacataagaaaacttggttagagttggaggttaattcagagttggtggtaggtctattcacaacagagaatagttatttgcatatgttgtcggtcctaatacaccaccatgctatgactctttatccatggactgtatagtcaatatttgttatatgtataaaaagattaaccgtctagccggcggattaactaactatgtattttctttatgagcttagttatgatacatgaattgtgtgtccggattttacacacccgattttgttggaagatataaaacatacctttgaaatctatgtatgtaagagaccctttgagctaaatgaagcatatgagagatcgattaccagaagataaatacacatattattatgcctacgaaggcagatgtattta

SEQ ID NO: 71831 - DNA, 1932 bp, Arabidopsis thaliana landsberg
tgttgagtgtaactgtgtcaaatatttatatttctttattaatctatgagttattttggcttctatgttgccctttagtgatagagcacaatggtaaattcaggttggccataatatctttgcctgctagtattcataaacctgttcacaatcatgtgttttcttaaatatttgaaacactgaaacttcgttctctgtgaaagctcatgaaacagttttgatgtttgtcatctcaagatgtgtagagttggagtcaagtccattagaattatgtgaagtccttttaaatttgtgtcttagtcttataagtcttgactcttgtcccaccttttgtgcatcatacgcacatggttgtttgtacattctatttatgtatatttaggtagtgcatatagattcattctaaaggccaaagactagtcactctttgtctagtgtacacaaatttcgggtctcacaaagatttcattggattcttgattatttcatgatttgttattagctgcattattaggatcatatgatgtattaattatgttttttcttctggactctttgtttcttgtcatcatcacaactaacaagttcttattttatatttgttttgctttctttgtgtgtcttcttaactacttttcaataaaagaatgtttttcttacttttaggtttcgcaactctgactttacaataagtcttttttctggtttccatgacaacaaatcttcccatatatctcaagataatctctttctttcatacactaaaaagtttcacgtcgtttctaggaacttcactatctcttttatggttgttgggtgtatacagaaatccattgatgtctaccttaaaacctcaaacttgtagaagtgtgaaagttgtacatcataaatctatggtagaaaatatactcacaagattactaaccctttaataatactggtgtagacatcaatgacaacaaaaaaccagcacaaagaaaagaaagcttgaggaaaggcttggctcgaggaaaacaatttcagagcaaaacccaaaaaaatgaaaagaaaagactctcaaagtttaagggacaagtcaaggttcttctgcttctcttcttcagctggcttcaacaattcctcgcctctctgccatagttcagaagttggaaactctactggaatccttcctacatcgaacctaccgatgttttcacatgtggaagtcaacggtggagcaatcatcatctgatgatgattataatgattctctgttgaagttagttttgctattgctggttgctgaactagtggtatccttgaccagttgatctgaccatactcaccaccgtaaacgttatatgaacttggcttatgactcattgagtgtgcctgaatacccaaggttctgttgctgtactgtccatggaacgggaccggagcaaaaccatatggatgcccgaaagctgcggcagatgccatccgttgccctcgctttgccaaagtcctttctcttttgtgggcgttttggtgaccaccaagcgcctgtgagctgtagaatgttctttgacagtagttgcatgagaagagcttctgttcagtggaagttgacccgttaaaactcggagtgactacacctgtctctaagcagtcgaggagattgagttcttgattgagctgtggttgactagaatcatatcctgctagcataaggtcaagctttataccttccactccttctttttggtcatgatcatcttcttcttgtgctgctactgtgtctatgttgtaattttctaggctcagctttggggaatctgaaaattgaagactggtggatgcagaaatgatgcatgaggaatcagatgatcttggttttccgctggaagaatccatgaggggcaaaaaaagtataaaattttccaggtgatggttttgttcacttcaattgtc

SEQ ID NO: 71832 - DNA, 132 bp, Arabidopsis thaliana landsberg
gcttatcgcgaataggaggaagatctgcattcccatcatcacaaaggttaaaagctttgtgcggcagttgtacatttaaaattgcgctatcaagtagtatctgcctccaacagcgacgccttgggatgtttt

SEQ ID NO: 71833 - DNA, 587 bp, Arabidopsis thaliana landsberg
cgcaccgttcagctgcttaggtaaggtctgattttgcccgtcattttagctttagctgggatccagcgccttcaagctggggaacgcaaagacgctggattcctgcttgaccagcccttcggctgttgaaaagcgcctcgcaggaatgacgagcaaaaagctggttgatcagaccttccttagcttatggccttggctggtgtgttatccaaaaacagggttgatctgcgccagcacccaagtgaagccgccacccgcgaggctcacatattgggtttgcccgttgaaggcaataatggttttcccgtcgggcgccgtaacctgatgcatttgcgggctggatactgaaggatttatcacaaccggatagctgatgccgttaacggcgatctgcgcaataacctgctgtccgtaccagttgccggtaacgtagctgaaagtcgtgagaccatttgtgaggctgacaggattgttcttatttccaccatcaccaccgtgttgcaatagctgtaccgcatacgatccatcgatgctggcattcgtgcactggatggcatccacgacatcgtcgctgcggataacgatac

SEQ ID NO: 71834 - DNA, 334 bp, Arabidopsis thaliana landsberg
aggcccctttaaatctattagagacacacctaaggtggatactatattagggtaattatgtttttcaaggtttgagatgacagatttcattttcagtcagataactgctcctggatctccatacaaaatgtcctaagagtgtgcatgtgctcaaccaattttattttgcactgttttctagtcagatgaatattcatctcatctgtagataaataacaggttaactagacatgcagacaaacaacatactcctttgtccatctgcattgtaagaaactttttttttttttttgagatagagtcttgctctgttgcccaggctggagtgcagcag

SEQ ID NO: 71835 - DNA, 563 bp, Arabidopsis thaliana landsberg
  unsure (1)..(563): unsure at all n locations
cgcaccattgtaaagtccatttacctcgacacaaaatcagaataccaggctgctgataatattgttgacgatgaagacgggagcaatactgcagtaagaaaatcaaaagcacccggccgcgaaatattcgatgcggcatacctgtttattttaagccgcgctcataaccgggccattgctgacaggccatcggggagcatcacatctcacaagtacattacccagcgggttttaaggatctgatatccttcttcacttcacaatcctatctcatacgattgctgagctttctatgaactgcccatagggcaggtatcagcttatcacacattttaccgtcatgaaaagaacgatcatgctcgcaggcctnnnnnnnnnnnnnnnnnnnnnnnnnnnnnaaccggccaaagaagaaaaagaagaaacaggcaagtacacagccaccagtcccgtgaagatggacacttctttcgtaaagaatatgtttcacagatccgctctgtacgcaacatcgagatcagggcccaggaaaagggctatctcgaanatatctatgtggatga

SEQ ID NO: 71836 - DNA, 597 bp, Arabidopsis thaliana landsberg
  unsure (1)..(597): unsure at all n locations
agtgttttcttttccgggacatataccaaatatggtcagtggggtagaacaaccattaagacttccaaagggcacctgaagaaccccaatgttaggagaccccgtttgggatgttgttacaccattcaccgtaacgtccagtgtcatggtagttgagttgatatcttcgttgccgtgccagtgttctatccaaatacgtaaatcaccattacagttggcgcaataggcaacctgcacggaatggccaaatgcatcatagccgtatcccgaaataattgcaaggaagagcaaccgaatgaaattatggtattttcttatcatatcctgcctataccgctcaaactctaaatttaatcaatattatctttttaatcaacggtatgttattgtttaatccaccaggccggttttactttattcattttattataaaaacccggttgaatatttcaaaatatgtgttgtttgtctcaatgtattagtgtcactgttcctttgtaggaatgttntatcattttaaaatcagtcatattaattacatacacgtatacattcatttgggctgtttcgcttgcattatttgtttcccattccatg

SEQ ID NO: 71837 - DNA, 629 bp, Arabidopsis thaliana landsberg
ctccatctgatgtctcctgctataattaatcaaacagttttgtagaatcactctaacacataaaaaataatgtgcatatttgacttcatttaaaaactaatcgatttcgtcggatcgtatgagatcccttgtcattaggcttactgttgtgctgaaagcttccaaagacctattatatcggcgtctcatttgtgatcctgcctacgcaattttttggaacttgctgatttaggagaattgtattgcaaaaagttagtacttatttaaaaagactagggacatagatgcaataaatctaatctttattaattagtcggacttttttttttggtaagtattaattaatcggacttgaaacaatgtgatttacactctacaatttttcatgtatatatataaatattgatcaaatgttgaatatctatgtaaattatggtcataggaaaaacatttagcaattagtttttacaaattggtgtggacactttcctttgtttgccaacttagcgctaaatggagcgatagctcaaacaacttgccttatgtagtggcattatatttggtgttttggtatttaaagggattctcctgccagttccaatttctcttattgttgcccaaaaaaaaaa

SEQ ID NO: 71838 - DNA, 736 bp, Arabidopsis thaliana landsberg
cctggtggcgggtaaaggaatcgagcaggccgaggaagccgggggcggtatccggatgcggttcgaacgggccgttccagtcgaccttcagcgccagctccgtgagcgtgtcgcggctgcgcaggtagccgtcgagcagttcgtccttcagcgcgcggctgtagcgatagccggtctcgaagctcgtcgaaaactgcacgaacaagtcgggtgtgccggcggtttcgggctgttgttgcgcttcgatgaaggcggacaccaggctcagcgcattgccgggaacgcgccatacggccaatcgcatggccgggtcggcgctggtttccagccagcgttcgagcaaggtgtcgatggccttctcgaccggattccgtgtggcagtcatggtcgcgtccctgcgatcaattcaggctgatcttggcgccggtgatgctgacgccgccgccgtcgatcttgatcgtcgacccggccgcgctgatcacgatggagctgccgacgatctcgatgccggcgccgccgacctgtagcgtcatcttgctgccggaggccagcgtcatcgggccgctggctggcgtgtcgtgcttgccgccggcgacatgactgacgtcgctggccaccatggtcttgtgctggccgccgatctcctgttcgagattgctgcccacctggtgcgtatcgctggcggccaccgtggtggtgcgggctgcattgtgggttttggtggtggcgcaagcac

SEQ ID NO: 71839 - DNA, 712 bp, Arabidopsis thaliana landsberg
aaagcgttggagaatggtatactgatgttttaagttacgtccaaaagtattgtaacatactgtaatacaactttagacttttatgctaagaaaatcatcttcatgggtttggtgaaccatataccagtagatagtttaatagctaaacgaaaaaaaatatagttaaatttttgatttcttgaatttggtaagaccacttctccttgaaaatgaaatgatataaattggtaggactgagaaaatacacatgttaaacatttggtgttcgtattctactctaacattaatgagtatggaggtcgtctggttggaaagcggtaatggatgtttcaatattcatttgatcggactggattcgaaatacatgtacatttgcaaaccaattatataagtaaatggtcctaaatacacaaatacccaaaattcatgtccaaactcgaatcctcgattcatatagtctactgagaaatatgagccaaaatatttggatatagttcaaaaatactttaaagatggatagagcagatcaaaattcttcattagttaatgttcgagagactttatcgaaaataaccaaatattattatgaaatgccaaaaaataaatgtataaatattactttgaatttttcacagcaaaaaaacaagctgagtgatgcatcaatagatcaaaaaactggatcaaacaacttacaacagaagtagtgaaacaa

SEQ ID NO: 71840 - DNA, 199 bp, Arabidopsis thaliana landsberg
caacctcaccgaacaggctctaccattgttgaaaaagcaggcatttttgcttcggtaggtaaaacagaagagatcgaagggctccgtggagggctttttcaatacggcatcgctctcagtctttatagagcctagatagttccctgcgctcagccctttccttttcctgtcagctttttccaacaaaagtattccaacg

SEQ ID NO: 71841 - DNA, 633 bp, Arabidopsis thaliana landsberg
  unsure (1)..(633): unsure at all n locations
gatagcattttccgaggcgcatcaatagttaaagcatcatttaactagtaacattgacaaaaatgagattttctaattatgcttgcgaagtggtccagttgtatagaaatatgggaagtataaaagtttggcgcggcgcttcctgttagcgtgtaccataaatccgaatttgtagtgcttaaccgtggttactgttcactgtacccagagaaatccacgtcatgacagaatttgacttgaaacgtctgctaccctatcaaactattaacaagggaatgggagggaaagaaacacagaataaacaatgtctgcccctccatctcgttgacatggtcacttgaaagcagagacggtaccatgacgcgatctgcctctccgcaagcttttattccttcctcgccaggtacctcttcgaagccatcggcctacacttatcggcaccttcatttcctccgtcaaaactcgccgtcaagtcccttgagagtaatcgcccatatcgacctcgatgcattttacgcgcaatgtgagatggtgcgcctcgggacaccacgcgacgcgcctttagccgtgcagcaatgggatgcactcatngcgatcaactatgccgctcgtccttttcgggatactcgcatg

SEQ ID NO: 71842 - DNA, 734 bp, Arabidopsis thaliana landsberg
  unsure (1)..(734): unsure at all n locations
ggttggtccaggtcgcctcaagcagggtcgagccttccacctgttccgccagcgggggccgctctttgtgatagcgaacggcgaagccgaagataagcgccccaaccaccaggagaccggcggtcgagatgaacagcaggaaaaaatagagcgcgtcggcgtagggcgcgatggtcgacgcctcgcgcggaaagagcgcggaagcgttgagccacttcaccagaaattgccacagaactggactaatatgcatcgttaccctttatccattctctttcttagtcaggtcgctggtgcgtgcccgccgtagatctttgcgaaacatcaggaacatgaagccgcccagccatgccatggtgaccataccgccgagttgcaccacgcgggcgacgatgagcgagtgcttgttcttctgcggatcgtagcgatagcagtacgtcagaatattggcgaccggcgagccgatcttgttaccggatccctggacgaggccgagcaacagatcccggggcgagtactcgacgccaaggtaatactgggagagcctgccgtcggtggtcacaacttctatggaggcggcgtgcgcgaactgcgtcatcttgccgtccgggccgggagcggngacgtagccgaaccctaccgccttggtcaccgcggcgatggcgggactcttgccagtcagaaagtgccagccattggccgtctcgggctttccatagcgcttcacatagagc

SEQ ID NO: 71843 - DNA, 520 bp, Arabidopsis thaliana landsberg
accctttctattataaataaaagtcacattcttcgattagatttttcgtttacctcaaaatgaataccaaactatttggagtcaggacatgaatatcctatttgtacaaagaaaaaaaatgatcttttctctagaagtgtctcttttttattttgccatacacgttgagaataaatgatcttttatatagaagtcttttgcttttcttctgagccttaagagcaggtgtagattttattttctatcaaactgttatgaaatatcactaagctcttttgacaaaaagaaaaaaaaatcagtaattaagcactaaccggaaactcaatttgaacgtaatgttaatcttacttttatttggattctcttaccatccacttgcacattaatcatgttttagcatatgcatcaccgtgtccaacatgaaaaccaaagaaatacaatacaattaattcggttcggtaatgtagaaaaatttggaagcaaatcattgggtcaaaatatactttttcacgtgactctc

SEQ ID NO: 71844 - DNA, 740 bp, Arabidopsis thaliana landsberg
  unsure (1)..(740): unsure at all n locations
cagcgtaaccgaccagacgccgaactgggatcagctctatcacgtcgacagcgatctcggctatccgggcttcgacggctatgcgtcgcacaagcggctcaagcacgccgatctcgatgcgccgatgtacgagaagtcgaagatcagcggccattcgttcacgctcaactggaacctcgacgacgtcaacacgttcaagtcgatcaccggctatcgcaagctgagctgggacgattcgctcgatctcgacggctcgccgtacgacatcgcgttcacgcagcgcttcaccaagtaccaccagatctcgcaggacctgcagtggctcggtcataccgaacagctgaactgggtcggcggcctgtattacttcggcgacaacggcggcaccaacaatccgcagcatttcttcagcggcgcggcgaactacgattcgagctattcgaccaagacgcatgccggctcggtgtacggacaggtcgactacaagccgatcgatccgctgacgctgaccgccggcctgcgctacacgcaggaaaagaaggaactgagccgcaccttcggtttcgtcggcagcgatccgtacctgatcccggccggcaccggcgccgaaaagaccttccacgcgacgacgccgatggcctcgatcgcctggcagttcacgccggacctcaacacctatttccgctacgccgaaggtttcaagagcggcggcnttcacggcgaattcagcgatccgacgc

SEQ ID NO: 71845 - DNA, 3331 bp, Arabidopsis thaliana landsberg
  unsure (1)..(3331): unsure at all n locations
atcttcgtaaacagttattatgaatttatgattttcaataaaaggtaattgaaagaaattacagaataaacaagatggaatatacactatgggcttaaaatttactttgttctggaatatattgtcgtatttaactatttatcattgaaagctatgaccacaaagaaactatgagctaaaaaattatactgtatattttgttgagcaaatattaatatgtgaaatgatcggagtggtagggaactatggattttaattacacgatcccattaattaaggatggtggatacgttttaattaaattccgacaacgtctcaaaggaaaataatgaatacaataaatactagatcttaagcttatctcagctctcaagtaagcctttaatttaacaaacaatatttcttcttcttttatctcaagaactaatgaattagttataaaattagaggttagtcttagtcacctttgtatttaggtaaaggttggcgcttctagtggttggtgtttttagtatctcaatattcttattgttttcatatatcaagacaaacttaggacatacccaattttatattgttattcttttgtcaaacgttatttattttcttaagatgctttgggttctcaattatttgtctaatcacatgattaatttagtcgtgtttgtattagggatggaccgggtaattaaataccagttagcatgatttttgatatgaataatcgaactgatatttaagatatatagattggccgaaaagatgtattgttagaacattttttttctttcgaaagttatgatttgatcatcatcggatgttttttgtattagcatggaacatgttttaatataaagaccattcaaattaaattataaagaatacatattagtccagttggaaatatacatgtattcggtctgactgtatctccagccacccgttattaattagaagcataatacaaatgaccttctgtaattcagaaaaaatgttgtatcatattcatatttttatatttttgtatgttttatcatcaaccaaatatttttctactatgtattgtattagatttttaaaaatatttagcatgtcaaatcgtgacatcgtaacatattaacatggcattagtaaaagtttctactcatttgtcaaaataacattattacattatatactaatttttaccgagtttgttaagatctgaatacatactattgaataataaaaagcagtgaattgactcacgtttaaagactatggaatttattttttgatgcgaggtaaattctaaatatattttttagtacaattgtactatctaattttaaaatgagaagttagttatattaataagtacagtttttcataaagtaaagttgtaattaatttttaaagtattgtacttataaagacatgaggagacaataacatcgattcgtgaatattagaaaatcaaagtggggctcatattttttatttttgttctttcgctcttgtttagtgagcaccgtcacataacttaaggacaatcttcgtgtgcgtccaggcacacgtgtgtttcacaatataacgccacgtgtcaataaggtcggcgatttgttcaacggcttgttatggacgcccccgactcgcggtttgatgacgtggccgtttcgctcattggattcttttttcgcgtttcgnctttttttttttttttttctttcccacaaattatttgtgtaattttgttcgtttcaataagcctatattgtaatttgaatgcattcgattaaaatagaggacggaacaataaaactccactacaaatatctcctttttttggacaaatatatattctgtagttactcaacgttaatttataaccaaaatgaaaaaatatttgacacagaatttgatatgtatatatatgagcaaggttaccaaattggcaaattttggaatccacataatttaacctcttttcttttacaaagctcaggttccatgtagagatatatatatatatatatatatatatatatatgtaacgtgtgacagtgtgagtgtgacttattacagagatgtccacgaatttcttatatatattttaaaatatttgcatgggtgcatgtttcacaaattaatttggtatacaattatacatctttttaaatattaactttcgtaatttcaggattttatgtttatttgagaagcttccaaggaaatgctttgttattttatatgaagaaaataaggaaacagacaagaaatcaatatgagcaatataaaaaccatgcataaatgatgttggatatgctaatatatacgtagacgtgtacttctattaatcaattgaattgtatttgtacgtatacggctattcatgtgaaccgatgagatattaaagagatatgggcagagtgaaagaagcatgtcccaatacattttatgtagaggattcaataatagctaaaatatatatgtacaccaacctatttattagatacatatgaattattgaaacaggaaatttatttaggtccaattagaaagtttgtgactttgactttttgcgagacaatatgtctccgtatgtatcttaaacttggatcgtgtcgctcgatttgtagctttcctccatgctcacgcacgaccggtacgtttatattttacactcattcacgaacatctcgttataggaaaatgtatcgaattaacatacaaatttctttaattaaaacagaaacatatacgaactattgcggcacggcggcaccgattcatgtcaccgtttagaacacacacactgacacacataataaatttacgcagaattttgatctgagtaaaagacggtgacaatactaatgtctccaccatttcggcgaaggaacatacaaaacaaaacaaagcatgcaaggagattgtaaaatgactcttattgactcgtcaaaggaaaatgcataaatatatatttggagactattctaggccatatcaacatttcacagatgacaagctttgttcacaagattattgaaattcaactattctccaacaaaagctaatcaagtcgccgatcggtttgcgaaaattgcacacaattaagaacgtatttttccaatattgttttttttatcttccttgatgtattaacgatttgttatttcaagatcatgaaacttacgatcaacgttaataataaaagttagacgttttaaaaagataaaaattaaagcattacataaaatttatggaaataaaaacttaaaaaaaaagatttagggaaataatagaggaatatgagaagtatgtgttcagagagatatctcctaatggatag

SEQ ID NO: 71846 - DNA, 519 bp, Arabidopsis thaliana landsberg
  unsure (1)..(519): unsure at all n locations
ttagaatattgacatggtccacattatgtaccataatagaaaagattggatttgaaatttatatatttcgggatttccattcgataagaaagtaaaaacctttaaatataattttataccagacaaatggacagctaagctgttgattagcggaactagtcttttgtataacgaaatttttaacgaataagaggaaccaaaattgacaaagataactctccttttatatttacaacgatttcatttcctgtcaaaaattaatttaagcctcctgtcattaggcttttttaatgaattgtttctcaggccagagctagcaggaaagtgacagttnnnnnnnnnnnnnnnnnnnnnnnnnnnnnnnnatgtggttttacatgattatgaggagagaagaagtaattagaggaccaacagatctattctttatttttgatccaagttgttgccaaaaaatttaaaatgagacttgaaaagaacagatttttctttttctcctggtggtaaaagacgttttgg

SEQ ID NO: 71847 - DNA, 637 bp, Arabidopsis thaliana landsberg
  unsure (1)..(637): unsure at all n locations
atggctgaacgtgttgccaagattaatttatagtcgaactccacaaatcgaatttgaattctgatcctaacgttacatatatatcgaaactactcgaaatctccgtcattgtgatcaccatcaccatctcttggttaaaacaaacaatattgtttgttctttttgaaaaaacaaacaatatttattctgttgttacgacggctcgagtggagatctagagtggttacaatgttttattcaaatggacggcttatatgtgacgagaggttttgcgggctccaactaattaggtgagagacggtggatctgatgctttacgattatcatacactcgtagagacacatggcaatctcttccttttgttgggttcaaatttactattttagtatcgtttttttgttaaaaatactaacatacagaccacacaatttcaactaagacaaagccaaagcataaaaaacaacggcccaagtagcaaccaaagcccgtaatggacaggacacggcccaagccgcacaaggaatggcctgtgtggtcgtgggattgtaaccaccaccacctccggtgaatggggttggtgtagtggttccatcanctacaccgcttgaagagttagacgctacagtgactgcgagc

SEQ ID NO: 71848 - DNA, 146 bp, Arabidopsis thaliana landsberg
gacgccgtgacctatacctatcgagcggacgcgcgatcgtccggtcgggccggcagctcgagccttggattttccagcagcatccgccatccccgcgcctcgcggtagggaccgggagacggtcttcaagtatctctaccagaagg

SEQ ID NO: 71849 - DNA, 340 bp, Arabidopsis thaliana landsberg
gatcgtaactagcaaacatgagatcatgcaataaaagacttaagacaaaaaaatgtgccacgctggtaatgcaaattttgtcgtggtgtgtagataaacaaaagtttcagacttaaatcaaaaatacataaacgttaagggtcttacttgcaaatttgagttttaccggtaaaaaaaagagtaacaggaaacgtaaaaagaagaagaagaacgctcaatggagaaaaaacgtgtcccgaagtggcaaatcacgcgacgagtctcttcttcttcttcttcttcttcatgcgttttctccttccttcttaaaagctctcttcttcctcctcctcttttacca

SEQ ID NO: 71850 - DNA, 428 bp, Arabidopsis thaliana landsberg
  unsure (1)..(428): unsure at all n locations
nnnnnnnnnnnnnnnnnnnnnnnnnnnnnnnnnnnnnnnnnnnnnnnnnnnnnnnnnnnnnnnnnnnnnnnnnnnnnnnnnnnnnnnnnnnnnnnnnnnnnnnnnnnnnnnnnnnnnnnnnnnnnnnnnnnnnnnnnnnnnnnnnnnnnnnnnnnnnnnnnnnnnnnnnnnnnnnnnnnnnnnnnnnnnnnnnnnnnnnnnnnnnnnnnnnnnnngagctccatccatattgagacacattcatggacaacgatctcatcattgttgatttggccatgcagtacggttatatatgacataacagatagatggttcttttctatttgtaatctatggctcaaaacttaacgagagatgtcacacgcgacgattctgtttgatgcattggactttcatgaaaagacatctactattatagatattgaaac

SEQ ID NO: 71851 - DNA, 1227 bp, Arabidopsis thaliana landsberg
ctattaagtcagaggttttctcatccagtgatgcttatatgctgatgtatagtcttagatgcgataaacaggaattccaggaaggacaaaatgaaaatcctattgacattactaaaggagaagttaaacagcttaaaggtggttatcttccaaaacatctttctgaatggatcaataacatgaatgcagtattccttgagagttgcaagcaatataatttaagaaaggaaaaagaattgaatgctttgactgaaaggaggcaagaagtacggacaatcctttcagaagctgctgttcagtcacttgaagaacaatatttttggatctccacagattggcttcgtctatgggctgataccactttacctccgtaagtaaagctcctcatacatgcatttgttgttattctctacatactgcactgctttcaacataggatgcattaaaatctgcaacagaatatcatatcattcaaatgcatcgtctataatttatcagaatatgatggcgactttgtaccccacaccaaacttctaaatattgtttccctttgaaaatttatattttatttcagtttccagctctaactggtagtggtaaatatgattttctgtttagcaaatcagattacatctttcaagtgttcttgattatatttgttcttgtatggtgtagcgctttggacaacacccctttactgtgttcccatgggaaagttcatgcctcaaaagtgaattgcatgaagcggatatctgaacttgcatggatcaagttagaatcaaaggtatgcaatgtactttgtgtagctcatgtgttagtttctttcctttttcggggcggaaactttattgatttcaagtttgcatcagctgccatcattaactatttgtcagaaaaaattatagtttctagattccagtagacagacttctgttcgactatcaacatttttcttatgctatgttattatttctgatggaataattttctcgtatgtttagttcaatggcggaccaaagttagggaaaggggactactgcagggactgccttatggatggtgctcgcatggttgtgtcttctgacagttatagggatcgaagaacattcatgaaaagcatagcaaatgatgttctttcgggaaagtgcgaggacggaatgtattatatcgctagagcatggtatgtgttcaagtcttttgtaagtttgatgcatatgcagatggcgc

SEQ ID NO: 71852 - DNA, 245 bp, Arabidopsis thaliana landsberg
gagtgaccaaataaattgtttatctcaaaacattttctcttcattttgatccaacaaatcctatttgcggagtattcatggatagttacaaaacactagcgggaatggtcattgtacgttcattctacatctatgccttttgaactagcttgaagggttaaagcgtacagaaaaactatatcagtggttgatagagctagtgaaattcttacgagatttaaactgcttacgcgatgacactatga

SEQ ID NO: 71853 - DNA, 605 bp, Arabidopsis thaliana landsberg
ttacgtcaccatccgtctttgccctaccgcatttatatcaatttcttaaccgtaatgggtcatttcaaattactattctaatttggaagttttcaggaagggatttttactcaaaataaaattattctaaatatattacaaatttttgaataaaataaattcgttatcacatactggaaatataatactcaggctacaacgtgataacgaatttattttattgataatggaaacagaacatggtttcttacgattatcttaacaaagtcttaattatctgacaaggtagctgtaaacgattccacgccgtacattaaataatctctttctcttataagatctgttgagcacgatggcttcgacgtgaatatagacaaaagtggccacatatattttaccaagataaagtaagttgaatatgggtattttaactttaatttatttatcatttataattttataatgatatattacacgttttctatatattttcgtaatgaagtctacgttatgattgagtgttgctttgaaagttactttatacagtttatggcagagtttaataaggtcctttaatcatcaagtctctctcagattcgtaaatt

SEQ ID NO: 71854 - DNA, 339 bp, Arabidopsis thaliana landsberg
acacactacttcttttcacaatacttatatcaaatatttaaaataatatattccttttaagatttggattttagaatctagactaatctaataaaatttagagtcgccatgttaatcgttaacgcgagaatatgtttattgataaatgacaacattaacaagtaatcatcattgtactacggttacttaattctaactcaaaattattgtacgtatacatacatactccatgacgtataataatacgataaagagaaacttatccgaatttggatatgttttttcaattttcatcatttacacccacaaaaatatttaaaagggcaaataatagaagac

SEQ ID NO: 71855 - DNA, 505 bp, Arabidopsis thaliana landsberg
  unsure (1)..(505): unsure at all n locations
ccccgccgatgtcgattggatgcgtccttcgcacatccactacaaagtgcacatgaaaggtttcatggtactcacgacgcagatgtattttgccgacgatatatttaacgcgggcgatttgattttactcaatttgccgcctgaagagcgcaaaaaagtcgtggtggatttcacgcaaacgacgatcaatggaattcccagtggaaaattcgacgtgacgttgaagaaaatcgttaaacccgcgaagcctagctaggccaggcgttgaaggccgcgacgatctctttggtggcgaccgttttcgggaggtcggcgcggtaaaccatgcaaatagaatcggtgaagtgcggcagcccttcatcgaaaattttcagcttgctgttgcgcgcttctactacttttttcggaatgattccgacgccggtgccggcttcggtttactgcgcgattaattccagattggccgtggtgagaacgcggtcgaacgcanacgtttttgtttttg

SEQ ID NO: 71856 - DNA, 622 bp, Arabidopsis thaliana landsberg
cgcctattttcgggtgaggaaatgaatgccagtaccagctcgcggccttcattggtttctccatatttctccatcttcaccatatccggtctggcttgtgccaccgccctgaaatagtccactatgcgatggtgccgtgtatatttcttccctatcgggtatcctaaaaactgttcaggactttgtaaaccctgggcagatgcataatatgcgagacccagcaggcaggcgagcagcagcgtttttttcatagggatgaagatagggaaaagccgagatgtgggtgtgagttcgtgagttattcatacctttctgctatgagaaaaacatatctattgttgctggcgctgtgtggagggctgcttgtgtttgcacagaaagtgccttccattgtaggggcggggaaatccatcgatccttacaggtattccatcgagaaaaaagccatctaccggaaagcgtctgtcagcagtgcgcatccgctggccagtatggtgggtgctgccatgatgagaagagggggcaatgcctttgatgctgacatcgccacacaattaacgcttgccgtggtataccccggtgcaggcaatatcggctggcggcgggtttttactgggaagaa

SEQ ID NO: 71857 - DNA, 493 bp, Arabidopsis thaliana landsberg
  unsure (1)..(493): unsure at all n locations
gaaccggctgggcctaatttgttatattttggtctaaaaaaaagaaggatctactgcatatttcttatatttggtgatccttgatgccatagccgtgaccagaaaacttctttacacacttattgtaattgttcaaattcagcagggatatgcccaaagcataggcaattacgctacttcccgtactaccggggttacttacagcagtatttcgacctcaggaaatgcagtaagctcatggcgaaacagcggaggtggattccagcaggacgataaccgcagtaattttgtggacattggctttgatttttggtataacggcacccggtatatgcagttatcgggctctaccaatgggttcatcgatttctcttcctcaacagatgacggtggcnnnnnnnnnnnnnnnnnngggtatgtaaacagcgctatgtcatcgtccaatacaagtctttcgaccaacccggcctgcgcagttatctatgatgatctt

SEQ ID NO: 71858 - DNA, 372 bp, Arabidopsis thaliana landsberg
  unsure (1)..(372): unsure at all n locations
tgnnnnnnnnnnnnnnnnnnnnnnnnnnnnnnnnnnnnnnnnnnnnnnnnnnnnnnnnnnnnnnnnnnnnnnnnnnnnnnnnnnnnnnnnnnnnnnnnnnnnnnnnnnnnnnnnnnnnnnnnnnnnnnnnnnnnnnnnnnnnnnnnnnnnnnnnnnnnnnnnnnnnnnnnnnnnnnnnnnnnnnnnnnnnnnnnnnnnnnnnnnnnnnnnnnnnnnnnnnnnnnnnnnnagctaacaaacattcaatggcaaaaatccattgtcctgctatttatattagagggctgtctgagtcctttaccaaaaggaggaacatgccacggttgccctcatggtctaaacgttgggtagaaataaagttctaacccaaaa

SEQ ID NO: 71859 - DNA, 512 bp, Arabidopsis thaliana landsberg
atattttcgattagtaacaatcgagactctatagttttgtttaatcacacagacccaatgtccacgtctttgcttatttcatctatttttcttaacacgtcttggagaatatagtaatactaaaaagacacacatcgttttcatttgtcaactactaaatacacacatattcatatgttatctgaatatacaaaaagttaatactttttaataaaagtaatgttaagtagatttttattcaatgctaaataatatatatatatatatataaactagattttgttggctattgctcttctttcatgttttaagttatattttgaatacgtgtattagatattaatatggataaaaaaattatagcgaaatcatgttttgaaaatgtaaacatgaataagtgatatattaacaaaatgactagtttgatgcatttaaataagtaatttgtttatgatgattcttttttttaaaatgatgaataatattttatttcaatttttttaactattcgt

SEQ ID NO: 71860 - DNA, 342 bp, Arabidopsis thaliana landsberg
taattgcctgaaccaggattaaacagatttaccggattaaacagatgggtgttttactgtttaagatcactagcgttttgatgttattctaatcggttctttgaaattattgtctgtattgggtttcggctgattctgagcctaccacgatttgaattttcgggattttcgcactattataacagattgatattcaatttatatgaatcaaggctgttatttgttctcccagttgatttcccttatttctcctacaagttttaaaacttgtgtaaaaagatataacggagactataagactaagcactttacctgttggcggcaatacctttgtatggtttt

SEQ ID NO: 71861 - DNA, 388 bp, Arabidopsis thaliana landsberg
tacagaataaaattcgctgacataactgccaataaaaatcctttcacctacacacatgtgtaacctttcattttcaggggtgggcgcagcgctggaagataggattgacgtgactccagtagatccgatcaaacatgtgaattgatgaagtttctatctattgtctaagtatagaaagcatagacagctgaggattaagaaggaaaaacatgtctaaggtcttggtactgtttgattatgaaaaatatacaagaaatctctcctaatccaatactgtctcagaggtcagggtttgacacaaccctcaaatgatcttatagagcagattcattccctgcgtgttatatgcacacaagagtctgtatatctaatttagagagagtacctg

SEQ ID NO: 71862 - DNA, 697 bp, Arabidopsis thaliana landsberg
aaactacacatgtgcatatacgtatatgcatatattaaattttagtattattcttattgaaaatgacgactaataattcccacccataatatgtttaaaatttgcatgtattagtcctcacctttatattttcaagcaatgacttatctacattttgttgtttagtgttaccgacaactttgattccccaaagttgaatttagctattcaattcaaagcagttttgattaacgtttaagtactcacaacacgtcaacatatactacgcgagtgttcctggctaaaagagttgcatccggagaaactgatgtctgaggtgtcggaaaatttcctgaaggatctagctgacgatctaaccctgcccgatgtgcggtaggagcaacacaaatgactgctcttggatttacttacgtgatcgtccctatgaaattgacaagtagagtttttagctgtctctttacattgattgtttagatgatcttttagataaatctgccaaaattatgtgttagccttaagtttgattttgcacgtttttatattttatatgtttcatacaaaaaggaagagagaaaacgcacgaaacacactttggattttggaacatagagacatatggacagccatcatgtccagatttcaagtacattttggagtttcgaaacaaagttgatttacatcctttagaaaatttgta

SEQ ID NO: 71863 - DNA, 422 bp, Arabidopsis thaliana landsberg
  unsure (1)..(422): unsure at all n locations
cttgcccatctctaacaattcgtaaacgataaaccaaaannnnnnnnnnnnnnnnnnnnnnnnnnnnnnnnnnnnnnnnnnnncgagaaagtcccgatgtgtcagagacagagagagagaagaagaagaagcgagatttttttgtttttcagcggcggtgggtcacaccatcacatgtttcccgcttttacacacaaatttccaaatttattggtttcttaccaaacctatcagatctaatttaggcttttggttctatctgggctttaataggcccatttatttaacatctttaacgtattgctcttataggcttttagcacctactattttaatatcggtgctcaagtaaaatgactgcaataccttgaaatgatatgtaatcaagcaaaacaccgaaccctaattggtaaacccaaaat

SEQ ID NO: 71864 - DNA, 2062 bp, Arabidopsis thaliana landsberg
tgatataattattattttaacaacactagttaaatttcggatgtatacaacttgcaatgaatatagcatctaaaaacctcataatatttgtttttttctgcttgactttaacttgtcagtacttttcgatcatttagaagttagaagacattaattattcatggaatgccatggtgagtatacgaccacgtattcacatccacttcctcatcattttaagagtcaaaaatatctgtgagaggatcctggcccattaaaattcaaggcccatttagtgtaatatggcttcatgttctctctttcctaagaccgtttttactgttgaccaataaagtctgaactcgtgatgacgtggcgtgaaatcgagagacccacgtgtcatcggcgtgccgttatcctctttccacttccggtctccgttcccacctgagtaaaccatactggtcgtgaaatgacgattctcgccgggttgatacgccggcgttttagtagattagttccggttcaactgaattacggtttcgaaccgtcgcgaattctctttaacccgagtcaaggaagaactcggttgctgagcggcgaggctgagtccaatcggaacgagtttccggtggagaacgcttacgatatcttgaatgtctccgaaaccagctcaatcgcagagatcaaagcatcatttcgcagactcgccaaggagactcatcctgatctgatcgaatccaagaaagatccatcaaattcgagacgattcgttcagattctcgctgcttatgaggtacaatgaagaaagcttcactcttcactcttatgattagtttcaaaatcgaaaatttcaagcttttcaagcttttgtgatagagttatagctttagaagtgtctgatgaatgatttgtggtgatgatacagattctatcagattctgaaaagagagcacactatgatagatatttgctatctcggagaatggtaatgaagaagcactcgggacaaggttatatgattcacaggtataaaacaggattgacattgagtcaagagatggaagtagttgaatggttaaagtggtatagagaagcaatacatgatatagtattggagaagagagtagcaaatggtactggttacttagatgaacttgaagaagatttttattcagctatacgagcggcctactttgggcctgatgttgaatctgttgagcttcttcctgattgatttgaagctgaggaaaggtctgtgtatgatacacgagagggtttgcatttggtatcaggacgggatctttttggtatggattccttggttgataacttccttgagctttcttctgcttgctcaaagaaattggctttgtcgtcgttgatggattcggaccttggtcaagcagttgagaaaggcaacaatgacatgatgtctgctaaaaggattggtcttcaaatatctcatatacaatcttcaagaagtaaaaaccatgtttctgatgcgtataaagatattcagctgcatgtatctggaagagttgttgctacagccattagggttcccccaaaagggtatcatgaaaagaaacaaattgagggtgatcacgatcttatacacgttttcctcaattcagatgaaggatctaatcatggcactgaatcgcctccgggaaatgaaagtggtgccagacttcttgttggaactataagtggtcttgggacaatcccagatgaaggttcatgttatgtctatgatgggaatggtgctaagactcatgtgataatgaaacataggacatttctggtttgtgacttatatgatctagcatttctttttatgtacctttcgcaaattacaacgtgtactttttcggggaattgttctgtgatgcatatagagatatgatccgctagttatttgatggaataggcatgtatgaaaattcttcatccacactctacaggtgagacatttgcactggtacaaaattggggaaaaggttttcatttgtgaatgtagatgcagtagagcgaagttaccaccaagcaagtaagccaaatattatttttgtttatttta

SEQ ID NO: 71865 - DNA, 517 bp, Arabidopsis thaliana landsberg
ccctgacccgtcaaatttcatgacattacctgttacacctgaaaacgggttggcatattctacgtatggcgtatcatcaggacttatggtcaggtccatataaattacaccactgagggaggagctgaaaccggcagcacccacaacgctccatgacgatccgtcaaatttcatgacggtggcattgttgctgttggtggcatcggtaaacccgatccatggaaaaccggctgcatcgaggtccatgctcaaataacttgcacccccgggtgaaacttctgccgttgcgcctgtattgacccatgctgttccatcaaacattttaacgcaggcgttgccggtggtaccatcaatataagccaggtagggagtaccgtaagcatttacctggatgcaggtataagtggcagtaccggatgagatacctgccgatccaagctgaacccagctggtgccgttgaatttcatgacagaggccattccgctcgggccgtcctggtaggagaaaaacaacgtg

SEQ ID NO: 71866 - DNA, 124 bp, Arabidopsis thaliana landsberg
tgaattgggatgcgtaccatggtatcaatgaggaggattacaatacctgaccactgaggcaacaccaccaggagggttgtatataccataacagtcgccttattcccgcttgcctccacgcaac

SEQ ID NO: 71867 - DNA, 470 bp, Arabidopsis thaliana landsberg
ggcatgaggaccgcagccagagcgaggccagtctcgccgcccagctcgttccagagggcgagtttttttggttggccgcgctgtgctcataaaattttaaagagggaaaaacggcccatcaacgtggggggcaagaccgcttccccgacgtcgtttgtcgatttggtcggacttgcatcgaactcacgaccggttggacgagaagtccgtgaacctccacatcgcctcatgcaggctgacaatggctctcaccagtcaaatcattgtgacacgtcatgaaatccagcctttggatgttccagagtcgtagctgcatcatgcattgatgcccaagcgttccggcctttttctctgacactatggatgctgatcgcactgtttgcaccgagaggactgccaccacgttatgtgcgccacgtcagaccactgaacgtgcgccttgctctcgtacagagggggggatcatgatt

SEQ ID NO: 71868 - DNA, 396 bp, Arabidopsis thaliana landsberg
ctggaaggctggacacttatctgatggattgtgacattgcaggtcacactgctctactattggatgatgatgtcactgttactctacgagaggctgccaagctctgtgtaacagggctactgccagactgcctggaccgttttggtccaggatatactgctactaatgaacgttgtgctatttttatatgcccagccattgcctgaggtgcatgcattaaaacaggtgcaccgaccggttgtgatgcttatgaatgcatacattcctccactatctttagcacggcccacagaagcttccttgacgccatatcacgccgaagtcacagtatactctcttttaccaactctctccctgtctatagtatctagagtgatacgattctgcttgcgtgct

SEQ ID NO: 71869 - DNA, 621 bp, Arabidopsis thaliana landsberg
  unsure (1)..(621): unsure at all n locations
cggctctcagatcaaatttcatagaaacactatactatattaaacgatatattgcacaacacaactactattatttaaaatttcgcaggcaatttttcagagaaaatatagcgtatattttgtagttctgtaacttctgttcataaaacatacatagagctgtgtcacgaatattacatctcatctattggatcaaaatataatattacccaaaattagtggacctatagataagagacaaagaaaattcttaacatgtaatattctgattaggtattttgtcttctatttccggcaagcgactaaaaaaagattttaaaaaatccaactatatagtactatatataaggattgacttaaaccagaccagagctcaaataattggaactgtttaaaattaataatggagctagtctacgctataagtcattattattaaaggattagttgaaaacttagctaacccaattaatattttctctgttgcttcatccaagactcatccctctcttgattcgatacggcaacactttatttataaatttttcataaaacatgatggtaaatcattntcgggattctacaagttatatntatcgtgcaaataaattttatttatca

SEQ ID NO: 71870 - DNA, 356 bp, Arabidopsis thaliana landsberg
attgattaaagattaacatttgccaaagaggtttccgaagttttggtagaaactatattttatgcaggtaagaaaaaaaacaccagatctgaaatacaaaacaacaaagaacagaagcgagaaaaagctaaagccggtaaaaccagatcgtagaaacgcacaagaaaaacagaaacttgtattagaaaaaatgtaattcaaacatcattcttcaatcaaacatcaatcagatgaagaatccgaaccagcgacgaagagattcagaaattacacaaagagatgaagatcccagaaaaaacataaaaatgaatgagagagagatcttaccaatttgaagagagcagatgagaaatttg

SEQ ID NO: 71871 - DNA, 347 bp, Arabidopsis thaliana landsberg
ggtttttcttgtaccatgaatcggagcgacgcgatgtctgtagatcaagacgatacattgtaaaactcttcttcgattcatgcttggaatcttcacatgaactgtgagagctattaaatttacgatgtgttggacggacatggctgggaacatgtgcgtaagtttcctgggtttaatcagatttagtcctattgcgtgggagtagctactaaatagggcattggggggtggactttaagtggccgtaaattgcgactagcgggagcatgtattagtgaagaagaaagttgacttgatggatcgctacaagtgtacccagacaactgttcagaggtatcttacccagg

SEQ ID NO: 71872 - DNA, 623 bp, Arabidopsis thaliana landsberg
ttgtctgacgagctgtctactaaacgagcgttagtgtgagttaaacctctaaagtttgatagctcgaacttctatcgagattcttcggacaatctttcttagtatcatctcgatgttcattgttataccatcatttgctctcttatactcaatagacaaggtagtagttagctcgtgcaatcaataaaaagcggtcctattttgtgtgagtgagtgactcatttttttttaagaagataaatcgtataggttatagcttatagagacctaataaaattgacatttactagagtctgtcctaaaacaacaaaaaaataatttttctttatttttaattttttaattgtaaattctgttttgttttagttcttttaaaagttaacaatataaaccactcactccctgaataatattaatcctatcattttgcatgaatgagtgagtgtctcaattcctttgaataagataaactgtacaggttatcaattagcaaaaaagaatctttttcttggtttagattgaaaacatatttgtgtgttggtcaactgatttattcagaccaaaaaaaaaaaaaaaaccctcagtcgtttaaacgttacaggttctttgttttaacgggccct

SEQ ID NO: 71873 - DNA, 698 bp, Arabidopsis thaliana landsberg
taagatatacaaatttagacaaaagtgtacatatatgaagaacactttttctttctttgacaacatatttatagggacaagtacgtaaatataagtggtcaagagaaaaacgatagagatatgttaggactaagattaaaacaaacagctattcaatatacatgagcaaaatcctttgtatgtacgatcttttgattagctactttcaaatgataaataataatttttgctagttttaggaaatatacttaaataattttatcatttgggtggaatatttttgtactatattctgctagatttttataacaaaaaagtaaaactaatcattctcccatttttggaatgaaattcgaaagaattatacatttcattgaccaaaaatatttcactgatctttggatttctttcttcttactattttctaattctaaattgtttctttttttcaatgtttgataattttcgaaaacgaagataaaaacaatgtttggttctttaatttctgaaaatgaaataaccggcaaataaaaataaacctttgaaaatgaaaataaaagcaaatatacagagtggcttatgctcaactattgtgatttgtgaactgtgtgatattgtagccaaattagaaaaagaacccgcctaaagattattggtcaaagaaacacgttcagttcttgacgatcacgcaacaacac

SEQ ID NO: 71874 - DNA, 519 bp, Arabidopsis thaliana landsberg
  unsure (1)..(519): unsure at all n locations
gcactgaaaaagaaaatttcttaaagtggattcttttcgatatctttctctctaatccatacgttcgaccatttataacttggtctgtgttatcagaattttaacctacagtattttgtttggatatcactttttcttttctcgtctttctttctagtctattattcatcctttttcgtctttcagatattcannnnnnnnnnnnnnnnnnnnnnnnnnnnnnnnnnnnnnnnnnnnnnnnaggagcaacaccaaacccgcacgagagcccatgttatatggggtatctatcccgaattataaaatttaaacttaaaatataaatatactaacagtttaatattaattagattatacaagaaaaaaaaagttaaaacataaaatttgactcatctattataaacttatatagttatttcaacacatgagatggccaaattggagtaataactagtgggtttagtggagtagtgaagtttaagttttcctttctccaaattggtttagctagtggagctc

SEQ ID NO: 71875 - DNA, 553 bp, Arabidopsis thaliana landsberg
cggaattcgttggcataaagctaacttaacattagtttacatcaaattcagactttttgatagtagtctgacgatctgtcccttccaaaaagatcaacttttacattgagtattgggattctcatgtagtgccaaaagccaatcgcatttagaaagactccagttgcaacaaaaggaatcaggtagaaagaattaatccatagtagaccacattcagctgtattaccgagaatgaaatctatcaggaaatgaattatagactcgaagcctagaaaaattccgccacccacaaaactattaaaaagtggagtgaatccgttatcggaattaaacgagtgactatttcttgtaacaatttcaaaggcagcccaaagcacaagagctggaatgattacgtaccaatagtgcgagaaaccataggaaatccaaaaccacacccccgaataaaggttccgggatatcgttataagtgcacacatagtgcccaaggctgtgttgctccataatttttaatatcacccgttaggtcgctagacaggtgaccatgagtgct

SEQ ID NO: 71876 - DNA, 2039 bp, Arabidopsis thaliana landsberg
agttatggtcagggtggtaaattttcaaatgacgggtactcagcttggatttaccgcccttttagaaaccccccttttatggagggaaagaaaaccgcaaaaaaacacaaaggaagagtttcgagaccttgtttctctgttagagggtcttgtaagaatgcttatgtggataaatcttttgagttatatcgtcttttgttttacatccattacacttacacatgtcgtatcattattggtcaggatggttttgctaggattgtcgtagtgtgtgtgatgcactaagatcaaacggtcgtcaaggctctccttaaaagcttatgccgagaggttttttgctattttgtgtggtaattaactggtgagagagttcaacatccaatctttctctctctctctatcttttatctctcacactcttaaaatgcttcttctatctccgatctctgcctctcttccaccgtcgtttcaccggggtaatttgatccggcgatcaattaagccgttaggtagggttgttgcaaaggccaaggacaacaccgacactggtggatttctggagacggcagctatagccggtggtttagtgtcgacgccggttattggatggtcactctacactttgaagaccacgggatgtggcttacctcccggaccggccggtttaatcggagcgttggaaggtgtgagctacttggtggtggttggcatcgtgggctggtctttgtacactaaaacaaaaactgggtcaggtctgccaaatgggccatttggtttgttgggtgcggtcgagggtttatcgtatctgtcggttctagccattcttgtggtgtttggtattcagttcttggataatgggtcggttccaggtccacttcctagtgaccagtgttttggttaaccacgtgtaatgtcgtataaataaagtgtcaaattaataattgctttcattgaccatattcgcaatttagccagggattataaaatttaatgagaacatttggtaatcataacctacgacaaaaaaaaaaacaatctctacataacgtacaatacaacaactagtcggcaaaatggtaaactgtgagctctataaactctcttgttcagtaagagggtttaagtgtgacccggttataacaatccgacatcggtttgtgcttttcatgttggaccaaaaacaaatctatgacaagttataataacaaacgaataagtttattaatgaagatttgaaattatgattatatatgcttcgttacatgatagatatagatttgatttggcatggacgaacagatacattgcagatcaataaaatataaacactcgtaagaaaaagtgtaatgtcgtataagaaaaagtgttgatatggctggcagcccacgaccgtctcgccactggtgctcgtaagcttaagtgggacagaggagcattgagggaatgcatttttatgtagccactgcattaaaacacgggaccatctctttttctcttgctgctatgcttcggaagtctaagcagcgcttgccaaaggcgtctttaagacacactactccaacggctggtctcagattctcactcatgtatccaagaatcatcattgtcgaatcgagagtttattatcaagtatatcttccaaatcactgcatacattattggagggaaagaaatggacggagacacagtgaaacaccgaatactgcaggccaactaatcaaatggattgatatataaatgagaaatcagatcacaaccaaacaaaggtagaaggactgtcgttatgaagcatgcttccaagcttgacttcaaagccgatcctaagatttagcaaactcaatctaagtttcaatactttctttatcaaacgcctgatgcactagttgtacaacgttatttttctaaagatataatttaacatttttttcaaaaacaaaatgtggattaatgttaatatcgacacattagagtaaaggatattatttaacttttctatttagtaaattaacgaaggatttgaagtttccaagcttggtttt

SEQ ID NO: 71877 - DNA, 288 bp, Arabidopsis thaliana landsberg
attcgaaatttgatggtaattctcgaaattagaggattacactaatattgtttacctaaataaatgaaatagaaattataatcaaaatcaatttataattaaaatttaattaatttgaactttgcactttttttgttacttcgtaggaattgaataatcgatttgttagattttgttttaaaaaaaagaaaatacaataataaacatttatctagattcattttcggaatcattataaggtttgttatcatcattagagtctacttggtcatcagacttttcgacttc

SEQ ID NO: 71878 - DNA, 2473 bp, Arabidopsis thaliana landsberg
gaactctattctactccatgtccctgaagatttggctgtaatactctcagtctcaagtagtctgaccatgagagtgtgctattttctgttacaataagagatcaaatcataataactctgccatatttgaatcagttggaatgaatctttcatgatagtctctttagggttattaagctcggaactgacatattatcggtgtttacaggaggtcctaagggtgcgattcgctactctctagtttttgctgctgtaggcacagcatttgattatgctacccttaaaggaaaaccaatgttagagagctaccgtaacatggagtcattcaagttacctgaatggtctcctattaaagtcctcgacgaagaagccttagcaaagaagaaagctcaggaagagaagatattccccgaaagagtcctcggcaaattgaacaaagaatagtcttaaccaacttaagattatttctgttttgcccacataaatttcttaagttggaattttgtttatcggtttgatgtttcgtgaaagactgaaagtaattccagaccttgtagatgagacttgaggaggattttggttttttgttgtttcctcaaggtaaaaattttcttgagacataagaaaacatctttgtatgctgacctacccataaagcgtatatattcatggttaattatgggctatagatgacttttggcttaccattgttaaactgatatgacccacattcatgaattcgagctctgattatgatacaactaactagtatgaaccgctaactacgcataatggtcaatatatttggttattataattcttctgttttaattagtcttacacctatatgcaaatttttatatttttctttgattacatcaataatccggattaagtcctagtaattcgttggataaaccaattcatcgctagatgatccgatcatgttacaaaaaaatcgggtcaaaggcccaaaaagcacaaataacctgccccaagtttgatagagaaatcaaatgcggagtttttgagtgtttacgtcatgaggccctaggtccaaagttctttttggtattaatcttataccattttcgtttctaagagatggttacagaatgatacaagtagcggaaaaaaccgaaaaaactacaatgcgaaagaaaaagaacaaggaatagacgccaactcgaacaaaagaaacgacgagatggataagaaccacaacacagaaaaacaattgtagaacgcaaacataaattcaaaattgatgcatatgtccaaaattatttctagaaatgactacatttgcaatgaatgggtttcttctagactatacttgttgtttagttaacgttctagactatacaaattgattaatatatatttaaaatcgtgtgatataggttgaatcgtccgacatagttggtgtatagtggtttagaagtagatactaaaatgtgtgagttgttatgaaattatacactaatagtgatgcgtaatagaatgagcaacaacaacaaaaaaatctcaacaacaacaacaatacatgtggaggagaagaaaaagtcttcgctcttcaaaaaaaaacaattgcaaaaaaaataaagtcacgtgattaaaccgagaagacagggaagacacgtgcttggctacattacaaaaacagagcacaccacaacaaacaacaacactagccaggctttttttaacattcgtctttgacaattgtccatcatcaatggcattaaatggcaaaaccgtaatttcgaactccaccaaggggcaaacttaaaagtcgatgtctttcttcttcacctcggacccatcggagagaagatactactagaagagattcattcacagtgttgaaattaaaaaaccgaaactttctcgtttcttcttcttcttcttctccaattttcaaaattcgaaaagatgttgaagctttcgtgtaatgtgactgattctaagttacagagaagcttactcttcttctcccattcacatcgatctgatccggtgaatttcattcgtcggagaattgtctcttgttctcagacgaagaagacaggtttggttcctttgcgtgctgttgtatctgctgatcaaggaagtgtggttcaaggtttgggtactctcgcggatcagctccgattaggtagtttgactgaagatggtttatcttataaagagaagtttgttgttagatcttacgaagtgggtagtaacaaaaccgctactgttgaaaccattgctaatcttttacaggtcagatacaactttttcacgttgtgtgtgtgtgtgtgtgtgtgtgtcttgatgattggttttgttgtaaagtatgaatctttttgtggtgaattgttgtgtataggaggtgggatgtaatcatgcacaaagtgttggcttttcgactgatgggtttgcaacaacaactactatgaggaagttgcatctcatttgggttactgcg

SEQ ID NO: 71879 - DNA, 289 bp, Arabidopsis thaliana landsberg
ttttaactgtttatgtattgttttaattttggcttattatatcattcgccatgtaaatatactttgcattgattttatatcatactttattgatatttacaggattacatacaagtttacgtaagactatggttaaaagtaaataagtaatgtacattgttttgtcaacgtacgtttgaaaataatgtacaatgtactaattaattatgactagctctttaaattttggagtttcagattttcagattctctacaaacaaaatattattcaaaataattaaaataaaat

SEQ ID NO: 71880 - DNA, 617 bp, Arabidopsis thaliana landsberg
cgaatgcagcgacacgtcgatatcgaaccattaatccaagaattgcctcgatatctagcgttaacttaaggcatcaacattgatccagcccatccagtatcattagagcagatgatgctattttggcgagccaacgtcagagatcttccaaactgggcgaaatttgcacggcgatcgctgctttaccaaccgagctcagctgcagcagaacgagtgttctcaatcctcaacaatacattcggtgttgatcgtacgtgtactctgaacgactatgtatgcatttcggtaatgctccaatacaatgacggaatgcgaggacaacgtgcatgacgagtgtttataatgagattagctgtttgatggtaattgccgaatcaggtctagttcagattccaatttgtgtaccgctaatacgtatacgacgtaatatacatctattaactgactcattttttaacacaacccactgatataaatccggaaatcctcgacgaaatatacgatgaattacacgaaataggcactatttcgtgacaaaatcccaacccaaatatgtggagacccagaacgaaattagggcagccctaccttgctggagataaaaaacataataaagc

SEQ ID NO: 71881 - DNA, 540 bp, Arabidopsis thaliana landsberg
tcataaccattaaaactattgattacgtacctttgagatgataaagagccctcttgactttctggtcgcaaccgtaagaatacaaaggcaccatcatttctacgtactgtgcttccaccttgttgtacaccggcacgatttgaagatcacccattatactttaactatgtattttggtcgaattccaatttctaactcaaactatgcacacttacctttatatatagtagagatacacgaacttaggtgtgtgcatatatatattgacgacagtgattgggtttcatgcagaagagatgaggtgcatgttgctgaagtcgtcatgttataagctttttaggatctagtgacttggatttagtgtaaagtgtgtcaccactattctctttgttagatatagttcacaaaatataaccttctttagactttggatcccatgttacatgttcatcttttactttatcccaccaaaagaaaacttggattgaatcttttgaaatctaagcaaaagatagaaattatcttcttagaaaagatttg

SEQ ID NO: 71882 - DNA, 584 bp, Arabidopsis thaliana landsberg
  unsure (1)..(584): unsure at all n locations
ggggggtgtggaaacaggacaagtgtaggtggtgtctaaattgcagatgagggggaaggacagggataggggagatatcaaatgagacataaaatangatatttttttattctagtttaaatctcatcataaattttatcctgagtattagagtaacatgaacatcccctctcgctccctccctccttcccaccctccttcttccctccctaccttctttccttccttctttccttccttaatttatttttgtttgcatctaaaaataatctaacatttgttattcctttgaggccatggtagtgaaagttggcctgtctttttaggtcaattgatacaatgggaacttgacataggtagtcactgaaaacatttggctcacaacccacttaagaaacatgacttttttttaaaaaaagaagttttaggtgagggattttgtaacctaaaacctttccctttattcttctgtttaaatctaagtcattctgtcatgctgctatttaaaatggaacctacactgctatacatgaaatagacgatgggtttaattaaatgttaagacctaaacctatgtgaaaggg

SEQ ID NO: 71883 - DNA, 429 bp, Arabidopsis thaliana landsberg
ggaaccgtaagtgctcaactgcccatcctattcttttttctggggtagaagttgtcttgctggacgggtttttttttatgtatgtattgacccggccccgataatccgatggcgggctatccagtttcggattttccgcatccgggatttcttgactattatgagccgtctcagctactctggccgtgtctcgaaggcaccacaggaccccatcatactgcccaagagcattgtcgatctggtgcacctctaaataaccagcgtctttcaactcatcaattccagagcgaactgccgaaactccgtctttatgtttcctgacgacttgatctatgctgaggctacgagggtcagggggtagcgaaagcaagcggacccaaatacctatggctacaaaagtgagattggagtcatcgagtatgtggttat

SEQ ID NO: 71884 - DNA, 547 bp, Arabidopsis thaliana landsberg
ccttgaccagggcgtactcgtcaccggaggattgaccgtagtggtcggggttgtactgcagggggagctcgacgggggtcttgactccggcgtccttgagcgccttcttcgccttgtccacatcgggtccgccgtcgccgtcgccatattcggacttcagcggttcgtccgcgccgggcaggccgtcgggaacgtgcgagtacagcggggtgaaggtgtccttgtagacctggctggcgatggcctgacggtcgacagaatcggccatggcctgacgcacggcgagcgccttcttctcatcggcgtcgtcggtcttcgcaccgaagggcatcgtgtcgaggttgtacacgatatagcggatctcgccgccggggcccttgtggaccttgaggtcgtcgttcttgccgaggtcttcgatgtcggtggccgacagcgaacgccacgccacgtcgatggtgccttcctggacgtcgagcttcatattgttcgcgttcgagtagtacttcatctgcacggtctcggtcttcgccggctcgatgaagccctg

SEQ ID NO: 71885 - DNA, 610 bp, Arabidopsis thaliana landsberg
aatgatagccccggggattattcgcataatttactaatgaaagttttccgattaacccgaccaaccacatcccgcttctgtgcgctgcaactttactaaaccgtataggctttggggttagactttctcaacccgtctacctctgacagtgctggccggttcgaaccacagttcaacccggacgcgtatccttttctggggttggaaacaacgcctcccttctagaacaaaactttgctttttcttgaaacgagatttaaagccccgaaaactttcgtccaggtgcgcgcgttgacgttactgtacacggaatcagcccgactatcctagtcgtgagcgatttgttgagaaaacctaaactgatccctaaaaccgatatcgccttattgtcatgagaggaagcaggtttcatatccaatgtccaggcaccgaaagtttggctagtaggattcttaggtgtacgggcaggaggaaatttccaggtagaggttcaaagatatatagctgaaactctccatgctagaacccaaaatgtagtaggttgacctttgcttacgtatacgattacttagtacaaccaagtggatagttagatcattaacgccgacaa

SEQ ID NO: 71886 - DNA, 294 bp, Arabidopsis thaliana landsberg
aaaatttcaaaagctccaaacagcaaacccttttcactgcaacaaaacggctgtttgttaaacagccacatattaacacgtgtttaagaggcgaaccagcattctgatcgacacgtcgagcaagttcgaagaagagagagtttccgatcaccagaatgatgtgacgccggaaaattttaattccgattgaaaccaccggaaaattgctcaacttttgcagcaacaaaactcaatcttcgcccaaaaaatttaaagcgaaatcccaagttagctttgatgagaatattttctaat

SEQ ID NO: 71887 - DNA, 4339 bp, Arabidopsis thaliana landsberg
agattaactcaaaagaacaatatattcacctatctacacgctgagtaattaagatttttgtttcacatacgaaaccaaaggaagtcaaacatgggtcacctttcctttaaggattttaaatatcgttcaaggcagctttgatgtacagcatgtccacatgatgaaagataaaccccatcacagtcgatagggtgaaacccatctgaaccagcatcaggacgcctggaagtttgtcttgatcgaatatcaggaaatctaccttgcaaagtagatggaccaccaacagaatttttctccgaacaattttcagcttcatggtgttgatgatctacacgtgtaaggctttgatttatcatgttttcaattttgttgcgaacagtttgatacatggctatctccaatgattccatgttagattcatcttttcccctcccatcgctagacctcttctctgtctgaccattccctataagccgggcttttatagattcaatcatattagcagactcagagatagtatcatctgacaattgcagcatgagaggagaacttattcttaaactatctgaagaagcattcattctcaaaagatcaggagctccatccacagatatcttcttttcggattgtggacattgatcccaagatggagggcctctatccacaaaactcaatagtttagatttctgcaggaaaaatgacatcattaagaatgatgcagaacaaaatttcctcggagtatatgtttatttaaccttaacagtcacatattatagcatcagccatgctaccaacctggagaaaaatcaagaaagaaacggggtctttcgaatctgggtcatggcagagggagcaaacttcacggacagctatttctgaatcatgttccatcacagaatcacttgtttcaaattcagatctcggatgatcatcatccatgctggaactcaaggtagacaagaactttgactgttcagctttcatttttgcctgcatgcaagttatatataagcataactaccatatcctggaacttattaattctaactacagataacaacttgaataatgagcataaaaacaatttagacagtcttatacaaaaatcttctattaccacagaggcaactatgtctacgttctgcatgctccttgttgataaggagacacattaatagggagcatgcaggacccagacaagtcagggagcgaacagcagccatcatatgttcaagtgcatgatcagacatcaatggctaccggttccatgtcaaacttttgcactagatttgaaataaaaggatcttaccataatagcagcctgcctctctttagctttagccttgcgcttctcatcagaagtagaacctgacatgactttatcgaagccagattgaccaaccacctcgggggcaagactttgcaataggttcatacaaacagaatcaattgcactgaacttcttcagcagatttccaatccaggacgaaatattgcaactgcctggctctggaaattgatggaggccatctcccatacgagtcttcattaacgaaacaagaagagacaataaactttctttttcagtcccctgagctataccaattatttccagaccagctaattcgagaattggaattgaattttctaagcaacaatcctgactattagattgcctctgctgagtgcaaatatccaatgataacgagagtaactgcagtgcagttatgagaacaccatcaggagcacgtgatttaactgatgtaccactctgtagtgcgtagtataaagcagatgaaattatttgaaatgtggctttgcaagtgcctattctagcaagcccctttagaggtggatagatcattctccacctcggaagctgagtggtcaacgcagacactccacaataacgcgaaaatctttcttctgcagattgcaagtctctcgactgccaacgagggtggtagagatccaattccttccaacaagatgactgtagtgaatactttccctgccaacgaactaatgtcaagtgattttttacattatgtgtcaacttaaaggtgatcccagcatatgggtaagaatcaagacctggttcatgccggatggattgcaatagactgaaacgtcatctaagacctcctggagctcgtccgacttggacaggtcacggggtaaagatttgaccaattgactatgagtgaaatctccagtggctaacttgaagatgatctctcttctcaaactttcagcagtagaaagaccacaaaatcgtctttcttgcagaatctgtatcagaagaccaagcatttcctggaccaaaactggttcatagctgaaaataaatttatgataagaatcatgtcagaaggaggtaagacagactgattatagtaaaataggactgaccatctagtaataaataaattcacgattcagaaaattcacagaataatataaaatacctgttctactctaatgcagattgaacaatgaaatgaagagacagtcatatcgaatgtagtagaactataaaaccatataatgagatcaattaccagtaagaggacaataggtacatactcatttgttatatccggattaagtgaaagatagcttgagagcccaaatcgactgagaagcttatcaacataagaatctgcgggagctaacgcagcacaacactggagaagaaatagatcaagctcaagtccctgttctgacctgtaaatagaaattactagaatgagaaacgagtaatctcttcacaaccaatctaccagttttcaaagctgcatctagttaaacatgcgagtaaatgatgaattatagcagtttataaaaacaatagtattctcacataccaacgaactgaccgataccactcacaagatactaatgcagaatccccattcttcttccacattccagcgataacctgggcacaaaacaccctaatctgtagaacatgttccataacgagtgcagaaaatccacaaggatggaaatctcctatcacagagctgaagaagtctgcatgtgggatctcatgactaatactgactccattgtatgatgcagattctccataccatacccttaatgctttttgtatgagcagagaaagtaaccggtgcaaaggaagatgaactgatatggcctgagaactcacatcatagtgaatgtccggccaatcacacagaccaagtatatgtaatcctgatgcattctttgtcaaatcagcagagttgcaagatactcttttggagtcagctgtaacatctgtctgaaccaccccatacggtccacaaacattatccaagctaagatttgtttgaatatcgccgcatagaggtgataagccagtactcggatctctactagaactggcaagattactagatacacttcctccagtttcaacatttaacaaatctctccttggccacgacatcttactttcagggatgtttctgccgctagaagaggacaacttgcaaagaaactttgatataccttcatcatttcctaagcatgtctccaaaactttcaaacattcgcgtatcaaatatatggcagaagaaggaagcagggcatggaaaggatcaattttgtggacttcagaggccattgagctatcgaaggagctgctgcttaccatcgcagtacatacagaatcttcatgagacaatcttccaacttttgcatacctttctccatctccatcacacttgtcaaattcttccttggcgtttctatcattttctatttcttcatcactggcagcagaatatgtaccattaaccaatagagagtgaataacagctatagaatgacccaaaacaaagaacagatgcatgtaatcattttcttcgtcaatagggattccagtctctctttttaaaggattcattccttgagcaaaggtcaagagtgtcaaccatgatcttgataactcccggtgttcatgtgttgcatacttagaaactatagcatggctcataacaaatttcaagtctccaatgacacgttcacttgtctcacacaaccgttccaactttgtagcctacaaaagaaaacagtcaaatatatttcactaggagcacaatgaaagcggaaataaaactcatcaccattaaaatgttacaattgtgagtagaaagtatcaccaaaccaaaaaatgagaaacgaagacatctgtttacctgtagcaaaccatcctccccagaacaagaaacaaagatatcactgaggcatcccaaaagcatagctagcaaattcatttccttcaccaaaaatggtgttagagttggcacagtgaggatttgaacagaaa

SEQ ID NO: 71888 - DNA, 130 bp, Arabidopsis thaliana landsberg
aactcccttttttaccttaaattggtccaaaatactcggcaatttcttacttttcgtggcggattatatccagtgactgggggtctatggttaaccgattagcacatatctttacttgcattctttttaa

SEQ ID NO: 71889 - DNA, 250 bp, Arabidopsis thaliana landsberg
gaagaatatgtaaaattggtgaatgaaatatgcaaatgtttaagattttttttataagagttgaagggataggttcaaaatattttatttggattatgtattggaaaaaaagttttgtgattaatttaaataaaaaaaatatagggaaatattaaggtgattgttttaaaattagtttgggaaatatagaatatgttaggaaacggtttaatgattcgagagatttttgaacaataatattgatttagat

SEQ ID NO: 71890 - DNA, 515 bp, Arabidopsis thaliana landsberg
  unsure (1)..(515): unsure at all n locations
gcgccaatgtccnnnnnnnnnnnnnnnnnnnnnnnnnnnnnnnnnnnnnnnnnnnnnnnnnnnnnnnnnnnnnnnnnnnnnnnnnnnnnnnnnnnnnnnnnnnnnnnnnnnnnnnnnnnnnnnnnnnnnnnnnnnnnnnnnnnnnnnnnnnnnnnnnnnnnntggtggacatcgcgtcatcagactatgccgccgccgactgctccagcggaaaacgcgacgcgcatcacttggggtataattccgagccggcggagccggaaatccctaccgaggccgtcaggccgacatcagacaattccaaacgtccaaatttcaaaaaacagagcgccccaaaaggaaaacacgtaagacgtcaggtcttgactcctgacagatgaagcatcgaacaaatgggccactactttgaaagggcaggggacgcattattgcaaggtgtctccgtggaccggtccgttgacatgaaacaaatttacggaggcgggtgccgttcagccgtggaggtaacggaggat

SEQ ID NO: 71891 - DNA, 586 bp, Arabidopsis thaliana landsberg
gcatttatcggcttatttccaacccgtatatcgaaacaatctttattttatgtaataaataagtatagtataaattgaagatgtaagggtaaaaaatgtgcccaacctccaataacagtaggtcataccaaatacattcaaaactttgactatttggcttttttttttaaaaatggtaccactccacctccattcttccttgaacgtaaagtaaccttttgactctcttctttccctcattttcatacctttttcacaaatccaatactcaaaccccatacatatgtgccaaatatgaaattagtacgtattactctatatcataatttgaaattttcattaaactactatgtactttattaattattcccacttatataaaactccgctcaagctgtaatttcttcgagattaacaaaaaagaaacacctttttaatcataaaatctcaaaccttttttctctaatcatttctctttatctctttcttgctctctctctctctctctctctggctccatgacctctcttgctttttcaccttcatcaaactcttctctagctacaaggccatgacgaaacaacct

SEQ ID NO: 71892 - DNA, 577 bp, Arabidopsis thaliana landsberg
gatggtttacaatgatatcactaaccactttactatgttacatatgataaaaaaaaaatatttatattgatacgactttactatatgcacaaaattatcttcttcaagtaaccacgaatatatatatatatagttttaaattatgactttaatggttgcggttgccacatgaatagcatttgtagcattcatcgaaaaaaatgtcattattcgtgcataaacttgttaatggatgtaacttttttttagtgaaaaaacttgttaatgaatgtaaaaaacaacaacaattggtaactctaaatacaactattaccttaaaataatttaccacgatctatattttagtttcatcttattcacaacaatacaactaaagttatgatgttgaagcgactaaatagcctgtgatagatacttaacaaatagctttttagaagatgagaatcattacattttaaaagctaataacttgaatcattgaaagttacaatcaggagtattaattaaaacttagaagttgctcatgtttggtatgtggaccacaatacaactatattgtatatatcctacataaata

SEQ ID NO: 71893 - DNA, 705 bp, Arabidopsis thaliana landsberg
aaaaatctcaggattgacttgagcacatgaataacccaatttgatgtctaaccgaacaacgaatgaatgtatgcatgtgtaattcatttaaatcgatacgtaactgcaaaggagcaagcgatcgtgaaggattgcgttgtcctcatgatgtacaaaataggtgtggtagcccaacttatcagtcccacgttgttaggtccaaatgtatatacatttatacacactgctatttttgttcatgactattcatcatacaatctaaatatattgattggtacttagattacaacaaaaattgaatttttgatttaaatccgtacaattcctcgggtatactaaagaagtgggtcaagatatcacatatccgacataaacagtttttggtctatgcatatatattcgatctcgataccaagttcgattctttatgatacgtataaataattttcggaaccacctgtctaattatgaaatagaatagaatgaaagaaggaaataaaaacaggattaaaggggatgaatgttaaagggggccaccacagaacatattaggtcttaaaaagacaagcttagctgtttccttccttgtaaaaccaatcactttgtttggtcttaaagaaaagctgtctcatcattttagggttttctcgcagaataaatcgaacaaaagttgcatccacagactttcacacataatttaatttt

SEQ ID NO: 71894 - DNA, 544 bp, Arabidopsis thaliana landsberg
  unsure (1)..(544): unsure at all n locations
aagaggaggctaaaagggttcttgcaccacattttcatatttttggctaactgggcaaggcggaggtacaggaatcttcggacgagtgaaatgaaagcaatccgatggctgcacatgatatgcatgcaaagtccaggaatgtttgcccactggggactcggatcgaagccaacggttggataataagagccgtgtaaagggagacctttacgcacggttgtgcgtccagcgaaggtggacatatccagtgggtgcaagtcccatcagagtaaaagtcaaaagctctgtagctaaatgacatgggtggaagaaatgaaatccatgaagctcattgaaaaagtacttggaaagcaggtacgcaagttgccaggccataacgcaagtgaatgcataggtagcctcgaaagtaatcaaaaccggcaggccgagctaatagccgtgtagcgaaggcagcatgtctctccgaaaattgaatgaaacgggaaatgacactaaccggcggngtggtagcagtagcatggtaacaggatatgtaacgcaactg

SEQ ID NO: 71895 - DNA, 593 bp, Arabidopsis thaliana landsberg
atttctacgtgaattttacagtgggtgaaaccgccagctataatggcaaaaaaaaaacttaaaaccaaaatggcggtgtgataatcgacatgaattgatccttacccatagattcaaaataacttaaccaacatagccggatcaaaaccgaaacacccatacacagaagaaatcgaaatccggctcaaaagaaaatcaaaaaatgaagcaattcaaggaaaatgcgataatacatacttacacagagaatggacaggatcaaattgatagactagggtttcgaatctcttatacgagctcgcaggactactgaagaaacactgaggagagaaaacgagccgatcgatatcgtgtttctcaggtgaatcataagccagcaaacacaaagaacttgatttgatatttggaagagcccaacgctttgatttatcaaaagcttcacctaaatatatgcatacgtggcttcctatcttttgattctgtctgatggtaggagctaaattacaacatcccgacttaatggtgtttttagctaggctgaatttggatcttactggctcatcttattgggctgggcaccatttttttattct

SEQ ID NO: 71896 - DNA, 744 bp, Arabidopsis thaliana landsberg
ttaactgaaacaaaaaaaattatactactattgttataatttgatataaatttaaattatttgataatattcatttaatataaaattatagagaactaaattaaataaagtaaccgttataaggcgttagaaaaaaacttttcaagattgtattgtcttttttagaacctttgtcgataatatataatatggacaacgatattaccattaaaatttataatgttctattatctttttaaaaatccaaaatgtcatatacgttttttgtcaataatatataatatatacaatgatattaacacaaactgctaatttatcagtcaaatttattatttaaacttacaacgttctattaccttttgaaaaattaaaatatccgtttatttttttgtcgattttatataatacaaacgatattaacacaaacaaccaacttactagttaaaatttataacgttctattttcaaattttaaaatcgaaaaatatcagtatttatgttttttgtcaataatatataatacgtaatgatatcaacacaaaccatcaatttaccggtcaaaatttattattcaaacttgtaacgttctattgtctttttaaaatataagaatatcatttatatttataatctacaatatatataaataatatcaacataaattagcaatttaccaattaatttttattaattaaatttataaagaaaaggcttgattattattattattattattctaaaata

SEQ ID NO: 71897 - DNA, 337 bp, Arabidopsis thaliana landsberg
tcgatattaactttgattttacatatttaaaagtaaaaatgaaggaaaatgtatttttcaaagtgtaaacaaaaagagggtatttttccaaatttactctatattttaaggataaatgataagattaacctaaatttaatcggttaaaaatataggtagatggtcaggacttacgtgattgcacaaaagtaaaggaaagcaacaagtgtttagcaacaatggcaaaagtctttttatgccaaaagctcaacatatcaaggaaatgcattagcaaatgacatgtatttagatggatacacaactatatatttttttctcaaattttcgaatttagaaa

SEQ ID NO: 71898 - DNA, 311 bp, Arabidopsis thaliana landsberg
cctaaaaacggggggcagaagaagggggggtaagtcacttaatctaatctgtctagaacttgttgatagaataccatataagctgatattgaaagggcaaggagaacacgggtcgtaagaattattaagaataagggaacaagcattctttacacctttgatagttaaatgaatgacacctgtgggaggctcatacaaacaccggggtccaaaggtagggaaactatacagtgttggcgcacaaatgaccaattaggagaacatatgacgttcctccttgggtgaaagtgtggacggacaatcctcagtta

SEQ ID NO: 71899 - DNA, 516 bp, Arabidopsis thaliana landsberg
cgaagatagtgaaatagtatcgaacctacctacttcgctcatgtgtataaccacgagttttgtgcgaccatggatcgtgtcatcacttctatgtcccacaaaatcgtgacgtcagcgtaatccgactcatctctcagagacggtctgaaattggtacattctttaatgatgtttgaccatttttagtaaccaagtcggacggtcaggatgataatgagatctcaatcggacggtggcggagattccaaggtcttagggagattgttgttagctttaggaaaacgacaatgttttcacatgtttcaaagtccaaactcattgattccaaatcacaccatgttctgtctgatctagttaacagctaatcaccaaaatattactgtatcatgtataaatttttcgaattatctgaaaaagaatcgatctctgtcctacacttacataaaaatttacacctaaaatgggaaccactaatctataaaactgaagttttatttatttaaatttttggttgag

SEQ ID NO: 71900 - DNA, 598 bp, Arabidopsis thaliana landsberg
gccggtttcaaacatttcgaaacgtgccatttttatcccctgtctgcgcctcagagccgccgtttcgtcgtttgccgtggctgccctttcgatggttcgcagaatgccgccgagctttgaatccggcgttaaatggcgtgcttaactggaagaaaacaaagtcaaaacaagaggtaaacgtgagattccgttaaggatagaaaacgcggacgcccgcggtttccgctcaaatttgacgaaaattcctgcggcgaaattcaagacttcgctaaccacgcaaacgcttcacgaaagcaaggttttcgtaaccgtcgtcttcagcgccccgccaagccatcgaaagcaccggcgaggcgtgacgccttcagcctcgcgccttagccccgcgccgtctggccgaacaggatcttctgggcatccttgtcattggcgaggttgctgcgccgctctttcccgaccgcaaggccacgctggacggcagggcgggcggccatgatatcgaaccagcgcttcatatgcgggaagtcgtccagcttctgtccctgattttcataggagcgggtccacgggaacgcggccatgtcggcaatcgaatagt

SEQ ID NO: 71901 - DNA, 500 bp, Arabidopsis thaliana landsberg
gggctgcgtataaacgcactgcattccttcgtctgaaagttcatattaccaaatataaggatatctgtttacagcagttcgggcgatttgcgcgcggttgtgtttgcatcgatcgacggcgtagaagtttatgccgacagccataaaatgaaacccatgtatatgagcgatattgaaagcaagcgtggcgttaaatttcgccgtggcgctgcaatgcttaaatccaatggtgtaggcggtattaatgacccttcccggatgccgaagcttggcggcagcgatatcaatttcggttccggctcctctgcgcctgcaaataaaatgcaggagcaagagctgccacagcaaccaaagagtgacggcacggtcgacaccagcgcgggcgccaatgactacgatacgaactacgatcacgcgccaaatgaaagcaagccgaagcctgaagagcctgcgccggattcttcaccccgacagcagccggcaaattggattatctgatg

SEQ ID NO: 71902 - DNA, 145 bp, Arabidopsis thaliana landsberg
tttatgaagacagagacactatttgtttggagggggcattttaattggattgtcaagaaagcgatccccaccctcttatatttattggatgagagttcttgatagctctcaccacctgctgagcagattttatgaaattgactgg

SEQ ID NO: 71903 - DNA, 595 bp, Arabidopsis thaliana landsberg
agtttgcatggcctgtaactaatatataactagagaactatattaaaaaaaactcaaatctcactaacggcgacatagaaacaccgtctctaaatcagaaggaggcgtaaaaaactctctaacgacgttactccgacattttaacgccggccgtcgttttctcggtgctggtggacattccaataactccggtatcttcgtttccttcgctgtcggagtcgtcgaacactcttcctcttggttgtagcaatcttcttcaacttcggtcactatctccggcggcgctctgagtttcgtcttgactggtttcaacgaagcccgaatcgaaattccggcgataacccatttcttcccgacggattctaaacctccttcgaattgagatttcttcgaaaaacccatctctctttaactaactcaaaaccaagataaatgagaaaacagagtaaacccaaaaagaaaacagagagataaaaacagagacttgttccaattagaagaagaggaatcggaataaaatgaaagtggggaaaaagcataaaattctgtggttggtcaaatttttttggtctgaaagggaagaatttttttttgt

SEQ ID NO: 71904 - DNA, 536 bp, Arabidopsis thaliana landsberg
ttactccattgaacagctacaaaaaaaactttaacttggcagtgagattatcacgagcaaaagatttttattttggaaatacaggtgactgaggcaaaagaggagaccaaaaccttatcagggtgaataattcgcaaagccagacaagaactagaaccataaaagccaatagctgatcgtcgtaaaactcaaacaggaagaacaaaatcccaatcataatctgcaatttcaaatagttatatcatgtcgcttaagagaatcctctgaaatcttggaataaaaaagaaccagggttatgtatgcataccggtacaaagacaagcgattcgatcacgtgtacaaagatcaactgaaatgttggtaaccgatgctgggcatggtgttgaagctgcactgcaacaaagtgatatcgaaacaaagatgattgttgagaagcaaagattggaaaccataagctattggaatagaagaaattctaacctgttaacttcaacatgcgaggttgtgtctctcgcaatgtgaatgatacagacatt

SEQ ID NO: 71905 - DNA, 603 bp, Arabidopsis thaliana landsberg
tctagtctctgcctttatttcactgatcattaataattgctggagttttaatttacatattataaagggaccaattgttatcattgtatgaatcttttttcttgcaaattataaccgtcattattggaaaagaatagaaacgcccacgattgtaattagatgctaggtcttcaaggtttgtgcatcccacttggaaacaaacaataaacacaaattaggagtaattatgaaactaatggcccattttctaatcatttgtagtctgtttcatttggttttacgtttgttatttctaaccttatccataacactctaattgaaaataaatgagtagctttattagttgttagactgtgagagatccgccattgtcacccgctgtaagattcagaatcatcgtcgcagccttcacagccctgttacatttgacatcacataacacaggtttagagtttcaggcaatagattcttaagaagaagaaaaacagagtcggacagatcaaacagagcaggatcatggctcagtattagaatcctcaaaaaaaagatttctagctcattataaaccttacagataagggcaagggttacaccatttttttt

SEQ ID NO: 71906 - DNA, 770 bp, Arabidopsis thaliana landsberg
tctattggcccgtgttttgtttacttcatagattctttttttcagtacagctcgagccaataagcattaccagagtgtcctgagcaatcttcattccattatcggtgtatcctgtcatagctccttctataagcgtctgtaaaaataaaacaaataaattgacatcttcagcatatacatatcacccaaagatatgttgaaccaagtatgggaaacaggacagaagcataattctcttcgactaatgcgttagttgagaatttagatttatttgtatatacatttgcggggtttgacaattgagaatcaacaactataagacatatatagtaaagaagacgttcactctcaaagcaaatatagaaaacaccagttatgaggtcagatcattgtgttaccgtgtatagttccatggcagggattttgtctgcgctcatgtaatcttgaaacagtttgagaccattctcaaagtcttgcgaatgtagatagcacctgcgtagatataaaataagatgcatatacgttaatcatgttttgattctcaacgagagttaatagtgtagtatactagtaacaaaagttaatttcgtagctaaagactgcctatgttttaacatctagatgcaaattaacatcaaagtgtgtgttctaattgacctcatgatttgtagcacgcagtaagtgtcagtatcttttccgttttcttaagcatctcaagaagagcttcgttgcctgcccatgagaaatgcttgtaagaagcaaaaataact

SEQ ID NO: 71907 - DNA, 466 bp, Arabidopsis thaliana landsberg
caccagtgtacctggcatggtcaccactgtctttttctttttcaggaacgatcacaccaccgttggacctggggtcctagcaccggctggagcgaaagtataacctgaatagtcatcggctgcaccatcagtagcgtcacctgcagtgtattcaccggcctcggccagtactgttgagaatgaaccaaaggcgttgtcggaattccacagccatacctggtaaccatcaaagtaatcacgtgtctggaaagaagctgatttgttcttaatggtacccgttccagcaagcaggtcgagtgatttggtgatcaaccaacttttggcctggccagcgctggagaaccatgagttggaagtaatgaccaccttggtatcgactgacgtggacaacgaatctgccacagcacaagcataggtcaagaaccactcgttatttcggggtgtacctgattcatcatgcaaacca

SEQ ID NO: 71908 - DNA, 423 bp, Arabidopsis thaliana landsberg
atctactgcacttgacacctatatttgccacttatccttttagtatgtactattacagtgccttgatcttgagactacttagattttgaaaggtaacgactctattgtagaaaaagtaccaaattacctgagattctatattgacaagcatttctccttgtgcatcaaccaaaactgccatatccaagaatatctgcaagaaaaggggaacctcttagatctgcctttaggcgaatgaattcatacaacgacttaacagacgaagaaaaaatgtttgattaacagattgcatcacactctggttcaaagatgttcataaggaaatatgaaatccaacatacttgttgtaaatcaagaagtttcttttccaagtctctgacagcatcatgacgttctttgatatccgacaaggtgtacattacc

SEQ ID NO: 71909 - DNA, 490 bp, Arabidopsis thaliana landsberg
gaccctcagcagacattgttggtttgcttcaagaatactcagagtcttatcatcaaatcatcagctctaagggggcgtccccttagaacaacgtgcacatgcacagtcctgtctctagatgttgattccggtgtatgccttatacgaacgttaaacctctcatcgggtcgtgaatcatcttcgatctctgtttgtcctgctagcttcgactttacctcccgatttctctctagtagtttcgaaagctcaccttgcaaagaaaatagatgctctcttgccatggagaggaccgacgctttatctttctgctcaagaaatttacgccattacgttagctcatatgtacattatccgaagaaactgatcacattgtggaaatgtgaagtaatagaaatcatactgcatacatgaagaaagaacacatctcacatacctttatctctggaggaaggagagatctcattgcttgcacgctctcactaagcttctc

SEQ ID NO: 71910 - DNA, 521 bp, Arabidopsis thaliana landsberg
  unsure (1)..(521): unsure at all n locations
tatgactcgagtagagactatgaatcgccacaacgacggatttattacttagcagtagattatcaattattgcatgaaggtgccaactaaacttgttagagatcatcactcatcagtgtccgggtcctttctgacgagtacgtgccgattcacttcgtctgacaccagcttttagattatcaaattgttgtgctccatttccttccccttaatttacaatataaaaaaaaaagagattaagaactgaatatgagttttgtttatgcgtgattgtatttgtnnnnnnnnnnnnnnnnnnnnnnnnnnnnnnnnnnnnnnnnnnnnnnnnnnnnnnnnnnnnnnnnnnnnnnnnnnnnnnnnnnnnnnnnnnnnnnnnnnnnnnnnnnnnnnnnnnnnnnnnnnnnnnnnnntaatctgagagataatggaataagttgatactacaatacttatatatatatacaaggagattnggtgaaacggtaatatattagtatatatactatatcaaagttaagttc

SEQ ID NO: 71911 - DNA, 2361 bp, Arabidopsis thaliana landsberg
tcaatttcctgctcttttgtatcgctttgatccgcatgggaatcatcaacttcgtcagaaagagaattgatgtctaaatctgtcaatttcttagtgtcttctttctcttccacggacccgtcaagtaacttgagattggattctctgtcattatccccctcttctacataagttaacttcaagcagctatcaagtgggttagaaggggattcaacaccagcagttgcacaatttcgctcgtgtgcactgtctttagactcctcaggtttattttcctcgacatctacaggcaaagtcatctcaggtgccagcagcactaatcctggagtagatttaagtcagtcaatagatgcaagtatgcatgtacacataacatgaacattttaaaaagttcagatgccaagagaaactgagttagttccattgggagatgaaacaactaagtcagtgaaaatctccttcaccaatgatttccccaacatgtctacgccagggaacaccaacaagttcagattcttaattgtttttttctcagaatcattgacaggtgcgaagccaaagcctgaagtccatgtatcaatcagttctggcactgctggtatgactaacttgtctactttgagagaaccaagcgcctgatgataaagcacatttgtaatatggatcttcagaaatcgtacacagaatgaagtctaaactaaacaaaacagaagactgagatagtacacagcagatcaagacatatggcatactaagaagcttgactagttcgcatcaactatcctataaagtcacttatacatatttgaaatcaaatgactacacaaatccatgtttttagttcagtgtgatctagcaatcattttgtcatttagcatatatcagacatggaaatgcaaagctatttccatatttctttcttaatgcctgaaagaacctgagaaaaagcagaatggcccgtcgccaaaacaagcaggatagcagcagaattgccagacatctaataaaacttcagatatagcaagaaacatttgagagaaataagcgacgaactttaatgtaaataaccaccaaactaacagaaaaaggaatttaggatatgacaagaagtggaggagggcctacagattcaatgccatccattagtcgacgacacatcccttgacgcctgtacatatagcgggttccgataaacggcatttctgccagttgattgccgtgtatcctgagtaagagatatatcagtcctatgggaagaaaagctaatttctatacacagttagtattctcaatttatcgagaacccggcaacagagtttcaatcaaacacctgagaccatgtagaggcatatacttagggaatttctttatcttagtacgacataaactgctaacatctaaatgtagtgtgttctatcaaacttaagatctctgtaccttaacaaaagaaatagtataatgaaaggggtacaaagtggttttctaatcttgtttgccccactagtccactagtatgatacgaacagtgtaatgtcacatctaagtaatgcttttaagtctagtatgataagtctagaaacttattaccccttgttctcattttcatggtaccaaaggcatacctaatagacgccacagcaatgatttcatcacccctctccaaaacagcagtgagaaaactgctgaaatctagccgatggaagttcgacctacaaaaaaataggaaaaagtttaaacataatctagtaagtagtaacatacggactgtttacatatccataaaacacttgccaataaaccaattgaacaaaacagaagcatataaggacaggttttgggaatgagcttacccaaaattataaacaatgttttgaagcaggttgactccactcctgtgatcaaccaaaggtgaaaagcactcatccataacagaaaatgcaacagccattttggcattatatgcaatcttctcagatatgtcacaatcggcaacctcactagggagctcaaagcggcgaaggaatgaccatgaaaatccctcaggcagtgggtgttttactccaatgaataactgaagttcctcgaataactataaattaaagaaaaagaagggaagaaacaaatgaaatactcagcgtttcaagtaataaagcgccaggataaaaggtaaaaaagaaaaaggaaggctacctcttgacaatactttccacaaaatgaatcagtactcctttcaccaggcaccgtgccatcttggttgatgcatgcttggtgatctgcaagagtgtcagggtaatgcttagagcctagaagacacgattgaagaagtttaacagagcatatacatataaatgcaattacaga

SEQ ID NO: 71912 - DNA, 2561 bp, Arabidopsis thaliana landsberg
  unsure (1)..(2561): unsure at all n locations
cgtgaagaatcttagagagtcgccgttattgatgcatttatacgcggaggctaatggtggtttgacgacgacggcaacgaatccaaaggcggaggattggacagagatggaaggaaagtggggtagaggagaagagaggacgccggaaggagttatattggtggagaagctcgcagacggtgannnnnnnnnnnnnnnnnnnnnnnntggtggcgcgtgtggggaagatacaagcgcgtgggggattgtggcgcaaggaagaggatcggatactgggccggtttgttatctattgaaaacgacccgggtccggtcgggtatgggtacggtttgcacccatttctgtttggttaaggtcaagagttttagggaaacggctatgtcacagttgaataattcgtggttggtgcagactggtcaatgagcagtgattgtcaaaggatttgcactgtaaattatttatactctttgggttttgattatgaaacccttatggatgatcaaattacatttgttattaatacagaacattttttaggaatttggattggtgatataaatgtaaataaaatggtcaaagttggttggttatagtgatttgtttaatcaaagaacattgttagttttgttgctattgtagtatagaggatttgaatcaagacaagtagacaacttaatccgtgtaagatctatatgcaattatgcattcattaacaccacaataagcaaaagtgtaggtggatttaaaacttctgttagtgatcatagtgcaaagcctatagctgatactgccagaagttgcattagagttcataacctccgtcggaaaattccgaagtcgatctccggagatggaaaagagagaaaatgaataaaacatggtcgtgatggaaaattatggattgtttgattggatcatttatatggatttggatattggatttacattttaaggcccgtaaatatatggaaggtataggcctttgttcctatgggctatgaatgatccaatgtttattttcttcttttttatgaattctctgaaagaatccaataaattgaaatgacatgcaataagctaatctaaaggggccaaggagtttcattgtttatgactttgacaagcgatacacatttagcagcacaagacatttcacgatcggacttacggaagtgaatgattacacttaatcaaccacctctaaattattggcatcaccatctaagactcttaagttatggcttaattatgatcaccattatatatatttttttttcaacatttcacaatcttatttttttatttttttggtttatacaaggttcctttttgggattttttggaaataatccaataaatgaaaatgacatatatactgtataagctaacctagaggaattaaatcatatattaataagctgtatatattaatgacatgaaaaaatctgtatagaaagatgaattatttttttctccaacctagttataaaccgaagaattgatcggtaatataataataagctgtatatggaaaaagaaaaaaattataaatggaaaatgtcccttaagtaacttattttttcaggttccatttcaaatggaaaaaaaaagtgttagcatatttggcttagaaagtcaaaacgttagatgccatctcactttaatgctatcatgtacaatattgaaatggatttttaacttatgagttaaaatgtcaaaatgttgcaaattaccgaggctagacaacgtagattgtagtactaatttcgtctttcccaactccaagagagaaaaacgtggtctgtttcagacaaggcatgctccattcctcttttatcggccattgaaactagggttcttctgttaaaaatgtacttatattatccctcaaaaagatactaatgaataatgtattttaattacagattcttgagacgtttcttcgattcccataatccaaaaaaagatcagacccattaaattgttgagttttcacagagtcccatgcacatggttacaacaaatgaagcttcttaagttattttatactctctttgttcagagagcatcatcacacgaagtcactaagttttatcttgattcttgtttttctcaaccctaagtttttatttgtctcacaagaaagctcttatcttctacgactgctaaaagatggttcagaacctgaaatgaagactacaggctttctttcataataatacttaagatttcatcgaaagagtcccatattatggaacccggtgaagacaaatccgatacagccctaaaaatgttacaagaacaataaatagaagaagctacaaacattgaaattgaaactaacagacacaaaagataacacataagagattatcaaaaaacaaacacaaacaaggatttctcttaaaacccccaaatgaacaaaccggattcctcttcgccggaacttggtgaaaaaacatgttagtctttaaccttcttttcaacttgaacccaactcatctgagctccctgaagggcatctgatcatcctaatatgttaacagcttctnccatatgt

SEQ ID NO: 71913 - DNA, 607 bp, Arabidopsis thaliana landsberg
  unsure (1)..(607): unsure at all n locations
aacgaggcaatgtttccctgtcgaacaccaccaaactggtggacagaggaactctgtatcttagacgtcgacttcttctccgatgtcgtatcttcaatgaagcagagaggtgtcaaaccttcttccttagcctctgcaatcatcacctacaccgagaaatccttaagagatctcgtcagagaccattccggcagaggagtcaagttttccgatcccggagataacgaatccgacgaaagatctcaacagagagatcttgttcagtctatcgtctctcttttaccttcagacaaagggctgttcccagtcaatttcctctgttctctcctccgttgcgcggtgttcttagacacttccttgacctgcaagaacgagctcgagaagcgaatctcagtcgttctagaacacgtctctgtcgacgatcttttgatcccgtctttcacctacgacggcgaacggttactagatctcgacagtgtcagaagaatcatctctgctttcgtcgaaaaagagaaaaacgtcggtgttttcaacggtggagacttncacagaggagtctgctctgtttcactacaaagagtagctaaaacagttgattcttacttag

SEQ ID NO: 71914 - DNA, 449 bp, Arabidopsis thaliana landsberg
  unsure (1)..(449): unsure at all n locations
aactggcgtaacgcgcttgggcgaagtagtactagttgggtgactctccggaagtctgtgtgggtccttggnnnnnnnnnnnnnnnnnnnnnnnnnnnnnnnnnnnnnnnnnnnnnnnnnnnnnnnnnnnnnnnnnnnnnnnnnnnnnnnnnnnnnnnnnnnnnnnnnnnnnnnnnnnnnnnnnnnnnnnnnnnnactcaaattttaccttaagactttttggcttttcggatttggcttatacggacccaatacttttttaagcattgtttcgaatattttcatgcatnnnnnnnnnnnnnnnnnnnnnnnnnnnnnnnnnnnnnnnnnnnnnnnnnnnnnnnnnnnnnnnnnnnnnnnnnnnnnnnnnnnnnnnnnnnnnnnnnnnnnnnnnnnnnnnnnnnnnnnnnnnnnnnacctaatctatgtgatgatacataagttatgta

SEQ ID NO: 71915 - DNA, 557 bp, Arabidopsis thaliana landsberg
atccatggctcatcagtctgaagctttatacttgtcataaacctattgaagtttttcacagcaagtatagccgtcaaggaagtaggcccataatgagatttaaccctaagaacccaatctaaagcctctttcctacaagaaaccaaaaagccatctaagatttgttccccaaaacatggattcgtttcgttttcctttgaaatcaaactcagaatctcatcgtcatcccataagaacatatccaaaagaggtaaaaactgaaactttacaacactctcatcagatttctcgagaaaatctaaatctccgtcgtcatcaagatcttcctccacaaacccggtttcttcctcgcaatagagcccatcaaggacacaaaacggtgcgttttgtgacgcttcttcctctttctccaaagccatcttcttcttcttcacggaagaagaaattgcaaactacaatgctcattatgccattggagctagttttttggtcgacggattctacagtgaagaaaggagataaaggaacaaggagaccgacacatctctatgagaaag

SEQ ID NO: 71916 - DNA, 688 bp, Arabidopsis thaliana landsberg
tgtgtttcattcttatgctcgaaaaatgattggccactttggagatgttcagcccgttaacatgcagctcaccccagtagtaaatcagtcaacccgcttgacccatcaaagagctcatatccatgaaaacccacctcgaagtcatcctttggatcttaccagcggatccacttgaagccaaataaggaaagtcacattttctttcatttgtacaaatatcaacactaaatatgtgaaggtggagatcatctaaactatcaacaacctctttccaggcctaacccatgaaaaatttctatgaaacatagttattgggcctcattttgtggaggaataaacaaaggtattgggcctcttggtccataaagctttggtgcacctttccacgctttattttacaaataccaaacttgccgtaattggatccaagtagctttacatcacaacacttttttcttgtcattgttgctacgttttgaagatcctcttatcagtgactagccaaaaagtctacttagtgatacgatggtacattaagcggtctacaatttaatcagatactttgtagtgaagacttttctaatacatgaatagattgatgctgattgagcttattgaaagagatatataaagattgaaatggcatagctctaatgaagctttaatgaaatgtaaaggagagaaagga

SEQ ID NO: 71917 - DNA, 5395 bp, Arabidopsis thaliana landsberg
ctctcagtctaaggatcttgctcatacagttcttgctagatcaatacttccttcttcctcatctacttctgttccggcttctctgactgatattccatgtccggacaaagagcaacgaagaacagagttaacctgcttccttaatctggcattatcaatcagaacctctgccagcatcttccttactagatcgtctgttccacgatgccctcctgatgttagcttcagcttttccacttcctctgagagaagctgcgtctgttttcgagaaaacattaacctcttttgtctcaacatgcgtaaactcagtatcaaagagcaatgggttgatcctatacctcagcaattagaagacctattcggttatcggatgttgctagtagctcgatggcttcggatagagatgatgagtccattattaatttaccctcctcttcaatgtcgaacttgacattgcattcttgaagccggttttgtagaacatcacactcatgcagcaacttcttgtctgcgttttttgcagtttcttctctatccttctcccgttgaacaattctctgaacattgcataaggtttaagcgttaaaacttccagattctccaattcttagaagaagattttacagaattaatagacttgaataaatctcctgcgacgagggtttttacctccatctccagtttttctttcattatgccgctaagctcttgtctcaaatctgattgagtggttcggagagacttgacctctttaacgaggactttcagctctgctttcgctttcacttccagctcttcgtgttctttatgaaaattctcaaaattttctcttatatcattgatctgctgcagcaacatctgattttcttgaacaagtgactcatttgcagtctcaatatgtgttttctcgtcctataagccaaatataaagaaaaacatctatagttgaatgcaaatgaattttacagtgaaagatactaagagaaacacaaacctttatagagtttaaaaacgattccatttccatgcattgcttgcggaagtcctccatatcccactgaatttgagtaaatctttccttttcatctaggactgttttctccatgccttgcttgcagctctctcgagttgtttcaagttcaacctctaaatctcttacctacgagaccaatgccaaacatacaatgcaacatattcaaagaaagcaagatggctgatcatttgaagcagaaataatgtgggggaagaagacagagaggagcaaaaacacaggtgatagttgtgcacacctttgttgacagaaattgtcgaacggctaactcctgattcagccttgagataagatcttccgtgtcagcttttgctgtttccagtctctgctttaatgtatcaataaccctctttaatttatgtcgctcctcagactgaaatacaatagcaagatccttctgagtctcagtatctccacctactgcaccatacatgtttccatgggcttcaccatgaatatccatagcgccttggttaactaaatcaggttccacagcagttgacgcctcaaaatcgcttacatgagtttttttaatgcttttaatggtcagttcttgaaactttctatcacttccatccaacctctgaattccaactccactagaaatgccccctctggttacggtaccagttgctgcatctccattagtactagaaagacgttcaactttttcctgaaaagaactttgatctagaagtccatattctgtgatcaactcatgccaatcagtcacattatctacagaagttgaattccttgagaaaagatttttgagattagcttcgtcatgcttcattgttgaggcattagatgtctcatcagcagaatcattgtcatgatctatggtaactgatgaactaccagggacatcagagatggtggtaggtagaagtgacggaatgtccccagaggtatcttcagtttcttgatattcatcattaaaatctgaagagatttaaagagtaaagaagcaaattagtaaataggcaaatacatgcaaggtttttagacaccaatacaaaatgaagtgggagctcagacaaattaaattaacttcctattgcatattttctctaccaagaggaaaaaaaaagagggaaaagaagagctcattcaagacctgtcagcagcttcaagctcaagaaatgtagctataagagcgcttctggatatatcaatatctgacaaaagtctattcatccaatcttccagagagcacctcctctacaatagactaaacatattgagaatattattgctgtcactaatctaaagtgttgagagaatcgaaatctacctcttccaaaagtgtctggtttctcatcctcagaatcttctttggtggtgcctggggtaagcttttcttcacaaactcctttttaatctgaaaacacggtagcccaatgacaatgtctaaatatctgaaatgagtaagccagaacaaagaaaagagtatcgaggaaagaaagtactcacagacgaatataactccaagaaatcattgaacctcctaagtaccagcctagcagaagtgattccctcaggagattgtatcgctacttgcactcttataaaactgataaggacacaagtaaaatcttaagactaacatattatagctagaatgactataccaacaggttggtacaaatatctgtaaaagataagataatacacaccagcggcaggatctgaaacgcttgacttgggaaggtcaacccaagaagggacagtgacacagtaactccaaccagttcgatgatcatgtggccaaaccgtgttccttccttcctaagacaaatttacagttagaaacaaattccaaacagaatcaacgaattcgaatattgcagagagaaaatgattaccaaatgacgaggaggagaactccaatccattcccagaggtaacggagacctcccgtcgtggcgatgcggcggagatgctcttgaatctgtgtccggttctcgtccattagctccgtcgtgactgtagctcgtattacggcggtaatcgtcttcttcgccttggaagaaagggccaggagagaggaagcggtgagatagtggctcgccgaagggaccggagacgttgtaattgaaatcgagaagagaaagatcgtgcgcgtatagattcatttcctttctactctcttgattccttcttctcctttctcgatctctctctatcaaacaaacaaaatttgctctctctgtgttcttggagcaaccgagtcaaaacgctccgttttgctttctcagtttagtttatgtaatttgataagtagtaatttcacaacaagtcgctctcgtctagtggtttgcgtatcaatcaatttgtgcgacccgagttcgatcgactttaagagcggtgaagatagaacaaattatgtgacggaagccgtcacagtcgtcctgaccaactgtgacgatagcaagtgccgtctgagctcttttttttttttggttccggttgagtgacttggttgttgaacatccggttatgcgacccggttcggttcgaccgattatgaggagacaacagaacaataaacataacggccgagtcctcccgtcactgtccgagctcgcttttgattattgtagattattatgtgtttttggagatgattctgcgaaacccactaaaatgtccttttaactctgaactatcgatcttcaaggcactgctcatgtcaacgatcacagaatctatatccaatgattactctcgtttcatctctatccttggagtttgcaaaacgacggaccaattcaagcaattacattcacaaagcattacgagaggtgtagcaccaaacccaacattccaaaagaagctctttgtcttctggtgtagtcgtttaggtggccatgtgagttatgcatacaagctgtttgtgaaaatacctgaaccagacgtggttgtgtggaacaatatgatcaaaggttggtcaaaggtggattgtgatggtgaaggagttagattgtatttgaatatgttgaaggaaggtgtgactccggatagccacacgtttcctttcttgttgaacggtcttcgtgatggaggagctttggcttgtggtaagaagctgcattgccatgttgtgaaatttggattaggttctaatctttatgtgcagaatgctcttgtgaaaatgtactctttatgtggactaatggatatggctcgtggggttttcgacaggagatgcaaagaggatgtgttctcgtggaacttgatgatctctgggtacaacaggatgaaagagtatgaagaaagcattgagctttttgtggagatggagaggaacttggtttctccaacttctgttaccttacttcttgttctctcggcttgttctaaggtgaaagataaggatctctgtaaaagggttcatgagtatgttagtgagtgtaagactgaacccagtttgagattggaaaatgctctggtcaatgcatatgctgcgtgcggggaaatggatatagcggtgaggattttcaggagtatgaaagctagggatgtgatttcttggacatctatcgtgaaagggtatgttgagagagggaatctggagttggcaaggacatattttgatcagatgccagtgagagacagaatttcgtggactattatgattgacggttacctacgagctggttgcttcaatgaatctctggaaatattccgagagatgcaaagtgcaggtatgatacccgatgaattcaccatggttagtgttctcacagcttgtgctcatctgggttccttggagataggtgaatggattaagacatacatagacaaaaacaagatcaagaacgatgttgttgtggggaatgctttgatcgatatgtatttcaaatgtgggtgttctgagaaagcacagaaggttttccatgacatggatcagagagacaaattcacatggacagccatggttgttggtcttgccaacaatggacaaggtcaagaggccattaaagttttctttcaaatgcaagacatgtcaatacaaccagatgacattacttaccttggcgtcctctctgcttgtaaccatagtggtatggtagaccaagcaaggaaattttttgccaagatgagaagcgaccatagaattgagccaagtttagtacattacggatgtatggttgacatgcttggtcgagctgggctagttaaggaagcatatgagatactaaggaaaatgccaatgaatccaaactcgattgtgtggggatctctactttgggcttctagacttcataatgatgaaccaatggctgaattggcggctaagaaaatccttgagttagaacctgataatggggctgttta

SEQ ID NO: 71918 - DNA, 594 bp, Arabidopsis thaliana landsberg
  unsure (1)..(594): unsure at all n locations
ccgggaccccgcccgcggggacgacgtgcggnatcgtacgggcccactcgttcttcgttttttaggccggggcgcacagcaccccgccggagacggggagtccgttgccgcgcagccattcggtgcgcggctcgctgcccaggcccaggacgacgaagtcgcagtccagccagctcgccgtcgtacaggcgcagccgcagcaggtcgccgaggtccctgccaggcggagatccgggtgccgagccggacgccgacgccggacctgcgctggatgccgccgacgaccgacccgaccttctcgtccagaacccggcgcagcagcggggcgctgcgccccccagggcgacgtccataccgcgctcgcgtgcggggcaggccagctcgcagccgatgaagccgccgtccgagatcaccaccgtggtgggcttgggccgcgcgcagggccccgctgcacggtggcggcgtcccgcagggggcgcaccgcacggatccggtccgtgaacagcggtgccctgggcagcccgtctgggcggaccaccgccggtgcggccacgacccaggccccgccgcaaaagggccagctccgctttgccc

SEQ ID NO: 71919 - DNA, 487 bp, Arabidopsis thaliana landsberg
gcggccagaaccacgggggcgggaggcatttgctggccgctttggtcatgcatgatgagaacacggtcatttcactccttgaccggcttgatgtggatgtgatcatgctgaccgacatgctcctcgaggcgctcgaagcacctctggggcagaccatgtctcagtcataccagctctacctgacgcccgatcttgcacaggctttggaacattccggccgcatcgcgcaggaactcaacgattcatatgtgggtgtagaacatctcttccttgcactccttgagcattcagggcctgcgatcgaagtgctggatcgtgcccatgtcgacaagaagaaggtccaacatgcgctttgcgaggtacgcgaacatgcagtggaggacgcacagtcttcgaacaagaaggtccgagcgctttcaaaatatgcacgcaatctcacgaaactcgcgagcgagaacaagctcgatcctgtgatcggccgcgatgc

SEQ ID NO: 71920 - DNA, 401 bp, Arabidopsis thaliana landsberg
ggggcatggcacccagcgcaacacgttccttctcgacaaccatgtcgtcggcgctgactcgcgcagaccggcgggatgaggtctgagatacgtcatcggcggggggaatgttttccttgtcgcggccctcggcgcggtccctgctgcgcttgcgctcactctcctcgtcagacgaaatatcgagaacgcaggtgctgtgctggagggaggttggtcatctcctgctcgggggtatcctcgtgaatctcaaagaaccagctagccttcatgtctccctcggcgagagcactcagcggctccttggagccagcctggaaaatcccttacccgggaattgggcccctgggagaccgcttcaaaagaaaagggagcagccaagcccaagcttaaaggaagggggg

SEQ ID NO: 71921 - DNA, 494 bp, Arabidopsis thaliana landsberg
  unsure (1)..(494): unsure at all n locations
tgggccaanntgggcattttttttaatatcgagagtttatgatcaaggggcttaaacagagtttgcagctacggttttgacccgaaaaaggcgggttttgttcacgctatggtagcctttgattgcacgagtgaatcagtaatggagcggaaatttaagttgttccaatgttttggttggtctaaagaagatttcgtcgcagcgatcatgagattcccaaactgtgtgacggtttgagatgagaagataatgtacacaatggagtaccttgtaaacaacattggtctgcgagctcgtgacattgttgcaagaccggtggtgttatctatgagcatggagaagagaatcaaaccgaggaaccaggtcatctctttgcttctctccaaaggacttgtgaaggaggtagacatcaactatttcactatactaaagctggcaagctccgagttcatggataagtttgtccttttagatctcgaagtgattgcctcaac

SEQ ID NO: 71922 - DNA, 504 bp, Arabidopsis thaliana landsberg
  unsure (1)..(504): unsure at all n locations
cagggaataactactcacacattccatttgttgccaactttaagctaaaaacggggctcttgtatttacttgtaacagaaaagtggcgcaatgaccttcaatggcttaactcttgacttctcgatggtttgagtttgatctcttcagcgccctgtcatggtttagcattgcgcttacgctctcaaccacgaaaacgatctgtaaagaaaagcagaaacccgtatgcgggttttagtcaagataacccaaaactacaacattctttgatcaataactgatgatctcatcatcctctgcttgatatcatcaaattttgtactatatgagtatcaactcccaactactgaatagaataatgaattttgaaatggatccaggcctatattnnnnnnnnnnnnnnnnnnnnnnnnnnnnnnnnnnnnngtagaaatttgcatttccggttccctgtcatgaaaaaatcaaaggtagttgtgatcattaaaacattatgttgcaactgct

SEQ ID NO: 71923 - DNA, 470 bp, Arabidopsis thaliana landsberg
  unsure (1)..(470): unsure at all n locations
tccgaagacattgaatgtcaaaaggttattagttttgtattatataacagctctgtgaggaatgttttatggggctacattaataactatcttgagctccagaatgtttcannnnnnnnnnnnnnnnnnnnnnnnnnnnnnnnnnnnnnnnnnnnnnnnnnnnnnnnnnnnnnnnnnnnnnnnnnnnnnnnnnnnnnnnnnnnnnnnnnnnnnnnnnnnnnnnnnnnnnnnnnnnnnnnnnnnnnnnnnnnnnnnnnnnnnnnnnnnnnnnnnnnnnnnnnnnnnnnnnnnnnnnnnnnnnnnnnnnnnnnnnnnnnnnnnnnnnnnnnnnnnnnnnnnnnnnnnnnnnnnnnnnnnnnnnnnnnnnnnnnnnnnnnnnnnnnnnnnnnnnnnnnnnnnnnnnnnnnnnnnaaactttggcagcgaaaaaaagcttccaccaacagacgacttgctgtcaatacaatagg

SEQ ID NO: 71924 - DNA, 159 bp, Arabidopsis thaliana landsberg
aacaacaaagacacacgcaaccccagaaaaaacaaacacacccaggaaaccaacgaaagacacagcacgcaagacaacaaaacgaacacccaaagagggcccaccagaacgcccgagaacaaacagcagagcaaaaaaacgggggacaaaaaaaccaaa

SEQ ID NO: 71925 - DNA, 391 bp, Arabidopsis thaliana landsberg
ccaaaccgacgcacctactagctcccactgggatgaattttgtaataccaaacattctacgtgtgaaacatgacatgatagatagactagtatcatactcaacatcaactgggtgaatcaaactaatgggctacataataaagtctttattcttgctagcttcttctttaaagagtcgaggttaatgattactaatttactacaaacaacaaagtaaatattatgctagtgaaagaaaaataaaaaaatgatgctaggtgacatgcatgaattattgaattttgaaaatattaaacatatatcattttaaaattctgaatataattataactgatcatttttaggttattaattgaccaattaatgcattttctcaaaaaataaaatttta

SEQ ID NO: 71926 - DNA, 583 bp, Arabidopsis thaliana landsberg
acatatccgataatatccgaatgaatcataaactccaaaactgaaagaacccgatcttaacaaaaatattttggtagttatatagttcttaaaatctaaaacccaaaaaaaataacagaagcgaataccaaatgtgagacgtactaaaatctcttatctcactaacattgggcctgaaagcccactaatctcaaaaaatgaactgctctaaaccatgtcaatcgaaactgaattatttttagtaaagataaccaaatgaattttcaagacaaccaaaacgaaccaaatcacctagttacagttcagttcgtttttttttcctttccggaaaaggttattatgcccacccatacagagaacccataacaagataaccatgtgaaaaggcagagactaaaacgaagcatattcaccaaatcaagtgaggctgaagacaatgagaaaggggagagaggcatataggtagaggttgggttaaagacaggtaccacaacttggggctaccactttaatggatcactttcggccaataaattggggagtggagcattgactactgtgcatctgctctaccaattaattt

SEQ ID NO: 71927 - DNA, 491 bp, Arabidopsis thaliana landsberg
tgccaaaacatatattggcttctgtttttactttatgtttttttgtttttacaaaaggggcttacaaccttgggcatggggctattttatattgaaactatatagtatcatgaaaaaggtcatcagacaattaatttataaaacattctgaaaatgaagaggtaccacctagcatgaggttccagtgcttaccaagttttaaaactttaattatttgccatttgaataatgatttgtcaaaagtggggtgctatttgtcaaattcttgtgagacacaacttttcttcatagaatatattgtagaactaatatatattgagtaacactatcctgaagaaatatattaaccaagaaatgtatagggcataagagaagtgtacttgatattcggaaaaaaaaaaaccaaaaactaggtataatttgaggttaatacaaaaactaggcctaaggtgaggtgaaaaaaaacttaagcaggactagtattaagttat

SEQ ID NO: 71928 - DNA, 469 bp, Arabidopsis thaliana landsberg
atcgaggaataacagaagagagaatgttcttaattaactaaatcattataggcattatctgggagaagagttggaaccaatgagcctcaaggatctccaaaatctggagcagcagcttgagactgctcttaagcacattcgctccagaaaagtgtgtaaatatatcccacactctatctctatgcataactaactttgactttgtgtggatgtattacatatagtcaaatattgtatagagattgtctcatataaataaataatttttggcctttttgtatgcagaatcaactcatgaatgagtccctcaaccacctccaaagaaaggtagctaagttaaaaccattttatctctcaagtcctgtgtgtatagagtcatgacttatatgttagagatataaatcttttaataaataaataacatataggttatatataattcaggttaatatattattaattactagat

SEQ ID NO: 71929 - DNA, 504 bp, Arabidopsis thaliana landsberg
  unsure (1)..(504): unsure at all n locations
tcaagggtcacgagcctcaaataactcagttacacgtggcaaattttcggtttatctcgcgttttacctgttggacgagggattttcgcaataatttgtccggtttgtagtttctcgccttcatcaactgcaatatgtgcacctaccgggatgttgtatcctttaattacattgcccttgttatcagtaacctggatagcagggtttttagttttatccctggtatcgataattaccttctcacggtgaccggtttgctcgtcagactcttcgcggaaggtgataccttctaacacagcctcgaactgagcgatacctgcaaattctgagataataaccgcgttgtacggatcccaagaacagatacggtcgcctttggtgatttttgcaccgtcttttacatataggtatgaaccgtaaggaatattgttggtaacaatcactttattgctaccttccnnnnnnnnnnnnnnnnnnnnagaacgacctaagactacgtcaaca

SEQ ID NO: 71930 - DNA, 570 bp, Arabidopsis thaliana landsberg
  unsure (1)..(570): unsure at all n locations
tatatcttgtatttgttaataggttgtattaccaattcgtgaacctctgtgtctcgacgtcactgcgcaaaaaatggctgatttagtcttacatttttggtttatataactcgggtatcacaaaatgttcccatacgtttgggagttgctcaatataatatgtcacagctgaagtatcaacaagtatcacaaaaattttgaacataaaatatgactctccggtttgttgaccttgatcagattcagattatatacctttttggagttcttctagttcggattaagcaacttcaataattgaaaattagtttatagtatatatattttttggttactagctgcaaagtgcaaaccaataaaaaacatcacttaactataaatctaactgataatatatactaacaacaaacacaccaaaaaaaaaaaaaaactaaaccaacagaaatccactagaatgatcataaattacggtttttctatttgtttcacttactatntttaccgtttaaaacaatcaagacagtagagatgacaaaatcgaccacatgaaacataacttttcttgatttt

SEQ ID NO: 71931 - DNA, 579 bp, Arabidopsis thaliana landsberg
gctaccagccacacattcagaatgaggagcacgacttgcagctctgtttgtagattcgctgttagggcaattatctcctgcctttacgacactcgactatacgaatcgtggtggttgcatttaccatttgcccaatgagctttgcgtggtcggcgatgaagccaaagagtatcaggcatctgtcgactagtgtcagcggcggtctataagtcattaagcatacctccccgtgctagcaattggtcgtttaagttgcacattctgcaaagatttccctcttttgaagatcttgactctgtcattgatcagtctcaacccaaaaacacaatgtataggggaaacgctttcctgaaactcgttgtcgctttggccgttgctattcagtgtttagcttctcagcctgatctattcaaacatgtcgctcaggacgacttccgtagcaatttcgagaacttgattgctactaatcccaactacttcggaaacgctccagaatctaaccgacccaccgtaacgccactatcttatgatactcaatatgagcaactggtttcgattggcttcgatgcacacctgagt

SEQ ID NO: 71932 - DNA, 424 bp, Arabidopsis thaliana landsberg
taggcttttcgccgccgcccctgatgagcgattctcacctccggctgccatttttaactgacgcctaagcctctgagcagaaacagagcgttgaatctggtggtgacgaaggcggcgctgctttggacaaccacacgtcaaagagtggagatctccggcggaggaagaggatgaagcaaccggagacatgaatctggaacctacttctctaactctcgcccgccgcgctgaaggccggaggagcccgcgctgatggccgaataagcttacgcccgctgggtttcgcctccataacttcttcgaaacagccggagattcaagcggccaccaggattcgtcacggcctttaagagatcataattggattcttgaacccaagccaccactcggagaagaagatacgctccgctttttttcttttttg

SEQ ID NO: 71933 - DNA, 280 bp, Arabidopsis thaliana landsberg
agtgcatcatccgcccgactaagagcaaccatgtggtcttaggacattgatgagggagagtgatggtaactgaatctttcaagatttaccgctcgattcaaccgtgccttgaatgatcagagacgctatacactttgttgaactactctgcaggctgcaattaaatgaaaccatggtacatgtggatacacatttgagggaaatagtgcaatgacaaagtaccatcacaaactagaaccaaacaaatttttagtttatataatgacccactgatggaaga

SEQ ID NO: 71934 - DNA, 579 bp, Arabidopsis thaliana landsberg
gtacttttattttttttagctaagttttcaaacatgtagcttgtatatagttaataggggtatgtgctggacacaagtgtacattctacagactagctagtaaatattaggaatgaggttttcaaatgggtgattaaccaaaatttgccgtgaatgtattttagtacagtataagttaattaatagtttatgcaaccaaaaaaaaaaaattggaaatatgacgctgtctttttagaattcagttactaaaaataggaatttgctctgctttttacgtgtctgggaagtcacgagcatattgctgtttctgtgtatcattacgatatcaaattacgaatcacaaaagtttaatgattcatgggaatcttttccaactaaccacaagtaaaattaatttcaaagttaatgcagaaaaataaaacactttggctgtttttagaaattaaagttttaagagacctctctttttacccattctttgcccacaaccagagagagagaaagagaagtagcgagtgagtgagatagaaaagttgaaaagagaagatgcgagtgagtgactgaggagatagagtgaag

SEQ ID NO: 71935 - DNA, 529 bp, Arabidopsis thaliana landsberg
  unsure (1)..(529): unsure at all n locations
ctgctgcccagcggtatgcgcagcatgcccacctacaagattatcaacccgtcgcaggcaccgatcatggtgctgtcgctgacctcggatgtgctgcagaaaggccagctgtacgacctggccgacaccatcctgtcgcagagcctggcccaggtgcccggggtaggggaggtgcagatcggcggcagttcgctgccggcggtgcgcattgccgtggagccgcagttgctcaaccagtacggcctgtcgctggatgaagtgcgcactgcggtgtccaacgccaaccagcgccggccgatgggctttgtcgaggacgccgagcgcannnnnnnnnnnnnnnnnnnnnnnnnnnnnnnnnnnnnnnnnnnnnnnnnnnnnnnnnnnnnnnnnnnnnnnaacggcaccatcctgcgcctgtccgatgtggcannnnnnnnnnnnnnnnnnnnnnnnnnctacaacagcggcttcttcaatgaccagagcgcggtgctgctggtggtcaaccgccagaccggcgccaacatca

SEQ ID NO: 71936 - DNA, 558 bp, Arabidopsis thaliana landsberg
atagacagcaccttgagcaggaaggcaaacaggggcaatgatacaaacagcatttgagggaacaggtgtttgaacttttcgagtatggcagtccagatctgcttgctgttatcgttgtatttttctttgagatgcagggattgcctcgtaaggcttcgtttcagaaaaccatccctgtcgccctgcggcaatgcggcctgcgcagaatcatactggtgtgtgctcctgtatttgatcgcatcttcatctcccatcaggttaaactcgttgcgtatggttcggagtttgttcctggccgttgtatcgctgcggatctgggccaggtcgctgtcgatcagcgaaagcctggtgaggtaggttttgatcttatccggtttcagcgaatctgtccgcttcaggttccgctctacccttgccctgttgcgttccagttcctgcaccagctcccgcgcagtggtgccggtatcattcacattcaccacattcttgtccttaccaaggctgaagaatatcaggaaaaaaaatgcggacgttaacacatacatcctgatgggatgc

SEQ ID NO: 71937 - DNA, 811 bp, Arabidopsis thaliana landsberg
cttttgccgggcaatcagatcaccttcccaaacaaaatttgtgctgatcctgggagacatctcaggccactcggggataaagatgccagacttgagaagattattgtagactttctttgctgcgcaattggcaatcctgaaatagataacttgatgctcatcgtgggagacctctcgggtcacagtgagttcgaattggctgctcaccttatgagatgtctaaatttcactgttttcttagcacagcctcaaaacgcatcacaacagctacttaaagctgtacctacaaaatggctttggtcaagcttatcagctgcacggaacgctgagctagcgttgaatgctaagctgctgaacgggtcgagtttgaaatgattgtgttgctttttatgggtctccaacttctctgcgtgcaaagatccttgtagccttcttctactcggtctggctctgcctaagatcgcatttgactcttttattcaaaggtttctggttgtttttatgtcttttctatctggtatgcataataactcggatctttgagtattactttgcatctatctattttgctttccctgttttgtttaaaactcccaagtcgtaaccaatgctttcctcttaaccattaaccaatttgaaagtttagcaaaaaggtcataagtttttgattcttttggaatcatcctaattaatagagagaacatgttgtgaaactgatgcatgaccaagcaaaaaacaaaattaccgagacaaaaagtccccttttcttttgcttttaacacggaaccatccgattccacaaccaaagcat

SEQ ID NO: 71938 - DNA, 332 bp, Arabidopsis thaliana landsberg
  unsure (1)..(332): unsure at all n locations
acatgatatagtcctataaaaaaaaagatcgattttaatcataacaaacaaattttcgggagcaatttttttattttattttgcatgggattcttcatcgtgttcatagctcaagcaagcttcaattcattttcctcttcaggtaatttatactttttgatgatgtaatttacacgattgcgtgttagtctgtttcagctacgtgttnnnnnnnnnnnnnnnnnnnnnnnnntttttgaaaaaaacttttgtttagcggattgagatcaaatctggatacatttccgctgtttttgctaataaagtgagcgaattttattttaaaccttagg

SEQ ID NO: 71939 - DNA, 179 bp, Arabidopsis thaliana landsberg
actaacgacgcgaaagaagaaccgaaagaccattagcaagaagacggccaaacaaaaccaaaagcaaaagccatgggcaccggcaggggcaccctcaccgctctgaaagggcctctacatttttaaagagccaaactttaaacattgagtgtcgcaaattttttaataaaaaatctttt

SEQ ID NO: 71940 - DNA, 313 bp, Arabidopsis thaliana landsberg
aggatagggcttttgaaaaccagatcattctttacttacccttagttattaaataatcaccacccacttaatgtagcattgtgggtatcattgaaagacctacttttagtctttaccaaatgtattgatcacattaaatgcaaggattacatcatcatggactgtctacttacaaacacaatagtgaaaactcttactgaaaagagagaataaaaaatgaaagaaggtcttcttagaccttctggccataatatatatagacatagataacaagtttattttacatgtagaagacagagaaagaaaatgagaa

SEQ ID NO: 71941 - DNA, 522 bp, Arabidopsis thaliana landsberg
aaaatatagcctatgcgaaagccaccggcctagcgagtgcgccgattcgttcttcatggctctatggcattccggcaaagaggcggcggtttgagtccataaagacatgatgcccatgcccgggtctttttgaattccgtaaatagaaatggaagcatgcggatagtcttccgtctcttgtctcataagaacgaacatgcggcccatgccggttctagcgatatcgtccgctttaacggcactaaatccgaattcaaaaatgcaatcatcaaatggcaaacgccattcgtcatcttcaagcggcttaatcgcccggccgaattcgccggccgtccaatcgtgacaaatcagaattgggattaagtcatttaattcaatcgaccgcatatgaagttttagaagagtgtccaatccgtcttttagttcgccttcttttccgggttgggcttccatcaacgttcgaagcggtgcaccgtcttttgcggcttgaatgaattagtgcagccaactatggcgcacgcc

SEQ ID NO: 71942 - DNA, 530 bp, Arabidopsis thaliana landsberg
ttggtcgcccaaacttggcaccaaatatgttagtagggaatttatatacagtcatagataattgatttgagtgctccattacagccacttgtaatgtcctcacataggcaatataatagatacgtcaccaatgtgtaaggaaaatatcatcgtcgtctttctatctgtttgtacctaagtggtggtattctagtatttgttggggcactgacgttctcaaaaataacataaaattttaaaacaatcatggattctaaaatcaaggtgtaatgtgttctatgttctacatttctagatttcatgtcaaagtatgaaatttatatgattagttaatcatctaaattctaacctgattccggaaagataccacagataaggagcttgattagctaagaggtcaaactcttttttggttttatttatttatttatttacatttagaacaaaaccataaatcatcagttgcatggaggctttttcgagtacgatttcagctttatagtcataattaatcgaattaattagctctc

SEQ ID NO: 71943 - DNA, 335 bp, Arabidopsis thaliana landsberg
cctttgctcctgacctacaagtatatacaaattgaagcaaggcggtcactacaaggttttttttgattggtggaaataattaagaaacgaaggcagagattttacttcttcttcttcctcttcctcaatggactggtgggcggtttcgtttctgaaattttatttgcccatttctcatatgccttgcttgacttcacttctcctgaaaaggaaatcacacttgataatcagcaactctcccaagtttacatagatttcagatcaggatcaccaaactggaataaaaaaattagaatgcatatttaggtggaatatgaaccatcaaacacacagcc

SEQ ID NO: 71944 - DNA, 497 bp, Arabidopsis thaliana landsberg
agcgggcgggcagtgaatccgacgccgtgggtcgcgaacgcggcaagtttgttcgccaccgatgacgcgccgggaaagaaggcggtgcctaagtagagggcggcagcggttccgaaaccgatgaagtcgtatgtctcgatgaccgcgccgacgctggatccgacggtcactcgccgcgcgtcgggggtgccgttcaccggtccccgcatggagagagctgcatcgctcatgggtgatgtcctttcgaactctgaggatagtgcctggtcgtcggcctagccggcgatcggtgagctcaagtgtgaccccacacacattcaatgtcaacagtcaacataaaacacatccagaagttgactgttaacagtcggccgaggtagtgtgctgggcatcacatggttcatcggatgacttcggacgggatcagcaatgcttttcgaccacaggctcgggtgctcgacgaatcagctttggcacctcgagctgaccgatgcgct

SEQ ID NO: 71945 - DNA, 520 bp, Arabidopsis thaliana landsberg
tgaaaagagccaaggaggtccaataaaataataacactatcactataaaactttcacaagagctggttgtgcataaatcttttattcgtctgactctcacaagtcacaatgcaaaaactcaggtgataaaaagcaaacagacagtgaaacgagtatcccaactattcaaatgagtgggtgttgatggatggtttttcctttagttacatacccttacagctagagtagaaattaaactattttgcatcattcatccaaagtatttagatatctttttcttgatgtaattggtttttaatctctatacgtacgtaacatcaaaatttatatactaaattgaccaaacaaacattatctattgtattcgtatatcgaaatgttatattctgacacaaaaacgaacaaaattttaaatctaaacatttttttgaaattcataaaatggcataaatttaattaataaaaatggcataatagttttttcataatgtggtctcctaattgtatcagtcataacgta

SEQ ID NO: 71946 - DNA, 564 bp, Arabidopsis thaliana landsberg
ttcggtttccttgatcaacttgctcctatcaacatctcttgcccattaaaaagttttgcagtttcataggatcttgcttagtaatgttaagtgagaagagtgttttgttttttcgtttatgctttagtaatttaagacatacaaaagtgtgtgttccggattgtagtaagatcttaagacataaagccgggttttgcaattaggaatcgagttttaatgaagttttagtttatgtttgattgatgttttgctgattctggtttctcttctcttttactttgggtttttcattgtgcttttaagagccgtccaaagtgaaagagttttgatgagaattccactgtcagttttattacatcattctccactttcatctttcgttaatgtgaaaaacaaaatattaatggaagaagctttttagtttatataattttgatgtgaattccttttcattgttcttatcgacttaatttgttgtctgcttcaaaattattaagccctaccagttgggcgttagattctgacgtgttgcgattctaagaatctaatggaaaatgacaaatg

SEQ ID NO: 71947 - DNA, 207 bp, Arabidopsis thaliana landsberg
ttatctcttaaataatgtaaaatttctaaaaattcatatttgtgggacggaagatgtattctttatataataataattgactgtatttgcttatgtcaaaaattttacttagaatataaataactaaatatataagttttggtatattagcttaagctagtttaattatagctgatattttaacaacttatctacagttattattaa

SEQ ID NO: 71948 - DNA, 423 bp, Arabidopsis thaliana landsberg
caagctcagagttgtaaatgtgcatgaaaatctggaaatccatccaactaatggacatatatattttggtcataagaagcaatatgtcaatggcttatacacatgacagtcttaccaatattattggaactttcacactctccaactcctgtctgataaaatcaatctgtatgataactaacagattaagatcttaacttcacaggatgaacaatacaagaacctaaaggctttcaaatccaagagcaatgaagaaaaatgatttttattaccttatgatcaatttgttcttgaaatgaaaatagcctcccagactcccagtcctaaaagtgaaaataatcaagtatcatgaaagcctatcaaactaagatattatatgaagagaaccatcaaagtttacacacagtaaaacctgaaacccaa

SEQ ID NO: 71949 - DNA, 536 bp, Arabidopsis thaliana landsberg
ccccgaagcacggcgttcatgggccgtgtaggaatctaaccttcaacctattagtaacggcggacccacgaaagcggtaaaaagtcgctgtaaggccaacttagcgaggccttacgcgaatgcaagatccccgaaacggcaccgaatgcagggctgaaggtgcaaccaaggtgcaaccgcgctccggaagtatcacggagggcgtcagcaggcagcgttctcggcgcagcggcggcggtccgcgcgtcgccaagcaccacctgagctcgcgcacggtcgtcggctcgccggcggacgttcgcagcaaggccgcgaagaagcgcgagctgatggagcaggcgcgccgcgccggctggaagggcaagtcgtaccggaaggccaagcggttcgagcgcgcgctcgagcgggacggggcccgatgaggcgcccctacagcgtctagctggctgacgcgcgcgccacggccagcaccggcctggagcccgagccgctccccgagccgcgcgacccggacacgatcgagctcttcgaggaag

SEQ ID NO: 71950 - DNA, 345 bp, Arabidopsis thaliana landsberg
ctaaactattcaccagggcacatctagatagagaaagacgagaaagtatatgactaacgtattatctatattcattctgagaaactaattgaaatgaaaataaactcacctttgtaaatagctgactcctcatctgaaagggctgccatatgtcacatcatgtcaattatattaagatgaaaaaggaagtttggtatggaaatcgtaataacatgatggggtttcttaatcacataccgcactggtgcagcccattaaaagactaactatggacttccactgcatgaacgattcaagagactgtcccatctgcccaataatatgacaccttgatcttagaatgga

SEQ ID NO: 71951 - DNA, 581 bp, Arabidopsis thaliana landsberg
  unsure (1)..(581): unsure at all n locations
atgtattctagagaagaaaacaaaaaacagaatgattatcaatttggatctcttcttactttgttctggggtcacatatttctttatcacaccttttttatcaaagagatgcatattacttgtagcgattgtcgtggtgagtttgaatttcttcagaaagccctcttgccgagccgccagcatgttctcttcactcaaaataaggtcaaaatcaacagatttctcgtcattgtaagccttgacatcctgcagaaagaaaaggaacaagtcagaaagaagcgtcaatgaatactagcacagttttctaattaaagcaggcattctacctggaaaaaaggtgcaccattatctgtcttcaatgactgcaagaaatttttgtaatcatcattccaccttctgattggcaactccgtgattcgaataggtgtttcatccacctcctcatatagaccagtgattgtgtaagtacaaccaccttctttggacgcagttttctcaattgttccttaacacctctataccaaggatccataggcaccatactctcaccgnttagtaaacgccttacatttagcacgatc

SEQ ID NO: 71952 - DNA, 330 bp, Arabidopsis thaliana landsberg
  unsure (1)..(330): unsure at all n locations
cgggcactcagcatcctttttatctgttccttcgatcatgcccagcacattgcggctttgcaataccattgttttgttcgaatcggcaatactcacctttgcctgaactgccgctggagcagtaatatcaacagggtgcccccatatgtatccggcagttttttcggtaataaaaaatatcggaattgannnnnnnnnnnnnnnnnnnnnnnnnnnnnnnnnnnnnnnnnnnnnnnnnnnnnnnnnnnattctttttgaatgatcaggatggcaacggtctggtgcttccgggcaatactttatttttttcttgggatgagcttcaacga

SEQ ID NO: 71953 - DNA, 678 bp, Arabidopsis thaliana landsberg
tctctgaccgtgcaatcagaaatgtggagtcgaccatcaaaacctgtagtttaggagaattagagagcttaacctcttgtgattcacacaagtccgggtaaaatcgatgtatgctacactctttaagtagagagtaaacggcgttacaccatgcaaccattgtatcaccacgtatagatagctcaagatactcgattgaagaaagagatctcagaagtaaacggagcatatattaattagagtgccacgtcagcattatttttttataatgataagtctcctccgctcaatttcagatcagaatcagatcatccatggaaacagcgtcgagagtggaactgattgttaaaggcaacttaccggaggttccttctcagtacattcagccaccggaagctcgacctaatctccattactccggcgatgcagcttcgatcccaaccgtcgatctctcgagctccgattccgcgagagaagccatcggtgacgcttggcgcgactggggagccttccacgtaatcaaccatggtgttccaatccatctccttgatcggatgaggtctttaggtctctctttcttccaagactctcccatggaagagaagctacgttacgcctgcgactctaccttcgccgaatttgaaggttaccgtaaccgtatgtggcttggtgctaaaa

SEQ ID NO: 71954 - DNA, 110 bp, Arabidopsis thaliana landsberg
tttcttttatagctaagcaactaatgggtttattaaaattaagtgattttatgatttgatagaagaatgcataaaagctgggtgccggggatataacagcgccatactta

SEQ ID NO: 71955 - DNA, 442 bp, Arabidopsis thaliana landsberg
ctgttttaagagtataaaccaagggatattcagctagcgatatcaaacccgaacaaagatgttcacttgacaatagcaagatcaggaatggtggagctagttggcaaggaatggttctttgtgagagtacacgacgccgtacaggtgtgtctacaatacgtacagagctctaacttggaggacaagcatttaagttttacgagaagatatggtgggagcaacaacaattcatcctcctccaacgcgctgttgaaggagacattgttatcagtggagaaataaaggatatgtaatgtaagtaatagctgtgtatagtttgttgcgattttgtaaaaacagtatacaatcttcattgtatcacctatataacaacattcttactcttcttttcccacaataaaaatagaccttgatgacattagacagttttttttatttaaat

SEQ ID NO: 71956 - DNA, 2507 bp, Arabidopsis thaliana landsberg
acttaaaacgtattcacaggtctgcaagttcctagaagtttctatatctctcatttgctagagagtacggttcggagatgaaagaagggtatgtcacagtgaagcacttgagggacgtcccaggttctgatggtgtccgatgctgtcttcctacacactgtctcggtttcttcggaactagctggacaaaggtttggtcaaaatcaactcggggtttttgtaaagtttctgaatttttcttgctcagatgaatgattttctgcatttttgaatgttttcaggtttgggcggttctgaaaccaggatttttggcgttactagaagatccattcagcggaaagcttctagatataatggtgttcgacacattggggttgcaaggtactaaagagtcttctgaacaaccgcgtttggctgaacaggtgaaggaacacaacccattgcgttttggctttaaagttactagtggggaccaaaccgtgaggctgagaacaacgagcagcaggaaagttaaagagtgggttaaggccgtggacgaagctggttgttacagtccacatcggtttggttcgtttgcaccacctagaggcttgacatcggacggaagccaggcacagtggttcgtagacggtcacactgcgtttgaagctatcgcgtttgcaatccaaaacgcaacatcagaggttccatttctttgcctcaacttgtatttgagaatcgtaccatataatatcttagttttaaatctaaaatttcgtctacagatatttatgactggttggtggttatgtccggagctatatctcaaacgcccctttgaagatcatccatcattgcggctcgatgcattgctggagacaaaagcaaaacagggcgttaaggtatgcgtaatgagcttacatttctctcgaaaggattcgatttgttttcttatgtaagcgtacactaaaaatttaaaagttgttgcagatatatattcttctgtataaggaagtccaaatcgcgctgaaaatcaacagcttgtacagcaagaaacggcttcaaaacattcacaagaacgtcaaagttcttcgttatccagaccatctctcctccggcatttacctctggtacagttttcatcgcttcagggatttacttaacaactacttagctataactaaatttgaattctgtggttttttcaggtcgcaccacgagaagatagtgattgtagattaccaagtttgtttcattggagggttagatctctgttttgggcggtacgatacagcggagcacaagattggagattgccctccttatatatggcctggaaaagattactacaatcctaggtaatatcctgaactttttattatcttttctaacaaaaggaatcatctttctcacaaattgcttctattgtcagagaatctgaaccaaattcgtgggaagaaacgatgaaagatgagttagacaggagaaagtacccgcgaatgccgtggcacgatgtccactgcgctctatggggaccgccttgtcgggatgtggctcgacattttgtccagcggtggaaccactctaaggtagagagatttcagtttttagtgtttgcatttggaaatcatggttctgatatattttagtctttgttatattagagaaacaaggcacctaatgaacagacgattccattgttgatgcctcaccaccacatggttcttcctcactacttgggaactagagagatcgatataatcgcagcggctaaaccagaggaagaccctgacaaacctgtcgttcttgccagacatgactctttctcttctgcctcaccgccccaagaaatccctttgcttctcccacaagaaaccgatgcagatttcgccggcagaggagatctgaagttagacagcggtgcaagacaagatcctggggaaacttcagaggaaagcgatctggacgaggctgtgaacgactggtggtggcagattgggaagcagagtgattgccggtgtcaaataatcagaagtgttagccaatggtctgctgggacgagccagcctgaagatagcattcatagagcttattgttcgcttatccagaacgctgaacattttatctacatagaggtataaattaatcattcaaacatttttatacaaaatctctacacctcagattggttctatattctaatctcttaatcttgttgtttaacagaaccaattattcatctccgggctagaaaaagaggacacgatcctaaaccgcgttctagaagcgttatacagacgcattctgaaggctcatgaagagaacaagtgcttccgcgttgtgatcgttattccgctactccctggatttcaggtactgtttgcttcttctcaattacaaattgacaaattgttaacagagtataatcatgatgtgtcgacataaaacagggaggtattgatgacttcggagcagccacggttcgagcactgatgcattggcaataccgtacgatctctagagaagga

SEQ ID NO: 71957 - DNA, 631 bp, Arabidopsis thaliana landsberg
  unsure (1)..(631): unsure at all n locations
tattagaaaaaatcgatacatgtgaaattcggtcccgttttcttagatttaaaactgggaaagaaagaaggataaaaccaagttgtggactcatcttggcttggatgaagagacaagtgataagatcattggaaaatgaatcgacattactccgaaaataatttctataaaattcacataaactctgaaaatcaaatacatataccaaacttaccgaacatttgaaattacatgaattaaattctcttatactattccattttttgttcatcccctccttaattttctaacaattccggaaaattctcatgacaatgacagtccaagatttcggctacttttattggggcttccctccggagttctaaattcccgacgccttaattaccggccgcgcatagccgagcctccccttatagaaaaaaggcaaatgccttaggctacactaaatataatacattcataagccacatttgatagaaattatctttctaactactcaattattttttcttgggatcaatattccaaaggttttattcataccaatactgatacttaactcatttattagaagcttctctattcctaatgctttttaaaaatttngttttcacattttaagttcatg

SEQ ID NO: 71958 - DNA, 598 bp, Arabidopsis thaliana landsberg
  unsure (1)..(598): unsure at all n locations
ctcagttcagaatttggaaaacgccaaagaaacgcgtaatcgtaagtggatctggaccatcgggatttagttcttttttcaactagccagcggtaacgctatccaacaatcgtgtgccactatcacacgccttagcttgctcaataacgcgtaatatgggcgtaagtatcactggcaaggtaagacgtttgcatttattgtttccataaccatatgtcaggatcgggtaatcttcgttctatcagttctatagttagggacatgatcgtaagtgttttatctaggaaagattactcgcggtaaaattcaaggtgcactgccgctagcccgatgattagatatgatatttttgtgcacactaagagtcgcttcgcttcagcgagttctatcgaagcgcccttcttgccttcaatgatgaattatagtctatcttcttgcaccattccatagatagcaaagtcggaatagcatgccacttgttgtgttgaccggtggctcgtgtctgagaccggccactaagtcgtcggcgctttattccacgatgatgttaattaaatctcagcaagactttngtgcgcagtatcttttgtagatggta

SEQ ID NO: 71959 - DNA, 421 bp, Arabidopsis thaliana landsberg
acgggggaaggggacaatggcggtgggcgaggtgtttttgttctccgccagccatttgccgccgagggcgtcggggccgtccaacaggaggcccttctccttgagcatcggtcccatcggggcgcaaatttcctcctcgcgcgcgggcagcgtcatcgccttggtatagacgtcgaccgcgaggttcgagcggaactcgcccgccccggacttgcgggtgatcgcgccggcgaacactccatcgaccaggacgatgcgcttgcctccctctgcgactgcgggaaggaaaggctgtaccatgaacggctcgggccaaacatggtcgaacaggtcggtcagcgcgccaagattgctgccgtcggggggcacgcggaacacggacttgctcgccgttgccgtgaagcgggttgaccacgatgtc

SEQ ID NO: 71960 - DNA, 148 bp, Arabidopsis thaliana landsberg
ctttgcacgaactacccgtatgaaccatctggcaatacgcttaccatatgtatatacagataagtcgcctctgacgcagcatcagggtgaaaagatttggacctgggagattcatcaccaatggactttgtcgggatcgccatcatca

SEQ ID NO: 71961 - DNA, 497 bp, Arabidopsis thaliana landsberg
tataagggcattattgtcgagcgcctcaactggctgctgctcgttgccgtcaaccaacgtttcatttatgagccttcgatgatccggttgaaagccgtgccgctctcgtcggtcgttctcggaggccacgcgaccatcctcacgccgacaggcatatccttcgtcgccgactgcatgcggcccgctccggccgggaccagcttccgccaggcattgcgccagtcgcgccaattcgagaagaatgatgcatcaatcgactccgcgacgagaatggttctcgaccaggagcgaagggacttgctgcagattattgagcgggatgtctcgttcgcgagacgaccgacacattcgcctcttccagcgccatcgacaagagataacgcaggaagcccaactcgccatcatcggcgaactgccggatctcgatcaaggcatcgcgaatataggctgcgcgaacggtggcggtcggctgctttcttctacgtgtacttttattc

SEQ ID NO: 71962 - DNA, 317 bp, Arabidopsis thaliana landsberg
tcctagaatttccataattttagatcatcatacagtcttagagtttagtcctttcattattatttataaagatactcgctttgcctaccttcaactgaacattactgcctactcttgatctaagtaccacattgctatgctcagtcaagcagtgggctaagaagcttccatgagaaatgattgagtcgatgagcttcacatgtaataaacttaagagttagtcctgaagaaaatggaccaactccaaaatacatataactaaaaggaaatatcatggctggcggtacttaccttagaggcgtctattattgatggcg

SEQ ID NO: 71963 - DNA, 508 bp, Arabidopsis thaliana landsberg
  unsure (1)..(508): unsure at all n locations
atctggaggacaaagggtatggccgaccttactatggaagctggcctatatatactctccatgatgctcttccatgggtagaccacctctccggctgctagaacagcagcgatgagaactagaacctcatgatcaacattgacagctgcacgtctgtttttcaacattggtgctgctnnnnnnnnnnnnnnnnnnnnnnnnntcgagttgggtgaatctggcaaaaaaactgatccactcgccataacaacagctgggacagctgctaaacctactgaaaccctccatccatgacgagccatctttgatgctccataggctagcacattcgccactcagatctcaatggagatagccatctgaaaaccgatgttgaaagctcctcttatctgcgctggagccatttcagatgggtgcacctgagtagactacacactcaaagattgagatattgacctggaccacagaaatagatgattgatgcacaagacagcaacatatgcctcac

SEQ ID NO: 71964 - DNA, 581 bp, Arabidopsis thaliana landsberg
atatcctgttccctaaaaatattcaatggagtccgttccatcataatctcctgaatcacagttggatgacacttggttgatgaaaacattgatttggatttcttgtcaccacaacaggcggtttctgattttggaacatgaagctgatgtgaatgcaaagtcatatgtgagtgatgcttgaatgattgaattgtgttcccgactctctcacacacaccaacaacattcaacgtgtgaaatgggactgtctgttgttgcagcgtggcttcacgtctctccactttgcatcatctcatggacatttggcttggtagaatatctggttgagaaatgcggagctgatttgcatgtcaaggctatccttaaccctaatcgtcgcgtttcgccttatggacttgtctgtttgtggcgaacttgccatttgtttgctgcccacaaagtaggatgccataatttagcgcattgtttagcttcactgaatatatctttgcacttgaaacatatttggtggtgcaccccattcatcattgtaaacttttatttcgaagaaaatgaaatcatcaagagctccgatgattaca

SEQ ID NO: 71965 - DNA, 1437 bp, Arabidopsis thaliana landsberg
cccaaaactgaccgagtttgacctctctctatatggtaaattccttttgatgagtgtttttattattattaccaccttctctcagaccttgaagacatagatgcaatgttctctggacactatctgcaaccaacttgagttttccctgagtcaaatctcctgcagcagaaccgttgacttccactgtacggctcactctctgtttacatttctcccaatcgtccactcgctgccaacaagctcgacctccatgacttccttccattccaagaaacgtcacgctaggattttcgccaaatgtgtatcttaacctaactgatacacagtaaggcaaccatgctgctcctccagccgcgtttatatggggtatgtgcacaggatcaagaacaacggttagcgcaaagtcaacagtgttgtgcggccggtcgtaatggatattgcttttagctgcacaattgttgtctaaatctgtaccggaatggttctctagacatagctcgattcgaggtctctgtgcaggagcaatctctccagcttgttgtgattgggataatccttttttccaagctatcagtttcagaaactctctcaagaccgatatgggtaacgtgaggagtgttatgaaagaggcaactcttgaggcatcatacggttctgatgcgacacggcggctgaaataatcgcagatttctccaatctcggattgggttaactcctcttgagccgcagcagaagaaccattttgttgtgcttggtgatggaatcgccttacgctaaggacttgaagaaggagctgaactctatggacactcaccgcaaacacatagccactgcaaaaacaaaaacaacaaaaaaacaaaacaatagataagcttaagcataatccttcaagattgagcataagtttcttggtttggcttacccgacaaagaagcgtaaggctggttgttcttggtctaaattcaagagagcgccttcgttatccttcaagatggaacccaagatctctcttaagagatctggtaactgagcaaatagccacagtactccaagatatttaaggataccacgcaaaacctttttaagagccacaagaggaacccatcctccgccatagccaccgtcatcacctaaaccgattatcgctgtgtttaattcacctcttacatgcgctggtacagcagtgcctggtgttctacgcacaggcaatcctgagctaaccactaaagatcctgaagcaacactggctactcgattcattgcagctcttgcactagaaggggaaaagttaactctgttcacaccgttaacagttgggtttccactgttgggatttgttgctccttggctacctgtcaaatttggttctaaaccgttcaattcttgagcaacatgctccatgatgaaaggtctgaattggggacatggcaaggagcc

SEQ ID NO: 71966 - DNA, 523 bp, Arabidopsis thaliana landsberg
  unsure (1)..(523): unsure at all n locations
cccctactaaacggcagcttgtcaccctttcgccgcatgttgnnnnnnnnnnnnnnnnnnnnnnnnnnnnnnnnnnnnnnnnnnnnnnnnnnnnnnnnnnnnngccagtacccagtttttgcggctttcgggattgtggcggatctttatcctgaaccaataggtcgatttcagatggttattctgcggcgtgtttgctgtgctccctacacaatgcgcgtttagaggcgaatacagcacttgcgaaaaggtataagagcccgcggtatcttccaggtattggatttcttccccgacaaacatatgttgatcctgccagtcgacaatttccctggcaggatgggaaaatacgcctgtaacgccgatcagcgaaatcagcaggctaattccaatccatttgactaaattcagaaagacagctatatgtaaaaataggagtttgatcaccgtaccgctttctttcaaagttaacaaattacattctacacggtcaaaaaatcttattcactttttaatgatctag

SEQ ID NO: 71967 - DNA, 1023 bp, Arabidopsis thaliana landsberg
gatacagatattggaagaatccatcaaaaggttcacatttacagtttgtggattttgcctgaattgtttggcgttatgtcttattctctgtgaattttcaacaataataatatcgtcccttttgtccttacctaaattgtttgcctattctctgtgaatgaatgaatacataactctcaaaccctgaaaagtgaaaactttcaatgctgaaacaaaccaacgtggatgattcaggacttttcaatgccaccgacaaattcaatctttttcctattcattttgtaagttgcaatgctgtcacatttggttttctcattgtttttaactctctcttaaagaaacaacttaattagaatttttatgttcttacaacaagatccaatagacttttggacatgtgttgacacttttctcaagtgggttggtgggatagggacgtatatagctgcatttgacaacaacactactctatttcatcaattatttcgttactcataaattttgtttcagttaacttttctctacaaatgaagttgaatgaaatgaactatactaaaatttggtttaatatagaattagaaattccaatggcaaatttatgcatgattttgagctaatatataaatatacattattttgcccaaaaaaaaagataaatatgcattaaaaaataatatatataaaataataggaagaagaagaatctatctttggtatacctactttggtttcagagcttataaacacaaacacttcactcacacaaaacacttgctcctccatttaccagatctgaacctcttccctttcctcgaaaatccttctaacatcatcatccatggcttcctctgatttcgatggaatccttttgggaatgggaaacccactcctcgacgtctctgctgtcgtcgaccaacagtttctcgacaagtaagctcagatccggatcgtcttcgctccgatctagattgtttgtgttacaaatattcaaaatgggttctctgaattataatgctttctttt

SEQ ID NO: 71968 - DNA, 650 bp, Arabidopsis thaliana landsberg
agtttcttatgaaaaataactaacacttataacttcctagtaccacatatttcctaagattcttaatttatacacaaaagaaaattttagaagcgatttagactagcacatcagttatttacataattttacttatgatgtaatgtaacaaatcaatcttttttcttcttctttatttctctaaactgttttactcgcaataactgtaggcagccgggggaaatatttggattcttgaaagtgtaaagtgaagagtggttatctatttggacatgattgttttcactgtagttatcaaataattagtactttaactaataattaagactaatctgtcaaagattgtcgggttcgaagaaacaaatgtataagcacaagtgggtttgaatatataattgcaagttacgtaaacccatctcttccctagattcactttctgcaaatccaatccatttctactttattttatgcagttcttttagtttaataggctcgaggaatgtgcaggtttggttaatgtaatcttttctagtccagggggccttgaatcttacaaataaattactataattttgattttttactggtaaacaacctaataatagtcccaccattttttttttcaatgaattctttttgttttgaaaaaa

SEQ ID NO: 71969 - DNA, 1827 bp, Arabidopsis thaliana landsberg
gagggagatctaagatgggttgtcccattccaatgaaactttttaatttttttcggatattttgatacgtagtgtttgtagttgttcaatacaaccaaaaagaagaccacatcacctttcaagttttgagtagattagtatttgatttatgtatgagacattgataagtctttttaatctgatcatatcttttgaggatgtaacgtaataagtaaacttttttcccctcagaatcgactttaacgtttttaaccacaccatgtcaatgggtatggttgcaagcatagtaacaaactctgaaaccaaagacatctgatatggtatttgatttgaggttcggttacggtttctataatacatgtgatggtgaaaagataaattcatagagaagaccatctgattctacaaagatttctatcttctgattcttatcacagtatttagtgatcacctaacatattagaattatccccattggcaagagaaaccatggaagtgtgttcttcaacacttgcagcttcagtgtttaagttgttagcagcatcagcaacactcccaccatcatcctacaaataagcgatgatgattcaagctccgccttatgtggataaaccaaccagaaacacagggtgatatttataagagcttaccggtttcattaaagccaactgattctcttctgttttctttgagagatccctcaatgtaccctacaagaattgaacaattctaaatgtcaaacttcttggctatatcagtatcttatgaactgaacatagtgaacatattatatatgtctttatcatcactttgtctttcatacgtaccctgttagcccaaaaaagtccacaggcattgcagagagtcctggggccggaagggccacgtcgcatcattggtgtacatttggaactaatgccgcaatgagtacacctacataagacacactcacgtttaaaataagtgcaaacaaaatgtcccacattagtggaaaacaaaaattgcaggaacagttaattggcagagaagagaaagaactcacgatatttctggatgggcatcatcttgggcagaatcttgatctgtgccagagttataagccccatctgtcatctttgaagaggtgaattgacctttattacgtgccattctgataaacactaacaaaggtcagagaggcagagaaggtgacaaatcctatcccttattattgaaatagacatgtcgattatttccagtaaaagctacttatcacactaacaaagactcagatgtctatcctgctcaactacaaccatattgtcaaatactacagcaagccatggacaatgaagcctactactctacataaacacctacatggtcaccaaacttcttgaaacaaataaaagaaaactagctagatagtaaactagttgaatatgaacagatttcctttcaatccatagcacacgaaagtgaggaagtagttaagcaaccagagcatagccagaagagtagaaaatttctagtttagctatacaagaatactaaatttttatcccagaaaaggtgaaagaattttgttcagagtaacagcttttggcataaattggtaaaactcaagactgacacactgaccttaaggcaacttcttggcgaacaccgtatcttactttcttctcgaaacatctagcattcctcttcttccgaaacctatccaaggattgtgcccgttgcggaaggctacagcggctctgatattctacaacaggctaaaaataacaccaaactgaaaaaggtggaatcgagatgaagtgacaatttaagcagaatttgaacacaaat

SEQ ID NO: 71970 - DNA, 4111 bp, Arabidopsis thaliana landsberg
gaccgagtgtgtggggaatctcggttgtacaggtgatcagttacccatgtaagaggataggtctgtattctaaaccctcaatcatattcagatcagattcaaacaacgaggatctcgaaggcaacgcaggcgctggactttacgacaggtttgttttgtgtgtttctctctgtttccgtcttttatttcggaactcagaagctgaaagggttaagtgctgcagtgtgataatggatgaagcagaggaagtagtggtggattactcaagggagccactaataatggacaaatcctttcaagtgcgtctattctcagcgattgcagaagctggaaatgtgatagagtcaatctatggttgtcctcaagacattgaaggtgttgtcaaaggtggacatatctacatcgtccaagctagaccccaagtttaagctctctttttctacttgtaccattccctaagttttcaatcaaatcttataattacaagctaatcttttatatgtttgctattacacatgtaatatttctacatcatggcacactcctgatacaaacaaacatgattcaaagtttcataataaatgattgtgtgataaaaatccaaaactcgttttaaacgacatcgtatgaagggtcgcataagcgaagaaggatataaaaccagtcgccgagaaagtctcccgctatggataccgttctcatggctacaacaccaccaatcagatgtcttcatgcttcaattcctacggtgttccgttcgccggcgatttatcaggtcagctgccggagctcccaaatgttttcctaccgttcgacgactatgatgagcatgtgttttctcagacggtccgatttgagatctcgctttcttagtactccgaaaaccacttctccgatgagacgacctcgcttttccgtcggtgcttctacggaggagtcttcaattccttctaatcggaaccttatcgtggctaactccgtcgtaatcgtagctttagctgtagctaatcgcgtgctctacaaactcgctttggttcccatgaaacagtacccttttttcatggctcagctcaccactttcgggtaacttaaacaagagtggctatgaaagaaattgggcagtgaaggagcctagcttagattatgataaatgaatggtttttggcagctacgtcttgatttatttcaccattctgtatacgaggcgccgtctaggcattgtgacgaatgaaatgatggatgtacccaaatggagattcgcaatcattggttttctcgaagctcttggtgttgccactggcatggctgcagcaggtatcccatttatagcatgattgaaactttacatatttataaggttacatatggagtgattccactctctgttgcagcaatgcttcctggaccagttatacccattttgaatcaggtcttttggttttatgattatcttcttgctcatttgttctcatgggggtgttgaactcatgcctcccaatgtttggcagacatatttggtgtggcagctgctttttgctcttcttattttaggcaggaggtttttgcttaaccaaattgctggttgtctccttgtggctgtgggggttgtggtggctgtttcaaggtattccttcctccctcttctcttcttctaaagttacttttatcttcttggatctggatgcttgatcttggggtagagaaatgtttgtgtatccgtggtcatttacagattatatcaagagagtgctttcagctcttacaatctagaaaactagttttcatggaccagagtcacacctatcaaattcaccatgctaaatgaatggagacggctctactttagtatttatcatccacatagcaaatagaaggccctgattctagagaagcttgtgtgatagtgatactttcatttttgtgaatgctgactgtaactcatctgcagtggatctggtgcagatactacgctatctggaatcggtttcttatggcctgctgtattggtagcatccgctgcttttcaagctggtgcatctatcataaaggtgaaggtcgctctctcttatgagttgtgaacatttctattttattttcttttgccaagacccaagttgttaagtgttttgtctgttaacaggaatttgttttcaatgatgctgcaaagcgtcttgaggtatctcccttatcccctgcatcaaacaggaatgcttttctttcgaaactttgctgaattaactctaagattaactggtggatgcagggaaagtcactggatatatttgtggtaaattcatttggatctggatttcaggtatctactactacaatatcatgttgtaaatgtatttgttacagccaaaacaattagacatgcttctccattacatgaagagtacgtgaagaaaacatttgaaagctgctttcctctgttattcacttactatctctctcctacttgagaagagtttttgttttttggtttagtgttacggatcactgaagctgtgcttgtgcaggctctttttgtgttcctgttgttgccttttctctcaaacttgaaaggcattccattcgccagccttccttcatatctaaaagatggtgccggatgcttcttcaacactggagctaagatttctggttagagaccattcgacacttgtttttttttccttcattgaattttattcactgctaaaactttgtgattatccatttgagaatttcaggctgtgatggtgcccctatactcccactggtctatatagccaccaatctcgctttcaacatctcattgctccatctggtgaaaatatcttcagcaatcgtttcctctcttaccatgatgctctcaggtccatatttctatccttccatgcaacgcctcttaagtgtcaccaaatactcaaacccatatgagataatacttttggtgttgttgcagcgccattagcggtgtacataatgtcaaaaccattgccgtatctaccgggaggatcaagcttgagctcaaatttcacgatggggtgtatagttcttgtcctaggtcttcttctctacaacattcccactactccaactaaacaacacaccaagacctcctaacacactcactctccattcatcctttttgtgcattacttttttttttgttgataaaccaaattcgtgtaatttcccaattttttttcctttgaccatcaaagatacatagaatattctcagatattttttttacgtgaaaaactagcttaaaaaaaagaacaaaaaaaaaagaataacaagaagagaaatttgtgattggttaaaaatccagtaaagtagagtcgtcgggtcgtctcggaagcagtgctgcgattttacctatagtgaccttttttttttaccgtcgggtgaattcgacgacggtcctaatctcgcctcctccacacgcgccgatcaccatctctctctgtaatcgctcttctcgatgtcaactatttccttcttcctttgctcttagggttagggtttattttgttctttctctatatccttcaatcaatgtgaaaaaaaagctctcccttttggcagtttccgatgtttggtcgccattcgattatcccaaataaccagattggtaccgcctctgcttccgctggtgaagaccatgtctctgcctccgctacgtctggtcacattccttacgacgatatggaagatatccctcatcctgactctatctatggtgctgcctccgatttgattcccgatggctctcaattggttgctcaccgatccgatggctctgaattacttgtttctcggccaccggaaggggcgaatcagcttacgatctcgttccgtggacaagtttacgtttttgatgccgttggtgctgacaaggtaattctactctgtccctcttttgttatttgtgtgaagtctcgatggatgcatctgaaacataacatctgatggcttagggcacgtaacgattgcctcttttgcacctttgtgcttttgctagtcttaaccaaactttggaaattgatttcgtaggtggatgctgtgttgtcgctgttgggtggttctactgagcttgctcctggtccgcaggtgatggaac

SEQ ID NO: 71971 - DNA, 315 bp, Arabidopsis thaliana landsberg
gggccactggtgaacctgaatgatcgaggctggctcttttggtccttttataacagaccgagattggtggggggaactcaagaaggtttatagcacgtatcaagcctgccttatggctgtacgacgaactatcaaaattgccaactatgcggctcgctactggacgcatgatgggactggcactccaccagagcgtgctctgcttcgaaaacgggacctgaccttggaacgcacataccccgaatctgaaaagttccaccagtatgggaccagacaggcccagtgcggctctattgggatggtaccccggctaga

SEQ ID NO: 71972 - DNA, 531 bp, Arabidopsis thaliana landsberg
cgtgctctcagacgcgcacgcccaccgtgcctgccgacgatgaggagggcacggtgaaggtgatggtgcggttcgagtttgaagtgccgttgctgatggtggtgttcgtcgccacctgctccccggagtccgtcagcacgccattgttgttccaatcgatccagacgttgagatatgccgtgtagccccgcgtgttcgtcacattcaccaccaggcttccggatgtgccctgcaccacgctcgccggcagggtcacgccgtcttcatcatcactgtcagtcagatcgtcgcctgtggctgttgcatcggtggtttcggagctttcggcgtccaccgtggcgccgatccgcagggcgctgttggtcgtgctggaggccgtcggaaacagtgttaaatcgccgtaatccagggtctgcgcggagacagactgacccagaccgatgccgcacagcatgagggccagaagcagatatgtcctggttctggacaagcgccctttcacatgcctctcccctcccggtgcgccagcac

SEQ ID NO: 71973 - DNA, 531 bp, Arabidopsis thaliana landsberg
ccaatatatttaagattttctttataaaattgtagtttagttggtctccaccttagaagacttattgttctcatcctttcaccaaaggcaacatgcagtttgacgcatagccgacttaccaaaccaaaaacatacgacggcattctcaaaaaatttgacattaatccctaaaatatagtgaaccagctcacattttaccttaaatgtttttttccttgaaatcgaccattatcctgaagatttgacaaaaaccactataaataaacattagtttcatctataaaacatgattaagaacatatgattgtaagttgtaacctaccaacattctttaattatcattacttagttactagaaattgacccccaaaaaaaaaaatgaagtcccccaaacatagaactcagctaactatagttaaaagtgacaagccatcatcatattgcaatattcattacacaaactttggactggtaaatgtaattattcgaccaacttagtttcaattaatccactcaatgattatttactta

SEQ ID NO: 71974 - DNA, 343 bp, Arabidopsis thaliana landsberg
aaaaatacacactacatatgatgtgaaacttcagaaaaaaataacaagaaaaagatagagatgtgggagaaaaggcatgaaccaaaaagaacggggctcctcattcatgaggatgaacatagtttggttgttacactctagaaatgaatataagaggagggatcggtttgtagcgtccaacacatatgttgatcatcaaatacgacgatgacaaatgtgcacaaaaaacatttagggtgggcgactataactatgaacagaaactggactgtacacactgagggagggtttctaaaagtgcctaaactatagaagcacgagcatacgatattgagcgaggaaa

SEQ ID NO: 71975 - DNA, 587 bp, Arabidopsis thaliana landsberg
ctaagtctaaaactgtgtttcccccattgaaaaatttcgactttaaatattgaatcatttggacccagtgtctgtttttgcatgtgcaagatttaaccgatttttgttgctttttcatcatatttaaccgattcttagaccgagtggtgggtttttttgtttgcaaacattcttgtatttcatttattttatctccaaaggatcaaagtttacaagatcttcaaccaagaggttggtacaataacttcaagaaagtgaaaacttacaacatgaaaagagaaagataagccatagagaattagagacagaggctaactagcagcatgccacaaacaaactcataaaccgagtggtggttatagttcagattaatagaaatttagataataatgtgctacttccacagaaagaatggcaagcgaagagaattaaaatcagttcgatttttttaatttgttacgtcttcttttcttaaatattccaaatgttagttaaaccatctaaaaagatctgccagcaaaatttgtctctagggaaattttaaattaattaaggattttctatgaaaaagcttatgaattaaggaa

SEQ ID NO: 71976 - DNA, 532 bp, Arabidopsis thaliana landsberg
accggccaagatcctggcggccgccgtgcgcgtgttcagcgagcagggtctcgacgcgcacttcgagcgcatcgccagggaagccggcgtgggcagcggcacgctgtaccgcaacttccccacccgggaggcgctgatcgaggcggcgtaccgcagcgaggtggcgcggctgtgcgacgccgcccccggcctgctggcgacgatgcccccgcgtgccgccatgcgcgcctggatgacgctgttcatcgactacgcggtggcgaagaccggcatggcggacgcgctgcgcgccgtcgtcgcctccgggaccgacctccacggacccagccacgagatgatcagcgccgccatcaccacgctgatggacgccgggacggccgccggcgtcttccgccccgacatcctcccggccgacctgggcgccgcgctggccggcatcgccctcacctcggccggccccgaccagcgtgaccgggccgagcgcctgctcgacctgaccctcgacgggctgacgaccatgccgtcgtgagtc

SEQ ID NO: 71977 - DNA, 578 bp, Arabidopsis thaliana landsberg
ccatctccttttatctccgcccaaataccggccattggaaatgttcacttcaccgtcaaatatatgtagattcgcgccggatccatcttattgtagatcggttcttccaaaccagcccggagatatatattcctacggacgtttgtctctacgaagatccctctcacgagcccgccggttcatttcgatgatcgacgctgaacttgaccggaaaggcaaagtggctgctaaatccacagtaggggctctcgaagactgcaaattcctagccagcctgactatggactacctccttagtagctcacagacggctgattccaccaaaacactgtcgttatctagggccgaggatgttcatacatttctgagtgctgccatcaccaatgagcagacttgtcttgaaggacttaaatcaacggcgtccgaaaatggtctttccggtgatcttttcaacgatacaaaactctatggggtgtctcttgcccttttctccaaggtataaacaaaagttatccaacatgcacgtaattcccattttttttggtcatatatgatactttaaatatacacgtaatcgt

SEQ ID NO: 71978 - DNA, 630 bp, Arabidopsis thaliana landsberg
aatattaaaccccaaaatttaactctaaatttgtgattcggcgactaacgttataatgcaccagaaatatcattattgaaatatcttactatttatcagtagtttggttattgtcacctggtcttatgttgttgttaattatttgatcatcattagaaaagaatacaagtagtatagcacatacgtataataattttagtgttgtaaaagatgtagttgaatatgatgggtcatgggtgtagcaagtagcaacaactatattaaaactaaactaatgaatatttgttgtgttaattatcacataattatatgttgttttttagttttctacaactcgcagacgaacatattcgggttttaacttggattaaaagtacgtagtagataacaacacatatcatatacttgatattattatattgagatttaaatttgaaaaaatgaatgtgaaagtttaatcaattcaccggtgggtcaactgctggagaaagcatcgtccaccgatttttgtctacccccgtcgtcgtaactgctatccacgagaccataggccaccaatccaccttatactttaacattaaacaatcaatctctaaatgattaatacgtggtaagtgccccgtacaacat

SEQ ID NO: 71979 - DNA, 455 bp, Arabidopsis thaliana landsberg
cattaaacaacgtcatgctcctaccatcgctggtccgaaccataaacgagatactttgtccaaccaaatctaaaccggtatcccaaatttgcccccaatttctcttcataacgatccaattactcttttgccctctaatttcaacgttactcacatctcctgcccctccaacgttataaaccaaaaccatgatataataaggattgcccttaatctcaaacctaacaccacctctcttatgacaggccactcgccggaacttcaccggaactatccctgctcggtactcagccaccgtagtgaacattttcattgatagatcaaagtgcttgttaggagggttgcaccaatggtactgaaccggttcttgataatttggtgggcaaaaattagtggctgtgatgttgatcgaaccagccgttggttttgcaccactttgagctaacacacatgag

SEQ ID NO: 71980 - DNA, 545 bp, Arabidopsis thaliana landsberg
  unsure (1)..(545): unsure at all n locations
caccgaaccgcacctgctggcgctgaccggcctctggtactggggtcttcggccttcggcgctgcgggtcctggcgagtgagctgctggaactggggcccctgtccggcgccggccgcggctcccgtttccgcgccgaggccgacggcacctggaccgggctggacggctactacacgggcgagacgctccggctggtgcccgcggccgatggcgtggccgagcacctggacctggcgacattcgtcttcacgcgcgagccctacggcgaggactcgccgaccgcggccgcgccgcacgaggacggctggcggggcgccccgtaacgcnnnnnnnnnnnnnnnnnnnnnnnnnnnnnnnnnnnnnnnnnnnnnnngcacttcttcgccgtctaatatttattgcggcgaggcaacgcgatgacgaaaaatttactggcatcccgccgcgttaacgtaacctccaaagctgggaagagcgcgtngcacctcggnccgctctccccagcgcatttgggggtccggcatatacgcacagctcagtcag

SEQ ID NO: 71981 - DNA, 302 bp, Arabidopsis thaliana landsberg
taacaactacaaccaccatcttacattttatacatacaacaacctctaaccaggttaatggtacatttaaataaataaaaactaatcacatttacatatactacaacattaacatataaacaattaatcattaacattacacacacattaattttttttaatccactcaatttcatctttcaacctttaacatcattttttaacctaatcaacttcttatctaatccttaaacaacatatttacatttcccattctcaattttcaaattttcatctctcattttacaactttctctcccttt

SEQ ID NO: 71982 - DNA, 584 bp, Arabidopsis thaliana landsberg
  unsure (1)..(584): unsure at all n locations
gctggaggcttatggctcatatcnnnnnnnnnnnnnnnnnnnnnnnnnnntgcaggtcaccggtgcgcgggtacccatagtcatccgggccacgatgtatttctgtatcgagcgccgctttgaattgccctcgttcaaaatcaccccacgccgcgagtattccgcacatatcagctcaccaatcacaacttatcattgcgtagtttcaacagggtttcattaagcaaagtggacgaagttccctgcgtataaggaaaatatacgatgcgcacaccaacatcctcaaacttcttgtccagggtcttccatttgtcactgttataccaatcatcaccgacaaacattacatcaaatttaagccgctcccatgcagcaaacttatccatatccgactgcggaacaacggcatcgacacactttatattcctgacgatttccatacgctcagagaacggaataactgatcgcttgtttttgtagctaaccaatttatcagtagttacacctactaccagtttatcgcacatggcgcgcgcattacgaagcaattgagatgaccgatatggaaaagatcataacgccgg

SEQ ID NO: 71983 - DNA, 453 bp, Arabidopsis thaliana landsberg
taactttttttttgtgtgtggcgcatgttattagttggtgtgtgtcttttcatgctaaactacgctgattagggtggggtatttttagggtagtgtatgtgtggttaaattttgtgtggacgacacgacagaggtcaaatgttcccacgtgaacatagatcactagtgtttaatgtgacgtgggtttacgtcatcttggtgttaaagagaatcctatgatattttttttggggtttgaatagatattttaaagtgtgttttatgaatctaattaagaagctgattggtttgaatatgcagagtatggaagatgcgagtttccgacaggatattaaggaagaagaagatttaagtttagattaatttctgctatataatatattcgcattttgatgtattttcgttggtgggaaagatttagttaattttttgaaacaatgactttttaatgtt

SEQ ID NO: 71984 - DNA, 464 bp, Arabidopsis thaliana landsberg
  unsure (1)..(464): unsure at all n locations
gnnnnnnnnnnnnnnnnnnnnnnnnnnnnnnnnnnnnnnnnnnnnnnnnnnnnnnnnnnnnnnnnnnnnnnnnnnnnnnnnnnnnnnnnnnnnnnnnnnnnnnnnnnnnnnnnnnnnnnnnnnnnnnnnnnnnnnnnnnnnnnnnnnnnnnnnnnnnnnnnnnnnnnnnnnnnnnnnnnnnnnnnnnnnnnnnnnnnnnnnnnnnnnnnnnnnnnnnnnnnnnnnnnnnnnnnnnnnnnnnnnnnnnnnnnnnnnnnnnnnnnnnnnnnnnnnnnnnnnnnnnnnnnnnnnnnnnnnnnnnnnnnnnnnnnnnnnnnnnagtcgacaaaaagactctggaaaagcatcattgtactgctcctttcatctgtgggctcactttgggcttaccgtataggtgtcacatgcctagagcggacgcacggcctagaaggaactgtgtccgatggtcccacaccaacaag

SEQ ID NO: 71985 - DNA, 558 bp, Arabidopsis thaliana landsberg
aacaggagtgaatctctaaagttcaaagcatgtagtcctctcttgagtcttctataaacccaattaacaaatgcaaaagcataacaataaggcatatttaaaactaaataaagatttggctccggttaccagtctctgagacaatacctaaactggattggaccggtttaggtttagctgttcttggcgctgtttttcgaacgaccaactcaaatgtgccatgatactagcaaaaccggtggaccgtggacatgttttcaagaaaaaacttaatagcgatctccataacaaaactaaatgtcagaccaacatgtctccaatgcgatcatatttgacagctaagatgttgggttttgagaatgccattgtcggttttgttgagactatacaggcatggattcgaagttaaatttgagagaagaattgctgtcaaaaagcaagattacagagttttgtgaatcgtcatttcgtcactgtgagacatcgagtttgaaattgatttacggcaaaacaactatttcattcgaagcggaatttcaataacgccaagggggtgcg

SEQ ID NO: 71986 - DNA, 314 bp, Arabidopsis thaliana landsberg
cttctgtcacagatcacagcagagccttttgtttaataaggtacttcaaatgcttcaatacaccattaggcccatgaagattgaagggaacctttagatgcataggatctcttagagcgagctcatcaatcatgttttggaatttgaaataataacaaagaagtacctcaggaatcaaacagatgtcgacttgtccacttgctagagaggcttgcatagcaatgaaaccactgttacgacccatcagttttacaacgccaatgccatgataagcactatgtgcctaatacagaaggcccaaatagcattggtta

SEQ ID NO: 71987 - DNA, 485 bp, Arabidopsis thaliana landsberg
  unsure (1)..(485): unsure at all n locations
aggaccaccncagggnatccaacnagaaagatttaattttaacaagcatggacgncccctatgagagcngacgattaaacttaaattcccgttatcccnnnnnnnnnnnnnnnnnnnnnnnnnnnnnnnnnnnnnnnnnnnnnnnnnnnnnnnnnnnnnnnnnnnnnnnnnnnnnnnnnnnnnnnnnnnnnnnnnnnnnnnnnnnnnnnnnnnnnnnnnnnnnnnnnnnnnnnnnnnnnnnnnnnnnnnnnnnnnnnnnnnnnnnnnnnnnnnnnnnnnnnnnnnnnnnnnnnnnnnnnnnnnnnnnnnnnnnnnnnnnnnnnnnnnnnnnnnnnnnnnnnnnnnnnnnnnnnnnnnnnnnnnnnnnnnnnnnnnnnnnnnnnnnnnnnnnnnnnnnnnnnnnnnnnnnnnnnnnnnnnnnnnnnnnnnnnnnnnnnnnnnnnnnnnnnnnnnnnnnnnnnnnnnnnnnnnnnnnnnnnnnnnnn

SEQ ID NO: 71988 - DNA, 330 bp, Arabidopsis thaliana landsberg
aatactggttagaaagcctttgcctatcaagtcatgtgattacaaactatatgggcccggtgccactgactgcattggaggcaaggacggtcagtaccctatgcggtggaacctttcaggttgaaggtgcccaaaggcttggacttattgcacgttctgcaagaattgagtatgacaggctttatgggaccatacgcgggggctcgctcgtgaggcatttttgaacggtatggatggaaggtatcgaagggtaagatcacgaggagttatgatatgctgctgggataagtgcgacggaaaggatatggcggattaccaaggtgacaagtc

SEQ ID NO: 71989 - DNA, 749 bp, Arabidopsis thaliana landsberg
aatgggacaagtagtacaaaaacatgggtcaccaatcgatattgctttcatgtctaacacttatatgttggccaaaaaactaatgtcaaatccttaaatggtggcaaaatgtaggtccacgtcagcttgacccatatatttggacatataaataatgaaactctaagtctacatacaacaaaaagtaataacaaaatgattattttttatacaagcagtgtggtcactcacaatcacacaagttgccagagaaagcccacaaggccataaccacaaggaaagcaacaaacaagattttaaggaattaataatgatattaaatactttatgattatttaagacctgttattatataaactcacatggacatttcagaacacctggcttcgaatttaattttaccgacttttatatttttgatggacacaaatattaaaaacaaatcaaagcgggtttagtttttccattcattggacagcaatttcagggaagcacatgcaacatgtgaaaattttgactcttaatggaaaaaggcttctaaaaagcttaataatatcaactcttaaattagaaatttcactgtagattgattatcattagatattatagtacttaaagcagaaatatacagctatcaatgatttagcaaaaccaacggtaaaaagttataaaattttagtaaaaaccccttgaatttaccataccaatcttttttttactattttgagaatttaaataattaataatta

SEQ ID NO: 71990 - DNA, 712 bp, Arabidopsis thaliana landsberg
tagatcatataagtcggcagtagagatatgtaccactcgatcaagacaacgttctataagttaaagtagatatgtacactttcgttgtaaagaagcatttagtgcttgctcgactttacaaaaattgtgattgtagttcatccgccaaaaatgctttgaagacgagtctatgtcatgacacttgttgcatggattcattttaaaagcgtaatgtttcgtcgatattttgttgatcattctaacgaaacgatttttacacataacgtttggattgacatactaatatatcacccaaaaatataatatctactactgcattcattaaaattagtataaatgaattgtaatacaaaaaaaatagtggaatattaggtgatatgattacagagtccagctgtaaccgccgccaaaagagtcgatcgaatcgaatataaaaacaaatttggataagttcagacttgatcaccttttcagttaaaaataagtgaaagaaacaaacaatagcgtcaatcatcatcactcgtatagctaatgtaactcgtttgatgaaaaataaagtcgggaaactatatatttggaagaaatatctaattttcgctgttatcacaaccaaataatgtatacattcaaatactattttcatactctcctaaattaagtttttttctgttcaacaaactatttttttagcttgttcttggaatcttttttt

SEQ ID NO: 71991 - DNA, 568 bp, Arabidopsis thaliana landsberg
  unsure (1)..(568): unsure at all n locations
cttgggataattgcactgttgtgaccgttttaccttataactttcggtttactacggttataccggggagggtgtgagtcaattcaattgggaattgattttcctttcgcgccggtttatgaatcgtgctttcgtcaagtgccatgtcagacgaattgtagtttgcnnnnnnnnnnnnnnnnnnnnnnnnnnntcttaaaacacttttaagcgtttttgacggcccaattgatgcgaatatggattgactcttatctatacttcagatatgttcaaagccacacaaggtaaattgcataacggataacacttcccataagaaaaaatgtttcggtgtcaaactgtatacgagccattctgaaacattctaaagattttgtggttatgtgttaaacttaaagcatttgatagagagatatttttcaaagaaataggaaaaaataatgttacaatcctccacattaatgtttataatccgtccatctgtacttgacatgtcggatcataatccaagataatgggaatacagatataagttaaaaatgaattcctcataaaacttggaggc

SEQ ID NO: 71992 - DNA, 505 bp, Arabidopsis thaliana landsberg
  unsure (1)..(505): unsure at all n locations
agaaagcctttggaagatgtggtggatctgaagcttgncctgagaacccgagtgggcgagtgctattacgaggccagagctccactccctggcgccgtcctgccggaaggcgaggaacatggtcttgaagagagcgctccgctggttccgccccacgagttcggcaggggagacgtcgagccgcccgacttgctggcgtagccgctcgataagcgcttcagcgtcgccaccatctcgcaaggtcgccaagtcttggaccaggagcgtgtcgctggaccctctggaaaaacgttcttttgcattggctgtaagagcccagtaccggaaccggcttgactcgccggggccgatctcgtacttgcgctggtagccgaaaaaggcggtagcaaccagcaggaacggtgatgaaagcagtactgcgctgtctatgccgaggctgcatttgaggtaattgatggcaaattccatcccttcgcggcaatccccccacgctgacttaagcgcg

SEQ ID NO: 71993 - DNA, 477 bp, Arabidopsis thaliana landsberg
ggtggacgtccatgttggaagaaaactgcatagcatattttggcatagaagcgtcaaacaagaatgttgagcaatattagctaaacccttcaactatgtaagatgtcaaacggatgaccataataaacttacttgttgtcatcgttttgttaaaaaaaaaattgtacctatgctacttgaacgaagaatttagtttctattgtatttgctctcgtggttctccatctacttagaaaactattacagtctagtttcaacaattacgtgagcatatataaaacaatcaaatcatgatgtcaactgtcaagcaagggagtgccttctcatgttgtttgttagacatccatatgaggagcagatggataaaaaatcgaacctgtggaaagagttggcgctatggattcctgactgatttcagaggagactgtagagaagggcttgtcttttgccttcagaaacggtgagacccatgtgagc

SEQ ID NO: 71994 - DNA, 468 bp, Arabidopsis thaliana landsberg
  unsure (1)..(468): unsure at all n locations
atctaattgaggtggctacacattttgtcatgttatcaggcggcgtcacgaaaggataatacggagacaccgggatgggcgatctctaggctttacacgactctgtttaccaattctgaccggaaccacacttgctacgagtgnnnnnnnnnnnnnnnnnnnnnnnnnnnnnnnnnnnnnnnnnnnnnnnnnnnnnnnnnnnnnnnnnnnnnnnnnnnnnnnnnnnnnnnnnnnnnnnnnnnnnnnnnnnnnnnnnnnnnnnnnnnnnnnnnnnnnnnnnnnnnnnnnnnnnnnnnnnnnnnnnnnnnnnnnnnnnnnnnnnnnnnnnnnnnnnnnnnnnnnnnnnnnnnnnnnnnnnnnnnnnnnnnnnnnnnnnnnnnnnnnnnnnnnnnnnnnnnnnnnnnnnnnnnnnnnnnnnnnnnnnnnnnnnnnnnnnnnnnnnnnnnnnnnnnnnnnnnnnnnnnnnnn

SEQ ID NO: 71995 - DNA, 606 bp, Arabidopsis thaliana landsberg
ccaattacgccatgcttgaactgggacgcccaacccatgtgttcgacctggatcgcatcattggtgggcttaccgtgcgctggggtcgtcagggcgaaacacttgagcttttgaatggccagaccgtcgacattactcccgatgtaggggtcatcgaagccgatggcgttgtcgaaagcctggcaggcatcatgggcggcgaagcgacagccgtcacgctggacaccacaagtgtgtacctggaagcggccttctggtggcctgaagccattatggggcgtgcccgacactacaaattcagcactgaagccagccaccgtttcgagcgtggcgtagatttcggacccattgtcgacgacctggaattcatgacccgtctgcttgtcgacgtatgcggtggtcaggcgggcccggtcgacgatctgcatgtcaatgtgccgcaatgcaagcccgtggccatgcgtcttgatcgatgccaccgtgtgttgggtgttccggtcagccgcgacgaagtggcgcgcatctttgacagcctgggtctgcagcataccgaggctgacggcgtatttaccgttacccctccgtcgtatcggtttgatctgcaca

SEQ ID NO: 71996 - DNA, 683 bp, Arabidopsis thaliana landsberg
tgctgtcccaattgcaatcttataccttgtctcccactccaatggtgcttgattcaaatctacacaaaaacattattatcaaatctttaaaataccaaacacataactcaagaagtaaaaaaccaacaattttactcataaaaatggttagaaattaaaagcaaagttttgataaatcttgaaagaaggaaggaaggttatgtttaccatgaaggagagaagcaagggagcctctagaagagaagatgaaaacaagatagagaccattgtcaatacaacaaccaagaagagacaagacattaggatgtgagacatgtcctattgttccaatctccattaaaaactctttctctctcctctcatcatctattcctactcttgttatcctcttcactgctatctcttcaccgtttttacccaatatccctttatacacctctgcaaatgcacctctacctaccaaattctctgcaataccaaacccttttagtcaaaaagaggcattatacgatttgaagtttatagaagagagcagaacctgagctaaaaccagtggttgcgtcatagatttcttgaaaggagaaacattgccatttgggtctttgaaactggtctgttttttgaaaaccctcgacgcatttggtggaagaagcaacgagaggagaagagttttttgaggagtc

SEQ ID NO: 71997 - DNA, 465 bp, Arabidopsis thaliana landsberg
aacaacagctggaaacggctgctaataccccgtaggctgaggagcaaaaggaggaatccgcccgaagcgtgtctctcgtatgaccacctcaagatggaggctataccttaccaaggcgatcataagctgcggttgcacaagcatgacagcacccgcttgtactgccatgcggggaaggctcgtccgaaaggctgcgaatggaaaatatgggcactgggagacaagccgactgtgctttccataggggagatataaagcctccgggttctgagcttcttttgcctcataacaaaccaggacacttgaaccttaatactacttgacctgctctatgccatcaggcactggccatctatggatacaggcgaactccttaacgacacgactaaaccattgtgtaagtgtttgactacatgcaacgacctataaatgtgctcttctatgcacaggatgggggggctacac

SEQ ID NO: 71998 - DNA, 1904 bp, Arabidopsis thaliana landsberg
  unsure (1)..(1904): unsure at all n locations
aggtttaagtcccacaggccccaacaaatgaacgtgttattacgtgtctaatatagattgagctagattttttttttcgatcnnnnnnnnnnnnnnnnnnnnnnnnntgttgttgttgtaaattagcatttaataacatcccagtttctcgcgcctttttaatcgcagcaaatactacattaaagattagatttggtgtgttttgctaaagataatgcctttcatgcgcttaaattaatttgaatggnnnnnnnnnnnnnnnnnnnnnnnnnnnnnnnnnnnnntgcggttcgagtaagaatggccacgtggcacaatctatcacataataacgacaccgtcagaattcatcatggtaaacgaacggtcatgatttaatcgcgatccaacacaggaaagtttatgagtgtgcaatgacgaatgtatccctacagagttcagaatatcgccggcgacaatttctctctccggctaacttttttctagagaaagctatggcggacgaagaagatgagttactggagacagaactaagttacgaccagaaaaaggaaatcgccaagtggtttttcctcaacgctcccgctggagaaatcaattacgtcgctaaaggtacttagatgcatcgtacatacatatttccgacgattcctccgatgtgtccctcaatgagaaggcgagatcatagattctccgtgtgcattttgttttgttttgagcatcatgcgtgatttgacatctttgtttcgatttctgtaaatcttttggacttctgacagatttaaaggcggttttgagcgatgaggaagtgtacaataagcagccatggaagcatttccagtgtacaacaaaactcacatgatttgccttgaaatgcccagaggagctggtgatgtgagttagcatcttattctggttctattctacttagttgaaattttcatttgttgtgtcataggagttgaattgtcgaacattattgacttgtaatctctgttatgtggaattagctattctcatgatctattaagattcttagagaaatgtggctaatgaaaaggggaagagctttgaacaatacttagtggatcactcagaaggagagaactcaagtatagtttgtggtatttgtctctcttagatgtatattgctttcctagggtttttgcttcgctagctgcaaagaggctagagattagtcgatcttagaaattagggattttaaattctagtaggagttcttcaatttcgctgtttggattgagaatttttgagctttgagtgtcttggtcgtgtgtctttttctttcctagagagtttttaaaaacttgcgactgatatctacatgcaacactcttatgctgactattgttgatcaaattggcaatcaacataagtcctgcatcaccttttcatattttttgaagatgttatgggaaaaccgtttagtgtttattcgctgcgagatatagtaatactgttttgttgaatctcaggtgattgtctcatcttacagtgaaattaatgaaaatgagtaccttgatccaagaactgcccaggttgccatagttgatcatgttaaacaggtacattattttattgttgttgttcttcattatggtgtgccatgatctgtgaatctaatttaagcttacctctcctctctttgaccagatttgtacaaaggtacggcctgcaaatgatgaagaacttccttctttgtatattgaggagtacaggtatggatttttacacccagctgtaggatttaagatcaggttcatgcatcaccattcagttcagaattatcatatattcgtagcctaagttcttatggcaacaaaggcaaacatataaaaaagcactttcagaagtttaggaataaagggcaatgaagctggagt

SEQ ID NO: 71999 - DNA, 647 bp, Arabidopsis thaliana landsberg
  unsure (1)..(647): unsure at all n locations
gatctgctacttcgtcaaaatgttaaaacgtctttgagatattttgagatataatagacgataagacaacatttatcttgcttacttcgatctattgtatttatttgtatttataattgaagtttcaccgtacaaatactttatatttatcttaggtttataacaaattaattattccctaaagtttaaaaataaaatatttccctagcgagctagtgggatattaattatcatactcaaagtagtcgattatagaaactaaatgattaaaattttacgtagtctggctctgtttttatctcaaatttctttgcaaataaaaacacaataaatcatatttacttgggagaaacttctatcacatattaatatttatcaagaaaacttcaatcatatttttcgtaaagtgttacttacctttatacaaatattccgtgtattcctcggtttacgattctttatgtctgattgtgtggaaaagtacaatcgatatttttgcaagaagttaagaagttggcacttggcagatgcgtgacgtgaatgaatcgtcaaggcagtgactctcncaagccccagtctttcatgccatttggacaatttttccgcattcttttttttcaaagccttaggaggaaaatttttaaaac

SEQ ID NO: 72000 - DNA, 534 bp, Arabidopsis thaliana landsberg
  unsure (1)..(534): unsure at all n locations
ttatcaatttcttccggattgtctatccttttcaacgcagttccctcatccattgcttttgtgaacacttctttttgttcacaactaaaaccacttttatccatccaattcncnncaactgcggcgggaataacaatgtttacacgaaggcttctgtccgccaattcattggcgggaatatgantaatggtacttacagctgctttcgatgctgaataaacactaccatttgccattgtaaaataggcagcatttgaagacgttgttataacagaggctccttcggctaaatgcggaatcaatttttgcaacgtaaagaacaagccttttacgtttacgttgaattgtgcgtcaaaatcttcttcgcttgtaaattcaatcggcgcgaattttccaaaacctgcattcagataaagcacatccaatttcccgtttgcagcaactgctttttttagtgttacaatgtcgttcacatttgaagtgtcagatactaacgctttcaatttggtactgttgatttccgctgctgctttt

SEQ ID NO: 72001 - DNA, 578 bp, Arabidopsis thaliana landsberg
  unsure (1)..(578): unsure at all n locations
ctggactcgctggcggctggagcccttgaccacctgatcctcgtctgtaactatcggccgcgggccgaccagactcatcgggccggggatgacgttgacgagttgcggcaactcgtcaaggtacgtccgccgcaggaaccgcccgacctcggtcgtccgtggatcggcgcggatcttgaacagcccgtcggcctcgttgaggtggcggacctccgccttgcgcgccnnnnnnnnnnnnnnnnnnnnnnnnnnnnnnnnnncacggaaccgccggccccgaaatccgacccgggtctgccagaagaacaccggtccgggggaggtgcgccggatgacgaacgcgatcaccgcacagacgggcagggcgagggcgagcagaaccgaggcgacgacgagatcgaagccccgcttgacggcgagacccagccgtccggggcctacctcggagatgtgaagctgggtcgcctcccgatcgccgcgggccatgcccccggcggngacgacctcaagcaccaccttcttgacacaggcgactcgacgtcgaagcgtttggaactcaacatgctcgcgtccccgat

SEQ ID NO: 72002 - DNA, 1678 bp, Arabidopsis thaliana landsberg
tgttataaagatagggaatcaatttaaaagaaaccgtaaaagccaaaaaaaataaattaaaggaccaatcaaataaagtgtttgatgacccatagacatgtggtttaacgtttaggaaacaaaagaagatagtgattgtacaaatgcctacgtccacgtcactacgactaatagccatgcaaaagtaattaaattaatccatatattatcgaccacttacaaatttagcttctattgtcctttttcccctttcttttttaacaaatcacattttattaatttcgtgtgtgaatgtagcatgtgtccgggtcgttgaaaccaacataaaaaacctggaaaacatctttattttgttacatttattgatatgtggattctttatttagaatatttttctgctaactaatcaattaattgttagttggctatgatatgataataatctcatcatttagaacaatccacgaaacgaaacatcgcacggaccttctctaggactaggagggtcggcgccgtcgaaataaacatgtcatatatgacgactgatagaaaattgcaaaaagcccactttctatcaataaacagatgtattcgtttattgttattccttttttaaaccgtagtttgataaaatgaaccttaaaagtataataaacatgccaattatgagaaggatgagttcaaggaatatacgcatccataattccatatcccaatctttttcttcctcaaaaattaaagtgaactaccgtctaaaaaagaaaaaaaaagtcaatgaaagaagaaaaagcaaaacaattcatggtttgttcaaatacaagagttatcattatcgtcatactatatgtctatatgtatatatatatctatatttatttattttttaaaacgaacgaaaattagttcgcaatttttgaacgttgcgtttaattttatacgagggcgccaccgttgtacatacacacacacacacaaaataatatcgtcagtaaagtgaatgacacgtgtctcctacatcgaaatttagttgggccaaaacgagttaaagataaatggactcgagaaaaatctggttggttcgccattatgggctttaacacaaaagggcccatataaagccattgagcacgtgacgtgcacgtgagcaaggggttttagtcaggcgcactctgtttttcatcttcctcctcaaactcctaaaaatgctaaaacccacagctctatgaaatcatttccgccattacaatcacgcatgaaacatctccttgctctactcattccttgagataatcatgcaattcggatcttccaaaaccctcttcttccgcgtcgccggtttctcttccacctccgtcttcaagccgcgtcgcgcgatctctgttccggtcgcgaatttctcttcttctagctcgatttccgctcactacacttctttgaaacgtgctcaatacgaggaagattcacggagtgttagtgttcctgtatggtgggattttgagaactgccatttgccgtcgggtgcaaatgtcttcaaattggctcaaaccatcacatccgccgttagaatctgtggaatcaaaggacccatcaccatcactgcctacgaaaacatgataaagctctccagaactaaccaagaagctctcttcgctactggaatcttctcgacaaatgtcca

SEQ ID NO: 72003 - DNA, 723 bp, Arabidopsis thaliana landsberg
aaacttcctgggacatgtcgggcgccaatgcggcggcaatgcggcccgtgggcgccaaacgccttccgcaattttagaaaccctttcaaaacggggtggaaaaaaatcgtcgcaaaaaattcaaaaaagttcgaaatcgttgttgacactttgagggggccccgactatatacgcctcaccaacgacggcggcgacgctgctggcgacaaagaggttcgcctctgagtttcgcgaagttggacgaaatcatgagagccgcgtgagcgacactcgacaggccctaagccaaaagcgaaccgggccacgacaccgcgtctgcgatgtctgttctttgaaaactgaagattgaagaaagagaaacgtgggcggcagagttctgctggacccatatcccgcaagggattgacggtccgaacgagactttggcggatcacgtttctggtgagaataatactaccgagtgttcggttgtcgaaagaccatcggatgccaagtgtgaatgttctcgtcaattcatgcgtgaccagattgcgtctgccaatgccgatgcgacgaaagccaaatcaaagtcttattcaacatgagagtttgatcctggctcagaacgaacgctggcggcaagcttaacacatgcaagtcgagcgcccctcaaagagagcggcagacgggtgactaacgcgtgggaatctacctagctctacggaataacccagggaaacttg

SEQ ID NO: 72004 - DNA, 721 bp, Arabidopsis thaliana landsberg
ctcaccgaccactaccgatgatatgttgagggaagccttttccggctacggaaacgtagtagatggtgaatgccttttggatcgtcctccaattaatatttccgagtttcttgtttatgttgttgagtgtggtttaagtttctcagttgtcactacaccaaaattattattgtttgtgcagcaattgtaatgagagacagatacacagataggtccaggggttttggatttgtcacatacagcagtcactccgaagctgaagcagccgtgtctgggatggatggaaaggtttggatggctctatttgtggtataatagttgtgtgtctgtctatatgtggtcagacttagtattgctttcgttttaaatttccaggaactgaatggtcgtatagtgagcgtgaaactctttggtattggtgatattgatgatgaatgacgatgatggtgctgacttgaaaggtggaacacatctctatccaaaactcaaaaccattcttgtaatgtattgtgtgctttcatgtgtttgcagagtctgtttttgtctcctttcaagggtttgtttccaggtctgctgtgatttgattcccgtgtatgatgacttaataaagacgtttacttttcctttatcaaatctttacatctgtattcaaagttagaatcaacgatctaagaggaagagcttaccatgaacccactagtttcttgacggttaaagggac

SEQ ID NO: 72005 - DNA, 595 bp, Arabidopsis thaliana landsberg
  unsure (1)..(595): unsure at all n locations
aacttagaccatatatgtgatacttttgctatcttgatatccttattatgtgtacataaatgaaatataactaatactaaaatctcttttaaaataatactcatcttggtacgttgtgtaatgttgcatcattcatgagtgtgttagaggtagagccagagttctgtctctcacttgtcttgtctctgtaagttgtttactcccagagcactcaaagaccccagcccttcaacttttattgagtcttgtccatttctgaatttccttccacatattgtaaaattcatttgacaggataaaacaattctgtagttctacctttcaattttcctaaagtttcaggatgaattgaaaatgacttgagtatttatctcttatgtacgacattattttttttatatctttcaattttactgtacttttctgtgtgaaaatcctaacatatgtattatattaaaaaactatttgactcctttaatttttcaaatatatatattattaaagttcatgaattttcatatttacgaacatactntnttgaattttcatctgaaaactaattgaaaaagacaaaaacatgtgaagaattctaaca

SEQ ID NO: 72006 - DNA, 583 bp, Arabidopsis thaliana landsberg
  unsure (1)..(583): unsure at all n locations
aacagagcattccccggtttgaactaaacttcaccgtagccggaaacttaggtttctcccctctaagattgttattcgagacatcaattaactgcaaactagtcataaatgtcaactccttaggaataacaccagtcaaatcgttaccattaagataaagactcttcaatgaagtaagattcgcaatcgccggagatataaacccggtgaatccatgtttcccaagattcaacgtgacaacattcttcccagctgaatcacaactaacataagcccaaccactacaagcatcatcaccttgccaagactcagccaacattgaaggatatcccaaacctccagccaccgctaaaagcgtcatcacctgaggactacagctttgtccagctttagtagtacaaaaaacgttgtggtctattgttactttaacctccggtgaaaacaaaggaagaggtccttgaaatttattgttatctagagaaatattcttcaagctagcgagtgtaagaagcgtcggaggtactattccgnnnnnnnnnnnnnnnnnnnnntgtagatcgaagagattctcgctctttgagag

SEQ ID NO: 72007 - DNA, 732 bp, Arabidopsis thaliana landsberg
ctaaggggcgcaactaacataattttactttctctttatcttaatctcaaaactttcagaaataaaacctaaccggaaatagaaccgtacaatttcatatatcaaggattttaacttatattgtagcatgctcaacttggttttgcgatgttttcatatctattattatttcaacatattttccaaattattttatctaaataacttacttatttgcaaattaattagtctataaaacatatatttttttggtcataggttattattgtacatacttattaaatatttttaattttattgtattacatattatagatacatacttgaaactacgatcacaatagatataaataaaaacgattttatgaaagagaattctctctgcaacctatctcagtctggaaaatattaacctgagaagatttggatatcgcaatcttaaaaagttaaaattgtgtcaagctcagatagctgtaagaaagaaatttcttaattactaaatatttaatctttttcccatgtgtagatgattgattaggatcttataaacttgtacccaaaacgactttagcacccaaaaaataaaaggttatatcatttcattaatttgtatgctcatgtataacacgtcatttatgtggccaatatggacggtccatgtaatccagacaaaattgttccagttgtaattctttgtttggtatagcgttttgttgggaagcaaccgaaaca

SEQ ID NO: 72008 - DNA, 521 bp, Arabidopsis thaliana landsberg
  unsure (1)..(521): unsure at all n locations
ccaaacaccagtctggattattctgtcattcattttctatattcaggactagtttctaaatcctaatctttgtaccattatccataatggagaataaacctaacctaatacctcgaagagtttatcctaatagttgtgaaagatcaaatcaagtaattacccaaaaagcttaacaggctggactttccataggatttgtctggcttaatatacaaaaatgtaaagaacagcttgcatgagaatggaaacaaaggctagcacatgtcttggtaagatctatataacctatcgatttgagatgcacatagaaacaagcatgctatatatatgaagcaaataaattaggtgggggttgcattacattgtatcaaacagagctaagaatggaacacatcaaggtatattagaacctagcaacttaaatgctacagaagcctatgtatcaaatgtgtgatggagagaagactttgcatttggataacacangtcaccatagatgagacgatcaagtgtcatatcag

SEQ ID NO: 72009 - DNA, 386 bp, Arabidopsis thaliana landsberg
  unsure (1)..(386): unsure at all n locations
tggctaggccaagcggattattatatcgaatatcaaggccaggtttccatcatttatcctttgcgcgagtactagccttatattgtaaaggcaaaggaaaacaatgcatagatcaaatatgtgtttgaaacgcatttccatgccgnnnnnnnnnnnnnnnnnnnnnnnnnnnnnnnnnnaacaggggctaccattgtttacggcccctgtgccgaaaccggctacaatacacatgtcgccaaagacggagaagtatttaacgatggaaagatcgccattaccgttttgcacacacctggacatacttgggaatcatatattttctctgttgagtgacgaacagggaaaaccttattgcattatcactgcctataccatgttcattg

SEQ ID NO: 72010 - DNA, 1842 bp, Arabidopsis thaliana landsberg
tttacaattttatttaacaaacaagatgactaaaaaaaaaaaaaaaaaggactccaaaagtccaaaacttctatggagtatatgagggtaaagtcgtcattttacaaaaagcattttatcttcgttttgtcgtcttcgaaagttctcaaagagaaggcatctgagaaaccccaatctctaatcttcttttcaattcaatacttttttttctcaatctctcctctcaaatcaaacaactttgattgatcttcgcaatcgattccacatgaagcgcagtactaccgactctgatttggccggtgatgctcacaacgagacaaacaagaagatgaagagtccagaggaagaagaaatcggattctccaatttagacgagaatctagtgtacgaggtgttgaaacacgtcgacgcaaagaccttagctatgtcatcttgcgtgagcaagatctggcacaaaacggcacaagacgagcggctttgggagctgatctgtactcgtcactggactaacatcggctgcgggcagaaccagctcagatctgttgtgttggcgcttggtggcttccgaagactccactctctttacctctggcctctctctaaacccaatccgcgtgctaggttcggtaaggacgagcttaaactcactctttctcttctctcaattcgatactacgagaagatgagtttcactaagagacctcttccagaatccaaataattgactacaaattattagagtttggttttggagtttgtgtatttggagtttgttgattggtagtcagatgtgatgttcaatgctggcaataaaatttgttggtatccataagccagactgttagcaacagttgtgttctgtaataatagagggtgatgagaatttttaattactgtaatcggagctgattaaaagtagatttaatatcaaatgtgattcgattttgttgtaatggttctgtcgtgaagttaagttggtccgtagttggacaatgattgtaacaaaatcgattcgtgatccagtttggtaaatttaagaactgttagtgacgattctgttttattattcaatgaaaaacaatgttcaccaatttggtaataaaccaaacattcaccactttaagtccaaaccggaatcaacgtcaagctatgtaatgttgcttatttctttatgtccttcgtttgtaacatttcccggtggttactactctgtcggatccagttttgccgtctagtttttacagcggtacgataaatctcaaatgttgtttgatttggttattcttgcgatggttagccttaatgtcgctagatttatgtgtatttgagtgatagctacaagcctacacatcattaccatgtaccaccatctccttattcaaatcagaatcattatcgccgtaaccacttttgtcattttctttttttatatgtcggtaaagaaagaataatgaaataaagaggtgtaagtaagagtcaacaaaataatttaagagcttgtgtgaattgataaaaacactccttttctgttcttggttttatatgaaatttataaacaaactcgagtgattacaaagaacttataaaccacttatgtggcatactaaaatttaacaaaaaaaaatgttttgcgaaaaataagaagattttgttcatcttttttggtaagatgacagtttagctaaagatatttttcatatataaaaatgacaataaacacattacaaaatacaaaccccacacggctctctctagccaaattacttggccacgaccataaacacaaaacaccgcttagcttctaaaatctgaacatcgagaaaaaatgagttggtggtgggc

SEQ ID NO: 72011 - DNA, 700 bp, Arabidopsis thaliana landsberg
  unsure (1)..(700): unsure at all n locations
cggtcgagatggctcaaccttatgaaaagggcggagcagcttgcctaagcgtttggactgaccaaaagtatttccaggttcacttgtgtattcagttgcagatatcttactcacattttcaacaagtttttaacatttgtagttcttatcttgatgttgttcaacagggaggctttgaaaacttggaagcaataaggagcgctggtgtgaaggtattttcttaacaaattctggtgcttttggtgcgttattatcaaaacactttgtgtaatccatgtttttcaaattattgcagtgtccactattatgcaaagagtttgttgtagatccatggcagatctactatgctcggactaaaggcgcagatgcagtactgcttattgctgctgtattgactgacctagaaataaccttcttgcttaagatttgcaagaagcttagcttggctgcccttgttgaggtctctttcaattagatgacaaattatgcaagttgaaatttagtatttttttgtttcactcttaatatatttgactttcaattaggtacatgatgagagagagatgggtcgtgtacttggaatagaaggaatcgagcttgttggcatcaataaccgaagtctggtaatatagcttttgatatatcgctagttctcatatctctggttctagaaatgactcatggngatgtgagtttttgt

SEQ ID NO: 72012 - DNA, 3778 bp, Arabidopsis thaliana landsberg
  unsure (1)..(3778): unsure at all n locations
gttgcttcaccaatcgaaactgctttgattccaaagtgttgcacaaagaatcatctaccttcaccatttctgatgtttgataatgctcaacatcaagcctcgacaagaaacaagccgagatatatacagagacgctcaacaagaaataaagagagacaatgtcaagttgtcaacatattcttcaataagtaagcgactaatcacatctttgcctctgaagagctgatctccatgcgtaaaacgctccagagatctgccagtgctaatttaaattcacctgccaacaaggatcatgggcatgtaagcagcaaggtaacacaagtgaccccaaaaacaaaaacaaaaaacatttcttttcgtgctcaaaacatataagtaatcgtttgtcagtgattccacaaggcaaaagaccagttaaacatcacacacaaatttgtgagccatcacctgtattattaaccacgtaactggaggcgtacaatagcttttattcataggcatacaaaatccaaatagtcaatacaaacacaatatctctaaagcaaaaccaaattggaaactttgacagaatgcctctaactttactcataatcaaataaaagaaggccaaaagcggtgctgcctcatttaatatggatgactaagtctaaccattctgagaatacctatttaacccacgcgttcactaatgatatgatatggatccaagagcaattttaagccactgccgtcacaaaatggagagcaaacatttacttcagtacaaacggaaatttccagcatggattgcaactgaaaaaaaaaaaaaaaaaaaaactataagcatagcagagtgagaatagtagtagatcaaatttcacatcttagggatattctgtgcaccatatgacatggtaatgaactccttggtagagcaggaacttgaaagcagaattttcacgttttttccggttatgctgattatttccagctgaagacacaccggctccagtgaaaactctaagtgtacgtgatcagtggtcgcagactccttgaaatgatcgatgtttaaacacagttacacgtccttcaccataattgttggtcaaacaccttgtggctctgatttagaaacaatagttgtcagattaaatcgggattcatttctcaataaatgtgtgaaagaagattgactgtagaaattataacaccttttcatcactaaattaagatgttccacaatctagtgccttgagttttggaaggctcccaagacctgcgcagccagaaagcttaagctcggcaacagatctcgagttgcttattccgaatcgcagttgctgaagccctccctctgcactttccagatctagcggaacaagttcagtgagattctagattgacaatcgaagttcacttatggcagtcccagctagatatatacttcattcaagtttggtgcaattcctgaatctccttgagctctgagcagccagacaaattaagcttgagagatgtaaaatcaaccatggcaggcaaacttcgcaaatgagaacagtctttcatattcaaggaaacaagcttcccacaacgaggaatagatgtgctaacgtcaaccagactagtacatccttcgagatcaatatgttcaaggtttacggcttcagataacaccaggatatcagttaattttttggagtggctaagtttcaatatctttagcttctcgagattctgtttacagcataaatcaccaaatgagtcatcaatcagggtaacgaataaatgtaagcaggataatacaatacttactttcttcccttcccataacttctccatgtcgctataaggcatgtttatctctacaaggttctcaggattaaatttcccaggcaaaatcttcagagggtaattctcccagtgaagtagccttagctcatcaggcaaagtgtcgaggccttgaggtagatttagtttacactcattctcagaggcggaacaatagaacttcagcaatctaagattatacatcttaccaaacacagtaggactcaactcacaagtcaagttagacgcatccaggaagatgccttcaattgcatctgttccctggcgaagacaatcacataagtatggtaacatcagcatattacagctaaagaaagaaaagatgattatgaagttatctggagtattaaaagaaacaaacatatatcaacttactgaattgttaatcaatacatcagtgatgtcactaaagtcccacaatctgctacgctcgcatggatcctcatcttcttcacgaacaacaaatcgacctatatcttgaaaaggaataggcatctctatcctgttgtccaaaaggctaatgagagactcatctataagatcacagattcccaaatacgtaaaaaaaccacaagcatcaagtatttgcaccacatgatctttgttctcccctctaaaaaaacatgcaaggtccaaaaatatgttcttttcgttttcatctagtccatcaaaacttcttcgaaacgcttcctgaatctgagttggaggattttttcgcaagctttggagatgttccatcttgtagtttatatgctgctttgatacagaagaacccaaaactttgagagccaatggaataccactactgcagcttataagctctgaaatgacatcaccttccccatttaaatattgtttgcagagacgaaaagattctaactggcgtaatctctggatctggtatggctctttaaccttacactgtacaagaacttgttttctcctagaagttacgatgattctgtgtccatgagaaaaccagccaaaccctccaacaacagcttctgcatctctagcattactcacgtcatcgagaacaaccagaacctttatattatggaaccgggacttcatgaaactcaattttgtatcacaagcgcctatacttagtttttcttccccacatactttagacaggaaatcatcacgcaattgcgtcagccctttcatctgactcattagatgaaagtcttgtaggaagtaacacaaatcataatgtggagcgagtatttcaaaaatttctcttgcaatggatgtcttacctattcctgccataccccagagtcccacaatttccgcgtctaaagactgggaatgatttaataatgctaagatttcagccacattcgtgctgtttttcaaacttagtcttaaggatgcatttcttacaacttcctcggcaagcataaactggctcctgcaaaaggacacagaaaatggacgtacttataagaaacactactccaaataattgaaatcgttgataatcttaaagctttggaattgtcctttccaagaattcctaaaataattccaggggaccagttgccacattgtttaaaagtataagggacaactaagagaagtcaatgtacccctttgtccattcaagtccaccgatggacactatttcagtcacagctgccttccnnnnnnnnnnnnnnnnnnnnnnnnnngacctctgaagctgcagaaatgctgcttcaaacctgcctttcaatccacaaatgtctgaaagtgtcaccttaaaatatataggaataattacaaggtctgtttttttccaatgctccataactgcaaccaggtgatccagggactgtctagaagaaacataacaatttgaaagaatcatgataccaactctagatctgtataacatctccttatccagcttctctctgcccaaaagattatatgtcaaaggggtgacctctcgtttgtgcaactc

SEQ ID NO: 72013 - DNA, 462 bp, Arabidopsis thaliana landsberg
  unsure (1)..(462): unsure at all n locations
cctgctgcttgaaagcctgctcatgttcttcatcgaccacgatcaggcccagttcgggataaggcaggaacagcgcggagcgcgcgcccaccaccacccgtgcttcgccgttcatgacggcgcgataggtgcggcggcgttccttgcccgaaagatcgctatgccattcggcgggccgcaccccgaaacgcgcggcgaagcgatccaggaattgcagtgtcagcgcgatttccggcaacaggatcaacacctgcttttccgcgcgcagcgcttcggccaccgcttcgaaataaacttcggtcttgcccgatccggtcaccccannnnnnnnnnnnnnnnnnnnnnnnnncgccgaaaccttttcgcgcaacaccgtggcggcctggccttggctttggctcaattgtggcgcggcgaacccggcatcccgcgcggcgaaggcgggaaaggcgggcagggtga

SEQ ID NO: 72014 - DNA, 169 bp, Arabidopsis thaliana landsberg
aaacgagtcccacatatacaagccttttgaccaaaaacacacactacaagctggatgatggttgacttctgacggtggacaaacaagaggaaaccaggatatccatctagaaccaaagacacagcaagacagatcaaacaatgacgcgccacacaacaatacaaagtca

SEQ ID NO: 72015 - DNA, 563 bp, Arabidopsis thaliana landsberg
gatttgataattttaagttagggtcggattagtagtcaacaagtcaaaataattgtggtctattaccttcctaatcgtcggcaatttaacagcggcgtacacgtgtggttacataatacttctatcattcaaacactggttttgttctaacatatttgtggtcaaaattaaacataaatggatttgattacttattaattgcaaattaatattatgatttctaatcttaatggggtcgaagatctttattttttatttgtcggctggacgatatttctgataggtatacaatatttttgtatgattaaaaatcttatcataagatattcaatgaaacggacggtcgtaaacgataaattgatcttgatctgaaccaactactatatcaacggtttattgtactgccacgtgatacgtttgatgacacatgtgttaccaatccggatcttcgcctttgatatgtgatccggtccacatgaaattgacgatttcgtcttggtgtatacattctcattgttacctaattatgctatgtgtccgattgcgactggtacaatgaacct

SEQ ID NO: 72016 - DNA, 389 bp, Arabidopsis thaliana landsberg
cagagtggcattctgtatccctattcacttatcggcctttcaagtgaacgaccaactggtatggggggtgcggtggacatcgtatccatcgttaactaccacttctaataccctgtctcaaacagccccgtattctttgccctattaaatccacatccactctcgacagatgatattctatttcaatggcggtagaacactgatctccggcagcttgacactcactaaatgaattctccatagtgacatgtaatcaccaaaagacgcttgacgcacccacactcacgattgggcgcactgataccgttgagattgagtagtactgcattatcgttgtgcacttctggaaagcgcggtggcaatctggggtaaatatgcatgatgctgcg

SEQ ID NO: 72017 - DNA, 898 bp, Arabidopsis thaliana landsberg
ctgcactttcagtaagcttcgtcctgctgcattcaaagaaacatcaagcccatcttccaagttgaattaatctaatctgttgcaaagaaccatgatccgaagtccaagacttttgtattttgagtaaaacaaaaaaaaaaccattttttgattagtttctctttgcatccaagaaaactgttagagcttcgaggcttgcaatgttgataatgaaaacttgtctatgtatattaattaggaagcttgcaggtaattaattaattaattttctggtgttaaatcttaagtttttcaatgaaggatgtgaaaagtcagatttttttggttccagaaccacaaaaaaagactcttttttgtcaattgattcgattcaagagttctttcaacgtttggagtagagagagtttgacctatttgaaagtctctgagaccggtgtggcatgacggtcgcggcgggtatcggctacgcgctggtggctttaggaccgtctctttcacttttcgtctccgtcatctccagaaaaccctttctcatcctcactgttctctccaggttctttcttttttcacaatcgctctgcttattccggattgttttttttttgtttcccccaaaagctatctatgtgattcaattcgattgcttcgaaatgttgggtatttcgcgaagatttttacctggaaaaaattagggtttttgggagattgattgatttgcttggtaaatgtaatgcagtacgttgctgtggcttgtgagtctgatcatcttgtcgggattatggagaccatttcttccgctcaaagccaatgtgtggtggccctagtgctttacttgtgatcactctgtttgttccaggaaggcttcgatttctctctggaaggtttacaagaagtttgt

SEQ ID NO: 72018 - DNA, 405 bp, Arabidopsis thaliana landsberg
tacttttggacaagaaaagaatataatttcatagtactaggtaccatacacagaactcatgccaatccatgatgaatactgagtctgacaatcttttagaggctatctcgtccttgagatccacatgtctttctatgcgtatcaactaatgctacattggcaaatatatataataacgagtgatgatgctttaaatggcctctctcaacatatgtgtcttcaggtaagacaattccatatgatgcttcttcttcatctgcctccattggcaattctcttcagatggtgaaatgccttctgcttaatccattgcctgtcatatggcagatatgcacttatcgagtggtcatagctgccaaatgaccagaggatcttgtttgcaaagcatccgaacatgggcacatc

SEQ ID NO: 72019 - DNA, 329 bp, Arabidopsis thaliana landsberg
gatgctttctgctctgactgtctcaatctggattagggttctgatgatgcgttacagatgggtcgagtattgatatgtcaggagggtgaccatagattgatggatcccttctctattatatggtcttactgcatattgctctctctgcaactgtaatttgtgcccatacttttgtgcgcccagatggattacgagggaatgtctgcaccacttattgcatagatctgcgcacacgtcccaaggaataggaatcatggatcagtgctggctttaactcggggatcactgctgcaagttacaggcactactcgtcagtggcgcactacacg

SEQ ID NO: 72020 - DNA, 267 bp, Arabidopsis thaliana landsberg
aattaatgatactagttatttagtacggagttaacatgagctaataggtatttctctttatttaatcaatgatactagttttattgtaaagtagatgcatttacaaataaaagtattgctcaaatatttgaataatgacttttaatacagtatatgcattttcaactgtgaacactttgaaaaataatggattttacattccgttcgactttatgttgtcttaagttgattgatattatattggttcaagacccaaatttggggtaa

SEQ ID NO: 72021 - DNA, 630 bp, Arabidopsis thaliana landsberg
  unsure (1)..(630): unsure at all n locations
ggcaagatgcatggatgaggggttcggcacaccganncgccgtgcagatcggtcgtgcttctgaagnctcgtgnntgagcgtaatcgccgcggatgcgtggcctgtggagcgnnngctcttcggctcggtcgcaccccgtcatcnttgcgcacanagcgtnntaccgcttcgacgccttcaaggancgaaanngcaatgaccgggcccttttgcantgaaatcgannctatggagtcgaatgggcgccctgaccgcggcgcgagatanagcttgcctatncgtctcgtaatgggtggtggtagtgctncctgtgaggggttggagcatcnttgaggggccgacgagcttcaaanccgacancgctcaaangcgggtcagagaatctcgccgacgatnnnnnnnnnnnnnnnnnnnnnnnnnnnatgacgacgagcgtgcgctctacggtctgtgtgttgttcatgcgcgccactctagcacagggtgcgcgcgttcgctacgggaggatgacgatctttgcgatgcaggtcgcttgcccgccactgacgccatagaaggtgaagttgtaggtataggtgccagccttgggcataatcaccgtgacatagcgtgcggncgaactgacttgt

SEQ ID NO: 72022 - DNA, 1269 bp, Arabidopsis thaliana landsberg
ttattaaaaagaaaaactcaccaagtgagaaaatttccttagggtgactatgttaatgcactgcgagctgctcgggagttcagttcaagaatatccaattccttgaaggtttgaacctggtgatgaattctttatttatagaagtatagattagctggctttgctagaaggaggatggtccgccatatgtcttttttttctgctcagcctcctatataataacccttgtgttttttgttatgcagattgacatctttccatattctgtcttctacattttctttgagcaatatctgaatatctggacagtagctttgacaaaccttgctatagcaatcggtttgcttcccatctatcaaattttgagtttttgctagagattttaccaaaagacaactctttacattcttatattgctttggcaggtgctatatttattgtttgctggttaatcacttccaggtcagttatctctctatagattaagcaaaattttagaatttggagatgtcttgatgttggtttcttttactaacttgccaatttcagtgcctggagttcagccatcattgtccttgtgttagtgatgatactcgtggatctcatggtactatgttatattgaaaatgatccatagaatattgtaccgatttgcattttggttcatgccgttatggatgttataagttgtagtaaaggataatcatccttgatgtgtttgagcagggtatgatggtgattctaggcatccaactcaatgcagtttctgttgtgaatttgataatgtcaatcgggattgctgtagaattctgcgtgcacatatcacatgctttcctggtaagaacaagccatgcccctttgcaaccttaccccgaacactatactgcatatattggcactacaatctgtagccatgtagtagcagaacagccttcctcacaattgtcaactacttattggttaagtggatataaggatgcagaacaagccatgtttcctttcgaccttgcatggatctgttctgaaaaataatatgtttatttcctgcactgcttcaaatgcagatgagtagtggggacagagaacatagagcgagggaggcactggaaaccatgggagcttcagttttcaggtgatgaaacttgcgatcacttgctagttgctacacttttattttctccatagcaatttttttttttttggtatgcaaaggcgtttgtctaactggtttagtggtcatatttgtgggacttgataatgaaaatatgt

SEQ ID NO: 72023 - DNA, 539 bp, Arabidopsis thaliana landsberg
tatttatactcatttccaatgataatggaaattaggattaagatactataatcgtttttccgcaattttagaatattaagatttgatgagaaaattttatgtttacttaatatgatggaagttattatacatgtgtttggctctttgcgtttacaaaaataattttaccatactaatctagtgatctacacaagtaattaaaagatatagttaaaacctagattcaattcatttagcaaaaaaaaaattcatcatttttagttattattatatatgcaataccgttaacaattgaatggtttgcatggtctcgctaatcatgcatgcatgcgttctttatttaatgtctatgtgaaattgtgaatggtttgcatggcctcactaatcatatcatcagccttattgaggccatgcaacattgagtgattttatcggagattcctcaattgaccattgaaacattgaatatcaacaacgcacttattgttaggatacttatttgaaagatttcttggaattattcctgcaaatgtcttcat

SEQ ID NO: 72024 - DNA, 389 bp, Arabidopsis thaliana landsberg
atacggcaacatacccggcggtggcttgccacattaatacctcttaccacgtggacccatcaacatttttttgagctgatttgaatctgataactcttgtttgaagaatctgacaattctccgctatcgactctccacctatatacacagaaacaaatatcaagaccctaattttaactactcaaaacctaaattcaaaatgtcacatttggggaagcagggataagaaaaatcaaacctttggaataaggaacaatgtgatcatactataaacagagacaaccattgcgatttccgaagcgtttgcagactatgttaccggcggcgtatttacgccaccttttaggatggggaaccaggtacgatgtaagcattagcccatcaacttg

SEQ ID NO: 72025 - DNA, 668 bp, Arabidopsis thaliana landsberg
ccaatgcgcagtgtaaaattcaagtcttaaagaagagaaaaatggtggaggtgtggtggtcactgattttagcagcagtgtctgcactaattgctggtcaagcttggaggataaagaagagacatggcgaagaagagaggatcaagagtgctcgaggaagagagaaaagctctgatgaaatctttgtctgtgaaagagtttgcacttccaaaagaatgctgaaaaaagttggagctttctctaaagatcctatccccgacacttgtgttactgtctgcggtgtatctgagctcgacgcttgctctgatgcttgtgctcgaactgtttgcgttaaccagcatcaagttgctaattggaatgacatttgtctcagaagatgtcaaagtgaatgtcttaagctctcttcttcttcttcttcttctcgctattcttgaatttgaaatgcaattatttgttgttgttgttgttgctatcttttgaaatgggaatggtatttgaatctgaagttttcattagtttatataataacattctgagcaaatttggtggatggttacatttcatcatgtgaggtttgtttagtaactttctcagctgtcttctgaactacttcacctacaacatctcctgctagttttgcagactcttcaatgggctctttgcttact

SEQ ID NO: 72026 - DNA, 1383 bp, Arabidopsis thaliana landsberg
gacagacgaaaaccggcccaaacgctatcaaatcaatagagaagagaaatctcggtatcaaaaatctgatcaatatctggaatctgtaaaaaagctgggaagctgcatcattttcattttcattttcattttcctaagtcaaaactttttatatttccttcttaaacaggcatgaaccaacgcaattagccaaatattaaagagtaacacttaactagataattccaccttaattttctttaaactgagtttttttgtcaactttaaagtgattttttttttaaagaaatccaatcgagaatatatttatttgaggccgctatcagctcgcataaaaaccttcattaatatttaatactgcaattttaaaattaaaccttgattagtgtgacactgacactcaaataaatatactatataaataggcccgtaggtcctgatcctactcttgttggacaaggccttgaaataacaaaaccaaaagtttccactcaccaaaactgggctccaataatttctttttctgagaccaacatcaaagaaatttcagataatttcttttatttatctgagaaaaaattaaatcatttttcgaacgacaaaaaaaaaaaaaaaacatttttcgataagaatatagaagatgaattatacacattgaaataatgacgtggagccatgtgtgctacaatatggcagcacgagaacatatcatgttcgtctctcaattatcaatccactgtcgtccatcttaagctcacgcaacacatccttgcgtgaaccacacgcaccactcgaagcaagatccaccgtccgatcatcccacctaagtctcatcccatggttcaaccgtcggatgaaaccctcgctacgtcgttcacagtaatccaacaagctaaccacatacacagacttttccttatccttccaattcccaccaaacttttcaaagtgacgtcgttttcggctctccacggccaaatactccaccatgccggccacaagctccggcgaagctcctgactcgtctccccatagccatattctaaccatagaacgtcgcaatgcagattccacggcgttgctaaacttttttctttccgtgagagatgggcttaatctgatcacatactctccatgacttgcacctgaagttaccgagaacctatctactctatcactactggttccacagaattggacgggaacgtggtttacaggcttacggagacgatgaggaacaccctcgtagagaaacctctccacaaagaagcttgcatcgagcaatatccgcactgccgtatcattagattcgaagaaaagggcgaatcttttaccggaaggagaatctttagcatcattgatgatacttatggagaagccttt

SEQ ID NO: 72027 - DNA, 658 bp, Arabidopsis thaliana landsberg
aacttttgactaacatccacatagttggtcatggatgactgtctaataatttaattaagggcgtaattacgcggaaaacttatagtacgataacttatgaccatataaaacaagacgtatgcgacattaaatgcaaactcattaaattttacattttgtttttcctcattaaattttacttactagttccaagatgcgcattacattggatacttctcgtgacatattcttgaaacgagattatgttttaaaattagagtttactctatactctatcgtgaatctcgttgcataaattaatttcgagattgagaaatcactaaaatggagcttatatgtgtgtattgatgtatggataacgaaatatggacacacactgttgtagggtcaatgcaatgattccgttctcatttgtgcatgaaggaacttgttttcatggaaagggtgacgacaagtaattcggggacctatttcttctgcccaagaaagagcatgtggttttactcttaaagttgaaaacattaagagtgaaaacgaaaagaaaggacaataatatgtgacacataggtattatataacaaacttaatgactatacttgttgggcagttgacctaagttgacggatggagaagacccgttgtaagagtctgatcgcca

SEQ ID NO: 72028 - DNA, 907 bp, Arabidopsis thaliana landsberg
cttattatatttaatggggtggccattggtcagtcttagaggacaggttttgaacttctgaggggatcgaccatgaaagtttcctaattaggtagatggagatttacctgttgttttcaagtatgactctgttcaacgatgataaaacgaccaaaaaggttgctatattgtcactatgatggaattagtttgtcactttgaggagttatacgcaataaaaaaagataaattcaactataaaaagattacacataatcaaataaacgaagttatatatatttccatcaaatactttatatacaacgacgaattcatttgcttacacatttatacatgaaatcaaatataatttcaagacaagtagaagaaacagtagtaccaaaccataatttaaagcgatggaaaaatattttgcatgtcttctacttatctttgtaagatgagtgctgctccaaccaaaccaaaccacagtgtcaaagcaagccaaaagactcggttcttctccataccgaccaccggtcgccaaaccaagagctttcctagaaaatcatcactcgagttgagctgattcgtagtcgatgcattcattcgccgctccttatccctttccttatcactccatgtcactgcatagctgcgcacacaccacaaagagtccatttcaagtgatgtcgacatatgcattagccatgatttggaaaccttttgttatacctgtcgtaacttgaaccgatcatgggaatagtaaccatttcctcctgagatatcttaagcttaggagcttgcaagatataccgaagctcagaagcttgacgacgaataccaggactgggatgtttcttctctaattgctgataaagatcaatgcaatcagcgtggcgattattggcctcatatgccatagcta

SEQ ID NO: 72029 - DNA, 448 bp, Arabidopsis thaliana landsberg
cggacacggcacagttccgcgccgaaggcgtgagttattttagcggagcggccggcgaagtcggggggggactgtccggtcaccagccggacggttaccaggtctgtcgcacgggatgcccgcacgtcgacgagaacggtgaccaggacccgtgcccggtacatgggcgcgagcccggccagcgttatggccgcatgccagcggtgccggtagaaccaccaccgtcgacgatcccgcaccgggccggcgacgagcctccggaacgacttcggtcatgccacgcgcaccgtcaccaggacggcggcgacgagcagcaccaggccgagcagtcccggccagccgtggttcacccacgtgaagagaaggatgccgcagaccgcatccagcatgggatggcggatgatgaaccagatcagccgcccgatcagccgggcgagctggacgaccc

SEQ ID NO: 72030 - DNA, 668 bp, Arabidopsis thaliana landsberg
ttaccgaacttatagataaggtttaagggagaaatcaccttgtattgtgcatgccctgcgataccaaaatcgtttattttgatcaagctgattgataacctacctttgatgcggcagtgaatttgaacatctgcaatgagtaatattaagtatcctttgcattccttcataagaaaaagaaaacgaactaacaatggataatggaatttaccggtgttccccactaatgaaatgatggtcgtgtttgaatccgggtttatattcagctgcaagacatttccaagtcaaactcacataaagcacatattctgaaaatataggctttgcttaacgattctttcagaaaaccttatctggccctgttacagaaaaccctcctataagaagtgcagatgcagatcccaaaacaggtcgagcttctttaagtgaagcatcaacggagaatgacacatgaggtttcatgtcttttgttatagacatggagtgaacaagatgctctggtgagtatgggaagaaaagacaataagtgttgcccgtatcgagatccatccatggctttgtgtatcttcaatgcaaataaataagagtcaagtcaagaacgagcatttatatacatacacactaaattcactggaagaaaatatagttgaactaagcatcaataccct

SEQ ID NO: 72031 - DNA, 356 bp, Arabidopsis thaliana landsberg
  unsure (1)..(356): unsure at all n locations
gaatactaaaccccatcatgcgcaatgggggaggtatccccatttagcacgaaacataccgcaatggcatctatccacacagacgaccaattggatagtgataccaaacttccaatggaannnnnnnnnnnnnnnnnnnnnnnnnnnnnnnnnnnnnntgtatcataatcgatagcggtataaaacatatatatagctgcgtctgcagagagaacgaaagggtggatgcgtggataactaatacatcaagatctatatcttgcaccgcatgcctatctgatactaaaagaggatccactgaattatgatgtataattcaaacctcgctatacaatagctgatcgttacatggaatg

SEQ ID NO: 72032 - DNA, 1069 bp, Arabidopsis thaliana landsberg
gttcctcctttcctagatcctcacttgtctgattccgatattatcaccggagtgtgctttgcttcggctggttccggttacgacaacctcacagatcgagcaacttcaactctatccgttgataaacaggcggatatgctcagaagttacgtggagaggttgagccagatcgtcggggacgagaaagcggcctcgatagtcagcgaggctctggtgattgtaagctccggaactaacgatttcaatctaaatctctacgatactccttctcgtcgtcagaagcttggcgttgatggctatcaaagcttcattctctcgaatgtacacaacttcgttcaagtaaacaatcctattaaacatacatatggtttttaattatagaattattttattttattttaatttcttttccatattttggtttcgacaatgttaattttgtgttgttgatgtatattattataggaactatatgacattggatgccgtaaaataatggtgttgggtctaccgccggtcgggtgtttaccaattcagatgacaatggctatgcaaaagcagaacgagagacgatgcatcgacaaacaaaactcagattcacaagagtttaaccagaagctaaaaaactccttgacggagatgcaatccaacctcactggaagtgtcatcttctacggcgatatctacggagcattgttcgacatggccactaatcctcaaagatacggtaacgttacgtttcctttactcccatgcaaataacgtttcgcactaaatctagttttccttgagttttgatcaattgcatctctttctagattatattgtatttggaaaaaatatatttgaggttgttatattggatcatttaaaaatgatattgcataaaggcaatataagaaaaaagaaatcaatcaaacccaaagcataatgcaattttctgcgcacaattctctcatattagtatatatcacatacgtgtgaagcgcacgtatttgacaggatttctactgttgattttttttacaggttgtgaaattataggcggttataagaagacattcaagac

SEQ ID NO: 72033 - DNA, 277 bp, Arabidopsis thaliana landsberg
  unsure (1)..(277): unsure at all n locations
aaatnagnaacacacttatatatactaaaagctttgataaaagatataataatctaaataaatcatacttttctatttgataacaaggaaacaaatcattattatttaacatcattgtaaggttctagttataatatattcaaacatacacataaaatataaacatattttactctttaactgtaaacaacaatctttataatttatatacctttacacaaacacttcaaatcatatctccatatattgttacaccaaatcccatttaaaaacgaaa

SEQ ID NO: 72034 - DNA, 4621 bp, Arabidopsis thaliana landsberg
ggacttaccggagaaaccatccagattgaagacttcattcgagaatacatcaagccatgagctccaacatgccttcatagattgaatctaccacaagtttcttatgctttgggctgtgactttgatttgagtttagagatccttttgtatatgagatctttggatgatttagggtgttcaaaactgagtagctgtattttcgagttagataatctgttttaaatcggaatgattttaaggaaatgttaaatgacttaattctcttgcaaaaaaggaaaagaggataatcatagataagtgatcgtgcttatcaacttcgagaagataacgcgagaagtccttggggataagctagaaactgtcttaactaagccggtaaatccaaattaaaccggtaatttggtcattacaatgctcacgagagcatcacgtgtcttcttcttcttcttattcccccccaaatttctggactttgtccttaagaaggagatgaagaagaagaatgactaatatggccggaaccgccaccaccgagttccggtggaaatcaccaccacagcctccgtcacaagagcaacccatttcagattcagattcagactccggatctgattcagagaatcatcagcaccgtcacaatgatctatcaaactccatcttcgaagcttacctcgattgccactcatcttcgtccccttcctcaatcgatctcgctaagatccaatcttttctcgcctcgtcttcttccggtgctgtctcgtgccttatctgtctcgaacgcattaaacgaaccgatcctacatggtcctgcacttcctcatgcttcgccgtctttcaccttttctgcattcaatcatgggctcgtcagtgcttagatctacaagccgcgcgtgcagtcacgcgaccttcttcgaatccgacagaaccggaagctgtctggaactgtccgaaatgtagatcgtcgtatcagaaatcgaagattccaaggcggtacctttgttactgcggcaaggaagaggatcctccggcggataatccatggatcttgcctcattcttgcggcgaggtctgcgagaggccgttgagcaacaattgtggtcactgttgcttactcttgtgtcaccctcggaccttgtgcttcttgtcccaagctcgtgaaagctaaatgcttctgcggcggtgttgaagatgttcgtcgatgtggacacaagcaattctcttgcggagatgtctgtgagagagtcctggattgtaatatccataactgtagggagatttgtcatgatggcgagtgtccaccttgcagggagcgcgcggtttacaagtgctcttgtggtaaagtgaaggaggagaaggattgctgcgagagagtctttaggtgtgaggcttcttgcgagaatatgcttaattgcgggaaacatgtatgcgagagaggatgccacgcgggagaatgtggattgtgtccatatcaggggaagaggagttgtccctgtggcaagagattctaccaaggcttgtcttgtgatgttgtggcgcctttatgtggtggcacttgtgataaagttcttggttgtggctaccataggtgtccagagaggtgccaccgcggtccgtgccttgagacttgcaggattgtagttaccaagtcttgcaggtgcggagtaacgaaaaaacaggtgaaagagagcctttttgatacttcatgatgctttattatagtcaaaatcaaatgttgatggaaagattttgggaacttaatttagagtaggttccttgccatcaagagttggcgtgtgagaggaaatgccagagagtgagagattgtgcacgtcatgcttgtagacgccgatgttgtgatggtgaatgtccaccatgctcagaggtatgatgtgtctcttggtccagtttagtgcaattgttcacgcttggcttctaatttgtttgtttgaatttttcagatttgtggaaaaaagctccgttgcaggaatcataaatgccagtctccttgtcaccagtatgttctgtagtagcttgctttggactttctttgtccgtttggtttcagatttgggacgatatgactaataaaattgtgtactgcaagatatcaactcatgcacgtggaatgacattatttgttgcgtgttcattgcaaaggtccatgtgctccttgtccaataatggtaacaatatcttgcgcttgtggtgagacacattttgaggtgagaattatgatttgagcatcaatatggcgtcttactatcaagtcgtgatatatagacttggtacttttattgttatggtggatctatagaaaattcttagttttgggtacatgcaactggtacaagcaggagatgttactgacacctaacaagcgagactataagcttaaacttactaaattatcttcggaaagaatgatcttgaggtcttgtttagtctaagcctgagaaccatatctgatgactttatgcctattgttgttatagatattttgcttcttctttttgtgtccataggcttttaaatgtttgatacttttaatatattctgtattctctgatagaagatctggtactgtatgttaaacctgtattaataacgcagttggatgttttatgttgttcaggtaccctgtggcactgaaacaaatcagaaacctcctagatgccgtaaattatgccacataaccccattgtgcagacatgggcaaaaccaaaaggtagcagaagagttagaataaggattttatgattttacttttgtgactggttctatgtttgaattctgcgaaatttatgtcatgtttatatgcagcctcataaatgccactatggagcttgtcctccatgtcgactcctttgtgatgaagaatacccatgtgggcacaagtgcaaactaaggtttctcatgctggtgtctttttcatccattttctttcctactctgatcatttcccttcttataaacattggtttttgtgtgcttcttatgacataggtgtcatggacctagacctcctcctaaccgtgaatttatactgaaaccaacgaaaaagatgttgaatattcaggctgaatctacaccgggttctccctgccctcgatgtccagagcctgtctggaggccctgtgtaggccaccacctggcagcagagaaaagggtgagtctcaattctcttttatattagttatttcagatgcatgtccaatatctaacttgttaatttttatttgtggactttgagatcttcttccgacatttgatatgtttttctcttttcattggcttagatgatttgctctgacagaactcaatttgcatgcgataatttatgtggaaaccctcttccatgtgggaaccattactgttcgtatttctgtcatgccctggatataagaagttcatcattggataaaagaagtgagtcctgtgaaaagtgtgatctccgctgtcaaaaggtatcagttatcttttgtatctcaccacttactcgatcatctttacgctcgggtcttgattgcagttgggaatctgttttcacaataacttgcattgttccgatagcttctgataaacacatttttttttttttgataaacatatttaactccatgaagctgttaaaagctctctactgagtcagtcaattagccagtcttccttatctttcataccattgtacaggagagaacaccacgatgccaacatccatgtcctcggcgatgccatcctgaagattgtccaccttgcaaaactctagtaaagagatcatgtcactgtggcgcgatggtgcatgcattcgagtgcatatactacaatacaatgtcggagaaggaccaaatgaaggcgcgctcatgccgtggaccttgtcacaggtaactaacacgctggtactgtattattgtgtttcatttttcaatttgaacaactgatggtttccttgtggtaactcacttgttcccaagctttatttttatattttagtgaataacattattagaaaaccacacttttgaaactagaggatattgctgttgcagaaaattgccaaactgtacccatttgtgtccggagatatgtcatcctgggcagtgtccattgccagagaagtgtggtaaaaaggtatccatttgccagtttatatccatttgggatgctgtatctgttacaagtgagatcttacttgtctcgattttatcatggatcaaggtggttgttcgttgcaagtgcctaaccttgaagaaagaatgggtatgccaggatgttcaagcagcccatagggccacaggttctgatcctaaagaagtaccaaagaaccagttcggggttggcctcctcccttgtgattccaactgtaagagcaaactacaggtggctgaatcggtgttaacacagcgcaatgtcaaagagattgaggtaaacagaaacaataaaaagctttcagaattaatctcactcttaaagcaactttcacaagtctttcttctaatcaaacatcttaggagaaggaggagcctagcgggaaaaatgcatcaaagcgaaggaaaagacgtggacggggtcaggacattcaggagaccacaaggctgcaggtaattactgtctttaattagaa

SEQ ID NO: 72035 - DNA, 361 bp, Arabidopsis thaliana landsberg
aactcaaccagaaggcaaagaagcagaggatcttataagagattatgattggagcagctgttatgtgatgttctgaagggtgacaaggttggaaaaataaaggaataaaaccttttttttgtttgggcaaaaaggaaaaacaaatttcaggaattttgctttcgctcccctaatttattgttattattattatgggacagtcccagcgagacgtatttatgagtccgagctaaactaaagccctaacctgtaaatcgcgaccgaatctctaattttctggatggcgttggaggaagtgagaggtcggatagggcggtcctttgaagagatgaataaaacaagcaacatggactgcacgaaa

SEQ ID NO: 72036 - DNA, 615 bp, Arabidopsis thaliana landsberg
ttaacgagaccttcttggcaatgataacaataaagtataataaatgatataagcaaaatatttatatttggttctcaagtaatgaatgatatacgttttaaacagcatgaaaaaacaaagaaaaatgagaaagatatatggaaaaaacaattaacaaagagagtcaactaatagagaaccagtactatttgccaaagtttaggaacttactaaagaatcaattacggattctattttttaatggcatttataaattttattattttctaaatagtttatacattttgctatttttcacataacaaaaatatgatttaacatttgctttatctattatgtttggatttattcggttttatttgtttttagtgtttagtatttgattaaaatactaatttttataaataaaaatcataaatacgtacattttgaaagtattataaaatggcaaattcataaaattttagtaaaaataacatttttaaaatattttaaagaaaaatggcaaaatcaacaatgatccctaaactaagattttaaagtttaaacatgacataaccatttttttttttttccttttttaagaacaactttaaaatttcttcatcttggaat

SEQ ID NO: 72037 - DNA, 3682 bp, Arabidopsis thaliana landsberg
  unsure (1)..(3682): unsure at all n locations
tggcaatactgaacacgtattactttattttgtgtttgttttgtgccatataccaggtctgggggagaatttggactgttcttgccgaacatttcgtatctgctggtagccatcatgatgaaaagattgcaatgtatgccatagattctctgagacagctcgggatgaagtatttagaacgtgctgagctcaccaatttcactttccaaaatgatattctcaaaccgttcgttattatcatgcggaatactcaaagtcagaccataaggagcctaattgttgactgcatcgttcaggttgcttgcttgatctattctatattctaaaattaatatgtttccttggtttttgttactcggtagtatgcagccattatttcagcagctaatcaatctttttattttagatgataaaatctaaagttggaagtatcaaatcgggatggaggagtgtttttatgatatttacagcagctgcagatgacgaagttgaatcgatagttgaaaaatcatttgagaatgttgagcaaggtgacaaacagtccatcaaactattgcacttgtatccctgttttactcaattttctcactctttcgttttgataaatgtttgtgtaaccactcgtttgtttgcagttattctggaacactttgaccaggtgataggagactgcttcatggattgtgtcaattgtctaatcaggtttgccaataacaaagcttcagaccggataagcctgaaagctattgcccttctcagaatatgtgaggatcggcttgcagaggtttgtttttatagctaaatttagcttcaaaattcagcgttttactcttctattataacttcaatcctatgctctcccgttcgtatctacttttaggcctgtctttgaacttcctcactttcttttgattcttccctctgtaactacatgtgctcatttgcctgggatatgatgattctcagggacttatacccggtggtgttcttaagcccgttgatggcaatgaggatgaaacttttgatgtgacagagcattactggtttccgatgcttgccggtctgtctgatctcacatctgattataggcccgaagttagaaactgtgctctggaggtgttgtttgatttgctaaatgaaaggggaaacaagttctccacacctttctgggagagtatcttccatcgcatcttgtttccaatttttgatcatgtgagtcatgctggaaaggaaagcttaatatcttccggggatgtaaaatttcgtgaaacaagcattcattcccttcagctcctctgcaatctcttcaatacgttctacaaggtactgatgaagcttctacatttgctccctctgtgctcatcttgtccgttattactcaattaaatttcagggttgttgcagtacttgtcatgtttactgcatgaaattatacagaattttttttcttaacatgcaactttggacatattaatattattgcgtgctgcaaatttgaccaacgaatttttcacctttggagcaggaagtatgttttatgctgcctccacttttaagtttgctcctagactgtgcgaagaaatcagatcagacagttgtttcaatttcattaggagcattggttcacctcatcgaggttggaggccaccaatttagtgagggagactgggatatgctcttgaaaagcataaggtgaccatctttcataaaaaaaaattgtcttcaaatgttgctatctaaccttttctttctgttgccagagatgcatcatacacaactcaaccgctggagctgttgaatgctttgagttttgacaatccgaaaaagaacctagttttgacaggagacatagaggccgatgcctctgattctccacgagttgatcgtaatccggacgatattaaagataatgggaaagtgtccgcccaggcatctccaaggattggtactcatggtgcttccctagaatctgggataccgcctaaggctgatggttcggaaggttgactctaaactttttgtagaattttggatttatgcataaacaattttcaatattcacttatggtgttggaaaataattgttataataggacatattggggnnnnnnnnnnnnnnnnnnnnnnnnnnatttgcacaacgccatgttttgttaacatttatctttctcattaaaggtcgtccatcgtcatctggaagggctcaaaaggatgtggatgatgtgaatctgcagcggagtcagacttttggccaaagattcatggacaatctcttcctccggaatctcacatctcaaccaaaaagctctgttgcagaagtgactgtaccctcctctccatataaggtattttgcacttgcacaacttttcttccatttgatgtaccttactaatttacactcgtcacaggtcattccttttttcatagttctcttgtttttccgagtaatatgatacatttacgaattattttcttctgtagcatgaagatcctacagagcctgacagcagagaagaagagagtccagcattgggagctattagaggaaaatgcatcacacaattactactacttggtgctatcaacagcatccaggtatttagatgtcttctctgctttgctatgttgtatggtgttgcaaacactctcattccttagcacctggtccccagtaagctttaggggaaatgtgcgtggtgttgtgaactgacagttgcagctttcttgtttgatgttaattctgcagcaaaaatactggagtaatttgaaaaccccacagaagattgcgattatggacatcttattctctttcatagaatttgcttcttcctacaattcatattctaaccttagaacacgtatgaatcacattcccacagagaggttagtgaataagactttggactgagttataaatagatatttttatcgtccttatacatttttttctttaataggccacctctaaaccttctccggcaagagctggaaggaaccaccatatatttggacgtcttgcaaaagacaacttctgggcttgcggatgatgcatctaactcggaagatagactagaaggtgcagcagaagaaaaattggtatcgttctgtgaacaggttctgaaagaaacatctgatctccagtccactttgggggagactactaacatggatgttcatcgggtactggagctacgttctcccgtgattgtgaaggtaatacatcttaattgcttatgcatttgtcgctgagaatataaaatctatgatagagaggataattttcttatgtcattgtcgttccaggttttggaaggcatgtgcttcatgaacaacacaatattcaggaagcacatgagagagttctaccctctgctcacgaggctcgtttgctgtgaacaggcaagttattgaatttgtttctgttctagatatttctcacacaactgaactttgttttggagttagtttcgtactttcgagccacccattatgtaatcggtagagagctaactccacgagtgtttctgtctccagatggagataagaggtgcactagccaaccttttcaaagcacaattgaagccacttttgcaacagtaaatgatctatacgctatgatattgtggcaaagcaaaacactctcaatgtcatttacttccaacagtttgggtattttttttt

SEQ ID NO: 72038 - DNA, 436 bp, Arabidopsis thaliana landsberg
caattatgtgtacaaatagaatctacgaggccaagattattcttcccatctgtagttctattatcaacgacggattatttttaattttactctattactattaattatatagggactcaattccaagcgtattagattaaggtaaagtatttatccctcacacagacaaattttattggtctgttagcaagtaatattgcactaaaccatctctaagctaatcttaggtcttcattcgttaatggaaaaattttgctgccaactttaaatgcaaatagctctgttattttgttatgagatttatttactatttaatataaaaaaagaatatggcgaaataaattgaatagtggaattatgacttgcaaaatcaaaactcggagaaggtttggagcaatgagaagctcgaaaatgattgaaaaaggggtctatgtga

SEQ ID NO: 72039 - DNA, 554 bp, Arabidopsis thaliana landsberg
  unsure (1)..(554): unsure at all n locations
taggaaatcgatcgttcagcaccgatccgcccgtctgaacgttgaaagtggattcaagccgcccgctctccgatcggggtgcccagccaccgggcaggccaccggcgaacgggcgcctttaagagtctgtcgtagtttgacatgctaatgccgataggtctttcctccaaaccacatcaacccgcccgtccattatttttggtcacaaagccgcctttcacaacgccggaccgcggctgccggccggtgttggcggctcaggtcatggtgcttaaacgacgttgacggtccgccgccgacagctnnnnnnnnnnnnnnnnnnnnnnnnnnnnnnnnnnnnnnnnnnnnnnnnnnnnnnnnnnnnnnnnnnnnnnnnnnnnnnnnnnnnnnnnnnnnnnttgctctaccgctgagctaccggggagcggcctgccgaggcaggcgaagccgggcctatagcagcgggattccggccatggcaagccgttccggatgccgcgcggaattgggcgcggnggcaatcctgtccacgataagaagagcgacgacgggac

SEQ ID NO: 72040 - DNA, 513 bp, Arabidopsis thaliana landsberg
atctatccacctaaaaaataaggtattttagcacatttatcttggaccaaattagtgtttgtatcttgagttcagttataaattagattatgtttcaatgcaattttcaatacttactttaacttgttgtgactattgttcttgtagatagagataagacctcgcatcatctcttcatccaaatcagatttatttccgtttcttgcggcagaaataatcacaattgcaatctttttcaacggactcccattaggacgcttgaaccgataaaacggtagccctaccgcaaaaatacacagcgccgtcgctagaatcccaacggatatattgaagctccatatccaccctttcttttcctcgatccacaacacaacggttacggccaagaggcatccagagcatatagagaagtataaccaatcgaagaatcttgagatcagtcttggatttcttctatcaatttgatcgcctccatgagtaggcaacgatgcctttaaacccgcccgtactaat

SEQ ID NO: 72041 - DNA, 250 bp, Arabidopsis thaliana landsberg
  unsure (1)..(250): unsure at all n locations
ctgcataacaatggatcatgttccatttttnnnnnnnnnnnnnnnnnnnnnnnnnnnagagaccagacgaggcgtttgagtttacaaaaagtggttagcgacaaggaacagaggagtttcttgtccaagcatactaaatcacatgcatacagaagagcagtgatgcagctggtttaatcaagaaacagagaaagtgtatcctacccggaaatgccttattgcctatctggtgggtgtaaaaggattcctg

SEQ ID NO: 72042 - DNA, 545 bp, Arabidopsis thaliana landsberg
taaagaaagattcacgctttactcggactgacgcgtatgaggatgagaaaatttctcttgctttaccagcaggcgtcattctaattcattattcttgcggtgcaacttcccctccctgccgtactcggacttgcattcgctacctctcgctgactcaaatttactcgaatggttcttatttgcatcctccccaatttttatacatgctcatggtgcgttccaacgtctatacttgctatacatcaattgcgcagaaacttctgctgataaaggcgatgctagtgcatccgaagctgttcctgatgttactgactctaaagatactagtgagagtaaacgcaacgctaggaaaatgattcttggtgaagaagctctgaaaatatcgtccaaagagccatattgtctataccatccctattttcgagaggtcacttccatgcctccgccaccattattcatcgcaacggctatgtctcacctccaatatttcttccaacctgtctttgtcgaccggcatttctggctactgactcgatacttctttt

SEQ ID NO: 72043 - DNA, 404 bp, Arabidopsis thaliana landsberg
gagatgatgttgagaacgagagagttcatgagacgaacatttcggtttttttttctggtacgcttcttcagaacatggatgagagtggaaacttcgaatgtccacagcttcacgcaatgatgaccatattagcttatgttctcactatccttattgtaatgaaatgcttaagctacagaacatttgggcattttgagttgttaactctataatacttgcccatgatgcctttctcctacacctttatgaacattacgatggttatatttgcaaataaggataccgtaaaaccacttctactatgcttctgtctgcccacattacttcagccttattgtatacaaacgcctaataagcgttcttttttgctgcacatactgattttagatgaagcccaccgtgtg

SEQ ID NO: 72044 - DNA, 603 bp, Arabidopsis thaliana landsberg
acaggcaaatcgcgccatgcccatatgtaaaatcccactcaggcgcaggataatatgataagcgctgaaaatatactgcagaaaggtgtaaagatcgcttactccgctttcatcgatataaacataagccagcaacaggcggtacaacaacaggtggaccagtccgcgcaggaggtaacggatagctttttggcgtgtatcatcgtatgggcgtaccaggtaagaacctaaaaattctttaaaatccacaatagggaaaagggcgaaaaccaggctgggatacatgagaaaataggccagccggtgaatggtattgcctttgagacggttgtttttcagataatacaaatagctgatgcccctgaacatgaaaataaatcccagaaaaggggcgagcaagtacaggcgtgggctatacgcatatcccaaacgtaaaaatgccagggccagtaaaaagagaacaaaaccagcaattttgatgtaaatatttatgcggaatgaaagccaaacaaaggcggccaggaaaacaagcaggaggaatgttcccgaaaccagctgaatgcatataaatcagcgccacgcccaaaagcaaaaacatgcctg

SEQ ID NO: 72045 - DNA, 479 bp, Arabidopsis thaliana landsberg
gaaaaactttatcacaaactacccttcctggttcgtacattgggttctacgctaaaacacgcgcggttgagatgaacatgagggagtagctctttaatagggtcaagccatgccgaacaaaggatttgactgaaggctccaatgaaaagtccgggccagatggtataatacaaacaatggatcttgggatcgacgtaatgctattatatagggctatcaactataacaagacaaactggaagtaactatacctaccaaatgcacctgttataagaactattcttagatgaccctacaattgaatgagatgccgactaacatgcgactaaaactttacactcttattagaaccgataccacctgataataaggcttgttgaagcctatggaaagacagaagagttgggatcaagacgattaaacatactgagttacactgcacatctccgaacacactacaataatgatgagagaccgac

SEQ ID NO: 72046 - DNA, 547 bp, Arabidopsis thaliana landsberg
cgtcggcggcggcgtggccccagccgaatatcggacgcgccttgctttgcaacgcagcggcgcgaacgcgcagccacgcctcatgcgcgagctcgttcatgcgcgcgtgtcgttgctgctcttcgctcggtgccgccggtgccggctgcgcatgctgcgccggtatctcgcagcgatcctcccaccgtgcgccattgagccaggtcgcggcgtacggccacgacggcacgaacttgcggttcgcgtcgagccattcgtgatagcgctcgcgccgctcgatcgcagcgatcagttcgtcgagcggcggccgcaacccttcggctctctgccacgcgacgaacgccgcagccttcgcatcgccgcacggaaaccgcttgaagaacgcctcgaactccggcggataacgcttacgcatcgaccctcctgcgccgcgcagcggaaattttccgcgcgctctggtttctctctgttccaaccaccgttttcagcgacccctacccaccattcgcccctctccccccacggggaaaagaagcgacccacccct

SEQ ID NO: 72047 - DNA, 685 bp, Arabidopsis thaliana landsberg
gataccacaccttctgcttatttcatattaatggcttattgaaggttgatctttttggtgaatcgaatttcattgtcctcagctttttttgtagaaactgcggaaagatggccaaagtgttgctctaaggtctcaaaacgaaaagcttacaccaaggaagacgaatatatatgtggtggatacactaggttagggtttcactacttttagtttatcttcctagtgctagtcccttttctttaagaaccctatctgtgtctgcttggtttcttcaggtgaactaagggaattgtacagtgtcgctccaatagccgtcattggaggctctttcatcccgggcttaactggtcacaacttgtctgaagcagctgctgctggctgcgccgttattacaggttctcaatgataaaaattagatgcttgtatattatcactctttctctcctttatctcaacattcatggaatctttgattaggttgtcatgttgggcatttctctcacatggtgaaggcgatgcatcacgcgaaccccttatcggtgacacaagtctcgacaaaactagaacttaaagaaactgtcgacttgcttctgagttaccctgagatcttggcaacacatcatagagcttttaaagacgtttatgaatctttattaagctgcattatcactaacatctggaaact

SEQ ID NO: 72048 - DNA, 545 bp, Arabidopsis thaliana landsberg
  unsure (1)..(545): unsure at all n locations
tttagccgaacgccacccagattggcacatcaacgggtatggaaggcatgaaaggttccggaaccgcctgcaagtggcattgtgaaagtcgcgaaagcgtgcaacattcttgctccgcgaggctgggggattgtgaatgtccattgatacaatatgcaaaatggtgaaagaagcattaggcagtctcaccgtgattaattgcaaagaatcctgtgagaattttggaatgatacggacaatgcattcctctgcctgcaaatcaaattcgactaatgtgatagatccgattatcggagctcaaacgcccctagcttgataggcactaaagatgtcaaacaaagcttgcgggtgtcttacaatgaaattcgagttcatcggcatgcaggcctggggcggccatcttagctacgggattgggcggcgaatggttgcgaacggattctgcagggattttgaaaagtggtgaacaattatcagtccacatagactagttggcgttttaacacatagagcttcttaatgcgcnngatatanatgaanatttc

SEQ ID NO: 72049 - DNA, 375 bp, Arabidopsis thaliana landsberg
ctttgactacctgaagcaatcccgaagctcttgaaagttacgcgaatccgagatttaacatgcatcaatataaccatgatggcatggggaccattatgtttcatttcggctgaatcttgattgaaactgcaaatcaatttgaacatgaaaataggacatcgttctctcatgacttactgtgaaaatctatcggggttagacgtgaagagaaaaaaatcgccggccacactcatattcatgtctgtatccagattaataataggagactataccacaaaaggtctgaatcaacaacaaggtattcaaaaacaaagtcaaaccggactacttctttaccgctatcacaaaaaaaaaattcccaccaaacacaaacaa

SEQ ID NO: 72050 - DNA, 270 bp, Arabidopsis thaliana landsberg
ccatggccacaacaatgcatcctacggtctatgcgttacttgaaagcgactgtccatcggtccatactctaaccccaaaccttcacacatcctagtataaacttatgcatcaagtgggcggatcacgacactgatgcacgcccgccatagataccataaagcatagtgcctgcccagacgaggtccatacacggtgggacacgaaactcccgcaagagctatgggcttaaacctctagccgtggaacgcactcatccacaacatcacaga

SEQ ID NO: 72051 - DNA, 1337 bp, Arabidopsis thaliana landsberg
actgctgcattccctttgtggagtttttgtttctagacgttagacaaaataataaatgaatgtcacacacgtattcaatatcgaactagtactcattattcatttattcaataaaaccattattaccaaaccatacaaatattttttagattaccattatcatgtttatcatatagttatgaacatacagtcacatgaaactacaactactaaattaaactaaaattttactaactgacatgtaccaggtttgacacgtgcaaagactctgcaaacacgtgtgtggtaagaagaaagtgaactccacaagttggcaaaccactaaaataaatccataagaggaaaggtcaatttcttcatatagattattaaccagtccaacttttctctctagcttctacttttaactccagaagcaaaaacaattttaaaaagactttggttttggttaggttggtttcatataagattttcgagttttcgacaaggacctaaactcttagctactgtttattgtcccttagctacatatatatcacttaaatgacccaaacaatccctactctttctctctcgttattacttaactgccacttctactttgctctgatgagtttctttcattatcaaagatgagattaagtaatgtgatgtttttgaatctaagaatgtaacaatttaattcaggatcatggaaacaaacaagaagctagctactcaaacaagacaacgaccaattcagcagtcaatcacataaagtcaagacaactaaaaaggaaagacaaagacacatgaacaacccctgttcttgatatagctatcaaaagtagaaaactgatggtacccatttaacaaatcgtccaaacttgttccaacactctcagggacataacgtcgaacatttggtgtgcgttattattcaaaacaaatctctttcaacttcgtcgctgctgattcgtcaattgagtactgcaaatgattgagaacagacagttaacacaaagggtacctagatttaaaagaaacccagaatctttgttaccttcttgagtacccaaagtgagtgattataggctcgctggaagagttcgtcgagggatgtttcgctttgatcgacttcacggtaattaacgaaattctccctggcgtacttggcgtaatacggccttgaatccgccggcaaaagtctcaccagcctcataacgccgccgtatactctcagcaccttcttcattttcgtttaccttctgcaacacgttacccaattctaggactctaatactgtatcataaacatccatgggctcttaatgggcctttaataataagcaattactg

SEQ ID NO: 72052 - DNA, 771 bp, Arabidopsis thaliana landsberg
tcccattattggtgacggaagatgagaaaactcttgtcgcttgcataaattgtttaacgaaggtaagatttatgaattatacggtatattcgtgtttttccgagattgttaatacaaagtcgcatgtagatataatcgtcaggtctcactgaaacagtttcattggctcttgtgtacagcttgtgggtaggctctcgcaagaggaattaatggatcaattgtcgtcttttttgcctgcggtttttgaagcatttgggagccaaagcgcggatgtccgcaaggtaaaggaattgaaaaaaaaaacttgacttttctactcataccagtaacttacgatttgatgaaattggacaagttataactaactctctatgagggggtctttgctgtttgttgcagacagtggtgttctgtctagtagacatatatataatgcttgggaaagcatttttgccgtatttggaaggtctaaacagcacgcaggttcgtctagtgaccatctatgcaaaccggatctcgcaggctagaaacggtgcccctatcgacgcagacacctgacgagccgcttgtactcatggttcagtgggtttatcttgtgtcttggggtcatattcattattgtttattttgtatatgggtgtgttttccgcgtttcaattttttgggtgtaattttgcaaattggtttttccatttgttgttgcaatgtgtggtctattttgagttgttttgggggaaagtatttattgctttcctctcggaggacaaaaaa

SEQ ID NO: 72053 - DNA, 585 bp, Arabidopsis thaliana landsberg
gagccgtcctgcaaaccactggttgaggaggacatacgcagttgtcccgtagaggagggtcctgagccggaatagatatagacttggccggcgggggtagaaccgttacctccagagataaccacattaccaccgggaccagcgtggctgttaccggccaaaatgtcgatatcgcctcctcgtgcacctcgactgtaggcgtcactacccacgatgctaaccaagcttccattgccttcgtgcgtctcacctgccgcaattgtgatggcaccgcccctgccaaggaaggccgagccggtggcgatcgtaatgttgcctgcatcgccgtgggcaaccttgttggtgcgcatggtaatagagccgctattacgagtgaacacgccgagatcgttactactggtgaaagtgatgtgacctccgattccgctgtcactggattgtgtgacgattgagaagttgccagagttcagctcggaacttccagccaccatttgaatggatcccgccgcgccgctggtagagttgcccgtagaaagcagaatgctgccactcgaggagttgacggccgagtttgtgaacactgaa

SEQ ID NO: 72054 - DNA, 346 bp, Arabidopsis thaliana landsberg
catgaatttatgtgtctaaccatggttaaattctagcccattcaacatatggagaagtggaaccatggttaatttaatataaccctctctctctctctcactgtgactgtgtgtgggaccaaaaccatttcatcattgagaaatgatggtgtttctcgcactctccctttctgtctatacccattatcgctaaagaggaatcctactacctatatattcatttaaactaacaaataatccctaattagattgtcctaagattttgtgttcttataggcatatacaatactctacatatgcattaacggatactataatcaggtatatccttaatagatgattaaat

SEQ ID NO: 72055 - DNA, 1773 bp, Arabidopsis thaliana landsberg
cattaagagcttctaattagtgtgttttcccttgattctggattgaattttggaattttaggtaggcagtttatatcaagaagcatccccttcgtattcaattcctggatcgtcaggcatctcaccgaacgagactatgcggtaatgaatctttgttcaccagttgaatgtttatcttgttagattttgccaatgtatttgctttaagcttgatggaaaggatttattattttggtagttgctgtctttgtatgcatttcttatggtaaagattgtgtttttatggactcttaggtgaccgagaaaacagttataaagtcatgttttataagttttagctaaatgcttgattttaatctcgatctatcttttctcattgaaatgcagctctacgctatccagttccatctttttgttacttgtgtcttgtttctcagccgggagggatttcggcgcgcttgcttgcgggctggcaccaaacggtatgcataatgcagtttgcgctgatcccgtttgtatatttggtttttgactgagtttttggtcagtgatattcctcaacttcgtgcttcagtgatggtcctgaatcagaggaaaatgtgactaggatattgaaagtagcatgggtgacagttccactcgggatagctattactattgcagcatgcatttttgtgttatggtggcagaaccttagttactccgacccatatgcacaggctatctggattcacggtatattgtggtcttttttgtgcctttatcatagttctttagcttacagccttggaatttgaaagtttcggttttcggtcatacttgtgtctgtaatcaactcaaggactaacctactaacgtggcaggatttgcatgtgtactggagcttatggctgaacctttgtatatcctctctcagacattgctgaaactacagttgcgactcattgttgagaccgtagctacattggcacggtgtgtaactctgtactctctcctagtcatgcaaaccaacatggtacagtccttgtactattccatcttgtttcaggcaaaataaagcatatattatcgaacttaaggttatcttcaacatgttcaggaaaaagtgataatcttcgcattgtcacaagttgcatatggaggttccttgtttattgggtactgggcctattttctcatctgtggtgtttacagaagttcgaatctctttcctttcaggtatgagttctctatcatttgatctcctcgccagcattgttaactcttaatatgctctaattagttctatcataaatattaatgttcaacaatttttgtgatgtcacagacctgggaacttcatggattttgataatgatctctcgaagatgtgtaagctgtttacttttcagtccttccgaaagttaatccttcaagaaggtgaaaaattggtcctggtatggttagatacaccttataaccaggctgtatatgggatagtcgacaaactaggcaagtctttttggtgacaaaatgcaaattatctacgggtacaaatgttgcctagaaatgtttcttacacagttcttaaaactccaggtagtttagttgtacgcatggtgtttctcccctttgaagaaagttcatacactatatttgccaggttcgcatcaggttcatttctctcctgagtgtagttaagtatggaataaatctcaattttagtgtttcatggtattggttcagagatttctcccaagatatttactgttcattaccatatatggtttctat

SEQ ID NO: 72056 - DNA, 459 bp, Arabidopsis thaliana landsberg
  unsure (1)..(459): unsure at all n locations
cgcccgtgctcgcgcggtggcggccgtcgtggttgcgttactgcccgctgagcctgtccgggttggtgatggtgcgggggcgcggtgggtgcgctgtaccagagcggagtctgggcggcgctagaggattcgccggtgagccgatcctggcttcaggccgctgagcagttcggtgtccagcagagcctgacgctgatcgctgccctgctcgtggtggtgtccatgctgttggcggtgctgcgctcgctggtgacttacggaaacctgttgttgtcccgcagttctgcggcgggcggtgacgtcctgacgttgagctacggcctgctgcgggtgcgcgaacacaactacgacatgcgccggttgcgcggcggaacgctgcgccggccgctgctggtgcggttgttncgcggcgcgcggctgggacgcgcgatgaccggtgtcaacggngatggcgagtcg

SEQ ID NO: 72057 - DNA, 530 bp, Arabidopsis thaliana landsberg
ttgcgtactacccgccccatgcgcgaaatttcacccatggccaccgtgcctgtgctgtggttgcctgattgcaccgtggtcgatgaaagcctggacgtgatgcgttgggctgtgcggcaagccgaccccatgggtttgatgaacctgcagcccagtgcgcttgaattgactcagcaatggttggccgtgttggatggcgagttcaaacatcaccttgaccgctacaaatacccccagcgctatgaaggtgtagacgcgctggaacatcgccaggccggtgttcagattttgaaacagtggggtgccgcactgattgacagcgattggctgtttggaaacagcatgcggtttgccgatttggccatcttgccattcgtgcggcagtttcgaattcccgaaccgcaatggtttgattccaacccggaactggctcccgtggtggcctggcttcagcgttttttggccttgcccctgtttgaaactgccatgcaaaagttcgagcccctgaaacccggcgaccctgtgttttt

SEQ ID NO: 72058 - DNA, 617 bp, Arabidopsis thaliana landsberg
  unsure (1)..(617): unsure at all n locations
aaaaaaaaatgccaaacgggagtccggatcgtactcgtaaagcgtaagcgtttggctgctctggcatgaaaatcgttatcttttttctttaggtaattactaatttcctttgtctgttgatttccatactctgtatcctgtctttatgagtgtgttnnnnnnnnnnnnnnnnnnnttcagattgtgaacttgatgaagttccagatgatagaaaagtagcggagaaagacactgctctacatttagcattgtnnnnnnnnnnnnnnnnntttgataaagactctaagttgtcattgcagcggttttacagaaaaaggagagtttctgtgatatccacgggttccctcaaccttgatctagctcttggagttggaggattgccaaaggttgttgttaatttagagtctcagataggactagccaagctaaaggtattgcaattaatgaggtctctaaatgtgtgtttacaagagaactttgttggtttttgtgtagggaagaatggttgaggtttacggaaaagaagcatcttggaagacaactctagctctgcatatcatcaaggaagctcaaaagcttggaggtacttgtttttgatcccattctcaatacatttg

SEQ ID NO: 72059 - DNA, 563 bp, Arabidopsis thaliana landsberg
  unsure (1)..(563): unsure at all n locations
ttcctctttgtgttttcttcttcttcttcctcatcgacccatcccatattcctatagacaagcatacatgataagattcatggatttcaatttatcaaatataaatcaattcttaaactgtgtaattaaaatgtagtttatatatatatatatatatatgcgtacnnnnnnnnnnnnnnnnnnnnnnnnnnnnnnnnnnacaatgcagacttgacacgaaaaatcaacactccgggagtcttaaccgtcataggatattgattagtatctgtaaaagtatcggtcccgggcattcttccaagcgtttctatccctggacgaattgatatgagtatgatcttggcaaacgaaataaccacctagcaacatagaagcacacaaatcatttaaactcatctataaatataaccaaaacgtacgcttctaatttattttcataaacttaaacttgtgtgtcaagtaactntacacctaatgtattatacgtaccgcgacaagaagtccgatctcaacggaagcgaataaaacaccaaagaatgctccaatgagagcaagaaaatcga

SEQ ID NO: 72060 - DNA, 1484 bp, Arabidopsis thaliana landsberg
  unsure (1)..(1484): unsure at all n locations
ctttttttggtgacgaagagcagaccagtcaaattctgtttgccagttgagtcggcaaatccttaaagtggttaagggccgatacgtggtctacgaatatttgtattgggccgatgagcccgtcttctacgtcaaagttatatcttttttttttgtttcaacgacaccgatgcttatgaggattttgaattcggttgccacaatgctataagtacaacaaagtacaaaccctttaagttttatgctttagtcctataacaagtttttttctttttttcgttttatcatttttcagttcgtgcatgttttcttttcactcgaggcatactcaaatttgttgttgttccaattttattggacgtacgtctccaaaacatttcctagtgccagtggaaggaatcaataagtgggataaacaaggtacataaacatacgaatagtaacgatatatataagaatcggaaatgatatgcatggtaatacatatgccaatacttgtgattcctaatatagaaagtgaaaccacaggtccacatcatctctcttcaatagcaaaagaagagtgatatctactatatacaagcatgtatatatatgtaacgacaaaacatcgaacacattattatcataagttcagaatcatgaaacaataagcaataagaatgatttagggtgagtcaccgtaattatctccaccaccgtatccgcttccatacccttcaccatatccacttccatagccggatccatttccgcggctacctccaccaccacctcctcctcctccaccgccgcctcccccaccaccacctctaccagcaccacttccatatccagagccgcttccataacctgacccgtttccggaacctccatttccgcctcctcctccaccacctctgcccccacctccaccgccaccaccgttgtttcctcctccataaccactaccggacccataccctgacccgtaaccactccctgaacctgatccatcttcaccaccacctnctccgncgnctccccctacgacagcaccacctcccccaccaccgttacctcccccagagcctgaaccatatccagaacctgaaccggaccctctaccaagagcttttggtgatctagctgctaaacagacgtcaaaaacaactaaaacaaagaaagcaactcctaagtacttgaggcttcccatttccacaacttctttattaagaaccaagctatgtcagccacaaattaagagatcgttctttgtgaaagttttagaaaaaagagctagctagagaagccgtttgtaatttagaaatcaattcgatgatctatggagagaatgttggtccgcgtaagtatttataaggaatcgaggataatggaaacgtaagagtcacgtaagttctagtagcttcctttgaccaatatgtgtgaacaatggtgaataaagtgggcctgcgatcttagtgctcttgtaggtgaagatacag

SEQ ID NO: 72061 - DNA, 519 bp, Arabidopsis thaliana landsberg
tgcgccagaccgccgcgatttgcaccgatcatgtctcgctcgccccttttatcatacgatcgcgcatcgcacgcaaatgcggaatgcaagcacgcgcagcatcgccgcatcgaacacgcgtcggatacgcataatgcgagcaccgattactcctcgcaacaaagagcgcgccggatgcggcgcgcccagtccttccactttccatcgatctatttcagccgcttcaggaattcctccttcagctgcgccgggttcgcggcgcccttcgactccttcatcccttgcccgatcaggaactgcaacgccgcctcctttcccccgcggtaatcgtcagcgaccgcggcattggcgcgtgatcacccggtcgacgatagcccgggagatccgcagccgagttcgtctgcaggagtacgcgtgccttcgccaccgtcttcggttccccaccctccttacagatggcagccagaaggtccttagccccgcgcgatgacagcgctccctccccgccatatgcatgat

SEQ ID NO: 72062 - DNA, 151 bp, Arabidopsis thaliana landsberg
tcttcgttacggtgggataactctcggagtacatgaacatatcgtgggggggtttaaaaaacgcacggttgtttgaagggctactcgaaggctttgccacccgattggttccagtggctagccgggaggtgtggatgaccatgggcgacac

SEQ ID NO: 72063 - DNA, 710 bp, Arabidopsis thaliana landsberg
accccgtgatgtactcactaaatcaaaccttgatggaaaccaatcaaccatgtagaatactagaatgtattgcagcaaattgtttgattcgtttctaccaactatctagagagtccatagttgtacactgggcctcaatgtaccaaaatcaggcccattatgtgatttcttctaccctcatgtacaaccgtttcggttgctgtgcaaaaacatcgtcgagcattcgagaagttacttttctcgtacaggcgacacgtgcaaatacgtggagatacgtgtcaattagaagctaaaagaaaaaaatgacaaatctgatgttacggttccacatccctcgcaaagtgtttattatgctaagtgctggttaagatttgatgacatatgaagagaggaggaaacaacaccgataagtaagtaatgacgaatcttttggccttgtgtcttgtcttgagcactttactagcggcggaggtatggtctccgagtccagccatgaccacccacaacacggcggtggcgtcagagggagaagtcatcgtcaaagacggacaccacgttgtggtggctgagtaccaacgcgacgggaaaaccaataccagagtctcgatctcgccaccatcggcagattaaggaagagaaaaagagactgaagtatagatgggaacttctatgtttagaaatgttaaagagaaagcttaagaaacggcgtc

SEQ ID NO: 72064 - DNA, 296 bp, Arabidopsis thaliana landsberg
caaggcgaatagcggggagaggggcgatcataaaacaaccaactcacttcgcgagcacatcaataggggtggctaatgaagtacacagccgttgtgaagacaagaaaaagaagtcggaccagaagcaaacaggaatcacaataagaaacactcagcaagaggagcatggcaaagacttgcgggaagataagatacgagatcatgagaaagacgacaagaatgttggagagatggtgagagacagcaacagaactgaaaaaaagtgcaagctaaaagacaaaggaataccatcggaa

SEQ ID NO: 72065 - DNA, 296 bp, Arabidopsis thaliana landsberg
ctctatcaacaaattgatcgttttgagaatattgatatctctttctgatttaatgtttaactctgtaggaccttaacaaaagttttgaaatgattgtaacactattgtaaatacactaaaaatccttagagacctattgtacattcattaatacccttgtgaaccatctaaaaacttgggataaagactttaataattgctgaaccatcttaaagcacttgtgaacctttcaaaacggtgttataaagacgtacacgagtttgtggcggaaaaattgtttgtgactactacacgtg

SEQ ID NO: 72066 - DNA, 529 bp, Arabidopsis thaliana landsberg
  unsure (1)..(529): unsure at all n locations
aacccgcttgaaggaatctctttcccggttagctatgtctggagttcgtgttcgtatacaagacgttaagaatctctctgttatatgccccaaggtgatttttttcccctatatcttttaagtatacctacttattctgtgacaagaagtttttatatgtaaccgccaatggttgtttgtaggtagtaaaggttatcactgatgactatgaggctgtgaactatgagaacgctatagttatagctgactatctggagatggatgaaaaatcaggtcgtaaaaaaattcctcttgcaaagctctttagtgccatgaaaaaacgggaggcttcctttaagtctgatttctgggagtccatcagatcgctactgaacaaaaatacaggtgagagtggaatagctatttccttggagggcttgcttaaatctgccagtgaaggaagagctgatggtggaaacgaagctagacaggctgggaaaggcactngtnctacctctggttctcgtaaattccagactttgtgtcatgc

SEQ ID NO: 72067 - DNA, 507 bp, Arabidopsis thaliana landsberg
  unsure (1)..(507): unsure at all n locations
taaaagcaaaactggttcagcacctggatgcaccgtttttgcgtgcattcttcctggatacacccgtgcgttttgtcttgaagctggtaaacaatttcctggccaatgcgcgtttcgaggagaaattgctggagttattgaagtattgaattgagcttttagcaattagcttttagcttttagtaaactccccaaaggctaacagctaacgatcatggctaatcactttccaattgtttccgcgagatcgcaccatccaccgacaacttaccgctttcgttgatcagggtggccaaagccagtcctatcatcagcaaatggtactcaaatccttctcctttttgatttccgtaccagttcatgaaaaatccattgtcgatnnnnnnnnnnnnnnnnnnnnnnnnnnnnngcacaattacacagatggcccagatacggctggcaaaacccaggatcagtgaaacagattcaaagaactcgttgatgatcactaaaaattcaatgatc

SEQ ID NO: 72068 - DNA, 435 bp, Arabidopsis thaliana landsberg
attccgcggaggttttagggaggacgttgagtggaagacctttgcttttttctagacggtattttcggagaatgggttggcaccgagtgaggcaggttcttttcttgtgccttgatttattcattctttggattcaagaactgttcttggtttgaagtattttgtgtcattgagaagcatctaatgaagagtgaattgttatgtggcagatcaaacaacttaatgagcctattgaagttaagataacagagtggaatactggagggcttctcaccagaattgaggttgctgaatttttcgtgctgattttgaggatttacatcttgctcacaacatagctcattgttggcttaatttatagggcttgagagcttttattccgaagcaggaactggtgaagaaagtgaacactttcaccgagttgaatgaaaacgt

SEQ ID NO: 72069 - DNA, 745 bp, Arabidopsis thaliana landsberg
tctaagtatctaacattatctcattgttttttttaatagttactattttcttacttagctaagttggaaagtcagtataattttataaagatgtgttagtgccatgtatgatcactacccacaatcacactaattatgtcccaattcctcagacttaaacatttgacgacttagaaatcatcgcattgcattgttagagtgcaaggcttttataatcttgtgaagttttggttaaagtttaataccaaaaaaaaagaggataaattttgcagtgtcaatttttatagtaaatctacgacgtgatctacccaccgcagcgtacaacaaaatataaaatcaattttaattatttttgtaatttatccaaaacacacaacgttttaaagattagataaatcgtacgttgctattttcgctgtcacgctgtgcccatttgtacatatatataaatccaagccacacataaattagtactaattttttttggggggcataaattagtactacagtattcacataaaaccaaatcaacatcttttttaatatatataaatccattaaaagacatgtacgggaataaaataaaaataaattaccgcgttaataatgtgatgtacgaaagatttcattcgcttgttattttgattttttctgatgctgtttcatggaagcttcttttggtgtggaaaaagagaaggaggaaggaaagaagctcgttaaataattacgaaatcaaggttctgtc

SEQ ID NO: 72070 - DNA, 513 bp, Arabidopsis thaliana landsberg
agccgctggtgtcggcgatattcgagacgacgaacccgaacatcaagaccttttggcaggccctggctgaggttgcgccgcaatgggccaagatgcgcgccatggcggatcgcggcgagctggcggcgggatcggacaccacggcctatctggtcgaggccatgaatttcgtgcgccatgtgcgcgacaaccggctgaacatggctgatctggtcgaaaagtggcgcgatcagtcggacctgttcaaggacggcgacgctttgtcgccggaagcgcaggcctatctgacgctgatgttccgcgacgaaacctatcgcacgcaacgcagcgccgaggccattgcggcgtcgctcaatgacatcgtcgaggccgcgatgcggaccacgccggatgccaacctgttcgggcaggttgacacttttgacatcaacgcgcagattagccgtctgatcgaccgtgccgccaatgaggatgcacaccatgtcacagtttacggcgcgagcgacgggaatg

SEQ ID NO: 72071 - DNA, 2074 bp, Arabidopsis thaliana landsberg
gcacctctacgtctcttcctggttccttcatatggcaaggcattaacataacgagcaggtcttattttaggggcgtgatgaccttcccctttgagggctacccactccttaagcttgtctgttcctgataaaagataatatcaaacgatcaaccaatcaattaataaagcaatggagcctcttcgtaggagcttcggcaatcagttctgcatccttttaaataattttacatgcatataatataataatggaaaatgggtgattgcataacctatttacttatacttggaagaatttgagcagtaaaagatctattgatgataaataagatttaaagaaaaccattgatgataaatacaaaaaccttgttctacagataggtcactgaacaacacgtaagctttatcatcctctaagctcaatacattggcagagtaccatgcggttcttaatccaggttcttctttgaaaaccttcaaaaaaatttatctccgttaaaaaaaaatgacaatcaaccacgagcagttagttatagacagtgtaaatgtagcacaaacctttacattagaaccctccttaatgtcctcattctttgatgctttgatagtctgttgggcgtcaattgaaaattttgtcccaacttctggttcaaaaaccacatcattgtttttagccaagtctgcatatttatcaccctcctgtccctttaactttccagaggcaggaactggaccggacacaccatctgtcgtattcacagagccaccaaactcagtctgcacaattttgggaccagcaaaagttccctcactagtagacacagtttctttttctaagacaaccgttctacagggctgtactttctgagattcttgagcctgcctccagtaattacttggacccgcctccaccagcttattgagcaacggaggatgacccattgaaacaagtattccagcttgagaagcagcctctgatgccaattctgctgcttttacaatggagtccatattttcagcacgcttggtggccgctgtagcagcttcaaccctcttcttagatgcctctctcgcagcaataagaaccgaactggagttcaccactgcaccttcacccttcaagatagaagcaggggtaccctgacctggtaatatgctatcatatgactttgggagtccctgatcagaagcatttggaagggatgcttcttcagccattaacttggcctgcaatgcagcattagctgcaacattggcggcagcagctgcagcttttgccaccgcagctgcagcagctatggcaacagcagccgaagctaatctgtcttgagtttctggctggaggccagcatgactttgttgctctatctgcttccatacatattcgctatgactaacagctgcagtagcaagagcagatgcatcctctgcatgcatcttagcctccttaagtttttcaatagtatcctctgacaagacagatctctgctttacttcaggtacaaggttaccaccaaaaattggagatgggaaagatgattttattttcttcccggggaacgtagataccaggtccatagggactgcagtcatagaaacaacactgggcagggtgccagcattataacccagattagccggagtaggtgtaaaaggcacaagaggtgaggcagctaattctgtctgctttaacgaattcaaaatgtttggaccagactccacagagactggcatcttcttccgtttccttgattttacccttgtagaatgttgagcaggtgctacaactgtactagtaggctcaagtgttggtgtcactttggaaacattgctagaagttccactctgaacatgttttgcgccagaaagagtcatggatgattctttcatgggagtcaattttacagggtcagtgattggatagacggggaaacgggaaccaacatcaaatccactggtttgctgagaagcaagccaagcgttacggaaagggagaggcgacatccaaggggtattatgtccaacaatattttgagatgcaggagtttggagagcatgcgaggcataaagcactg

SEQ ID NO: 72072 - DNA, 612 bp, Arabidopsis thaliana landsberg
cagcatatatcatttacatgatatttaaactgtaaaactcatcactatttaaaactattaaacgaacttcaaaagtgtttgcaataaaaaaaataccacttatatataaaattcatatcagattagattgcataggttcactgccaatccatggccaacatttctaaatgatatacagtacatgaaagactattatattcaactattcaaagttatctgatggaaaattattacatgaaatcaaataagtagttgaatctggatgatcgatctcaatattcatattaaaatggaacacacttttgttgttagagtattgatataatgcatgtaacgtgaaattgcaataatgcatcatatataggtttatatagattaactgagagacatcacttgcgttggttactcaataattacgtagctaaaattaataaagcggcgttaaggacccacccacgagctctatctatatatttccgtggtttttgtattcgaaacagaattgatcacatacgtccaaattctgatttgttactggcccactacttatccttacgcgcccgaacgcgtgtccttttaattgactttttatatacccaaatatcagaccaa

SEQ ID NO: 72073 - DNA, 505 bp, Arabidopsis thaliana landsberg
cgatcttagctactgctttctgggaatgacatttccaaaggaacttccgcgctggccccagaagttgcactggactttcgcagtagtctgattgaatacttcttcccaaacaagggaatttccttacaggccgtccacccgccactctttgccatgctagcatttgatgcaggtgcgtttctgaaagcactggaacaagcacctgggttgaatgagtcgtttcaaatattccaatggctggttgttgctgggctggattccaagttggaggaaaaggtgcgcatatcaattatcgcgtatgtgttgcatgatgttgcgcacatcagacgatccaataatgaccaagaagttacgttggaaactgtgctcacttcagagctgagtgaaaaattttttgcggatgtgtatatgaatgctgaactcaatgaatgtgtcgcattggtggagcgtttctcgtctaatccaagctggttcttacagcaacttgtcatgcttggtgaagaga

SEQ ID NO: 72074 - DNA, 221 bp, Arabidopsis thaliana landsberg
gctgacgaataacaccctgatcggttctaaaaaggggacgaccagctgttggaaggattcaacctagaagcattgatgactgccaacccaaaagggggcatgcactaccagaacatctgctatcaaacagcggcgacccgtaccgaattgttgctccggcaagctcgctcacgctataggaacacacatggttatcctgtgaacctttgggttaactgttc

SEQ ID NO: 72075 - DNA, 479 bp, Arabidopsis thaliana landsberg
gccttcacaatctttcctagtctcatcctcaccaccatctaatatatgtagaagatttgaagatagaaaaaaactagttagatcccacttggagtgggagataaacattatctcaacaacttaactcaagaatacagtatcccaacaaaaaagttaagagaccaatcattttttttacatgtaaatagttaatctgtaagataaaaagattgaagtattgaactaatatatagacatgtaataatgtggcaaaagagggcagatagagttgaagaaatattgaaccttaaaagtgtggcttgtcgatatgagagaagatgaaaaggggggataatacatatatgtagatcatatatatatattgtgtgtgtgtgacggaggctgatgtcaaaggttgtgtgacttgtgaagctatgtgagtctcgtgaccttattttttcaaactttagccaatggttattatttttttttaaatagct

SEQ ID NO: 72076 - DNA, 316 bp, Arabidopsis thaliana landsberg
  unsure (1)..(316): unsure at all n locations
cagtttaaatatgtataatgtaaaaagatattttaaatttttaaaaagtcccacaattttctcccgggcacggggtnccgatgtcctcctaaaaacataatggaacttcctttcatctggatctgaccaactttttcttcctaaaaaaagtgttatttaacggaccgttatttcaaatggggtttccgttgaattcttcctttacccaacggtcattttaacagctttaccatcttttcttactttatgaccgttaacagcatcgccggaactatcttcttcactcttggcccccgttaattcctggtaattcttt

SEQ ID NO: 72077 - DNA, 1406 bp, Arabidopsis thaliana landsberg
atatagtatatgtagacacaaaaaaagatctaacccaacaaaagagaattaccaaaacgtatcaaagatttagacttaaattagggcttaaacatggattaagaatagaaccaattatagtagtataagttaggagtgaggaaagtcgtaatcgaatacagctacacacgagcgtagcgtgcttgaaagagacaccaaatcctgttttagtggggaactttcttactttcactttttcccctcttttttttttcctatttaagaacaattatttggggtttttactcttttattttccctcatgttttttgattttatcagtctcttccagcagccctccaggtgtaactggtcacacattcgcttggcttacctttaaccaggtgtttctccttcttcatagattttagggatgccaattttcaatactacgttttaagttcctataccgtaatttatggttttattcgcatataacagtggcatttccgtttttttcccacaaagtcagattctcttcaaattaaaatttttacataactacttttcgtattaaataaatattttagaacgaaaaagatcatttagatttatctcttttaatttttattcataaaaactagttaaaaaattaaaatagcatatgattattattgagataacaaaattctgttgagaaaaatccaccgaacatatattttagcagcccgtttcaaaacctttacaattaaattgattaaattaaacaccatagaaagaaagagacgtcaaagaaaggatctcttctgagttctctgactcaatttctgagctctctataaatataagctctcttcttcacacttttaatgcaactctcaatatcactattaaatatctttctcttttctcttcttcactttcctcgattcttgagttttcgatccttttgttctctaaccaccggtttcctctttaaccggtctctggataatcatcataatcattaggatcatcaagataaggaatctttttgagtatatctctacaccaaatcgaatctatggatcaaaaagttagacagtttgaggtttgcactcaagacggtagcgttgatcgtcacggcaatccagctatccgagctaataccggcaaatggctcactgctattctcattctaggtaatgattctctctctctttctctctatatataccactgttctttgtcttaaagtgttgtgttttggattctaaagaaatgggtttttggttgatatagtgaatcaaggactagctacgcttgcgttcttcggtgtaggagtgaatttggttctgtttctgactcgagtgatgggacaagacaatgcagaagcggctaataatgttagtaaatggacaggaactgtctatatcttctctttgcta

SEQ ID NO: 72078 - DNA, 2591 bp, Arabidopsis thaliana landsberg
aacaaaacttcgacaatgttattttttgtctttctctcaatttctttctctccccattggtcaaaaaaggtataagaattaataaaaaaattgtatttttgtctttctatacattaggaagatgacatgtgtacctgagctttcgatgagaggcaagagctttttgaagagcaacatcaactcttgagttctctctgaacaagctggtcatataactggcaaacaaactcagacacttcttcttgatcatcttcccaaagaccacaatacttaccgtctctgtttgttttgtcgtggtcgctatcttcccagtcacttgtcggtgtcggagggtccatctcttccctttccgtttcctcgtttacttcttcatcttcgtcttcttcttctccaatctcaaacttcccgttctgatctccaatgttgtactcagatgagccttgggatgtgattagtggtgtctcttgtggctcgtttgatggaccaatcacagctttggcaccagagtccaaaaaggctttaactacagcttgtgttggtccaaatgttcctgagaagactattatcctatctctccatgctcctacctgtttcagataagatgttcatagcataagacaaacttttggccttcttcttattagccttccttatgtttatcactagctttgatggtttgggttttgtacccgtcaaacaaactgaacataagtatacggacaatattttcgtagaagctagccttttaaggaatgcgagagtaaatatatgtgagcaaaagctagcctttcggcaattttaggtatacaaaagtcaagtaacaacattaccatccagcgaatatcatcaggagtcaagtgtgccgaaggtacagttctgcggaacataaacgatgcaatttcttgatcatcttccatcacctacagtatattaacaagtaacatcaaaaataaaataaagctttcaacgctataacactaacaccacaaagaagttaatatgaaaacatattcttactagggtctggcgtccaatataacggtggatgatatttccaacttggaagcatttcttgctacgcaccaaatccgagattgaacagatattggaaagaactgatgcagcctttcggcgattactttgcatgactgacaatatactgactttgacgctttggagaaacttatcagctagatctccaggttcagcaaccacaaatacatcattttgccaactaaatgaaaccaaaaagcaaatataatcaattcactagaatcaacctttttagaactgagtgtgatatggtggaaactgaaaattttggactaacctcagtatcgaaccattagaatcattttgaagtgagagatgtaagatccccacttggggtaaattctgtaacttttcatgcatctgtcgtagtggaagatagagttgtctttgtcgcggaggagatgatggaggcgacataaccgtcttcccaacatgtcccccatccaagctaagtggcggaaccatatcaatcctattgaacttttgtgggccaagctcaggagtgaagagaagggggctcggaggcaagcttccagttataagaggagaggtaaatggtgtgggaaaagcagttcctggagatggtttttggcatccaggagtagcagtagtatgtaatgaggataactttattccattattcgaacaaaatgactcgagcgcacgagcatgatactttactctccctgagtcaggactatgctgagcctccataagcaaaacattgcgtctccatccaagagaaggactgctctctactgtttaggaatgaaagaaaaatgatagaagttactaagctaacagtttgagaaggttttgctgaaaagcaaataaattttaaaatagatacctctgctatttggtagctttccattcataaatcgtggtttcaaattatcacaccatttctcatcgtttaggaaggggagtgttaatctctcgcatacgtttttaaatacttggggattgctttgtatgaattcttcaatcgcagcttccaattttagccagatcgctggatcagtctcatccaactccattccacagcgatcgtcaactgcatatacccagatatgtaaagattaactagattctacgtcaaaacacatgcattatggaaatcggcatggataagaaattcaaggtttcataggtgttcaacaggataagagtgttcttgcatgttgtaaaatgctgtttgttacctgggttgaaccgaaaatattgtatttctggcaacatagggagcaatgtgcttagagcttcttcaacacgttccactgagcatgcactctcaatcagtacttgcccagtatctaaataacgccatccacctttccgtacctacaagggagttagatcaacaatgaaaaataattacttaacattacaaggacggcaagattttatccaccatatgtatttcagtggttttccaacataaacatagattttgcacaatctggagccacaggaaaaacgggaattacccttgttggtacagagccagagccaatcgaaaccaagcaatcaatttt

SEQ ID NO: 72079 - DNA, 726 bp, Arabidopsis thaliana landsberg
gatcatgaccttagatttaaaccgtatatactggttataatttgtgttgaactcttgaatatatgaaagaaagaaaaaacaaatctgaaaacaaaagaaaaaactccttggaagccaaactagacattttgagcgtaaagttgtacataagagagagaaccaacaacttgcctaaatctctaaaacctcattaattaaaaaagagtaatgttaggcaaaaaaaataaatgatacacaagtgtttgtgattccaaggcatctcttggctctataaatacatactacacaacatcatcgaaagcatccacactttcatatccacaaaataaaataaaaaaatggcctcaaagagctcaaccaccatttccctcatcatcatcctcctcatcagcctcgcagaagcaaacctcttaagctcgcctacaccgaccaacaactttggctcatgtcccagaaacccattgcaactaggcgtatgtgccaacgtccttggcctagccaatgttacagctggcgaccccagagcacgacagtgttgcactgccctcaatggcctcactaatgttcaagtaaccgattgtctctgctttatcttcaggccgattccgttggttttcggtattgatgtgggcgttagagaaattttttttgcttgcaatagggtttttcctatcggttttccagtgtcccaccaccacagtaactactacttaattcccctaaata

SEQ ID NO: 72080 - DNA, 720 bp, Arabidopsis thaliana landsberg
acatacaaataatttatatatatactagtttcagatcaagctagtagctagagtgctagacgatgtaaaatgatatctacttcactatttatattcatacacatacaaattaaggccgaaaatgtgacaagaaccctaaaaatatgaataacatacaaattataaaaaaaatgaatcgttctaaaaatagcctaagaaagtgagcaagacagtataaatctaatggagaaaactaccttgcaagttaacttgtgctggaagaaacagattattcttcaatttttccttcactctctactcgagagataaactgacgaatgagtttgggatgagaagttaacttttccgaggctttttatacaaataaggaaattttttgattagaagagatatctagaaagattaaaaaactatttatgtttcatgattgatatagatccgttctagctccatcactggattatttgatcttaccatgcttcgaatgtttttgaatccacatggcttcttttgtttactttcaaaagattgtgtcgaaacgtaacactactatcgtgtatctatcttctgtataaccctgtcttgataattagatcataaacctgaatatactctctttgtcaaacaaaaccataccaaagataaaatatttattctgactatgctcaatattcaatttctatggcaccttattggaaaacgaatggttttatatgactt

SEQ ID NO: 72081 - DNA, 501 bp, Arabidopsis thaliana landsberg
atttaactttctacttttttcatcaaacctaaggaacgttttttatattttgctttcaaaaaaggaaaaaaaaacacagaaaacaaaataatcaagttaaatatataaattctaaatattcttacttataagtatatttcggacagacatagcgaaagctagatcccactgaattctacgaatgtattgtataaaccttcttaaactcataaaattttgaaaaacaatgtcaatatccaaaaaaaaaggagatgaggaaaaagccctttcctcatttcatatcaactcaaatgttggataaatcataaatttaaaaactttatttataatgaatcatacattgtatatgaattatacttttaatttgaattaaatctcgtcgggtgaaaaccaaaaaaaaattcataatcttttgatggttgctgaccatgatgattctttatgagaattttttttttttttttttggaagcctggaatatattttccttccaacttaatg

SEQ ID NO: 72082 - DNA, 408 bp, Arabidopsis thaliana landsberg
taacctgtgcagtactcacatgctaaatcattattcgagagctgccttggatcggacgagtcctctgtaaggctccatctatgtgtaccgacctgatacgctagacgaacgagccgagtgatgacccaacaatgggttgacgcaccggacttaccgcatcagcacggtttgtgtggacttaggacctgggcatatgcgggcatgataagaggaccgcaggtgaattagatgatgtggagctgctcacaggatagattcatgaggagacctacaacgtgtgacgagggccctggtgggatcagtgatatgtgggtccctgggtcggaggctaaccttacaaatctaccttacggattagggccctatgtcaggtcgaggaaggtacatatctatatgtacgagctggga

SEQ ID NO: 72083 - DNA, 531 bp, Arabidopsis thaliana landsberg
gggttccccatcaagcattcactgggctttgactatgattattaatacatgattgacgagatcgtgaagaatagtcaagtcggcctgcaagaagatcagggtacctgttcctaatatttatactgaatttggctcttatacggtgggggaaagcggcgcgcttatatacagtgtgctgggagagaaattacagaatgaccgggaaacctggtatatgattgacagttcgttcattaccacgctgccggatacgtggggcataggggagaagttcctgatgctgcccgtgaataaatgggacagcgaataccagcaggtgaacctggggggcctgacctgtgacagccatgatttttatacttccgaagaacatatcaaccaggttttcctgcccaagctcaatggaggagaaccgctgtacgtcggctttttccataccggtgcttaccaggatcagctaagcggttacggaggcatcaagcattgcctgatcccgtcgacaaacatggggtcgtgggctacgataagaac

SEQ ID NO: 72084 - DNA, 477 bp, Arabidopsis thaliana landsberg
  unsure (1)..(477): unsure at all n locations
agcgnnnnnnnnnnnnnnnnnnnnnnnnnnnnnnnnnnnnnnnnnnnnnnnnnnnnnnnnnnnnnnnnnnnnnnnnnnnnnnnnnnnnnnnnnnnnnnnnnnnnnnnnnnnnnnnnnnnnnnnnnnnnnnnnnnnnnnnnnnnnnnnnnnnnnnnnnnnnnnnnnnnnnnnnnnnnnnnnnnnnnnnnnnnnnnnnnnnnnnnnnnnnnnnnnnnnnnnnnnnnnnnnnnnnnnnnnnnnnnnnnnnnnnnnnnnnnnnnnnnnnnnnnnnnnntcttgtggctctagaggatccaggtactggagaaccagtaacggtcagcttaccaatacttttccgtcacaactatatcgaatgctaggttnnnnnnnnnnnnnnnnnnnnnnnnnnnnnnnnnnnnnnnnnnnnnnnnnnnnnnnnnnnnnnnnnnnnnnnnnnnnnnnnnnnnnnnnnnnnnnnnnnnnnnnnnnnnnnna

SEQ ID NO: 72085 - DNA, 596 bp, Arabidopsis thaliana landsberg
  unsure (1)..(596): unsure at all n locations
tcctcatcctcatcttcatcgtcctcatcttcttctgtgtcactttttcctttttcctctctctgcctgtaaaaaagaggtgaagattcactacctccctcacaaccaatatatgccaagaaacttgttacatataatcaacacaatcttaaaagaataaaatttgaagatttaaaggacatagtagttagttccacatcggaacaagtatatcgaatctaaatgattgacataattccgagtcatacaaagagtcaaagacttccaaataaaccaaaaactgaagacttgaacttgttaaaacaaacgacattgtaaagataccttcttttgttcatatcagcaacaaccttgttagatgaaccaagagacgccagcaaattttggtactgtgtcggttctctgtaaaccattgcttccgattcagcctctatagaggattcttcaggtgaatctaacgataaaataacaccaaaagagtttaatattgagcaccacttaatttgttggacacacaatctagtatctcttgcacaattaacaaagaagagctaacanacctgttgaaagattggaaacaatcgtctttttcacat

SEQ ID NO: 72086 - DNA, 600 bp, Arabidopsis thaliana landsberg
catagtcaactgtttaaagtacacctcatgacctcaactcaatacatctaaaaagccatttcaactgtcaacttgtactttctaacccaaaacgtaccacaatttgttttgccctatttaaataaaaactacatttcaaaactttcaattaattgaagaattttgaccgttattttatatacaaaatcgccccattaaactattaccaagctgtgtccgattgaggacaaatattttctgaaggagatcgctggatctagacggttcacttgttacatgtttaatataaaaattcgaatagtagattcaaaataaattctagcattgaattatataaggttatgactttcatggtctgttttgtttttttaagtagatattgaaaagaaaatctcgtttataataagatagcgaattcgatttaaaattttggtttttgatcttcttgactagtagattgaagttgttaacgcgacaataaactaaaaagcactttttaatagtacttttgaaacacatatataggttttgctaaaatagtacttctgaacattttctaaactattttggctgcttccataaaactatccgttagggggg

SEQ ID NO: 72087 - DNA, 511 bp, Arabidopsis thaliana landsberg
  unsure (1)..(511): unsure at all n locations
cctactggcctannnnnnnnnnnnnnnnnnnnnnnnnnnnnnnnnnnnnnnnnnnnnnnnnnnnnnnnnnnnnnnnnnnnnnnnnnnnnnnnnnnnnnnnnnnnnnnnnnnnnnnnnnnnnnnnnnnnnnnnnnnnnnnnnnnnnnnnnnnnnnnnnnnnnnnnnnnnnnnnnnnnnnnnnnnnnnnnnnnnnnnnnnnnnnnnnnnnnnnnnnnnnnnnnnnnnnnnnnnnnnnnnnnnnnnnnnnnnnnnnnnnnnnnnnnnnnnnnnnnnnnnnnnnnnnnnnnnnnnnnnnnnnnnnnnnnnnnnnnnnnnnnnnnnnnnnnnnnnnnnnnnnnnnnnnnnnnnnnnnnnnnnnnnnnnnnnnnnnnnnnnnnnnctcgttatcttcgctacccgtaccggtccagttcctcgtcctaaggtgtctatgcccatgcgcgactctcacacctgggttactcttgggacatgcttatccgatccatgcttttcaactaagcacgccctt

SEQ ID NO: 72088 - DNA, 644 bp, Arabidopsis thaliana landsberg
caagttgcaaaaccattatatttttcttttaaatacaatttgatattacattaaaattttttgattttaaacgaacatcatccttattcaggtttaggatggtattgcgcgaacatcaacaatgaggcacaacccatggtagcttataatctttgctggaggctctctcgtttacatatcaaattaaaagcattagtgtgaacgataagatatcgatgcttaattgctgaacttgagactgaagctgctttcatcacggacagctctgatccggcgaacattgcatctataccaatagagtggccggcatttatgacgtacgcaataagaagagaagtgtaagaaaacattctcgcatttttcttttgcttctcgtaatgctaatataaaaacggatacgttagcaaataatgctcgtgtctaccagtattatatttgttcccccataatgacttatgaagcctctcaattaacataaagttgttgacgggagaataagatttactcaaaccaaaagttcaataaacgagaaaaatgactgtccgagactccgagcaaacgtgataccacaaaccaaatttttcaaagcacagaaaaaaataaaagggagaaattcctaacccggaaaacataacaaaactact

SEQ ID NO: 72089 - DNA, 576 bp, Arabidopsis thaliana landsberg
  unsure (1)..(576): unsure at all n locations
gcacgcttgagataattcccagcatttacgcaggcgattaacaatcaagaagctcccgaaacgttcgggatgggctcgttgtctcgcggtggctctcccaatgccgccaacaatcctggagcagaccatcgccgtaaacgtgaagctcggtcgcttcgactgtcggcccggtaaacagttcgatcattgccgcgcagtctgtgacctgctggagaaaattaagagatgtccggcgaccacaaatttcnnnnnnnnnnnnnnnnnnncatgccccgcatctgcgatcggcataggcgtgtgttttgtcgcctctaaagctcgaatccagcccgtgcaggtgaaacgagcgatagccaagcaaatagccaagattgacccaccgcaaacctattgtgcagccgccggcaaccatcagcnnnnnnnnnnnnnnnnnnnnnnnnnnnnnnnnnnnnnnnnnnnnnnnnnnnnnnntagccggtgtcggatgccatatccaaaccctacatccagcattcagaagtatgtcgaaaagcgacggatcgcagtttggagcaacgagataacgaacgcgggagt

SEQ ID NO: 72090 - DNA, 754 bp, Arabidopsis thaliana landsberg
acataactgtatacgcataaatttatgatcggaacaaatattctaattttttttatttatgtgctatattttgatctttttcaaattgaataaagcaatctatttatccagcgttaatcactaacggacaccgcatgaaatgagtgcattttgtaaaagaaactttcagctgtaaaacgcattttgttctctgatccaatgaaaaaatgacacatcatcgatctgcagctacttaattacgttgaccagttagcagagttgattaagtttatgttagtcttaaattgctaattaatagacactgcatgaattttataatgttataaaattataagaatttcataatgaaaagtttatgaaatgttaatttatgactaatgcaagaactttctatttggaaacgtaagttaaggggtttataaaagaatagtacaatattagaaaggctgctttattgaatgataatacaaacaacgaatggtcattttatattagttgaatactttatcgaataacttttctttttggtgaagatcaaacagagcttttttcatcttcacacgcatcaatgagatcataagaaaccgagcagtacttttttcaatcatagaatacaattataacaagctatatcatgcaactcaaagtttctccagactggtctcttgttcgactcctaaaattcatcttccacaatccgagtgggtttacaccgtcggcttcaagattttaactaggatggacttctttagaa

SEQ ID NO: 72091 - DNA, 293 bp, Arabidopsis thaliana landsberg
aacctattgtaacatgttacatttatctttgagttttacatgttacaataggttatttgattaatttacatatttcaggctcgctttcgcggtggatggtaacagactgtatgagaagatcgatccccggtgacgggccttccaaatagaatacaactttttctggtaagctaggtaacgagaacatgccttctagtctcacccacttctccttgaagacacaagttctgcaaaaattcaaaataaaatgttatttttttgtctcaacacttacttaagatcatacaaaaagg

SEQ ID NO: 72092 - DNA, 528 bp, Arabidopsis thaliana landsberg
  unsure (1)..(528): unsure at all n locations
ctccttaactcataaatggtattttactttcatgtcaagttttatattccaacaacaaaatttctattttcctgggttgagtttattgtttgtttttctcttttataaataatttatttaaaaaatgaatcaaatcaagctaaaacaaattaaaccttattagaacggatactaggaagacttagagttttatatttatatgaagaaaaacactcaagtttggcagatccattttaaaacccccaactaaattattaatagataaaccctccatttaagagattctaatgaaaaatcctctcaagtaatagtcggtccatttaaaaactgccaactaaagttttaacaaaaacaagccttaaataaaaaaaattaattaaaagaacccttatttatagtttcacctaaatatatcttgtttaatcgatattttgcgttaatgcttgttaaaaaatgttaaaataaataatgatacttttaaaaacgatactaatttctaaaaatcgctattttcaatctaanaatttt

SEQ ID NO: 72093 - DNA, 657 bp, Arabidopsis thaliana landsberg
agccttcgccaaccgacccggcacccagcaccagtgctacgcggcctgtaaattttttgtcgttcatggtgtcttcaaaaagccggtggacaaccacggtatggcggcaaccagaataaggcctatggtgcacgacgcaagatagcccatgatcggcttgatgcccttgtccggcgccacccgcccaatggcgcatgcggcgtagtagcccaccccgaatgggggtgcgaacagcccgatgcccatgcccagcacggcgaccatggcgtaatgcacttcgttgatgttgagttccgccgcaatgggaaacagcaacggcccaagaagtacaatggccggaatgccctcaagcacgctgcccagcacaatgaacgtgacaatggatacgcagaagaaggtaaatgcgccgtccggcaggtgtgccatgaattcggccagatcgcttgaaaaccccgattgcgtcaacgaccaggccatgcccgtggccgtgccgataataagcaggatggcaccggacaatatggccgtgtcgataagtatcgggtacaggcgcttgatgtcaaagcaccggtatacaagaatgcctattacgccagagtagacgatgcctatggtggacacttcggtcgccgtggccaccccttcaaccaccgcgct

SEQ ID NO: 72094 - DNA, 623 bp, Arabidopsis thaliana landsberg
  unsure (1)..(623): unsure at all n locations
ctgaaattttacgagaatataaggcanaaatgatggtcttgaaacttgtttcgatatcaatctatgatgttctttatacttgtttctatatcaaaatccttaagtaaaagaaaatagtgataaaagaaaagattccagtgcaaaaacttacaaacattttatacaaatgattgtagttggaaatttatcatactcaaaactttatattataccttactcaatataaatttatagatatttaagataagcttctaaaaccagatcaatgcatgtaattaagcatacaaacatcaaagatcagtgaacagacatagtagtcgaaattctgaaaatttagtatccatgaatctaatccatttctaccgaatatctaattttgtgtgccattttgtactgtgaaaattcggatttttgttagatctactatgattttctttccaagtcattaagaaaaataaagtttgattcaaatttaatattacacaaataatcaaggtaccttagtggcaaatggtagtagagaatggagagctaagtaactctgtttttgtttctctcttctcgtcctttctttcaacatatgtcgccggcttctttccttctctggagccaccgtatttttc

SEQ ID NO: 72095 - DNA, 639 bp, Arabidopsis thaliana landsberg
  unsure (1)..(639): unsure at all n locations
gattatatggtcctcttctgagaagctatcctgcagnnnnnnnnnnnnnnnnnnnnnnnnnnnnnnnnnnnnnnnnnnnnnnnnnnnnnnnnnnnnnnnntccatggccatcttcatcgtcaatgtcttctttgtctctatgtgctcctggtaatcacttctctctctacctgttctcttcttactcattgttggagcttccagaaaactaaaaagtttaaattgcaaaaaaagttttgctttatcttattcaattttattttaaatatgcagagatgtcattacctgccttgccaacatcccagactattaaaaatcacggtaagcctagtttcgttgcaatgtaatctctagtctcatgaacagaactcaaagacttgcattttcaactcgtaattgcagggttttgcaatggtggggttggagcgttgcgtctcattgtcttggtatttcttctgtatgttgctgttgtgagacattaaaaagaggcttaggagggttttgtttttggtagtcagtgaggactttggataaacactgtaagctcaatttctcttgtgatatgtatgacaatagggcaagtgtatgtagagtatatctctcatctcatgatagggcatcttgctctgcttgtatgcg

SEQ ID NO: 72096 - DNA, 475 bp, Arabidopsis thaliana landsberg
agtcgcagccagaaggccactttaaggccttattttggcctagttctcataagacaaagctgagagatcaaacattgatcaaaaagtgaagaaacacaaaatcactaaaatcgaaaccggaaagtgacaatcgaattaacatcacacaaccaccgacatttctctcgcgctcttctcacactataacccaaaacaaaacccttctcaaatcaccaatggctttaaaacattagaagtgaataaactcgctctaacgcgtgtcattcgttaccacttctactcatacactaaaacccttaccaacgcacacttttgaacacccaaaacacctttttcgcggccgtctcgtctcgttcttaaaacccgcgtttcgcggtttcttctcgcgcgtgatcgtatctttaagcgaaccactctactatgggatagtctgtggagaagataagagagatgagtatggattgtaaagaatggt

SEQ ID NO: 72097 - DNA, 636 bp, Arabidopsis thaliana landsberg
agagctcgagctgcgcctgcgcgccagcgacgaggagctgcggcggctgaacgacttcgccgcggcctacggcatgttctacttcaaccagggccacggcaccctggtgatcgaggccagggcggacaagggccggctcagcggctacatcaagccgctgctgcgcgacgtcgacgtgttcaactggcagcaggacgtggaggagaaggacaagggcctgttccgctccatctgggaggcgctggtgggcggcggcgagacgctgctgaagaaccaacgcaaggaccagttcgcgacccgcgtcgagctcagcggcaacatccatgaccgggacgtcagcgcgttccaggcctttctcggcatactgcgcaacgccttcatccaggccttcactgcgcgctacgagcgatccgcgcccgaggactgaggcgcccgctcaatggctggtggagccctggccgacgacctgcgccggcgggcggacgaaatggcgttgcggcccgcgcggagcatcgtccggcgcctcgacgttgcgcagctcgcggaccgggaaggcgaagacgacgcccatcgccttgacccccgagcagcacccccaagttgatctgctgctgcacgttcatgtaacggctgtag

SEQ ID NO: 72098 - DNA, 371 bp, Arabidopsis thaliana landsberg
agaaagaaaggtgttctaagggatatagaaactttatgaaattcagaggataagttgggaggctatgaacaaggtacaggataatgggacttactatcagtatataaaaaccaaaaataatcatcaaaaactaatcttactgttcatatcattataggcgacgaacaaaagactcatcaccttgcaaagaaacgataaatgttatcactgcggaaggaatcttgctcttaatgcgagggaaaaagactccgataataccatacgtatgaatagtacaacagacactatgatagagacatgttaaatatgaactaagcggcatctacgctagaacctacacactaagagcgccatgactacattaaaccttg

SEQ ID NO: 72099 - DNA, 643 bp, Arabidopsis thaliana landsberg
catgaaaaagatgaatatttatattttgcactttcagcccaaatggtaaaaatttgggttgaatatatttttgataaaaatccaaaaaaaaattattgcatgtttaatatccaaacttttttggttggaaggaaaatatacatagtttaattaaaacatataatttaatttctacaattttactcaagatctaataacaaaaacaaaattctagttttactcttaccatctcaattaatttataattaacatggtatatttgatttgaataaaaattattttttgttgataggttgtttttattaaaattattttattttgactaccaaaataaaaattagaagaaaatcttcttaaaaaaatcttcaactttccttttttaaaacacaccctttaatagataaaattagggtttttggaatgaaatgttgaagaagatcaaaaaatttagattcttttctatcccaatttgagtgggtgagtaagacaatacatttcttgctatccttttgtttttaattttcaaagaagaaatttaaagcatacatgtatcttaggtttaaactgatcttgttattatatatagtttcaaaattcaaaacacacattcacaagcgagatatttttcattaaaagaaagaac

SEQ ID NO: 72100 - DNA, 628 bp, Arabidopsis thaliana landsberg
ttggttattacataaaaatactgatttggaccattttgggactagccattaaccaaaactttatattttatggaaaaaaaaagaaaaaggttatgatatccttttttactcatagctttaataatttaattatgttcataagtcatatagtatatgactccaaatgatgatcaaactagcctaatctcacttagctagcaaaatgacttgtgacacaagaaaaagttaaagcaaatgtctttttaaaaaccctaaaccctgacacgaatctctctcaaatgaggcatttactcttcagattcggaatcataggacagatcaatgtattgagatggccgtttgactggaaatttttcccacatggacttgaacactgaaacattgatgagtcaaaaagagatattcttcaatttttcatcaacggagggagagaaagtgaaggatacttgaaacgaaagagattggtttcatcatctaccgaacatggagacaccggagaggatgattcgtctgtagtaaactcatgaatacgaagagcaacaggcacaacttgattagatcttaatgatggaacaagttcagtccaatctttgttatcaacaacttgattacttcttgatgatggagc

SEQ ID NO: 72101 - DNA, 620 bp, Arabidopsis thaliana landsberg
  unsure (1)..(620): unsure at all n locations
tcagctgtgatactaattccttggaatatcaaaatcagcaatcaaggttttcttgcaggtttttggtattatcccatgtatcatttttaattcttgaaactagtattacacacacatcaatacaagcataacttcttctatactcctctatctattactcttcttctcttttgttcttcatccatgactcatgctctcccacatgtgttctcttatcagaaaatgatcgtcataaccggatttataacaaggaacattctgaaactagtcttgggatcacggttgatttagcaacaaagtatagaacataaaatcgttctgctgcagaaactagagaacttaacaattacaaacttcaaaacacaaacaagaactgctttaattagaaaactataacatgttctctctcattcgaaaacaatacacaaaagatccttaagaaaaaaaaaacatcattcttcttcgttaaccacttcttcctctttccaacagaacccaagagtcgattntgctgagctgcaatcaacagacaacagatttgacaaatttctcgtaaagaatcgaacctccatgttctctctttggctcaagtatcccttcacatcaactacacagtcaag

SEQ ID NO: 72102 - DNA, 522 bp, Arabidopsis thaliana landsberg
  unsure (1)..(522): unsure at all n locations
gcactgctcgccgcaggatggtggcacgttctcgcaggacagcggcgtcttctcccagggttgcggcgtcttctcccaggacggccgcttctcccaggacggccgcgtcttctcccagggaggcggtccgctctcccaggacggccccacgtcccaggaccccgggctggttcagccggggcccacgcagccgggccaggcacagccaggccaggcggcccctccgttgcaggcacccgtaccgcaggcacccgtccagcgaacggcggtacagcagcaggctcccgtccagcaggcaccggcgcagcaacagcctgtgcaatatccgcaaggccagcagatgcccgcgcagcccgcatctcagctgccgcctggnnnnnnnnnnnnnnnnnnnnnnnnnnnnnngctcggagcgccgggccagaactacgtagcgcagtcaccgggcgccccgacgattccgggcccggtcggcgcgatcccgctcgggacgatcggcatgcccatcgccctgccggtccc

SEQ ID NO: 72103 - DNA, 2175 bp, Arabidopsis thaliana landsberg
ctactagttgacattaaactgcatttctttgttcgactttcgcattgcgtagaagattaggattagatattgatctaggttttgcgatttttgtcggtgtgatgatgattctgaattgcttcttgtactattatttttgatgtcattggaagatagtgaaatttagggaagatgcagcacactccagtaacaatagaggaccagttaatatcgaaagctgtaagagaagaatgtcaatgggaaaacctcccaaaacgacttcaatcgatccttgggtctaaggatgaatggcatagaaggttagattttctttatgctttcttcttgtagtagctcggtgcacggtgacatagtttactttgacatagtttactttgacatagttcactgttttgattgtttgtgtagggttacggcgcattgtataaagaaaagactcctatggaatacgtgttttgcttgtaaagtttgcaaagaaggtgaatattatgaagatatgatgcgttacttgcgaaagaatctggcggtgcgtgttgatggattactctttaagaggtctttttgttttgattgcattctagtggagagttactagcaaatcatttttctgaagtttattttttgtttgtcttcgttcctcattatatctcgttttcaatggctttctcactgcacaattttatgtacgatagcgacaatgcataagaaaagggtttggaattgacaatagtggttaacaaggtttattttagattttagataccatagtctgtgatggcaatttatgaatatgtttcctactctgaaagatagctgtgggttcacatagtcgatataaagagagaaacttggtgtcaaggacgaaatatagggcattgttttctgttactgtcagaggatctctaatcttaattgctgttaacaattatccgcagctctttccgtatcaccttgcagagtatgtttgccgtgtgatgaggatatcacctttcagatactactgtgatatgatatttgaagtcatgagaaatggtaaattgtttcgttactctagcgctcattttttatttaccttaaattcgagccagtgatttcgtcatcctcattccttttaatttgacacagagcaaccttatgacagtattccaaacttcagtgcggcagatgctttccggcttacaggaatagggaggaatgagttcattgatatcatgaataaatgcagatctaaggtactctttcttctagactctgtagtctgtactgctttatatgcctggcatgtcgtgcaagttacactctgcaaagtatctgttgctttgacttttgacttgaaaaatctttattctgggtaaaatatgggaattcaatgattacaaaattctagatggagtttctatcataataacttgagcctataagtggatgtatattatgtcttatacttctcatttttgttttgagctttccagaaaataatgtggaagctgaacaaatcgattgcaaaagactttttaccgactctacctgtggatttccctattgacccttggtggggtgtttgccttgtcaacttcaccatagaagagtttaaggtaacctaagctcttctttatcatttattttcttccttttcaaactaagtttacccggaatgaacaatgtcactgtcatcttacttgttccttgtctgataacagatcttatttccttgttctttgcatagaaactttcagaagatgagatggcgacaatagataaaatctgcaaagaggaagctaatgcatatttcctcttcgatccagaagtcataaaaggcctgtaccagaggggattggtatattttgatgtcccagtctatcaggacgaccgctttaaaggtgagtttatgtttgccaatattttcttacccctccgtttcttctatcgttacttacaatgtacttcaagggtggagattgctgaaatttttgctaaggcatataatcgcatgtcagggggttctaagaatagattcataagcagcatataacaatttttttttatcattgtttaccaatactatatcatgctacttttacttacttggaacagagccagtgaagctcctagatagcctgttcttagattcatatgtagtctcatattttatattttgaaaaaaaaaaattcact

SEQ ID NO: 72104 - DNA, 589 bp, Arabidopsis thaliana landsberg
atctttatatttccatttaaatatatcattttaatgaattttatcttataaattttaacaaatctttcaattgctgcaaagaaagatgacctttaattaactactcactagatagtagaggcggtaaaaaaaccgtaaacgtatatttaatttgttttagtaaaatttaattataaactgtttactaaaatgcaaagtaatcaataatataaacttttcctattttatgttattgtgtcacaatgtttatagctttaaatacgatttattgtactattatatttttaatatatggtaacttaccatattctctcattatactttattgtaccgctatctattatcgtatactcttatttttaaatccgtaagaaaatttgatcgacttagtatcaatttttttttaataaaaaagctaaaatcatgtaacttctaatgttcatcaccaataaggcacatagtctcgctaaatacactattttagatttataccatctacattatatgtttctactgcaattctacggcttcaacaaccccattttcatcacttcttaataaaaaccccaataaatttaccccccgattt

SEQ ID NO: 72105 - DNA, 569 bp, Arabidopsis thaliana landsberg
aattttaaattggaccaccaccgcgagattcgagttgaataaactaagatggacaaaccaacaaatttgcagtttctaaatcgcactaagtctccaaatgtaggattacttgtgaaccaagaattacgttttgaactccctcgtttccaggcaaattaccaagctggttttgttgtccgggtgtaaccttgaaaaggatctggtcggattcttttgagacataattcataccacatgcaacgtcgcatttgcagtttagtttgtgtacaagtttgagtaccgagtatcaatttgagagaacaacttatctagtcgatccaataaaatcttctctagcttaaatccaatataagagttttccgcctgacaaatccagtcgatctgtttcgcttgcaagtaaacttaatttttttggagctccatacaaaattttaaatcatgaacaaaaatctttattaagaactttcattaatgacttcttaaatcaatctagagtgaatcgagtgaaaactatgcctgctgcactctgccgatggatctaactctaacttattgcccttctttttctt

SEQ ID NO: 72106 - DNA, 960 bp, Arabidopsis thaliana landsberg
atcatcacccttaagaaatttgtttcatgaccagaaaatatgcaagtgttaacatgttttaatttagactgtttcaaaaatttacagttgttatttagtaaaatttagcaatgaatacaaacaaacgaatacaccaaattaatgtttgtagtatttactatttagtaaatgcatggtactgtggtagactcgctaagtaaattgcatgtgttacattttaatatgtaaccagtaacctcatgcatgtgtatctctttcaagtttcaacaacctttttgttttttagaagtaaaaacttaaaattctttaattggcggacagaaagataaggcgattactcaccagaccaacaaaattaaatggaaattaaatacatatagagtaattaaatggctctgtgaccaaaacatggaattaatgggcgttattcattagaccagtaaaattgactggaaattaaatatatatagtaatgatacgatggtcctgcgacgaaggaggagccatgtctacgcaactcatccaataagcaacacaagctattcttttttacttctttcatgattgtcagtttcttctttcatttattctatcattgcttgagatatgtattctttaatagaagttaaatagtgtgtacatataccatgttgtcactttttaacaaacaaaaagtcatatggtatcatcatcatgtcgcatgaagaggagctacaacatttcttgattcatgcgttacgtggtctaacaaagggaatgtgatgaattgtcgctctgggagtaatttcgaaacgaaagttttcttacctaaaactctttattaattatctgagtttctgtagagagaaatagcatcaatttaaagcttgaaaagtttaacacatctttgacaaaacaaatttaggaagaccaaaaccaaaataattactatttctctctatctgttttcagtggggggac

SEQ ID NO: 72107 - DNA, 3466 bp, Arabidopsis thaliana landsberg
tgttatagtctgtgagtcttgtgactctttttgtctttccctttcttgctctaaaagggaacaaagaaatttcgtcactaataagtttccccaataaaaagtctttaacgatagtcatatttagcaattcaatttgtttgtgtagcatagtttacacgtacgtagatgatcaaaactacagcttgcatgtggcaattagcagacaaatacacatatcttgggataaatataaattaaataatgcaaatagattgcaattagcagactaataagcgcatataaaaattagattgaaaagaacaaaaaaacgagccaacagtagaacaaaggaattaagtacctaactgccatgtgggactttaattacttggagaaaaacataacttcgcagaaatgtgagcaaaatttaattaccaatgtagactttttgcactgtcgtaagaatatttcagatttgacacttgtgcaaggttcattacgaatttaggactcgctattctactgaattgatcgagagacctgtaacaaataggcttactttctaagagcccattgacataaagtccaataaaaattaagaaggaagctagtccttgactcgtacaataacaacattataaaaaggcgagagagagagaaaaaaccaaatttcacaaggcagagagattagttaaattcagttccaatctctatcaaaccaaagaaacaagaggaatttttattgagactctcagatccttcttcacttcttctcatcctcgccttttttgctactactctcttcctcctcggtacgctgtcattttaaccatatacatttatcagaatcttctttttcaaataacaaaaagatgtaatcataaacatcaacaaagacacacctttgactcgtctggcagagacgctagtagttctttaacatgcggatcatttggaccaccccaggaagctgcgtgtacacaaagtcttagtaccaaagctaaccctactacttttctctttcattttgcttgtgaaaaaaactgactaaggtttatgtaggcttaccgatgagagaacagacgatatgaaggcttgatttcccaagaggttgtttccagcacctgtagcttcacttgactcttccccactcattgacatttgcagagctgcacatggagtataaaaaaatataagaaaaatgccaattttgattgccatggatatacttttaccacactgttctacttacctaaagccagatcctggtcctcatcagccgcttctgacatattcacatcaccaacagacatagcaattgcctgatctagcaacgcactgtcctcatcctgccacaaaaggttgtatgattaacaatctctccgcctgtgactatataagaatgctacactcaattttaagtaacaactaaccattggttcagcgttcttgtcagttgtcctagcaactgtctcctgtgaggcggaagctgtgtccccatctttgtctttctgacctgcctcatcggccgccttcttggcagcagcttcttgtcttgctctctcctcctccatggagacccgaagggcaagagcaagttctggatcgatatttgggtccacaccaaagtcgaagtccccacctgcggccgctgcagcagctgccgcagaaacatagccacttgcaccctcatcacccgtgaatacaggtgtgctggaagaaaatttaaaagttaaaacactatctatgattcaaatcactgtctaaatgttttgttgcagcattgataaaaagcaagactagagagctcaaaagacctaaacacacaaaaccacatgaagtgcacctaccaagccggatattgttgaaactgttccttttacaatctacataacctagaaaaaaagaagaaaagggatggtacctgagaagcacatctgagagagcattggctccagaaggaacatgaacaatgtggctaccgtcattgttattcacagctgtaaggagggcctcgagtttctgaggcttttcctcatcatcatcctccccgaaattgacaatatcaagagagacactattcttcttcagcctttttccaactatctctagggccttcttctcgtacttgattggactaaaaagtagaagcagaagaaaaacatcagtataaaactatacaaaagttactcagcaaaaacaatgcaattcggtaccttccagcaaaaacaataatcctttggcgttgattcttgttttggcgatgcttaagagctagctgggcgatctggatagctgcggttaagttgatctctcctcccacatcaaggcctgaaaagatgacgcaagtagcaaattgatgtcaaactcaatgataaagagaaagaacagattttttctaattgctctaagtagacagctaataataaatagaaagattggagagagagatacataccgtgcatacaggccagaattttgccaagatcagaggtaggagtagtcaatactctaactcctttgccagccattgtcaaaatccccaccgtattctccggattcgactgcaattgcaaaaaagaaagatccctaaaaatcacaatctcacgcaaacccaaaaaccctaatcgaatcaagtgaaaaaacgtaaattattacctgggttttggctccgcaaagaagattaacagcttccgtttgcgcctgtaacctagacggagagtaatctccgtttcgcatccactcggagttgtcgatacatatcatagtcgcctacaacaagaaaacatcgatgagaaaaagcattcaacgtggatcatcaacgaagataagcacaagtaattggaaaatcacctcgagaaccatcgtgtcgataagcagagagaagcttcaaaaattctgtcgtagagagaaagtcaggaaggcaagatttagattttagtttagaccgataataataacattgttcttctttaaatatcccctttacttttttactttctcctttaagaccctaatgttttacgtttatttcaatttagccccaatggttgtttttgataaaaagcaaaacaaagttgatttattaatgaataaaagaaacacagaccacattacagtaattcctataactaaagtctttcttttattcaacattgttaccccataactctacaaaacatcaatataaacccgcagaagaccaaccacagcgcaccagagaggaattgacaacggtgctaacaaacaaaaaaagatacaacaagcagagacgttggatcatcttctgctatgcattaagagcatttgggatgagagaagatcttgtgcttctgctgataggcaagtgaacataaacctcgtgaacttcctgcttacatacatcccctttggctctatcaatcgcgtaacagacatagattgtgtcaatcacatcgtcgagaacatgtacaaagaaagccaatatcacaatcagtaacacccacgc

SEQ ID NO: 72108 - DNA, 473 bp, Arabidopsis thaliana landsberg
tctgtctatacctaaaaaagttctttcttataatatcaaaagctagattttaggaaattaaatatttgagatctctttttttcgttaggtgtgaattgcgactcgccaagggcccatacaaaatgctttttttttttgcgtgcgagcatctccttataataatttgtttgttaaataccaaaatggtgcttcaaatgtcaatgtattactgtaaactttccctacgatccactaatttttctttttctcctttatcaaaaaacattaatagtaacctaacccgcaatctatatatacatttcaagtgagtatcaaaatttactccaattttgatctcctgaattgcgataatcttatctctctctttctttctaaaacttgaattctggacttggtgtttgcatgtaaaaatgttttttcattcctcatttaactgaactattcctagatttagatgaaattacaaattctct

SEQ ID NO: 72109 - DNA, 414 bp, Arabidopsis thaliana landsberg
  unsure (1)..(414): unsure at all n locations
agagcactagcaaggtttatgtttccaccattctcattctcctatagaagttttgtatttttaaagtgtagtactcttaaccaccaagctttgtgttataagaatacattcacttacatggaatcagatgtctctggatttaataagaacttgaagatcactagcaacaatatcaaatttgtcttcaagtattttcattttggacttcatctcgaccatctctagattagttgatgtaacatgcaaaaaaactaacacaataaattaatagtacaaaattagaaaccaatttaacaacatagcatcaaagaaacaaagaacgaacgcacaaattgtnttgggccttttttccccttttggcaanatcattactttccatttactctncataccgtgatganaataaaacaattc

SEQ ID NO: 72110 - DNA, 445 bp, Arabidopsis thaliana landsberg
  unsure (1)..(445): unsure at all n locations
tcgcaggataaagaacttgctgcgaggtggctggtggnnnnnnnnnnnnnnnnnnnnnnnnnnnnnnnnnnnnnnnnnnnnnnnnnnnnnnnnnnnnnnnnnnnnnnnnnnnnnnnnnnnnnnnnnnnnnnnnnnnngataggaacagataagagacatttggcaaacttcaccgacttgagtggcctatgcgtcaacgaagtccaccatgctactggcctgccatatcggatggattgatggtttggnnnnnnnnnnnnnnnnnnnnttttttcacgagagctgatcggggctgctttcggcgcaaatcaacaccctatttagcgcgtggcgtattttcgttccacgcaggcctgataccatttgcgtgaaaccggtgattgacgtgagcgcaaggtgcgccttccgggtcgataaattagtcgtagaagcgttcacgcatttt

SEQ ID NO: 72111 - DNA, 686 bp, Arabidopsis thaliana landsberg
gttagcggttcccgagtatccgacgaccacggcagaacgccgagtcgtagcggtccccaggaaaccgttagtctttgtggatgggtccgccgacgcaccgtcgtgcttgagtacgaacatagactcaccagtcgccgtactgacgctggccgagttaactagagtccagtcagccgggggatgggccatggtgttggcgcccgtgcatgttacgtacgcgatcagaaggtcgccatcagcggtacccgcaggcttgttgagcgtgaagttcgtaccgctcgtcggcgacgtaaagaccgaactcgtggccctgtaggcgatagtgggcgaaatgccgacgtacttcatctgagacatgttcgagccgttggagcccgtgcccgaggttgccgggcgggtgtacgtagtcgccgagttacccgtgatccacggattgatcgcgtcggccgcatccatgttggactgggcggcagtgagcagattgcggctcatatgtccgccatcgctccatgccgagtcggtgccctacatgaaaccgatgcggtctacgtaatggctctccacactcgccggagtcacgacttccttggtcaccgtggggaattcgggaccgatcggcgtggtttcgcttttggaaatctccgtccaagatcctgtaacatccgacccggaagcggagattgacc

SEQ ID NO: 72112 - DNA, 543 bp, Arabidopsis thaliana landsberg
  unsure (1)..(543): unsure at all n locations
cattttttttaaatattaaattcccccgctgtattggcattcgattgtactcattgtcataattaaatttgattcccctcgagattttgaatccaatgagctttctaggacattatggttgataccgttgaccgtgcgcatccaaaccgaatggtatgatcctcatgcttccaaataaggtccccccggctttgctgcgcctaatattgttgagggcgaaagggtagcacctataaagacatccgccgtagtgacgtgatgtgacgccgctcaaaaatatcactgtagcagggatgactgtggttctaaatcaccatgcaaacacatctattttcaattaaatatagcatgaaaagcatttttttttttctcagaccagcttgaaccttttcttctcaaaggctcacacctttcttcacctccacacacctttttccatctccacacacctttctccaaccccacataccttcttcttcctccacacacttttcttcactttcttcatagngggcgttatcgcgttatcttttaaacagtcca

SEQ ID NO: 72113 - DNA, 250 bp, Arabidopsis thaliana landsberg
gaacaccgatcttctgctctgacaaagcaaatttctaagtctatgctaccgatcgggggaatgggggaatgttcagtatagatgtgatgtcttacagaaactaagtttatgattcctaatattccacagacggccctttcctatgactcgtcttctatgcctctacccgttgtctaatagctcacacgtattcttctttaaacatatcattatccttctttctcggactatattaagagtaccagtctct

SEQ ID NO: 72114 - DNA, 459 bp, Arabidopsis thaliana landsberg
  unsure (1)..(459): unsure at all n locations
tacacagaactcgggttccttgcaacgatttttatctatttaggcagccctaaacgcagggnnnnnnnnnnnnnnnnnnnnnatagatccgacatggactacttcgatcccatatcgaagactaacacctccgcaaccgagtccccaacattttcaatgccgagtggtcccaagatctccatgccctcgatgaatgcgccgggaccttcccgcaagacggactatcctattttgatctcgccgacgccctgcttaggctgcgttcgaccggtcatgacgacgtggacgtacaccttacgaggcccctgagccacgatctcgtgcacgactgaccgtcctggcgacaacagcgtggcttccatagtcaggtcggccggcagcgcgatggtgccctacatgcgacctgagttgtcaccggcgcgatcgacggcagtaatgatccgcaccaggcgatcagac

SEQ ID NO: 72115 - DNA, 494 bp, Arabidopsis thaliana landsberg
aaccgccgcaggggggttgcgccctccgaaagccccggattttcgccgtttctcgctgaggcgacggccccggggggacgaaggaaggagcttctaagctcttgaattcgttctccaaagtgtctagctaaggcggcaatcggggacctccccatgagccagggcggcgacgtcctgcgcagactggaggggactctttttgaggcgaatgcggagcgatccggaccggctcaaaaaactcgaaagaggcgattgacaccctgaaggacggcaactagatacgccgctcttcttcgggggccgggccgccggcgggaacatccgagagacttgaaaaaggctcttgattttcctcctgacggtcgctaggttcccgagcctcaatcgaatcgctacggactttgagggaagcccctcggcggcccacagtgatttttgcgcccaaaaccggctcgccggacggtcgcaaaaaagtccgaaaggatcggttgaca

SEQ ID NO: 72116 - DNA, 502 bp, Arabidopsis thaliana landsberg
  unsure (1)..(502): unsure at all n locations
ggaatagactcatcatatatcacttcttgttcggtgggaattagattcctttttcatggatagtgctttcacatatgagtggagggtttgaccttagcatgtcaatgttaactaattaatctgcttccttggaagtgagtagttgtaagttgctacatgattgagtatagatgtaatacttagttggttcgatgtatttcttgttggttcagtgctggagttgatggctcggctggaaactcagaagctagcaaagaacctggatccaaaaagaggtaagctttttatgttaaactctttgtgacacacctttaattcaaaagacttactgaaccaggaaactatagcaactttcagaatctataactttgagaaatcgctatggaattgtttatggctcttttagtgtggggatctgtattggctcgcttgacatattttgggnnnnnnnnnnnnnnnnnnnnnnnnnnnntgttcattccatgtctgacggggagatgtg

SEQ ID NO: 72117 - DNA, 415 bp, Arabidopsis thaliana landsberg
aggagcttgacttttgacttggcaagtcttcctatgaatattttggttttgtgggaccttatcttacgtccctgttcttttactgaggaattttttttagcacccaccaattcgacgaaatgtctaagagacattatccccacctattcttgaggcttcggattttatattgaggatgttgaagatgcgttgagttgagcccatgggcttagcgacaaggagcgaataagagaatcattattgagtaccatgttgtgatcaaagcttatcgcatctggtgcatagagggttatgtatctgctgacacacagacaatgaagcgggagagaaggattgactgatggattatacagaactgaccagatccgcatcctacacgagactaaaatccacatagtcgcgagctatttacatg

SEQ ID NO: 72118 - DNA, 485 bp, Arabidopsis thaliana landsberg
cataatcaacatgagattctaagtacattaattaactatataattcttgattattatattatttcatacgatccagctgttcgacattagactcgaatttgaatcaaagaggacaaatcttagatgcaaaaactatcttaacaaccaaatcttttgtgtagatatacaaatgctcttgcagatattagtagttaaaaaggaagagaagatattttattgtgtgttataaaccattggacctatttcaatttcaaaagcataattaaactaattccttgacaacctggaagacctcgtcaattctcagttttcacctaatacgaatcttatcaacctgtgggaacgaaacacacttaccagcatttttccaagcagtccattggtgaaaattggcaaagtaagattttaaaaagggccaactttttttgaagtttaataatttttttcacaaaagtaatttcttcattggattatgagtaaagctt

SEQ ID NO: 72119 - DNA, 536 bp, Arabidopsis thaliana landsberg
  unsure (1)..(536): unsure at all n locations
atatacnnnnnnnnnnnnnnnnnnnnnnnnnnnnnnnnttgtttccaagtaaggatgcacaagttccgtgagagcaagcttgaactctgtnnnnnnnnnnnnnnnnnnnnnnnnnnnnnnnnnnnngggaatgattttaatggcagattgaactaaatttggcattctcttaaacctcaatctcctcctaaattctctaactccatcatcgatctcaatctctacatcttcaattaacatttcaccaacgaaaggcccgacgcatttttcaatctctacactggagacaacattatcatcgtaaatcagaaaaggcacatcgtcgatttcttctcgtgttagggttttaggtaacaaagctaccacaagaggtttcaatcttatctcgagtttctcagattcgtcgtcttcgccgttcggtcggtgaataaccgcaggtaaatcagagtcagtatcgtgatcatcaccgatcaagatcaatcgagagatttctggcatgttaaggagaagctgtatttgaccggactcagtggaga

SEQ ID NO: 72120 - DNA, 495 bp, Arabidopsis thaliana landsberg
ttgctgggtgtaggtcattatacgctctgtaattacgttgccaagttaaatgatacaagcattttattgtttgtgtctaaaccagattataagtaaaggacttatgttcagcacaaaattaaaaatgatgcaaccagatttgaatgaaaaagttcgcacaacattaagagcggtgtctgatgatggcagaagactcgctagtaggaaccaaaaatgaaatttcattatccaaaaatttatttgtggtctttcatgcatccacatgaacagtttcaataccaaatacctaatttagttttaaaaaaaaatcgtaattaatcaatacatcaagaattcaacattagattatcctgctattaaaaaaatctcttagaacattagaataatgtaaaaacaaacagtgaatacaaagccataatgatgagagtgacatggtcatttgccttgccgcgcgtggtttaggatactctgcaatctcctttttgacacacttat

SEQ ID NO: 72121 - DNA, 576 bp, Arabidopsis thaliana landsberg
aaatcccatatactgttgacaaaaaaggtcgcaacattattaccatattctatttcgaggtattaaattgggttttagtttttgggaaaggataagataaaatgacaaaaagaatgctccaaaacactaagaacaaaccattgatcaataatcatgcagaaaaataaagcacaacataagatgggctcggtcaatggatgagtcttgccaataaaagagataacgttcttttgcctagcaaggctaataatatagagcccaattttgatagctagcccaacagatatcttccactaatttcagcggtataatcaatcattttttgtagtgatcgaacctgttaaagatctagaactgaaagtagtattacttaaataataaaaattacattattcgatttcaaatagcaaatttatttcttttgaaaagtacaattaaatctgaaagacgtgcacacgtggtggtagtgttaatgatgattaggcaaaacttgcatggaagccggaagaatctctcggccactttctaatacacaaggtcaactttgaggtctgtattcccccgcggtttgaaccc

SEQ ID NO: 72122 - DNA, 4383 bp, Arabidopsis thaliana landsberg
  unsure (1)..(4383): unsure at all n locations
ttcctcattgttacaagggaaacaacaaattttagcatccagtttttttttcaaaggactttaaaaagagggctcactgttttgctcattgcaggcttaattttcagattgtagctagaaacatcctaatttatttaatgtaaggattcgaaatggaatccgtttgttaagaggtcttacagtttcgtgaatatatctatatcaccgtctaatacgaaaagctgcaaaataccgacaagaccagaccaaaaccaaaagtcagcaagagaataagttgagaaaatgtgaatcgacaagataattaaaaaagggcaagagcttgaaaacttatgtacattgggattaatataaacaataaaaagacttcaagagatctttggaagaaggaaaaaaatacatccataaaaagaaccgataccagcctccgactacaactccacaccatcatattctacttataaaagagcttttcatattctactatataatacctgtaacctttttatgttttactttataatatctattaattattattagatagataataagggtgatggaagatgctaattatctaagtggccaacaaaatacttcaaaaattgcatttttaatatcttatcttaaacccatcatcccattttgctctccagtctccaccaatcgacccccatcctgctgtcattaacagaacaaacatcagtcgaatgtaatgatataaacttttggctgtgtctctagtctactaatatctcaaaagcttttacatacctcggcttgcagcaaaagggttgttggttattttgtttgtttaagagttcccagcgctggacaatgaaggatttgatgcagacttggcgtcctttgcatctgatccttccccaacaactgcttcttcctcgctcctacagcttaaagtccccgggttcatcttcctcacttcctctttcgtgtatatgaagattttgcgaaccatgcaacaaaactccctgcaagagagatcattgtgtcagtgttataagaaaaacactaacatcgatataaactaagatggaaaatttgcaaaatcttactgccaaggatcgtcaccaacaagcatcatatcattctcttcatctgtgtaaactatcaaccaatctttcttaggagccatcaactctccattgaactcaaacagcctgtccagctcagcgactaactcctcatagttttggaactttgaaagatccactgaacggccaagtgcaattccctgcttgtgaacctttacatcaatgtgtcatgtgttagttgaaaagtgattcaagggttatcacaacctcatacactttgtgctacatattgcaaaaacttacctttgtgcaactcctacttgagttggttttcgtatgagcatccttcggatgaggattattagtctggaatggtcttccctgttcacgatgatcgtttgttgattttgacccttttgactgatctgaaaggtcctgaacctttggtgatgctatctgtgtaagccccgcagcatcattcaagttgtttctctgagacatggttgagtctgtcccattcatgttgttggtcagaggaatgccaaagagcctgcagttcccttctcttgactttgctgtctcctcttgtatcgtgaagggttgttttgttacttgctccctagcctgagcttgcgcttgagcattgaccacttcctcataataattcaaagcacgtggacgtattggccagttaccaccagcattctcagtcgatagaccattaagaacaggatattcgctgtatttaacattgcatcgcccttggagagacgcatcagttgctgcaggtaccttaggagattcatgtaacttcagggagagaccagagtgtatcatctgccactggttagcaagataatcgaacttgccttctgaatcactcaagattctctttgcaggcatagaaggtgatgatgaatggtcataaaaaggtatcccctgaccatgggatggatctatgttagtcccaaagccggagagcaaatctgtgtaagtaggttcatgcctggctgaggacatccagttctcagatccatatcttctagaacccgaaaccacgtcaaccttatcatcatccgctgaagattgccagacaacagaattctcaggagcatcacactctacactctcagtatgtttcgtcctcaaggtcgagtattcttgaccttgcaagacccttgaaagtccgcttgctggtaaagggtccatgtttgccttagttgtacctgttttgtgtacaatgaattagactcccactgacaagttcaattaagtttcagacgcactactatgtgtactacagtggaaggggaagacattaccttctctggtaagcatcgaagagtcaggagatgaaggtgctatattcgatctgggcctcttaggcctaggcattggaacaggactcaaagcaggaggagcaagagctggctctactttccacggagatactctatcaggtcgaggaatactagaagtctcatcccatctcacctgaaagacaattgaacaatcagcattcattatattcaaacaatagtcttgatcctctctagaaactaggtcataccttgagggatctccactttgattttggccacctagtaggatcagactcttcaatcccaacgattgtgccagtaaacctaatataaatcagtacaacttgttaggttcgttattccaagagaaaaaggctcgagagctaacatatttcaaaagcagaagacaggttttacctctgctcaggagcctcttcgccttcaaatctcattttgaatctcatgccaatagagtagttattcttaacagactccatatactgatcgaacggaacaataaactcagatgggctcgtcctgtattaaacaaaacaacaccgcatgaaaatttagtagagtgattcactaccaagcatcagacatatagagacatacaaagcaaagagctcaaaaaactgaaagctgttttgtgagctaatacaaatacaaacctgggtttgtagtagactgtaaacatagtccctgttgaaatggcatgccatgcggtggccagtactccaagatgcatgctatggctagatataacagaagacggcacgtttccttgttgtcgcatcgcacgccttacaccaactcttaattctccattctcgcccctgtagaagattaagatattccacattatagaaactaacagatacagctaaagaaaacaatgaactaaaatccacaaaccttagaaatataaacgcatcgcctgcaactagccttttggagctaacaaacacactccacccactctgtagcaaatgcctccgtggttgacctggtccattatcacaaacatcaacaaccagataagtttgatgacacacagactcgagaaaaacagaaaataaaaaagttacagattcctataccccggaatatatgtctgaatcgccactcatttgcatgcaaatcctttgcaactaactcttgagtgggaggctgtcgagacatatcctgagggaagaaacaaaaaatgaattgaaggcaatcttagaacaaaattcaggaaaaataagccaatgaatagatagttagaagcgcaaatgaaacaccaaccagaggtgggagacattcatccgcatgtcgcctaagaacagaaaatccaccatgtgtacttgtgtcggatgcagtcaaggttttgcagaacgaatgcacctggacctcgnnaggtggaggaagaggcgcttctttctcaattgcattctcgtcttgctgtatggaacaaaaaatatatagaattcagcatcttgaagaataagatcacctctacaacactcaaaccaataaatcagaaaacaaaacttacattagcctcaggaagaagagtaatctgcgcataaacttcatctgtatctgcctctgcctgtaaaatcataaacaaaactcttgttagctgacaatccaagacacagaaaccaaaattttccaagaagttaaagaaacctacctttaaatctacattaataactcgacagagaagctttgacggaagatcatagagaggcatctgttgttctgccgcctggttcgtcgaagcctccacctaatcataaaacaatggaaaccgacaaagttcattagaaaatatctcaacaggtacgaatcacagaggggttaactcaaagatttagccaaaaatagcaagaactcatagatgaaatatctcacctgctcgatgtgtccttgaggaaaatagaagactcggtcgtcttgtctaggaaccgtcacaagcggaccagcacaagcgtgccatagctctctgtaaagagcagcctcag

SEQ ID NO: 72123 - DNA, 652 bp, Arabidopsis thaliana landsberg
ccggaccccggtggccgttgatgatttccggaaccatcaccgaccgttccggccgaaccctttccggccagaccgttctagcgttctattactcggtgcgccacgcgcggccgttgtcggtcggcttcaactgcgcgctcggtgccgaagacctgcgcccgcacatccagaccatatccggggttgccgagtgccacatcagcacgcaccccaacgccggcctgccgaatgccttcggcgaatacgacgagaccccggaacagatggccgccgtcatcggcagctttgcccgcgaaggcctgctcaacctggttggtggctgctgcggcaccacgccggcgcatatcaaggcaattgcggaagcggtgcgtggcgtggcgccgcgtgcgttgcccaccgaagctcaggaagccgcatgagacacgcccgccgcgccttgctcccgcaccccgccggggagagggctggggtgaagggccaaccgtggctcggcccgacaacgaagcgcgttcaaatcacctctcacgcgagcacccgcccctcaccttaatcctctccccacgggggagaggaggccaacgcaagaagcatgtcctcatgagtacccgtcacacccgcctgtctggtctcgagccgctggtcctcacgcccg

SEQ ID NO: 72124 - DNA, 513 bp, Arabidopsis thaliana landsberg
  unsure (1)..(513): unsure at all n locations
caccgactgcacgcggccggccgaacgggcgccgggcnnnnnnnnnnnnnnnnncggcgacagggtgaaaccgacgaggtaatcgagggcgcggcgggccagataggcatcaaccagttccatgtcgatatcgcgcggggcggccatggcggtctggacggcggactgggtgatggcgttgaaggtgacccgctggacctgcttgtccttcatcaggccttttttcttgttgagcacttgcagcacgtgccacgagatggcttccccctcgcgatccgggtcggtggccaggatgacgcgggcggacgtctttatggcatcggcgatgtcattgaggcgcttggaggatttcagatcaacctcccaggtcatggcgaagtcggcgtccggcttcacggacccgtctttcgagggtaggtcgcggatatggccgagactggccagaacggtgaaacccttgccgagatacttgatgatggtcttggccttggccgggctttctacgataacaac

SEQ ID NO: 72125 - DNA, 565 bp, Arabidopsis thaliana landsberg
  unsure (1)..(565): unsure at all n locations
acatgaaaagaccagagtaaataatttacctactaaaaaccaagttacaagatattttctaattaattagcacatcttccaatggcataaaatcagttattaataatttgtaatgaaaaaaagtggttgaaaactggaatgaatttgattatatataggattggattgcattcatagtctccacaaacgaattattttcaaattctctatccatacaaaaaacaagaatgagaagtagtgnnnnnnnnnnnnnnnnnnnnnnnnnnnnnnnnnnnnnnnnnnnnnnnnnnnnnnnnnnnnnnnnnnnnnnnnnnnnnnnnnnnnnnnnnnnnnnnnnnnnnnnnnnnnnnnnnnnnnnnnnnnnnnnnnnnnnnnnnnnnnnnnnnnnnnnnnnnnnnnnnnnnnnnnnnnnnnnnnnnnnnnnnnnnnnnnnnnnnnnnnnnnnnnnnnnnnnnnnnnnnnnnnnnnnnnnnnnnnnnnnnnnnnnnnnnnnnnnnnnnnnnnnnnnnnnnnnnnnnnnnnnnnnnnnnnnnnnnnnnnnnnnnnnnnnnnnnnnnnnnnnnnn

SEQ ID NO: 72126 - DNA, 786 bp, Arabidopsis thaliana landsberg
  unsure (1)..(786): unsure at all n locations
tgtatgtggtaatataaaactttgtaaataaagtatcttagttaatctgctgaggaaaataatgaaatgaaattaaagaaaaaaacagttgaaaaaagaaaaaatgaaaagaacttggtaacgtaaacattactaattttattacttataaatcataatcagttcaaagttcgttgccatcctcagtgtacactctgaacttgctagatgataaaagtctgcaagaatagtaatccgaagaatactttatgttcaggattgtagttatatcaataaagaaagatttggattgagatgcgtgtgggatttctttttattaaataaatacaaatataatgttttaaaagaaaatgatatgattctaaattggacacgacatacatatcactatgtcttgatgtgataacatttacttcatctatgaaattatatcgtctataaataactaaataaagagtgtttggttgttatgatatgtgggttcattacctggtcaatacatgaaaaggccaaagtcatatcatacaagttcctctgtttttcaagtataccaattctaaatttataataagatacgtatcacatatatattaccgaataatgtatacatatgtctatgaagttgaaatatttcgaatttaatattatctcttgtactggatgtcaaactagaatttcaacaacaaacaattatatgcacattttctcaattntagctccctatgatatatatgtactctgtaacttacttatcaccatgctatatagtgataataacatgaagta

SEQ ID NO: 72127 - DNA, 506 bp, Arabidopsis thaliana landsberg
  unsure (1)..(506): unsure at all n locations
gggtgggacagaaagatacacaatcacttaataaactttcttttccatgtccgaagcgtcactctagcgggggggtttaaacaggtcctgaggaatgaaaaatctgaatattcctaagatagactcgcccgcnnnnnnnnnnnnnnnnnnnnnnnnnnnnnnnngactctgatttgacaggaacaacccttccttgagtactgtcggtcgttgggtaactcaaactttgtaaagatacatatgcaccgacttacactgacgcgtgtatgatcgctcctaattatacatatgaaatctttagaaatgtatcgatagaacatctgaaataggaactatgacaagattgatgaacaaccatacatgatcatgatgctggataaaagccggccaaaaccgcttgcagacgtcggtattgcctgtggctgtcttggcttatatgctaacagatcctgattgatgcttgacaatgtccatgaacttgggacggcagtgtaccagaattatgc

SEQ ID NO: 72128 - DNA, 117 bp, Arabidopsis thaliana landsberg
gtccgggtgaatcattggctccgcctctctcagcatgggaacactactttcgcttcagggatttggatgttattctagatgttttgctacaaatgcacatgaccttttgccatattt

SEQ ID NO: 72129 - DNA, 579 bp, Arabidopsis thaliana landsberg
agctgaaggaaaacctgatggatgattttatgatctccatacaccccattatactgagcggcggcatttttatgtttaatacgctgaacacccgtacggaactgactcacaccggcacgaaaacatattccagcgggctggtgcaagtacgctatgcgttaaaacctgtattagcctgagcatgtatagtttaccttacctatgcctgcaacatttgtcattctgggcttaaaattccggcgggaactttgaaagtacgttaaaaagaataaagatttgtcattgcgagcgtagcgcgccaatcccgtagttggtttcataacacgggattgccgtgtcgctgcgctccttacagcactgacaaaattgtgctgcggaaaaagaagtcacggatagctaagttctccataacgtagtttggacattcgctaatcattctgtattattggaacaagaataatatacaattcgtatctgttctaaactaaacattttacttgcaaagctgcttcgcgcacccttgcaatgccgacatttgtttttcacaactaagtagttatatgaatgttgaaattttag

SEQ ID NO: 72130 - DNA, 596 bp, Arabidopsis thaliana landsberg
ggctggcttttttgcaaaacggcaagcaactcttcgccggtggcgaataccgtacatgtgtggcctgccgtggtcagtacttgttgaatcagttgtgcttgggcaaaatcgtcttccagcgaggcgatgttcattagcgaacctgtattgtttccgagcggatgtcttcaatgggatatccgtgctcattgagagcaacggttacaagtttcagtatatccgcattccgcgtccggaaagccacgacacatccgccacgctgcctgtcccagtaaacctggaggccggcccggctgcccgcatcgtacaaggccaatacccgctggaccacctggctgatgcggccgcactgatcgagtatccacgattcactcaaaaactcgggcatgctgatgcacagctcgtgcccgatttccccaaacgtaccattgccctggacgctcatggcttgcggcatccgtacggcgcagcttggcgaaaggtaaagcacacgacaaaatccgccttattggctacaaaatgatactgtgattcttatagccagggcaggcattgtccagccaaacggcaattcgttgacgattcttgacagtgtg

SEQ ID NO: 72131 - DNA, 636 bp, Arabidopsis thaliana landsberg
tacttaaaatctagctcgatatttctttcttttgttcttatcttcaacgataattattgcctcaggcatgtcagcagaaaacgacaccgttcatattcaatctcgttattaatatgttcttgaagcaaaatatcattattagctatggagtttctgcagtaccctaaccggaagtctcaaaaagataacgtttatgccggttataattaaatccgataaggcgataaatcagtgaacccgtaaagtctaaaattttcacatatatatgaacaaagaaatagtctatagatctccatgcattcttgtacaaacatatttaattttttattttattttctttatataagagctggtgcatgaaactttacattttgcaaatactaacattacatcataatgtaagaaccaataattctagtggaatgatataatctccactttaaattcttatgtctttatccaaagagatcatgaggaacttgagcaaaggaagagggcaccgcttactagtataggtgaataacgtggccgacaccaggctggtctcattttcaaatcaagagatcgagagaaaatggaaggaaaaaagaacctattggcgatgccgatatttgttcgtcttttagtggagaccac

SEQ ID NO: 72132 - DNA, 566 bp, Arabidopsis thaliana landsberg
aatgcctgtctttgtattggatatcgtttttcatcgcccttttattgtgcgttatggccatttgcttcttttcgagtttctggtataatttcccaatttcggcattcaccacataatctcttggatcaagaagtgccgctttttggaaataggctagaacgtcagcgtcattatttctttttgtttgccggagcagcgcaagatagtaccacggccggtttagatttggaagtgcctgggttgcttttcgcaatataatttctgagtcattatagcatcctaggtaataatatatagcgcctagccttcccagctcgatcggatcggggttaccaagcgatacggagtaaagttctttcgcacaactttgcaatatgattttagaatgttccggacaccgatgtttgagctcttcgtagaatgggcttgcagccaggtcgggattagtaagaattgccttttcatagcatttcagcgcttgaaggtatcagatcggatttcatacaacaaaccgagaccgatgaatgcttccgggttgttgccgtcgattgccacagatctggaaa

SEQ ID NO: 72133 - DNA, 632 bp, Arabidopsis thaliana landsberg
gacgaagattttaaatgcattttccaagaatcccataaataagttcaagtgccaccaaaggcgttttattttctaaccataaaatagaatattacaaacacataagaggttcgtgtttaactcatatgacatatttcattacaaacataaatgtttcccatataattggagaaattgtgagagatgtgttcaacaagtacttacggtgactactctacttgcttccacaacacttatttcgtgaaccacaataatttgtccaatcaccaatctcactcagcataaattactatggaaaaaacaaattcttaaaattacctctaattattgattactttatctcgtttgccctacatactacaataatatttcaatcaaataaaccaataatcattgaattattcaaaaagattccgcattataaaccttttcacttcatggattataaaaatcaactcatttataaaagcacatctaaagagtttttataacaacaaatcacattttttttaccaaggctcattaggaataatcaacggttcaagttgaagaggggaagtcttgcctataaccgagtgtacgaaaccatatttcgcattacttgtttattagcgaaattaatggctttgata

SEQ ID NO: 72134 - DNA, 174 bp, Arabidopsis thaliana landsberg
acaattttttttctacgccacagtaacataaaagataggatggatcagtttttttgccacgtcactccttaattcaagcggagccttaagtatttactcatcaagatgatgcgtcgttcggtgctttatgtgggttaattgttgacgaccattcttaacctatatttctgagaa

SEQ ID NO: 72135 - DNA, 1003 bp, Arabidopsis thaliana landsberg
tgtttcaactttttggaatgaaaatcgagatgggaggatgctgtttagttctggcagatccctagttctcaaggtcttcaggcttgggaacaatgttggatcttcgacggatggactctcgtgttcgcttatcaattcctctatctctctgcagtcgaacagttcaatcacctctagctttgggagtttctgaacccatgagacattcttcagcttgttgcagtgtgaaatgtttatgcaacggatattccgcagacaatcttggcttacagaatttccccacactctggttaagttgtgaaggctgtgtaacgtcagaacctctagactcggaagccaatcattttcaaaatctgcgggtgtgaccaggtactccaagtcatggcaacttttaatgctaagtcttctcaggttcctgccatggttagtgagtgatgggagattgaagtagaggagatcattgcactcttcaacgtggagatgctgtatatgtttatgcaaagcaccgaactcgaagagagtttttagggtctccaatgagagaacagtgataccgagtgtggttaggttttccaagtattccaagtcagcgaatccgagttcttctgcttcatcttctccaaagctctgcagttcccaaccggcgtaactgtagtacaagttcagaacctcgagcttgctcagccaacatatggcatctcgtgggatcgtctgaagaaactgagttctttgtaggtccagatgcttcagttttctaagattcccaagctcctgtggcaatacacttatctttgttcctgacatagacagatgatacaactccaccaaatacttgatagacaacggaatctcagtgatacttgtgaacgacaagtccaagactctgagaacaggcatatgcatgaaaaaccctgttggaatcttcttcaaagagctgttctgttggagcatcagtgttgtcagtttcgggcatatgagtttttcaggcaaggtctggattctg

SEQ ID NO: 72136 - DNA, 2644 bp, Arabidopsis thaliana landsberg
cagaaaacaaaaaccggtggatggtcgacacgtagactttgaaattgggaaggagagagggtgacgtgtacgggttaagatgtgttagttgggtggcgggagagatttcgatcgaaagaaaaaaaggttcattgcactgacaaagacaggtcccccttttatattatttttctttcgtcccattaaattccgtaaatatcttgtctttaaactctcttttttcctctcctcattattattctattttctctaatatctcaataaatatttattcgtcaacagatagataaaaaagaagtatttattcatgttccatatgtttgatgccacttgtgcggttttctttggacaatgtgtaatgatatgttattcatatgggagatgtgtgaaagtgggctttggatgatgggcaagagacaaaatacccaagacacctcaaatacaatgtaccaatcatctaccgttttttttttacaaattattacaaaagtagaaaaaacattgattttttattgaaagctatttcttttagataaactgagaagaaagccgagacaaatatgaacactagtaatttattttgtttaatgtgtgattaattgaatttgttagctttccttgcgattgcgggcaaagtggataagagaagtagaagtaggtttgttctaactcgtaataaagtcacagaactaattctaaagaacggtacatatatcatcattcataagtacttgatgtctcccattttcggtgaaacactttacttgaccagtctttttaatatgcaacaaatcttgtatatattcaacataaaaaaaatgcaccatcattggaattgttgacccaacaaaaaaaccctataggcattaaaaggctcttagagggccaattttgttatcgggccttcacttggccagtagaaattacaagcatgcaaacaacagttcgagacttcgaggaagattcctatctctctctactcgtttcttgaaccaagtcatacaagcaagcaagacagctttattaaagttgactttactttaatctttatgagtcaacacctcatctttattagttagttagctcagtcaagtaaaagaaagagcgagaaatcatcgaaatggatttcatctcatctcttatcgttggctgtgctcaggtgttgtgtgaatctatgaatatggcggagagaagaggacataagactgatcttagacaagccatcactgatcttgaaacagccatcggtgacttgaaggccatacgtgatgacctgactttacggatccaacaagacggtctagagggacgaagctgctcaaatcgtgccagagagtggcttagtgcggtgcaagtaacggagactaaaacagccctacttttagtgaggtttaggcgtcgggaacagaggacgcgaatgaggaggagatacctcagttgtttcggttgtgccgactacaaactgtgcaagaaggtttctgccatattgaagagcattggtgagctgagagaacgctctgaagctatcaaaacagatggcgggtcaattcaagtaacttgtagagagatacccatcaagtacgttgtcggaaataccacgatgatggaacaggttttggaatttctcagtgaagaagaagaaagaggaatcattggtgtttatggacctggtggggttgggaagacaacgttaatgcagagcattaacaacgagctgatcacaaaaggacatcagtatgatgtactgatttgggttcaaatgtccagagaattcggcgagtgtacaattcagcaagccgttggagcacggttgggtttatcttgggacgagaaggagaccggcgaaaacagagctttgaagatatacagagctttgagacagaaacgtttcttgttgttgctagatgatgtctgggaagagatagacttggagaaaactggagttcctcgacctgacagggaaaacaaatgcaaggtgatgttcacgacacggtctatagcattatgcaacaatatgggtgcggaatacaagttgagagtggagtttctggagaagaaacacgcgtgggagctgttctgtagtaaggtatggagaaaagatcttttagagtcatcatcaattcgccggctcgcggagattatagtgagtaaatgtggaggattgccactagcgttgatcactttaggaggagccatggctcatagagagacagaagaagagtggatccatgctagtgaagttctgactagatttccagcagagatgaagggtatgaactatgtatttgcccttttgaaattcagctacgacaacctcgagagtgatctgcttcggtcttgtttcttgtactgcgctttattcccagaagaacattctatagagatcgagcagcttgttgagtactgggtcggcgaagggtttctcaccagctcccatggcgttaacaccatttacaagggatattttctcattggggatctgaaagcggcatgtttgttggaaaccggagatgagaaaacacaggtgaagatgcataatgtggtcagaagctttgcattgtggatggcatctgaacaggggacttataaggagctgatcctagttgagcctagcatgggacatactgaagctcctaaagcagaa

SEQ ID NO: 72137 - DNA, 777 bp, Arabidopsis thaliana landsberg
ccgtggttatcttcgcggtgccgggcggcggctattcgcgggcctattactatctgaatttcgagggtcatgattgctatgacgaggccgcctggcacgccgcgcgcggcaccatccacgtcgcgatcgatcatgtcggggtgggcgagagcagcatccccgacctgtcgcggatcagcttccaggcattggccgcgacccacgatagttgcgtccgccaggtcgccgcgatgatcgagcagggtggtctcgcgcccggcttcccgccctgtccgggcctgttccgcgtcggcatgggccagtcgatgggcggcggcgtcaccattctcgcgcaggggcgcttcgccaccttcgacgcgatcgcgccctgcggcgtcagcgcgatccacaccgcgctgccgcagcgcagcgccgaggagttcgaactcggcaagcgccgctttgccaaggtcagcgtcggcgacgccagccagagccacctgaccaccagccatgagggcgtggactatgtctaatcccttccactgggaggacgtgccggccgacatattggaggctgacatggagggcggctatccgatccgtcagacggcgccggcgttcggcagcctgaccatcccgcattgcgcggtgcacatgatgacgcccggctgcttcgccgaggatgcggtgcggatcgccgtgccggtgctgggtcgggtcggggaacgcgacaacctgccccgatccgcgcgccgagccgtcggctaccgcgcctggccgacatcggcgtgttca

SEQ ID NO: 72138 - DNA, 690 bp, Arabidopsis thaliana landsberg
gaactgcgccgtcgcctgcgggaagagcggcagcaccacccgcaggaacccgtaggcgccgaccttcgccagcaccccggagaagaccaccagcaccggcagcggcgccgcgcggtaggcgtcgggcatccagccgtggatcaggaaggccggcatcttgaccaggaaggcggcggcgaagaaccagaagatccagcgctggctgccgagcggcacgccctgttcggagatcgcctggatcgagaaggtgaggtggccgccgtgggcggagatgatcgccgtcgcgatcgccccgaccagcatcagcagcgagccgatcagcgtgtagaccatcatcttcagcgtcgcctgcggcgccgtcggcccgccttcggccgagcgatcgacgccccaggcgccgaagaggaagtagaacggcaccagcatcaggtcgaagaagaggacgaagagcagcaggtcctgggagaggaacgagcccagcgtcgcggtctccgccgccagcatgaggaagaagaagagctgcgggcgctcctgctcgcggaaggcggcgaaggcgatcccgccgacccagagcaccgcggtcagcagcacgaggaagaggttgaggccgtcgatgccgaggctgtagtcgacgccgagcccggagatccaggggtgttgacggtgtcctgcaagccggctgcgccggtg

SEQ ID NO: 72139 - DNA, 660 bp, Arabidopsis thaliana landsberg
actaaggaaatatattattcagtttttattaaaaaaacatttcaaattttagtcattttaataaaattcaaaattgtaagttgacatcttactcaagaaccacatatttgtagcattgtaatcttcaagactttcaagatgagtctcagtctaatgccgatcgttacacctcatttctttcacctaaatctaattatgtcatagtctaagttgacctcatccttcctttttttttttatggtgaaaatgcataatatttgttacatggtgttagaattaccttttaatagatggatcaatttgaagtttccatatagagaaccctgtttaactatagaggcaaaagtaaatgtattatggtaataaaagtagataaaggagtatagtttaacatacatgtatatcatacttcttgaaaattataatatttttatgataatacaaaagacttatatgcctaaaaaggtatgatagatgaaactacaagagtattatttctatttttaagtgatagtaagcctgaacacgtggaaggttggaacccagtatacatagcaataaaagaaatggaccaaaagacacattcctctcttaacctattttggtcttgacaaaataaataaactttatttttgtttcaaatttctcaaggtaaaaaaa

SEQ ID NO: 72140 - DNA, 443 bp, Arabidopsis thaliana landsberg
gggcagtttatatatgatcatgtcacgtacatctcttcttcaccattttttttttctgtctatattttccttatgcttgtttgaggtgtgttcagagattttattcgttggatatttatgatgggtttcatttttttgtttgttttccttaagcggctctgaagcatgacgcgaatgattttgtttgcttttgagctatctgagtctagtttgagacggtgaccaatctgttctttagatctgtagatctcatctctagttcttgttcaagtgagggttgaacagtgaactcgcgtgaatgcttctgcttatgccatctttctgtttgtgcctgaaccatgttgaatatgctgtgacttgctggaaataatatactgtgtcaacagcgctttgatctatcaggaagacaccagactccatgagttattctatgtgtatttagc

SEQ ID NO: 72141 - DNA, 518 bp, Arabidopsis thaliana landsberg
ggtacgccaatatgagatagacttacaagagttaacacaattgtttatgtacgtcaacagagcgatttgagtaacgagaatgaaaagagtatttctgttgttttaatcagcttttgataatatttataaaatattcgacttgatctgttaattaaataatttgaaattcaagtatcagttgttcttataccaaattacagttttagcagtatatttttgtaaatgaagtgaagattataaagtattatatgtctatagcttctttttttggttaactatttatagctaaatcatatgatatgacacttaacattctaataatttaattttaatttatatggtgacagaacgatgattctaataaaatttagcgtgtactatagataatgtcatagttaacgtagtaataattcattacttcaataaaaagaaaagaaaagctctttttttttttggtcattatgtgttcatccactttggttgattgacttattgaaccacccttacacaatttggat

SEQ ID NO: 72142 - DNA, 579 bp, Arabidopsis thaliana landsberg
  unsure (1)..(579): unsure at all n locations
ctctcaggttagcggtgcgttctctcggctatctcgagatgaacgcgatgcgggagcatgacgacacggtctatggggttgaccagtcacgcagttctccccccctgtcagaatctgactcgtcagattctccctcgcgatatgcagatgttggttccgcatccccatcactgcatactgcatgcttacttagcgtcacaaaggtggtccattgtctcggggaaggcaacgcgttctgtgtagagccaacactgaactcgactcgatcgtcgcccctctctcctccctctaatctctcgactaccgggtcaagccacaccggacggctcccatcccgctaacatcatcaactttggcgggttggccctgactgagtctcgtcgcctttgtgttgggtgtttcttttgccggggataagcatcatcttctcgagaccggaccggagtactcagaccagagtgctcacctcggtggtccggcggattcaatgacacccccatgtgagaacaggcagacattgaactcgagcagttgggcatgtcttacctctcatgcaagcccncccctcttgttcgtcct

SEQ ID NO: 72143 - DNA, 504 bp, Arabidopsis thaliana landsberg
  unsure (1)..(504): unsure at all n locations
tcagaatcttgcaaaatttggaaatctgatatatataccactaaaaccttcacgagacaacgaaaattcttcactttaatttgttaaacaaaaatatttaaaagtatccannnnnnnnnnnnnnnnnnnnnnnnngggcgacagtttcacttaaattcatattcacaactcacaagtcaaagattttgattggagtcacgtatcatatacttcgtaggagttatttatcttttaagttatatgcgaacataagacgaagaaaaaaaactattttagtacatataaatatcaaagtaatcacatgaagttttttgcgaaagtgatagtttaacggctaatcatacaggggccaaagagtactcaattttatgattatttattgagttctgactattttatgtgttggagaatgaagacagtacttgtcacgtttaatgataaaatactgattacaaaacaaaaaaggattatggcgacaataatgcagaagaaatgacggaattc

SEQ ID NO: 72144 - DNA, 475 bp, Arabidopsis thaliana landsberg
ggttttacgcgtaagagggaatttgatagtgaagagagatgtgggatacggctttatgtttgagatttccatatattacatctatgatgttgattatgctcggaagcgttgcaagcgcgctcgtcgcatgatctacaggacttttgaagacattaccatgagctcgggattatgacttgaataatatagtatgggcgtgcataccatattttcaccaactactggtacgcgttagagtaagcgtaaaaaccgttctataaagctggcatacattgttaaagacaaaaaggtgtgccacgtgtgccatgcagccttacatcagagaatatcatctttgtcgcatgacctctatatttgagagaaaactctaatcaaaacacgtaataaaaaacgaaaaaagtgagtgggcacttggaccacgaaatatctgtcgtgagaaacaaaagatatggacaatgagagacttgaactcccg

SEQ ID NO: 72145 - DNA, 147 bp, Arabidopsis thaliana landsberg
ttaccttcactttaggataagggaagctagttttagcaccacctctgcttccgaaactgatctatgatttcttgcccttaggtcttaagatcggaaaagagtaggttaaattcctccctcacaccccatcatcgcaccctgcatttg

SEQ ID NO: 72146 - DNA, 590 bp, Arabidopsis thaliana landsberg
actacaatgtgagaaaagttggatttacggaccattctctctttattttctcatataccaaacggggcatgactctaggatatgattacacaaattagccacaaggtcaacaggttggcctttgaagactttttccccggtgtagcgaaccctcttgatgggtaaaaactcaattatatacccattactctcacctgttattgctttttcaataatcctatcttctgaaacattctcttggttctctcagtgtgcagtggaatcaggggaaacagagtggcaactatcaatactccatcaaggttcgcttcatttgtacattatatctatatacaatgctctcacctgggacaatagtttaggtacaaaatgatgagatctctaaaaggctcattattagctcagggtactgatagagaaatacatagacattaatacattatgcttggtgaccaatgcaataagaatttatttatcgggagcttttgcatgctagaaagattgatgaccgttgggataaagaatggattgtggatgtagaatttctgggggtaccaagcatatacacccggtgttaccaaagtacaatt

SEQ ID NO: 72147 - DNA, 628 bp, Arabidopsis thaliana landsberg
gccgtggctgctattagaatgccgatgcttcgtgtttcggattttaatggagagctaagttatgcgatacttgtttgtgttttaccgggcgggacgcctcgggattggacttatcaggagattgagattgttaaagttgtggcggatcaagtaaccgttgcgttagatcatgcagcggttcttgaagagtctcagcttatgagggagaagctggcggaacagaacagggcgttgcagatggcgaagagagacgcgttgagagcgagccaagcgaggaatgcgtttcagaaaacgatgagcgaagggatgaggcgtcctatgcattcgatactcggtcttttgtcgatgattcaggacgagaagttgagtgacgagcagaaaatgattgttgatacgatggttaaaacagggaatgttatgtcgaatttggtgggggactctatggatgtgcctgacggtagatttggtacggagatgaaaccgtttagtctgcatcgtacgatccatgaagcagcttgtatggcgagatgtttgtgtctatgcaatgcaattaggttcttggttgacgcggagaagtctctacctgataatgtagtaagtgatgaaagaagggtctttcaagtgatac

SEQ ID NO: 72148 - DNA, 353 bp, Arabidopsis thaliana landsberg
ctctcagaccggtaacagcatcatttccttctataacagcagcagacatttcctaaaatcaaacgttatacatattattacaggagttaaaactattcttgtctacaaagaatgaaggaaagtagtaacaattagtgtttcctccgatgtatattgattgaatagacaaataattcaaaatattcgaatcgtttttcaatcagttctatcaagtgtatgaaatcttccagaatataaactttcctttaaaatagcattcaaatctaagaacagtcaatgcccaatttacagagaattcaatcatgtaagataactaaatgtaaatctaaatgatgtcgcaaggttcctgttga

SEQ ID NO: 72149 - DNA, 227 bp, Arabidopsis thaliana landsberg
tattcctctgactccgcgcatctgtgagggccgttgatgtcccgggcgcgtgccctcttcatatgcgcactttccaactttgggaacggtggcggtttccacgaaaatctcctaggttcgttttgtcaccaacctagttcattactgcgcgggagactaggggccgcaaagggggacaccggctgtagacctgtggctgagacacgacgtatacacacccgtgtcac

SEQ ID NO: 72150 - DNA, 571 bp, Arabidopsis thaliana landsberg
gatttgggatcgtggtaagaaatcaaaaactttgaaagcaattaaagaaataaatatattttaaaatactgtagaatcctagttgcgtaggtataacaacattaaataaatgaggtttcatcaatggttcaataatctcagattatctcaataatttttgtaattatcgtcaaagctaaatatgttgtatatatatgcttatttttaatagatttattacttcattaaacagctcagcataagagggaaatagtacttgagcaaaaataaaaaataagagagaaatagtatgtaacatatggtaaagcctctactagactgaaataaaaatatataatagtaacaaattataattaacgttacaaattacatattgaaccaataagcagaatcaagaagatcagcccacaggaacaaggccgtgggtttttaagtttcaaattatgagggcatggacttttcttcagcatgtcatatctctacactatatataccatatacgtattgattctcttttcttacacataacagaacccaaagagaaaaaaattcatatttaatagtaaccctg

SEQ ID NO: 72151 - DNA, 566 bp, Arabidopsis thaliana landsberg
  unsure (1)..(566): unsure at all n locations
cagtgaaataacataaaaactttcttctttttgtgcaagttgattttgaaatgaatttaaaaacagatattttctcttgaatgtttttcgattcgttcatgaacccattggcataaacttcaaagctatcaactaattcttggtttacctagctagggtttggttattagttagatacgctctttagattgctataaatataatgaagtggtcttctctgtatatatatatacataggtggaagtgaagtcttcgaataaaagcagagcttccacatggggaatgaatctcattctctgtaactcacatatttcaatagttaaattaataattcaaatatgacaataatcaaatatatacaatacgtgaagggaatttttttttggattctaagaattaaagtgtcacggaattttggacgattctttagataataatataatgcatcaattactggacaaaaattggttatcaattatttcccaatagcaagaccagtcgacatatgtttgtntgaaaactaatcaacaactagactttgaatactaactgaaatataatacaca

SEQ ID NO: 72152 - DNA, 546 bp, Arabidopsis thaliana landsberg
taaaccttctgataaccagtatacaaaaagttataaacttaaatagttctccatctgtcatgtaatgttaccaagagactattactaacagtaccattgcaaaaggctttcaattccgttgtgtagtaaaaatgataagtccaaatcggtgcccaaaaagctggtagacaatgttggatatatatgtaaatatatttctcagaagattaaaaatacttgtaattctcttccttttttctcttataattgatgtttgcattcagctgttgcctgatgatatgacttcacattgttattgtattggtttacaaatggttttaaaaagcgaaatgttgtagttagtgaagataaaattacaaaatttctagataaattatacaaaacgtatgagtagattgtttccaattacaattcttgtgctttatataaacaactacaattattgatttatgtaaatttttacgaactatttatgtatatatgatttgtagacttgtaatcttctttctctctaaacgaggttcaaactcggagataacttataaa

SEQ ID NO: 72153 - DNA, 304 bp, Arabidopsis thaliana landsberg
gagggcgatacagacgcgatgagcacattatttttttagtaagagtagcagcttcaacttcgcctgatgagggcggtgtcataagactatcaaacggaaactgagtggagacgatgatctgttatcatcacatttatacattcgatagaaagagattcgaaattaaccatgattcaccacggaatttgttcttcttcggagatactttttttttttcttggatagaaaggaaaccaaaccatctcatatatattctctttctcatgcaattctttaatgggaatatcaaatatgtctaccaaat

SEQ ID NO: 72154 - DNA, 614 bp, Arabidopsis thaliana landsberg
ctctcagtggcaaccagaaatcgtctgatattgaactcgaagttattcattcttgtaaaaaatagatctagttcttgtttggtgatgttagacattaactgaaatttttcctcaagttcgttgaatctggcagttgttacttttgacaggccaatgaggctatctttgagtatttccgtttttgcgttagaagtggccattttagtttccagatcatctattttgctttctatattttcattattttttccataaaagaaaccggctacgaaggtggcacctatggcaattcccattgtagccaacgaaaccaattctcttttagtgcgactataatttactttttcaaacaattgttgccttttttgcataaattcatttaatggatatatgacagaattatgatcatgcattaggtaggcacaggtattacttctaaattcaggagtatttggcattcgtcgatgtagtttttggacaatttctttacagttttcttgcatacttgatagaagactatttgatatttgaacattatgtctaggtaatctgaccttaacataatgtatccaatagtcattgaatatgtatgctttgccgttgtctacaagtgt

SEQ ID NO: 72155 - DNA, 597 bp, Arabidopsis thaliana landsberg
aggcaccatgttcagctataatatcaaggggaattccttgcatccatgtttcaagtgattgtcttcttcggccactaatgacaatgatcctgtttttggtatcactggtaagtgcctttaataattgaataagttcagcactgggcgctgccttagcagggtttttatcaaagggtaccagggtgccatcataatctaaaaatataagtcgactatttgcctgctgataggctttggtaaagttgtcaaggtttactgggctgatttgtcttgttgataatttttgttgtttctcttttgctatggaaaggctatttaaaaagttattaacccacatatgtatattgaatttttttatattttcctgcatgatttgcatatgctgcattttctctgagggatccatctgcagtgccgtatttatagccgcggccatgccatcggcatctcctggattgataataatggcctccgttagttctctggcagcgcctgccatttcacttaatatcaaaacgccttctctgtccgttttactggcgatatattccttacagactaaattcatgccatcccgcataggcgttaccagtgcaa

SEQ ID NO: 72156 - DNA, 128 bp, Arabidopsis thaliana landsberg
tctatgaaatctacaaacgtccgacatatcacatgaattacactttacttatctaaaaaaatctaatccgcagagcacactgattaaaaatccatactcgaccatattcatacgaccaaccccaatat

SEQ ID NO: 72157 - DNA, 1561 bp, Arabidopsis thaliana landsberg
tagttgtaaatcgacctattgattcttccctgcatgagttgctagaaatcgcagagtgtattgcactgggttgttctactaccagtgttagtgtgttggtacagaggctggctgagcttgtcaccgagcatatgggtggatctgcggaagattccagtatagtattggcaaggtggactgaaaaaagcagcgagttcaaggcagcattgaatacttgtgtattccctattggatttgtaaagattggtatctcaaggcatcgtgctctgcttttcaaggtatattctcaaaccctcttcctagatttagtctcttgtcttatcctacttgtggcaagtcatgaaatcgttgaatgattggaccagctagtaaaaagaaggaaacatgaaatctcatatgttaaggatgattgaacaaatgacttgtgctgttttcgcagaatcagatgctttgctgcttgtactcataaatcttgtttgattttgaaaactgatccgtgggcagtttacttctcccaatgtaggttttggcagatagtgtcaggttaccttgtaggttggtaaaaggtagccactacacaggcaatgaggatgatgctgtgaacacgataagactggaagatgaaaggtgtttttgattatctttttcactatgattccattattttcttttttctttttacgaaaatgtaacatatctccccttctttcagagagtacttggttgatcttatgacagatcctgggacgcttatacccgctgattttgcaagtgctagtaataacaccgttgagccatgtaactcaaatggaaacaaatttcctacagttcagttttcaaatgacgtgccgaagctctcagaaggtgaaggaagtagtcacagttctatggccaactatagttcttctttggatagaaggacagaggctgaaaggacagattcttcatacccaaaggtgggaccacttcggaacatagactatagttctccttctagcgtaactagttctactcagttggagaacaattcctcaacagcaattggaaaggggagtcgaggagccataattgaatgttcaagaacaaacatgaatatagttccttacaatcagaacagtgaggaagacccaaaaaaccttttcgcagaccttaatccatttcaaaataagggagctgacaagctgtatatgcccactaaatcaggtttgaataacgttgatgattttcatcaacagaaaaataatgctctggttggtagatcacctgcgccaatgatgtggaagaattacagttgcaatgaagccccaaagagaaaggagaatagttatatagaaaatcttctcccgaaactccaccgtgatcctcgttatggaaacactcaatcctcatatgctacctcaagctccaatggagctatttcctcaaatgtgcatggcagagacaatgtgacatttgtgtcaccggttgctgtaccatcatccttcacatccactgaaaatcagtttagaccaagtatagtggaggatatgaacagaaacaccaacaatgaactagatcttca

SEQ ID NO: 72158 - DNA, 345 bp, Arabidopsis thaliana landsberg
ctctgaaacttactctactctctacacactctttcttttttatttatacaaatgatacattttttgttttgcatcacttcctctgatgatggcaccttggatgttgagtaagctttcattgactaatgattttgtctttttggcgtcttgaataggcaaactttatctatctgcgatagatgattttcgcttaatattgaagtattgagtccgaaacctcttcatattgtgtaatagatgagtctgtattcatattgacttgacagttaaattttggaaatatcgtaaagtaagttgcatatttttattagtgaagtaattttgcgttttgtataaatatctact

SEQ ID NO: 72159 - DNA, 361 bp, Arabidopsis thaliana landsberg
  unsure (1)..(361): unsure at all n locations
acatgaatttattcttgcctacgtcgccgattgtcaacaagaaaatcatcaccacaaaactataaaacttgttttcctatatagaacaaaatatantacatatgtactcacacaaaattaacatttttttattttaatctctgttttttttaataaaaaaatttgactataaattgagtgacacgctaaagatgagcgattaatgtttcttataataaaccatgacactataaacttaggaaatatatcgatcgaatgtctgaaactacatcgatcattgagaacgataagttagcaaatttatgcaatcaatatggaattaaacagaattttattttatttttgaacaaaaggaattaaa

SEQ ID NO: 72160 - DNA, 1270 bp, Arabidopsis thaliana landsberg
ccagtgaatcattaccctctcaggagccttgcacgaggctccatgtcttgacccaagagaatataatgataaatctcaagcagaagtaagttgtcatgcctcaaccaactattgaaaccctcaatagtctgagttatcacaagaactatatccatcacattctcacgagacagaacttcgagaaactgatccctcaacgacaaaaagtaacaagtagactctccagctttctgaatcggagatacatcatgaatagcaagtaaattcctgaataaagtaagcacaagctgaaccaatttccaatcttcctcattgaatacatctctgtaaagcataaataatatcagtaagaaagaaaaaaacgttttgcattacttaacacaacaatgagtttcgaacttacaattctaagttctcaagaggagcttcaagcaaagacacaatcactgcaacaatattactaaaagtaattgcagatttcaatccccatagatactctaactgctgaggaatatcatctgaagaaggctctataggcattgtaagaaacaccaacactttaactgaacaaaaacagatcacaatctcatcagaaaaattacaaagtatcacacttttatttaagggcaacagagcaaactcagtacctgcatttaaaactaagttatgttcatcttggtaatgctcaatgatcggaatcaaatctttagagactatattccacgcacagacttgtttgaaaacttctctgctctcaggatcgtcgcgtctcagaaatctcagtaaatctttcaaattgtcgagacagtactcgcttttcgagtacccaattcttcttctgtcttcgtcttcctcgggaagacccagatcgctgcagattactgataatccttccaaatctatcttcttcttcgttgagattctctcctccacatccattttcttccgcggaatacaaaaatgaaataaaaaatctcaatgaaattaagaagagatttttagcgaatcaaaacgtaaacttcgagaaatcagaaatcgaaaaggctcagcttctctgtatcatcactaatctcaagtgattagggctcttgtgagcgcgaatagctccagacagtttcccgccatttcgcaatcctcaaaagttacaagtcaaactaaaacaccgagatttggcccacatggtctaaatgggcttataaaaaggtccaaaagtacgagtttaaacgccgtcgttttgggttgtgtcttattttgtttttttctaaaaatt

SEQ ID NO: 72161 - DNA, 577 bp, Arabidopsis thaliana landsberg
tctatttttatacatgcgctagccgctaagcataccgctaatgaaccaatattcatagttgtaactgatcatctctctcttctcgtataataatctcataaattagagggagccgaatgcggcggtaaaattggtgaaccgtctctaggttaacaaaattggtttacacacacgtccttccattgctcgataaattaacaattacttaagaaaatcttaataatatagattaattcagatcagatggttaattatatttcttaaccgattaatcaattaatgaattaagaagaacaaaaatcaataaataaagaataactaaattgtaaatcaaactgtgttgattaatggctagtgtcgttactatcatcaattgtaaatcatattgtaaattgcaagtgataggaaacataaacatgtgtttatagctgaccaaataacatgtctgtaaatgtatatgatttttggcgaatgcattgcatatgcaaatttaaaccgggtaatgacattacacatcacgaacatatacacatagctcattagatcattgatgatcatgtatatttactgtagaaac

SEQ ID NO: 72162 - DNA, 367 bp, Arabidopsis thaliana landsberg
gaacttattgtgactacggccttaacataattgttcccttgtttggtgagaataactttatttagtttcgagggtaactttttcactttttgtctcaacagtactgtatgagtatacgatggaagtacacatatatactacccatttattaacaagaacgtacaaataccaccacttgttttatttctttttttggtaaatactaaaaaactctcacttaagaaagattgaagccatcaatcctggccactaattcaaatatttgctggtaattcttgtatttgtctgcatgtacttaccttctttctaacaaattaataattgggtaaaactactgtgaatataagttttattaaaacaataaaat

SEQ ID NO: 72163 - DNA, 572 bp, Arabidopsis thaliana landsberg
cctttttgacttttgcgtcgcacggtctgtgccgctgtccccacaaatctctattttttacacacgcaatctctacctctgcgtctgcgtttcgaaacgtgactcttctaaccgctccacgtgagtgacttttagagcgagtttggtgtccgaaaccacgcgtgcgcgtctcctcaacgcctgagtctctctatgaagttgcattgacgtcagaaaaattaaatttgtcttacttgaaacataaaaatttacagtagtaaattatcattttcataacacttcatttattctcttgtagttaaacaacggatatactaatgaaatgaactcgttcaatctaattaaaatctcattattaatggtagacgctagagaatctcattattgtaggtgttaatttatgaaaataatacatcactttcaatcactgatttgattagattgatggattttatatacagcccatgtttttaacctctctagttgaaattttggttgattttaaagagaagagacaaaaatcaaagacgaaaaacaaaaagtggaagtagaacaaaaagctgatggtcaga

SEQ ID NO: 72164 - DNA, 106 bp, Arabidopsis thaliana landsberg
caaatctcaagaatcctgatccgaatcttcttcttcaaatgatgcatccctttttatttaccaagatcattttggaaaaagatggaagcctttaagaatctggatc

SEQ ID NO: 72165 - DNA, 318 bp, Arabidopsis thaliana landsberg
accgacatgaccccatcaatggcgcggcaccccaccactttacctttaaacacggcgcctagggcgggatggcacaacgccagcgtaaaggagcaggcctgctaccagtgaaatcgccgttaccacaggaatcagatacgcgaagggccccaggcgacacaaagatgaaaccgtccagtcaggggggccaaggcaacaccaaggatataaccaggagtcgaagggccagcgaacagcggagacaacagaaagacgccagacttcaaacacacagaacggagccgggtgataactacacccaacaacacgggccagggg

SEQ ID NO: 72166 - DNA, 358 bp, Arabidopsis thaliana landsberg
tttttttaaacatgatcaaacctgttaaatcaatgttgcaaaaaaattatttttttattattatgtatagctttatatttaaaactcgaatatcttccttataattataaaaatttaatgtgcaccgcttgatccactttcaccattcaacacatataaagcgtttgaacagggtttgaatgtacgcgcgtatcgagtggtttacggacggttcaattattatgttaccattcaacatcactttattatgttacctgtggtttgataattaaaaagtaaaaaataaaatcacactgatgcggttcaaaagtgtaatggaaaaagcaaaactgtagctatcaaattataccgcatatgt

SEQ ID NO: 72167 - DNA, 861 bp, Arabidopsis thaliana landsberg
gacgattcctaaaacccttttccttctctttggtttgctcgagaaatcgtttcctgccatggattctgatgtgaggaggaagattaacaacactactcagggttcgtccccttctccgaagccctccaagttctctgtgtaccggaaccctgctctcgccgccgcttccaccgccaacagcatccgtccttcgaaatccgttcttctattcatattcttgctctctatcgcttccgctttctctctcatctccttcatggccgggtacttgccagcattagcttgagcttcgtacattccctcttagttgcattgttggagtatttgtctaggttttggaatatttctggttagctagaaaatctcgacttgagtccttagttcttattctttatcatttgctttctctgtgagttaggattgctcaatctgggaaagatctaccatgataatcatttgcttgtttatcttatgttacagggagaaatggttgaccaatgctttaacattcgggaaaatatcccaagaggcagcttgtgagttgcatttttttcttgagagatttcctttttaaccttttgtgttttattagtttcgtaatatatctaaaatcttaccttgtggttcagatgtcactgtaaaagcgtggcaggggctggtgactttgttttgtattggagcaatgatggctttgtccaaaggcatatctttgcacagagcaaagtttgctgctcgaggagaaactaaatctttctctaaagaaaccaaagatcagttttctttatcaaatcgtcagcttgaacttcttgggataaagaaaaaagctgaccagagtgtatcagaatttccaaagagtcgtcc

SEQ ID NO: 72168 - DNA, 1417 bp, Arabidopsis thaliana landsberg
  unsure (1)..(1417): unsure at all n locations
tcttctggtggtggtgataagctgaattcccgtaatggaagccagattagttcatttagcactccctcaaaacaaatgggttcaccgtctatgtatcttgtcccttctagctcaccagtttcttctaaccgtccttcgtcgggtcaggataaggctgtctctagtccttggtctggtagacgaagttcnnnnnnnnnnnnnnnnnnnnnnnnnnnnnnnnnnnnncttttggcagaaatagatgagaaaatcactgagtcggctgggaagatgcgtacgcctccaccaacagttgggagttttgccatggctagcccgagtacagttggtggttcaactggtgcatctggggctactaggagtacaccactaagacctgtcaggatgtctcctggcgctcagaaatttacgactcccccaaagaaaggagagggtgatttccccaacccaatgtccttagaaagggctatcgaaggttttattcatctaggtgtctatcctcagatagaagactggcgtgaccgactaaggcaatggtgttcctcagtgttgctcaaacctctgcttaacaaggttgaaaccagtcatattcaggtttgtttctggagtccttttaaagtaaacactggccttcctatacttgtctgctgatgaatgagttgataaccacatccgaatcagaggcacaagaagaatttcttgtttccctatgttgctgtgaaagagattttaaactttgtcatttgtgtaggtaatgcaaacagcatcaaagcttggtgttaatgtcacagttagtcaagttggaagtgatttgccaacaaatggaaccgctacaactgccttaccggttgatcgaacgaaggggtggcagccatcttactctctcgatgaagatgctcttcttcaccaattacgcgctaatcttgtacaggctattgatgcttccatgcgtaagtaacattcctacagcttctactgtgatgtggtccgaatggttgtcattgttaagttgaagtgctgttctgttgttttgaaaatattgttatcaacttaagacttcatgtttctcaataaattactgaatttaagaatgttgtaattgattggatatctgagagaaataatgatatcatgtcatttatgtgttgttgctaaatgtttgggtcttcatatagttgctaattctttcttctggcatctgcagaaaagctgcgtacagagaaccagcagtttcagcaacagcaacaacaacagcaacagcaagcggcactaatccctgtcatgcaggaatgtgttgatgctataagtgaacatcggaggcttcagggcttaatgaaaggagagtgggttaagggcctacttccgcgcagcagtattccagcagattacacagtgcacagaatcccaggtatcaaac

SEQ ID NO: 72169 - DNA, 450 bp, Arabidopsis thaliana landsberg
gttcagagatagactaataccacagtgcttaactcatcggtattgccaacgaacgcatacataacgtttgctcgtcttttggatcgaaccttctacttacgagaagcccatctggggatcgtcaaccccacgccgcgccccagccccgggcaccatcttcatcaacttctaagacaccagtgtgtacgaaagcggcacctggcatctcctcgcctcggacatcttagccgggaacacataatgatcaagccattgagccacctgctctactaccataaacccccgggcgctcctcgggcttactgtgaacagcctgtaagtacagcatggacttcaattggggctatcgcggccggctaatgctcgcaggacggcacacgaccgcagagcctcaatggccaagcattgggaattttttgctattgtcagcagatggagtgctcacgtgat

SEQ ID NO: 72170 - DNA, 134 bp, Arabidopsis thaliana landsberg
cccctgcaagactatctaaattttccattttccttcggcgtactacctatcttcggcaggggcaacatttcgccgctcctttatttcttcctttcatggttgcgcggtcagagagccgcagaactgcacattaa

SEQ ID NO: 72171 - DNA, 311 bp, Arabidopsis thaliana landsberg
gtttttccgccatcctcggaatgcgcgtagtagacgcctttgagtttgcggccgagggcgaaccatgtggcatgataggtgccatcgtctgcgatcgcgagacttggcccctggtgcgggcacgcatcgacttcgcgtcgtcgtcgctaacgcggtagagggggccgggttttccgtcgttggaaaacgttatgacggcgtggtcgcgaatgccgccatcgaaaatgttgcgaaacatcacgacgggtttccccggtccggcgaaagcaacggcgatgcggcagcattcgcaggtgttatcgcgggcgatg

SEQ ID NO: 72172 - DNA, 578 bp, Arabidopsis thaliana landsberg
ttaaattaagaacgaacagcagacactctcaaatggttgatccaaaccaaaaaccaaatttgagggctaaaggggcttggaccgggcaagttttatataacatggaccgacaattgagttgagttcaattgtagcatgtacactaaacacattcgaaacttgattctgcccatatttaaataaaatgtatatacaataataagtaggataaaatctactctatataaaaaataaagtttttttgcaagagatttttttatatacttaattacatgccatgaaattaaaatattttggtaaagagaaaattatttaaaattatttacatcaaaatttacatttattaatttcatactacaagccttaagatagctcataacttcatatcataaacctacagtaattcaacaaaataaacttttcatagtaacaaactaggtacaaattaactttatggtaacaaatgatttcataatccattgatatcaattgtcttaattacattccaagataatcaaaaataaattatttacgaatcagttgatcaatgataaaaacatctaataatatgatatatg

SEQ ID NO: 72173 - DNA, 512 bp, Arabidopsis thaliana landsberg
gtaccgatgtacgcgcaagggtactgggctagccctgtgacgcgccccctggatttccgttttttgtttctataatcgtacatatagagcaatttcatgtcgctcatgatgcttggctgggttagggttggtgtttggggggcttggaaggtccatgtccggggaggggagtcttgtacatattgacgtgtagaaaggccggtcacacgcacattatacggttggctcttcaaacccgaagacagtgggtgtattttataatcacaacgctttatgaccctcttttcttattcgtatgatgtccttggagactttcattccttctagtagccatggctcccaagtaaatattgtctgacatgctgttagtccctgtcatactaaagaaaatctttgaccattggtttactcgattggatattggaagaaacaacgactgaatccagaatcaatctaattcatcacccccgccatggaatcaaccttagccttgatcgcattcgaggctcatt

SEQ ID NO: 72174 - DNA, 484 bp, Arabidopsis thaliana landsberg
  unsure (1)..(484): unsure at all n locations
tnnnnnnnnnnnnnnnnnnnnnnnnnnnnnnnnnnnnnnnnnnnnnnnnnnnnnnnnnnnnnnnnnnnnnnnnnnnnnnnnnnnnnnnnnnnnnnnnnnnnnnnnnnnnnnnnnnnnnnnnnnnnnnnnnnnnnnnnnnnnnnnnnnnnnnnnnnnnnnnnnnnnnnnnnnnnnnnnnnnnnnnnnnnnnnnnnnnnnnnnnnnnnnnnnnnnnnnnnnnnnnnnnnnnnnnnnnnnnnnnnnnnnnnnnnnnnnnnnnnnnnnnnnnnnnnnnnnnnnnnnnnnnnnnnnnnnnnnnnnnnnnnnnnnnnnnnnnnnnnnnnnnnnnnnnnnnnnnnnnnnnnnnnnnnnnnnnnnnngatgttggtttatttgatcgatattcaagggtaagggcgatggatttttgttgcacctgaacgggcttgatgcttgttctataccattatttagggtgatgctgtaccccgagtgaaaggaaaaa

SEQ ID NO: 72175 - DNA, 487 bp, Arabidopsis thaliana landsberg
  unsure (1)..(487): unsure at all n locations
aaaagtacacaacataagctatttctcattgcacaaatcactttgaatgttttctattaaatatcgattggaacacaaggttgattctcggacaatttccaaaaaatttgctcatgtgatcttgctcttttctcgctataccagttcatggtaatgtccctattaaatagtgactagtcggcgaaatagttagaagtttcaacaatattataagtttagacataggcccaatcttctctcgctaccagttcatggaaatgtttcaacaaattatatataagtttgatttgaagtttgttgacttcaagtttttgttccgtactgattgggccaatgtctaaagttcactaggccgatcaaaagagtctgaaatttttattataagtnnnnnnnnnnnnnnnnnnnnnnnnnnnnnnnnnnnnnnnnnagttgatcgtgatgccgtcgaaatttgaagaatttgtccggctttctccatcaatttggc

SEQ ID NO: 72176 - DNA, 597 bp, Arabidopsis thaliana landsberg
attttttagggttattatgtatgttttaaaattcaaatttaaccgaaaaaaacatattcaaaagattaacaaaacaaatatctataaggttagaaaaaaaggaataaccaaattgtaaatattgaagaagattgaatggtattgaatagtgttagactctgtttagataactttcgataaaataatttttctttaatttgataattcagttcaccacaaaatgtttagaggttatgatttttgttgctgtgagatatagacataatataacatatacatatgtatcttcattactgatcggatatccaaacaaaaggcaagaagtcgaaacttaatcattccgttcataactacgtacatataatcaataatcaatacaaatgttaacgtctcaagagataacaaaatcatatgtggcaacacctaaataaaatcaaatgtaagttcattatcaatgtttctatatatatgctttcacaaatttaaaattgaagcatctagagaaaactgatatcttttaataaaaatttcatatccaaatagacttttcttttatataactttgaaacaattagagtaattgtgacaaaacaaatc

SEQ ID NO: 72177 - DNA, 402 bp, Arabidopsis thaliana landsberg
gtgcagattctcttcatttcaattcccaatggccgtattctcaagaaaaacctaacctttgaagcaaggtcaaatttcaggagtctgtgttttgtaagttcccaggtactcttcacttttgtctccaatcgaattgccagattcccaattgcgataatcccaaaatcaaaactttcagattgtaccatagtcaaaacaaacaaaagctaacctttggcgacttcgcctttcttcagatcaacgatgtaagtaaccttttcaaaccctaatttctgaaattccaaatctgtcacattcaaacataaaacaaaacagagtaataaacgaaatgattctataaagaaaggaccaacctttggagcaatgatgatctgataaacaagaccgatcttctttgtgacc

SEQ ID NO: 72178 - DNA, 260 bp, Arabidopsis thaliana landsberg
attttccattgtacatggatatttctctgcaacaactgtttatatcgttgggtggatggcacaaaagaagggtccaatgtacgaccgaattaatttatactaacatgtaaaacacaatagataaaactcttttttcaaatttttagagagcaatgatgatatcgtttttgagtggcaatttgattttgttgccctggaccaacttgttgcactccaataagattcacagacatgatgaagatattcttagaggagggcta

SEQ ID NO: 72179 - DNA, 453 bp, Arabidopsis thaliana landsberg
ccatgccaaaaaaaaatcaaatcgcttcttattggtatgtggcaggcaagtatatctagcgaaaggtataactggtagttgcctaaaaataagaagaaggtataactggtataaagaaaaacatgtgggaagttcatattcaaggaaggcaaacaaacctatgtgttgatttgttatatataagaaaaaataaactccactagctgcgtatgagataagtttcttaagttcgcaagctgtgtatgaggtgtacgtcaaagcgaaagatccctaattagtaattttatttggtgaaactcttgtaaccgattgtatagccataactaaaaatgtttgtttttataattgttaaaatttaaaacaatatttcattgtgagagagttacacacaagaatatatgtctttatttttttttagttccctacaaaatcatttggaaaatactgtatata

SEQ ID NO: 72180 - DNA, 621 bp, Arabidopsis thaliana landsberg
ccatcagccgtcccgtcgaaacctggcgggcatcgcgctccggctaaggagttcgaacaaatcttttctttacgatgtcattctgaacaggcggaaagcagagcttgccgcaaacttgtttctaaacgagtgacgcttccatcttctcgacacctcgccctttcgacaggggaatggtggagccagacgggatcgaaccgacgacctcatgcttgcaaagcacgcgctctcccagctgagctatggcccctgataccttccgtggaggaaaaatggtgggcctgggaggacttgaacctccgacctcacgcttatcaagcgcgcgctctaaccaactgagctacaagccctcagaccgcaccttcgatcggctcgcctccgagacgaagtctcgaaaggccgacctgccgtcgcggcttgtgccgcgccctcgcggagcgccagcagccgaaagctgcggtacggcgcgcgagcgcaggtcaaagtcactcgtgaagaaagagaaacgaaggcggcagatccgcttttgtatgtgcgacgtgaagattgactatcttccgtcttgttccaagagaaccgaaaggcagaggctcatcgccccatctaaaagacgggaatgag

SEQ ID NO: 72181 - DNA, 510 bp, Arabidopsis thaliana landsberg
aaatatcctggctcctacatttgggcctaatccccaaaatttcaccaaaaaagataaatcaaaagctgaaaggaggaaaccagaggaaggagacgacgaccaccaccacaacgcatctgagctcttccttaatccatggcagtacgatctctctccctccctctctttttgtctccatcttgttcaatctatgaatcttgatatttcctgtttcttctgtttctagtttcacatcttttgattttgatgtttctgtggtttcttatttttggtggaattgttaaagtttgattcttttcttttggttgttcgcctggatttgcttcgagattgatcatttctctcgttttttctttgtgggcctttattcttttggatttattcgtatgtgaaatattttgacttggtttttgcttgttgaaaatggagctttctttgcttgatcttacaaaaagttatatggtttggatagatttttcaattacctgttggaaaaaatcaatacctttt

SEQ ID NO: 72182 - DNA, 335 bp, Arabidopsis thaliana landsberg
gcctgggccgacgtgcattacagcctcgcgggcggaagccagctcaatgtgcgcatgaacaacagcggcaccagcaacagctaccagatttccggcctcagcagcggcgaggtggtgagctactggttcaccatcggccagagcgatggctcggcggtgaatacgccgacacagacactgagttacgccgcaccggcacccgcgccgacgccgactccttcgcccacgccttcaccctcgccgagcccggtgtttccgtcggtgggcaccaggttcaacctgatcaacgagacccacggcgcctatcaggacaaccaggtttactggaccatggt

SEQ ID NO: 72183 - DNA, 450 bp, Arabidopsis thaliana landsberg
aattaacctcctgtaatataactacaaaactatgaataaagaatttaaagaaaatttcatgttttttaatgaattttgagttctgtgttaagaactctcttatagtacgaaaaaaaagaatgtgtaaaatcttggagaattttggttaaaagtccataactagaaagcgtttgtttctgaatatcacttttttaagaggaaaacaaagttctagttttgtcccgacaaaaaaaaagggaaactttttttttaagaggtcataatttgtcagaaaaaaaaaaaaaggggtttgactttacaaatttttatgagagattttccattaaagaaagaaaaaagcgttgggaaaagaaagaaggtggtgactttgtcacaacttttttttcatctgcaaaacaaagcaaattttttagggagtggttaaaccaatccccaccgaatttttttttt

SEQ ID NO: 72184 - DNA, 530 bp, Arabidopsis thaliana landsberg
gttcaggtaaagtttgcaaatttgcatgcctagtcttatcaactcttcgaaaacatgtttgaatttgtcatctctagtgagaagtgtcaagtatggtgttttgaggcttgcgacattcacatcctttcatatagatttttctagtatttttcgaaattcgaccatacatcgatgagaaacttttttctgacactcatgtcacacttcagaaaaacatattattgtattatttgattgatatttttggttcaaaaactttaaaaaattatgaatgtaaaaagtaaaactaaataatcatatttgaccaactgaatgtggaaattatatttgaccaactgaatgtgaaaattaaattttataaatgtaaaaagtgaaacaaaaaatttattaaagtcaaaatctcgtccgagctcagctgaatgtggaaattgaatttaataattagagttgcatcaattgcagttataggtatttcacatttcataaaaagcatattataatatcaattggcttatctttttagttcaaaa

SEQ ID NO: 72185 - DNA, 372 bp, Arabidopsis thaliana landsberg
  unsure (1)..(372): unsure at all n locations
tgacaaatactcgacaacaatgcttgaattagtaattttcggtccttcatctatctcacatctcaaaaacgcgcgaaaaattacttacaggcccaaatttggannnnnnnnnnnnnnnnnnnnnnnnnnnnnnnnnnnnnnnnnnnnnnnnnnnnnnnnnnnnnnnnnnnnnnnnnnnnnnnnnnnnnnnnnnnnnnnnnnnnnnnnnnnnnnnnnnnnnnnnnnnnnnnnnnnnnnnnnnnnnnnnnnnnnnnnnnnnnnnnnnnnnnnnnnnnnnnnnnnnnnnnnnnnnnnnnnnnnnnnnnnnnnnnnnnnnnnnnnnnnnnnnnnnnnnnnnnnnnnnnnnnnnnnnnnnnnnnnnnnnnnnnnnnn

SEQ ID NO: 72186 - DNA, 286 bp, Arabidopsis thaliana landsberg
gtttctcccaaaatgggaaaccttaaggaaaagcttctcaccgatggaggccaagaaacagagtttgagtcctcaatgaaaagaagaataatggggtttctcaaaatctccgaggaagactactcaatggtcttcaccgctaatagaactactgctttcaggctcgtcgccgagtcttaccctgttaacttaaaaatgagactagatgctggttacgactacacgaagatgtgcggcgtgtgaaatagcagagttttttggagacgtgcaatccaagaagctactt

SEQ ID NO: 72187 - DNA, 355 bp, Arabidopsis thaliana landsberg
catactcgacatcttctctctcgtttttatccatagagacctcagctttttatttggatcgtaataatgggtttcgtttgttcactctgttttgtttctgagcagaagaagaacgaaggagataacaagaagaaaggaggagataacaagaagaagaacgaaacgccttccatcaccgtcgttttgaaggtcgacatgcattgtgaaggttgtgcttctcgaatcgtcaaatgtgttcgatctttccaaggtttgattttttttcattgctaaccaaaaaaagtttcgattgttcttattcagaacgttgaaaaatccttattccagcggaatctggaactggatttctcgaaaa

SEQ ID NO: 72188 - DNA, 658 bp, Arabidopsis thaliana landsberg
  unsure (1)..(658): unsure at all n locations
nnnnnnnnnnnnnnnnnnnnnnnnnnnnnnnnnnnnnnnnnnnnnnnnnnnnnnnnnnnnnnnnnnnnnnnnnnnnnnnnnnnnnnnnnnnnnnnnnnnnnnnnnnnnnnnnnnnnnnnnnnnnnnnnnnnnnnnnnnnnnnnnnnnnnnnnnnnnnnnnnnnnnnnnnnnnnnnnnnnnnnnnnnnnnnnnnnnnnnnnnnnnnnnnnnnnnnnnnnnnnnnnnnnnnnnnnnnnnnnnnnnnnnnnntgctctcttgatcggatctttcgtgcaatttctctttatattgtataatatagggagaggtgtctcgcaccacaatttcttgagtatatagataataaggctaatgggcggatttcgttctgctttccgctttacgtacgtcaaaaacatttctctgctgtgacaccctgtgtaagggaatatcttgtaatatgtcggtgaaatgatacctctacacacaacagctccccgtttattagtnnnnnnnnnnnnnnnnnnnnnnnnnnnnnnnnnnnnnnnnnnnnnnnnnnnnnnnnnnnnnnnnnnnnnnnnnnnnnnnnnnnnnnnnnnnnnnnnnnnnnnnnnnnnnnnnnnnnnnnnnnnnnnnnnnnnnnnnnnnnnnnnnnnnnnnnnnnnnnnnnnnnnnnnn

SEQ ID NO: 72189 - DNA, 519 bp, Arabidopsis thaliana landsberg
gacccccgccgacgctgacggcggctatgctctcgatgattttccggcgttggcgcacgtgctggcggtgactctccccggtacggcgtatctgatgacgctgagcgtgcaatccagcgcccagggcacggcgtcgagcgtgtcgtacaccgaacccgccgtgctgctgacgtggatagggacggactcgcgcgtgagggtggcggtgtacgcggggtccaaggagctgacgtgggaccagtggctggcgcggtttccctcggtcaagggagcgcgtcccgcgcacgtggcgctgacggcgctttctcttcccgctgaaacccctctgcctaaactgccgttgcgctaaatcttcgcggcgagcgcctggcgcatccgttccagaccttcttacagcagactcgtcggcgcggcgaggttgaaccgcatgtgattggctccgccggattggaaggtgctgccgacagacagtttgacgcgcgccgtggtctccagaaaggcttccagcgtcttgtcatc

SEQ ID NO: 72190 - DNA, 952 bp, Arabidopsis thaliana landsberg
ttcctagttgcacaatcatttagatctcttatgcttatatgatcaaagtcatttgctcttcttaacattattacattcatactatgataacttattactatattagacaaaacaagatggttcatttgtgatgagtgaaactattgaaggtcctgccttaaaatggtccctgcatcgacgacatattttcttcacttgtcaccgtccttgtaaatgtatctacctgataagtcttttacatattatataaattctttatcgatcaatcagtggttggatcttttagctatattattgagttgtgagagccataggattatagtttagtggaaagaatcagtcttgatcaaatactctcatcatgttctaatattcgctagaaacaaaaaatctttctgcttagttgaaccaaaagtttgatgatagtgtcgtatcttgaatgattcattctcttttttttttttcttatcattctttatagggtgggtgataaagcaattagctagctttttgagcataccttcgtgtacctcttagttggtacaaataatatgcattttcgcataatctgtttctctttcgtcattggtgatggacagattaacctgattacacgtttagagtggattgatttatatctcttatgtataacctaataagttatcgatgtgggttcctaactcgtatcgaattcgaactttcgagactattggttaccttgcaccatagtgcattgtgaagtgagcaatggtttggtaagataagaaagcaaatgaagttctttgcaataagcaggataaacatatttagccaagttcttttttttttacctttgaccaagagttcaaatcatctttatttcctcctattgatgaggataaagttgcccatcttttgttactgatatagaattctttagtcatgctttttatatatatgatattctttcttt

SEQ ID NO: 72191 - DNA, 1014 bp, Arabidopsis thaliana landsberg
ccgacttgccactgccatgaaatccatggaagctgaatatcattggtttacaatcctctaacacccatttcttctgcatccaactgaaagcttaagtatgttttttcttcatatcccctaggtgtgcaattctggtggtgagtcatggagatcctctgcagatgttgcagaacgttttccattcagcaaagcaacaggaaggagatggtttggcagagaagtttcagttgagcagagttgcttctgtcttgtcacagcaccgcaagtttgctttgctcactggggaactccgacccctcatctgattggcaatcaatgtattcagcttttggaatgtctttccttgaactcttttgttatcaattcctatttctctcccattggcattcttgcaattgccaaacttggattagcctgtttattatcacctctgtttgttaaagaaaacatgaagatttactcctgtaataagaaatcatgctcatttatgttatatgtatcttcaaatctgtacacagatgttcaatatttaacggcttctacgtgatcatcctcttctcgcaaacaactgcgctttgaggagaaaaatgtggaacaaacttgtagatcaatattttgttaatctttggtgatccatctgcggcccctgacttcaaatccaccataagcttgatcactactgctctctcccccgctctctgcgctagtgtatcccgatttacgcctgtgctttttggttcttgtaactccactatcgctaaaactcccatttagaagcggatcatcaatccctcgaatcactctccgactgggtgatgatgacatgcaactatcgtccttcactcttctcttttccgtgtcgtgtttcttaatgttctgggagatcttgtgcagtttctcattgaactttgtgatgctcttctccataggctccaccgcttgagtcactgtgaatctcacgtctttaacaatctacaacatttagcctctttgtgatccgaagcccttaatcca

SEQ ID NO: 72192 - DNA, 323 bp, Arabidopsis thaliana landsberg
tggacctgaccatatccaagccatgggttcggaaccatatgacagcccacatctgcatgaaatacagaggaatggagacggccatatgcaactgcgaacgtatcgcgaatatacgaactataactttatcttgcgagcggctggataggacaatagaaacacttgggattatgttcaacaatcaggggcgactagcggacctctgagtgggaagcgcacccagacgaagttgtgaccatatgacagagaaaaaagaacgaatggctcttgtaggattcccaagaaaatcttcgcttttttgcggaagcagatgactattcatt

SEQ ID NO: 72193 - DNA, 948 bp, Arabidopsis thaliana landsberg
attagctagataattgttgtagtgatatctagtggatgtgagatgcgatcggggtcaagctatgatttgatgagttctaaggaattaggattgaagcaactagaatctatagaaattagaagtgtttttgattgatgagtatcattgttgtattgcgtaggcaccaaaggtacattggcaaagtgaagcatgcagtattccacactcaaaagactggaagaaagcgtgttatcgtctcaaccgaggagaatgttgttgcttcacttgatctcagacatggggagatatgtatgaattattcatcttcatatttttgttatccatctttaaatcttgaagtatcttccactttgattgtcgtttttcttactttgtattctggtttggtgcagtttggcgacatgttctcgggacaaaagacgctatcgatggggctggtattgctttgggaaaatgtaagaattatcttctatacatgtggatcaatttatgtctggatgtatctaacactatgaataaataatgtaccagcatcttgaactctattttcctggcttcaaatgatttcagatgttatcactctttcatcagaaggaagtactttaagagcctggaaccttcctgatggtcaaatggtgtgggaaacatctctgcttaccgcacaacattcaaagtcactgttatcagtgccggtaagtaattaggagttatgctattttctttataagaaggacaactgtagttattatctgaagtcttagttgcttcatcctttccttggatgattatttatgaattaaagctatcttgcagataaatttgaaggttgacaaggactaccctattactgttttcggtggtgggtaccttcatgctgtttctgctatagatggtgaggtcctctggaaaaaggatttcacagcggaagggtatgacagcctttactct

SEQ ID NO: 72194 - DNA, 425 bp, Arabidopsis thaliana landsberg
cacaaccaattctttgttaccgtttacggagaaatataccttgttactctgtaattattttactcattccatctgattttaaaaaggtaaatgttaacagttcggttccgttgtacaactgaccaactgcttatctcaatttaataaaattttcagaacgccctgcagaatctctttttgagttactgcagagccaaaattaggtgttaaatgcttcacggttttgtttctggggatgaatgcagtatccccatcaaatttgtgattccatctcttttgtttagggggggagctatgagattttcttgattttaaaaccaaaccgtgtgatgctcattaaccacttggctacaagcttctgccatgacaactaatataacttgatgccagtgagaccatacccaatatcggccttgctataatgg

SEQ ID NO: 72195 - DNA, 346 bp, Arabidopsis thaliana landsberg
tgtacaggtcggcggagttacggctcggcgcaagcccgcaaactgcgagcacgaccagtcacccaatgagcgaataggattggttggctcgatgtttggatttgaacttaccgcatctgccctctttgcgtccaccgtcctgatcttccggcagaggtcgtgacttgccgggcacgtcgcaggtgacctcgcactggaaccctttgcccctcggtttatcgtccttccgcgtgggtccttcgtcgctccggaactcgatgaagaggtcgcgacccttgcgagaggcggtgtacagctttcccgccccaaacttggtcttcttggcggacgccaggatgcccccacc

SEQ ID NO: 72196 - DNA, 258 bp, Arabidopsis thaliana landsberg
aaacctcaaacagttttgaataatatcttcctgtgttgaaaaagcatgcaacaagaagttgcttattcgatttatatggggaaatgaataagcataaacttggacaaccagaaatggctaatcaagctgctcaacaaagacagaaatttaaaccttcacatgtatctattcacagaggaaaaaaatgaattttaagaacaaaaaccttagaaattgataaccataatgaccttctttgtggtagccttggtaatgggt

SEQ ID NO: 72197 - DNA, 243 bp, Arabidopsis thaliana landsberg
actcgtcttataaagagactcgtgagctctctattctctgtgatgctcacatcggtctcatcgtcttctcagccaccggaaagctttccgagttctgctccgaacagaacaggttaacttcttcttctttcttgaattagggtttcagagatctatatatacatgtgtatgtatacatctaattaatgaggaaatgagctagatatattactcgtgcttgagaacagacagctctcatcatta

SEQ ID NO: 72198 - DNA, 723 bp, Arabidopsis thaliana landsberg
tttatctttggaatatttcttttacattcaatcttccatgacacacagacagacatatatatatgtgtgtatgtatgatatgattggaactttttaaaaccaaaaaagagagacccatatgagatgatgatgacgattgagacaaataattattttgacaatttaagaaaaacataagatgctttgtggattaacttttgaaaattcaagaaatctgtccctatatatatgaaaacattagctttagaatacaattttatgagatttatttagtttatagtttatagttttaaatttatatttatgtgttattaaaattgtaaaattatatgaaaacatagtcgcttagttttacaaccgctaatttatttcaaactcaaaatattatatttttattccttcttcggttacgtatttttcttatgagatattatatggtcaaacatttaaaattagttaaatgttacatacacacaaattccaacattttcatttctttttaaggaaaaaaccatttcatttctttaagatatataaaaccaaaaaaattatgtttttatatagcttagatcgtgatgctaaatttttcttgtaagagcaatctcggatagatattttatgttagtgtcaaatatcttcttctacaatttctaaagtcatattacactatgggaattgttttctaaacccttttagatccaaaaaaaaaaaaacttgaaattt

SEQ ID NO: 72199 - DNA, 569 bp, Arabidopsis thaliana landsberg
gcggactttttagaacccgattggttttacaaaaacaatcggttcaattttggtttatcggttcaattttgactcagagatctgagaaccgactaagtcaattacagagaaaaaaagaccgaagttcagacgaaacaacatgaaaaggatttggttttagacttttagtcttaaaactaaagtctcttatcttgtagcccaagtctcagacatgatgaacaacaagccacgaaaaagataaagagggcaggaagataaacagggtagtgttcaagtaacatggacacttagttctcttattgatacagatccttattgatgaagagaaaagctgtgtatttagacattaggaggtggccaaatcttcccgaaaagctcttcaacacgtttcgcttggttcgcataaccttcaacaccggctgataaaagctccactgatgcaggacccatagatgaagccaagcttagctggttccatttgaccagctaaaccagaatcaaacaaacagggtgagacactggtttagtgaaaccaaaagcaaaagagtggtagttagggtcagagctta

SEQ ID NO: 72200 - DNA, 302 bp, Arabidopsis thaliana landsberg
  unsure (1)..(302): unsure at all n locations
nnnnnnnnnnnnnnnnnnnnnnnnnnnnnnnnnnnnnnnnnnnnnnnnnnnnnnnnnnnnnnnnnnnnnnnnnnngtacggcggaggtgaaagatccgaactctacgcataacaccgagccaccggaaaagccccctgcccctaccggactcaagctcggtaagacccaccgccagaccagggtagagccctgggataagacggcggactaaaaaagnnnnnnnnnnnnnnnnnnnnnnnnnnnnnnnnnnnnnnnnnnnnnnnnnnnnnnnnnnnnnnnnnnnnnnnnnnnnnnnnnnnnn

SEQ ID NO: 72201 - DNA, 484 bp, Arabidopsis thaliana landsberg
tatgggattctaagaaaagtctgagacactaggctcaccacacaatatacctcaaaattaccatcatccatatgtcttcctcctttattaagagaaataatgtctaactacatttatacacacaatattggaaaaacgcttcgcacacgcgttaaatatgtccttcgtttcttgcaatatgagagagttgtggagaattatataaaaatagcacacaaaatgaaagctttgaatcaatcacacagaaactttgttcttgatatttattaatagagtaggcgacatcacataatgtggcatccacatgtcttaccctttcggggggattgatgatgcattcctctttcatgtgctattacactctgttttaatgcatttcccattctgaagataaccaagatatatcaagtttataggatccagtgaaagataaacattttgagattacagaaaatctatatgaaaataccattctttccatcat

SEQ ID NO: 72202 - DNA, 766 bp, Arabidopsis thaliana landsberg
ttgttgatacttcattatcagaaagaagaaaatggttctgctcagccacactctgttcaaatatgtgcccttcttgattctgaaggtactccactggaggtcgcatacgttgctagaaaacttgttcaagaagggttcagtgctattaaacttaaagtaagccaacgttccttaatcatacaaacaagatgctcgatcatcaagtaagataggcggataattattttattttatgattgaatggtggctttctcaaatcagtgctattaaacttatggttgagttttagcatttcatgcataaattgaagtggttggctttctcactttgcgaatttcaagctattgattgctgactggtggataaacctgcctaaaatgacaggttggtcgtcgagtgagctctgttcaagatgctttagttatgcaagaagtaaggagagccgttggcgttcaaattgaactccgtgcagatgcaaattgtcgttggacttttgaagaggctagagagtttggtttattggtgaacagctgtaatttaaaatatattgaggtctgcttctgtatgaattattgctatctgattgtgttatgaagtattaccaaaataactgatttctcttgcctatataacttcagtgacaaacgttttgtatatctcaggaacctgtccagaataaagatgaccttataaggtttcatgaagaaactggattaccagtggcacttgatgagactcttgatgattttgaggaatgtcctctgca

SEQ ID NO: 72203 - DNA, 713 bp, Arabidopsis thaliana landsberg
ccaagtcgcccccatttatagatttcgtaattgagaatgatgatattaccgggaaattgaaacggttgtggatttagaattagacatttgagaccggttaaagaaagtaaaccgggaggggaatataggacaagagatcaggtggtgggaaaggaccaatgatgaggaactgacaaattgcagaagacagagttaagtaagtgtctctgtcttaaaattcatcgggaaactctctctatctttcttatcttagctgtacttacatttttctccgtaccttttattctcccttattggcttcttttctttttcagttttttttttttgtataaaagattatatatttgtttacttctgatttcttactcaaaatgatctcgtttatcttacaggatatatatgtatttaagtagatacgatttttgaagtgatagatacgagaacatagctggattttaaggtataagtcaattcaaaatcaatttcctataaacttaaattctccccaaaaacgaataacaatattagctgtttgcacttgcaccatatggtttatcgaatattcgctgttatgtttctgccctttttttttttttgcatttcttcgctctctgaaaatctttttattcaattactactattttccttttaaggaaattaccattcgattttattaataatatatttcttttcaagtgtatcttttttttata

SEQ ID NO: 72204 - DNA, 672 bp, Arabidopsis thaliana landsberg
  unsure (1)..(672): unsure at all n locations
caacctttgcaaagagaaccaagagattgagccaaagaaggagtagcttcatcatcaggagacacaacatgaagaagagtcactatatatctcctttgttagtcaaatgagtcaaagcccacattatagcatgcttagacctcgaactttcatcaactacaaccatcactctcttacttgtcgccgacgtgtctccaccggagtaaactgcataaagaccctccattgatgagtaaccaccaccacaaccaccaccacttgtgtcgtcgatgaaggctgttgagctatctccggaagtccaccttttagaagccgatctccaaccttcttttcggcttagttgcctaaggattgagtttcttgaaaattgcatctttggagggtatatagtgatgggagctcgaagctttttatgtagggaatgaaagagagagagaagaagtngtcgtaggtagtaggagactatattagagagagagagaaagtgaagaggctttggtgtaaaactcgaaaatgtgaaaatggtaagagaagaaaaagagagatttaattggtagtagctaataaagagtgagcgacagggcattaagggtgaatcatgtgcccacaataaagtgtgttatttaattgctaaactttaagcaaccaacatttttttgtttttaataaaaa

SEQ ID NO: 72205 - DNA, 524 bp, Arabidopsis thaliana landsberg
gaaccggcgcgtcaaggccaaacataaaggcatttttcgattaccttattgaaacccttaacactagggaacaaacaatgttttcgaaagaacatatggatggtagacgccacaactggttgtcgcgagcgccgaggcgctcgcgccaacgccggtggcggccgccaatcaggggcgtccgggccgtctattccggacgcacctcgagggttccgctatcgggaagcgtcacctgccggctccaggacccggcgacgacggtggtgatcgtacccgggcggccggtcagcctgatcatggtggcggcgccgttcgcccagtcgacgtcgatcttcatgccgggccgggcgccggcgccgtggaggtaaccggacgctgcccatgccgacggcagcgcgggcaggacctcgacgcgcccggggcgagactgcaccaacatcttgaccatggccgcgggagtgcccatgttcgcgtcgatctggaacaccgaccacctgctgctgagcgaggacatgtcgaacatg

SEQ ID NO: 72206 - DNA, 546 bp, Arabidopsis thaliana landsberg
ataaatatgtctatatattttagactaaactttattatgttttcacaaagatatcttaacaaactctatatcaattatcaaacaaaaagagaggaaaaaaattcttcttcttttggaattcaggtggatcggtctgtctcgttgttataatcaagattccacaaataattaggaatatggagggatatgataatgggtcgttgtatgctccttttttggtcgtgaaatctcattcgaaaccagagctgcatcaaggcgaagaagagagctcaaaggttagatcagaaggttgttcgaaaagcgtggagtcggcgaaaaagaaggggaagaaacaaaggtatgcgtttcaaacaaggagccaagaggatattcttgatgatggttatcgatggaggaaatatggccaaaaggcccgcaagaacaacaagatccctaggttcttcttcaattctgccttctaagatattcaatgcttacaattgctatatatttcatcgaacatataaagaacgagctaagagttcgacatgcatatatatgctttag

SEQ ID NO: 72207 - DNA, 528 bp, Arabidopsis thaliana landsberg
ccctttggattctatactgccaccccagggcagcttaattttgattatagaaggggtgtgaatttgaaggttacattggacgggttttgtgggatcttgtctctgacagggatgagaattcgaagatcgatcgccttttaacgtttttaccaatacctaacgttcaataataaattgcggttaagcgtatctgattgcgggaatgtgttaatattattaactattaaactaatcgcgtaaatcaaaatggttgactctgtcatatataccaccaatgagaaaatcaatttcctctaccgtataccaaattatactaaatctatgtttaaactataacataccctatatttgcagcttattatctcccttgtccattaactgatacaacgaagtagctgattatatatttagaaatgtttagataattatggataaacaattacatcagcatgttaacataacaattttctcataactatgaacatttatatctgaatctattgatttaaacaggagattctccacgct

SEQ ID NO: 72208 - DNA, 526 bp, Arabidopsis thaliana landsberg
  unsure (1)..(526): unsure at all n locations
ggggtcgcgcgccttgtcctgtttcttggtcgattacggtgctttaatgatcgacgcatccacgagggtgccgggcgacagcttcatcccgtgtccggccagataccggttcacctcggccaggatctgcttggccagaccatggcgctccagcaagtgccggaactnnnnnnnnnnnnnnnnnnnnnnnnnnnnnnnnnnnnnnnnnnnnnnnnnnnnnnnnnnnnnnnnnnnnnnnnnnnnnnnnnnnnnnnnnnnnnnnnnnnnnnnnnnnnnnnnnnnnnnnnnnnnnnnnnnnnnnatgcgcaacatccgctccagcccaatcggacggcggcccgcaccgtcctcgcgtaccttcggatagtgcggctcgatcaacgcgcacaaggccgaccacggcaccaccttgtgcatgtgggccaggaacacgtgccgacgcgtcgccttgcgatgcagcgcgaatcccgcatccacctggctcgccagcgtcatctgcttcggtgccatcggctatgctccccac

SEQ ID NO: 72209 - DNA, 153 bp, Arabidopsis thaliana landsberg
ggggattggcaaagctcatgcttgtgattggttttgttttaaccgaggataattaatagaaggaaggttctgataaaggattgcggggtctacctcctgactccatggtcggatcactcctgtaggagcttttttttttttttatcctcttct

SEQ ID NO: 72210 - DNA, 245 bp, Arabidopsis thaliana landsberg
aaacaaccccatcaatccctaccagaaacacaaacatcactagtttaacaaccctccatcactctttcaactagctcttcaacccatacaccactcacctactaattattcctaaccaacacaacttccttcctcgtaaacacttacccatgactccctcaacgtgactattccacaacacatccaagacacacctccaatctcaatctcaccccatatctataaccttcaaagatcactgtaac

SEQ ID NO: 72211 - DNA, 450 bp, Arabidopsis thaliana landsberg
cttacaaactttttttttaatcttatgaattagtataattttgtcgttaaaattgaattggggaaatccgcgagccaaaccaaaacccggtttcggttttgatcttccggttatcgagagagcaatgcgtttagtcaaagtgtgtgactttttttagttgttggttctgcaaaatcattcttgagaaagcttctctgaatatcacaaggcgaaggaaactgagaaatcaagattgttttgatacatgttaacatgaacatgtggattcataaataagcagttaattaccgaaaaaactaataatcaagtctttttcaagtgtgattttgggggcgtaccatattcaaattgctgccactgtaatcttgctcttccccatgcccaatagttagctcttataggatctacacgacccagaatagtacacaccaaattggccaagttagtctc

SEQ ID NO: 72212 - DNA, 465 bp, Arabidopsis thaliana landsberg
gtggggtaaaaaaatgaaagagctagttcgaacctgaatggcaagaaggccgcaataagcgaagaaatactcgtgccatttagggattttgaagctccggtgagccaaatttcggtggtaagagacggtgataccgagcccacccaccgtatagacaatgagggcgactcttaaagccggccaagtgaaattgaaaggcgccaagagacagaggaaatggacaaagagagatgcaaaagctttcacaatgtccaatctcttccactttctttcccacattgccctcttcttcctccccatctcagccttgtccgctgccattttcttgctattctcctccttctccgaggctgacaatgacctcttgtaataaaactatgtataagctaagtcgaagagaaaaaaaaaaaaagactctttgtggatttgaagtttgtataaagagtgttatagtggtttaggttt

SEQ ID NO: 72213 - DNA, 5440 bp, Arabidopsis thaliana landsberg
  unsure (1)..(5440): unsure at all n locations
gaaaaaaaaaacttagcagagactaattagaagagattttccgaccaagagagaactgaagattcagggttttactttacagagaaggacatagaaatcgacccgaaccaattccaaattagaactcgaaccgaaaataacattgtaattaaattataccgaatctaaccgaaatattcgaaccggataacggaagtaaaatgattttaatggtacggccgtaaaatgtttgggccaatacggcccattcgttatgactttttttattattattacagaatcgtttccattaaacccttaaaagtttcagaatcgaactcgtctattctccgccggtgtgccgtcgccgatatgcttcgtcgtgtcttttacaagcgtgcacggtcagttggtgtctctgtctgattttatgttgtatatatcatagattcgttagaactatcgaccaaatacacattcaattttgtaattatctgcagccaaaatcgattttcgactagaagtaatttatgtaataatcttacctgtgtttcgattttcattggcagtgatgatttatcttactgtcatcgtctgttgcacattccgtataacgaaccagagcctgactcaaaggcaatttctgaaatcgttggtatagtttcaaagaaagaagaagctgtagtagttacggaaccaactcatcattggcgtaagaattgggaagatttgagaaagaataggttaacagctagtaatttcgcgcgtgctatcggattttcgcctgacggtagacgaaatctttggttagagaaaatcggggcagcgaaaccgtttgctggaaaccgagctacgttttgggacattgagaatgaggtcgaagcactcgagaggtacaacgagttaacgggaaatgaaatcctcatacctgagtttgttgattataagaatggtgaaagccctgaagaaaactggttaggagcttctcctgatggagtgatcaatgtagttaaggacggtgttacttcgtgtggtgtgttagaagggaaatgcccgtttgataaccgggataactcgaaagtttatccgtggaagaaggttccttataattgtgttccacaacttcagggtttaatggagattgtggatacagattggttggatttgtattgttggactcgcaatggaagcagtctctttagagtttggcgtgataccgcgttttgggaggatatgaaaccggcactgtttgatttttggcagaatcatggttttacctgcaagagagatatacaataactttgatataaaggatcctcaagtgaagctgagagagtttaaaccgaagcattggcatgaagattgcaagaagattatgcgtggagctgagagaatcagcgcaaacgcaaaccgtttgttctatgagatcgatgggaatcttgtagactgaggtttttgtaactgattatgtgaaatttgcaagcaagcaagccaggttcccttatttcatttgaatgttatttgcttagtgtggaatgtagaaaacactaaatgaagctcttgtgttgagctaaagtacatatttcatattgtatactctgtttcttattgtctcatcagcttttgttacatnnnnnnnnnnnnnnnnnnttatgaatgcttctcaagttttcacttttggccattgtttttcttagttctgaaattgcaattgtgtatattggacggttggatttagaggctcaattagccgcattaactaaatatgtggctgtgattcatcttactcaagacgacagcgttttaaactcctttggacattggtcttacttgccacgtgtcacatcttctctatcgagtacaaaccgcaagtgaaacagagtaacagagacgcgtcgtcttcaacgatgctctcaacggtgacggcgacggcggtttctcgaccgattctgaaggtggaatgtacaatcaaaaggacgtttaaagtgacggcggagaagtttccgacgtttctgccgaccgatgtcgagaaaattaaagacacgtttgctctaaagctcgccgccagaatagagaggcttcctgtatctgtaagtggcttgagattccacgttttatcattctgaaatttcaaataatccaaggtctgatcctttcatgactgagaatttgagcttatatacaactacattttactgtcttagctgcaacttggccatgtcacaattcaagtttttgtgattctgtatttcttacattcaaagtttcaagtgagtagaaacatttaaagcaatgtaagaatcatgaacctgtagagattttgctcattgtcttgttaggtgagcttcagggaagatagtattatgagcagttgcgtgacaccgctgatgcggaacgagacaactcctgttgtgcttcttcacggatttgataggtactaatcaaaatgttttggtttgttgaattagtgtcttgagttttaaaactcttgtaaaacagttcttgtttagagtggagatacacttatccgttgcttgaagaagccggtttagaaacatgggcatttgatatccttggttggggtttttctgatttaggttttgtccctctcttatcatttactacttcctttccctttttgttttctgttattctccaaacttgccaatgtttttatactcttgcacacttctcttttcagacaaacttccaccttgtgatgtagcgtcgaaaagagagcacttttacaaggtttgtagacattttctttacttgtgtgcttagtttagttgttgagaattgatttggctctcttgtatgatccatagttttggaagtctcatattaaaaggcctgtggttttggttggtccgagcctcggtgctgctgtcgcaattgacattgcggtcaaccatccagaagcggtacttatagaattcttgaggagctttcattatttctcataaagaagtttttagtcaacatgtcagaagatattgactaggagaagaaactcatgaatattcaggttgagtccttggttttaatggacgcaagcgtttacgcagaaggtactggaaacttggcaacgttacctaaagcagcagcttatgctggggtaagttctcatcaagttctatacataaaagtccctttattgtattggaggatgatcctcttgagtaaaactcttcacaattctgttaacactatggttttttgggtatatgaatttgggattttaggtgtatcttctaaagagtattccattacggttatacgttaacttcatatgtttcaatggtatctcattggaaactagttgggactggacaaaggtaaacaagccttactaagtaattcttattggtaaacaagaaactagctctcatcagtctgatttttttcgtcaatctagattggtcgcttgcattgtctatatccttggtgggaagatgcaactgttagttttatgactagcggaggatacaacgtaacttctcttataaaaaaggtactttcatcttttctctaaatcacttttcatttatgtagatttcggagtaaggtgaaatcaagaagagattctgtctgcaggtttcacagaagacattgatactatggggagaggatgaccaaatcattagcaacaagctcgcttgggttagttagatttttctatctctatttagactattatcatgtttcaaatggtctctcaagtcctagatcatatcttcttcaatgcagagactgcacggagaattatcgaatgcacgtgtcaaacaaatatctaactgtggacatcttccccatgtcgaaaagccggctgctgtcactaaacttatagcagagtttgttagagagacttgccggtgtaaagaggttgaaagtatatcttagacccttgggggccattattgaagctgtgtttcataccaataccaaaatcttacttgttaaatcgtatatagttgatacttcacttctttcatggtttggttggtctttttttgaataaataaaccacaccaaacatctctctgttttgtaacttgtatgattgatttgttgtatgtaacttaaaaacaaaaacagagtgtgaaaacagaggagatgaccaaacttgaagccccactggatttggaatgtcaatcatcgatatgtctttaatgaaaatgtttttgtcaacctaatcaattgaatcgtatacggctcagaatggtggcagaaaatgattattgagattacgcttaacatccaaaaattgggtaaataataaaggcagaatacgtttattgagcttgctgtgaacatcaaagagcttgcattgtatcacaagtcaaaaacccaaataacttggtcgagctttctactccctagtctcttcttcatcgagagctttcgacttcataggttgagaatgacctaaaaagaaaccacggaaactaatgagacaatttagaatttgttaccaagaaaccaagaatcagagcaaatgttatgtacatgatgatgaccgattcctttttgggccgaggtgagtaacaccaacaacattaatatcccatcctttcacgtgattattggtaattatttaggtttaaaaaaagttatacacagtgtaaaaacaatacaaatttcttagttagaaagtattagaaagatattagttttagacttttagataaggtatattttggggaacaaaaatagtgtttttaccaatatgtgttcttcaccacttagaagatagaaacaaaatcttaatatttcccaattcatattcaagttatgccctagtttaatatgatcaaacctacgagtcgagattacaaaaaagaccctcaaactaaaagggttgaatatatcctcgaccaaacccaaaggattactacagtttagagcttcctcaaccgaaagaccaagaagtcaccactagagtttagaatatttccaatcaaaaccaagtgtaactatagttttgaacttcctcaacggctcaacctaaaccattttaccacaagtgcactcagatctgcaagaagaatacaccaacatatatcaaattttcaacttttcaacttgagaaaactttttttcagactacatatttacttaccttaagttcaacaaactctgtcacaaggttgacctgacggcggacacgaacgaatccctcatcaccccaagtgtcgcccttcgtgtcctgaaactccatgaaagggatgttgctctcctcatcaatcccatgcccggtgagtaacatgaagtgaccatctactcttctattcgcttctctgatctttagggtaggtttataaagctgtccctatcacaaaacataaccacatcaagggaatgcaatgttcaaggtaatttgattgtgattctcgcaaatcaataaacacaagaaagaacatataaatcaaaatacttacattctctgtatgcttatgag

SEQ ID NO: 72214 - DNA, 268 bp, Arabidopsis thaliana landsberg
agtgaggcaaccacgggtgatgagagctttgctcgcacagtaccaccatggcgatctcgaacttgtgctttgacacggaatgaactgcgttgtctggaagatgcgtgatctgatccttcacctgatcaaaagctcgatttatgaaaaaaagacggcgagcctggaggcaagcgaagtggtatttccaagttccaaataattaaccaaatctgttgagaaaaaataattcagcattaaaccaaggtgtggtttattcgtatcagcatta

SEQ ID NO: 72215 - DNA, 567 bp, Arabidopsis thaliana landsberg
ataggatagaacaggctctttacatttttttgccctttaacttttttcatgaagccggggcggaaattgtatgcgggcctgaggggtaattgcagcagggcattttctgttctgccttttacacgggcccacatcatgcggcttgttccgctgctgtctgtatgcctgccggatacatagcagaacaccatttccctgccgttttcactgatcaatgcattggcaaaggcaagggtggtatcataggtgatatgtgtgtattgttcttccttcatacccacagagctgatgccggcgcagaaaaagcaggcgtcataccctttccactgatcgctgtattctgcgagggagaagaaatcaggcaccagcagttcttttaatttggggtgcgatatatggcaatgcctgcgtccgataaccagcactttcgcaaccccgggatcctgcaggcaggttagcagtacaccttctcccaccataccagtggcgcctgtgatgatgactctgatgggcatgtattttctttgaataacgaatgaagcagctgattattctatgcatataata

SEQ ID NO: 72216 - DNA, 535 bp, Arabidopsis thaliana landsberg
  unsure (1)..(535): unsure at all n locations
cacgtcccgaacaatggctgacgcgtcatgtacgttatgctcgtttcattttccagccgtgaacgtcgatgcacccgtccagcatgagcaaccattccgcacaaggcgaccgcggcgtgcccaacccgttcgtcggtgccgagttcctgatgtcgtgcgcgaagatcacgcagctgccggccgacggtctgccggaaatcacgttcgccggccgctccaacgccggctaatccagcgccatgaacgcgctgtgcggacaaaatcagctggcgcgtgtcagcaagacgccgggccgcacgcagctgatcaacatgttcaacgtcgccagcgnnnnnnnnnnnnnnnnnnnnnnnnnnnnnnnnnnnnnnnnnnnnnnnnnnnnnnnnnnnnnnnnnnnnnnnnnnnnnngcgactacctgcaaggccgcgccaatttgcgtgcggtcgtgcaaatcatggacatgcgccatccgctgaccgacttcgacgtacagatgctggagtgggcagcgcatcgccgtctgcgctgcttgtg

SEQ ID NO: 72217 - DNA, 566 bp, Arabidopsis thaliana landsberg
ggtactcatactgactgtacgagaggccgaacccaaagtaaaacagtgggggggtccgcagcttttcgtaatagcgataaccgacaaagacaccctgaccatagtgaatctccctctcgcccttaccaaaggtcaagaacgcaggtgtatcttccagtcgtttagggaaggtgagagatagacgcccactagggttggtcttgccaaagagcacgtcggcgattgcgttaccggtctcttggccgccaaaccaggcgtgaacgagtgttggggtatcggaaacccatggcatgaggatgggacaccctgattgagttacaactacctggtgacagttagttagaacgttatccggggattttagggaaggggacttgccgtatttgggtttgccttgatgacagctgtgatcagctcatcaacagctggtggcaaatcaagggacttgcgatcaagagcttcactctcaaagtcgctgttcaaaccggcgatgacgatagggacatcaacctcagtagccagcttaacagcctctgcagggcaatagcggcatcgactttttcaca

SEQ ID NO: 72218 - DNA, 712 bp, Arabidopsis thaliana landsberg
ccaggcgtggtactaggagtaccggtcgcgtaaggcgaaccaggcacgtgaccataacgagcttgattgtagttgatagatgcgagcatgttggacatagggtcaagcagattggaacagaaaccaggctgacagtaggccgcgaacgtcgggccgatgacctgcatcagaccgccggacggcgtgccctttgctgcgttggagtcggtggtgttgaagatattcgggttaccgcccgactcctgctgcatcagcgaaagcatgccgccgagccaggatgccggagcaccggccatctgcaacgctgccgccatcatgggcgcccaggcctgaacggacttggagccagcaaccgccgaagcggagaactccttagccttctgcttgtcctggttgatcaggtagtctttcagtccgtcaatgatcttgtgagatccggcgttcatgacgttaccgacgttacccgaacttgcccttcaatgcaccgtcagcgaacttgcccaagatggcgaaaccggcactgatggccttgtcgccaatgaagcccaggatggtgcccgttgcgccaccaacccaagaagcccacggctgcatgctcaatgccctttgcgatcttgcccacagggctgtcattctcgcctgcgcccgggattaccaggcccagcgcctttgagatgatgtcagaaaaggtggcgctggccttgggagactt

SEQ ID NO: 72219 - DNA, 398 bp, Arabidopsis thaliana landsberg
tgtaatttggatggcctcatggatcttaaagatgtatttagataaccagaaacatggtgagtgatggaagaattacatagtgtttcaaattaaacccaagaaaacacgagatatacggataagtcaatttttactgtttcattgctggaaatggtccccttcgcatgtttaagataatacacataaactagtgtcaagactcaaaatcactacattttaattgtaaaaatcaaagttaataatataagttttgttcattatcgaaacatttctcggcctcatgcttgatcaaaatttctttagtagccaagtacaaaaacgatcattcttctttttttttgcttttaactcatcgatcgtcatccacctaataggtaccgtctattaaaagggcatga

SEQ ID NO: 72220 - DNA, 762 bp, Arabidopsis thaliana landsberg
acctatgcaaaactcttcgaccatgtttggattatcgcaattcttttgcacgaaataatgagtattcctctggtgggtattatcagcacctattcggactttaaacatgattttctttcatatcaattctgtcaagatagaaggcaacacccgaggatcgtcctatttttttatttttttttaaaaagacagcatcattatcctttaacgcgttgatgtgataattatacataggcaataataacaaacctgaggaatctcatcaagtaatggctgagcactcttcttaactagatttttggctattgaatcgaaaagaagaaattttgtctcaacaaaatcatgggaaactcgtaacatgagacgatatttgtttataataattacaacagtaatcaagacgcaaaataatattatatatatactaaaagtttcaagagagtatgaatgttatatctagccacaacgtcggtaacaatccactaccaaaagtatcaaagacgtaaaacggagggccattataacctttttctctggataatgctgcaactttttggtacatatcttgcaccagagataacaccaacgataaggatcatcgatagcatcaacagttgcaactgtaacacatgtgatgtcctataattcaacagaaatatagtaaatgttatagcaatataataaataataattcagttatgtaaataatatagtaaacaaaacctccacaacagtcactatctcatggatagtttttttatg

SEQ ID NO: 72221 - DNA, 689 bp, Arabidopsis thaliana landsberg
ccagccggccatcagcagcaccgcgcccagggccggcatgggaatccagcccagcgttgcgctgaacagcaccagcgccaggccgatgaccagggccgcgactatgccgaccatctgcgtctggccgccgaccatgtcgttgaccgcggtgcgcgagtcggcgccgctgatgacgaagccttgggacaccccggcgccgatgttggccacgcccagggcgaccatctcgcggctggcgtcgatgctgtagccgtggcgcgcggcgaagctgcgggcggtgagcatggcgctgcagaagctgacgatggtgatgcccagggcgtcgcggaacaggttgcccatctcctgcacgctggtgcgcggccagctcagctccggcaggccctggggcacggcgccgagcagggcgacgccgtagcggtccaggcccagcgccacgctggccagggtggcgaacagcacgccgaccagggcgccggggatcttcggatagcgccgcggcagcaggatcatcagcagcagggtggccgcgcccagggcgagggtcggccagtgggtgctgccgaggttgcgcagcagcgccagcaggccggcgaggaagccgctggtctcggtgtggtagcccagcagcttgcccagctggcccgggatcaggctcaggccgatgcccgttggaggtagccccacca

SEQ ID NO: 72222 - DNA, 352 bp, Arabidopsis thaliana landsberg
gccttgggcgatctcgcgcagggcgacgacggtcggcttgtcgttttcccacgcttcgcgtggctccttgccgacggtggccagctggcgggcgcgcttggtcgagagcatgaccagctcaaagcggttatccacgtgttccaggcagtcttcaacagttacgcgggccatggtcttcctcagtagcaaatgcggtaggcgtgcaacccaatatgggcaggcggactcgatagtttaaaaaatcaccagccaatagggaagcgctgttttgtcgagtgatcagacacgatgccctgctgtgggagcgggttcacccgctaaagggccgtagcagacaccctgaacgcctggt

SEQ ID NO: 72223 - DNA, 193 bp, Arabidopsis thaliana landsberg
accatacttgctggacagtgccaccaatggggcgctcaccaccaacagtgggtccacaaacacccttacccaaagcgatacagtcgagaatgctaccggacacgctcacccaagcccatcgtgcgatgactacacgatgacaacgccttgcggaggacaaacccaactgactgttcgcggcttgcactcacga

SEQ ID NO: 72224 - DNA, 3585 bp, Arabidopsis thaliana landsberg
  unsure (1)..(3585): unsure at all n locations
caaaggggcataggtgacaacatctggctgaagatttatcgcgttttattcctctgctttctcctgaggtatattggggaaccaagacattataattaatatgagccaagctctagcccagtactactgtgagtacacttgcagtatacaactggcattaaaaagatacatgtcgaccttcatatcattgagaaacttcatagccgcaggcaagtggtcacacttaatgcaggcatggatcaaaggattgaaggatcaacctatgtggctccaagctaagnnnnnnnnnnnnnnnnnnnnaatttattgcagcttgcggagattctgagttgacatagccctgaaatatataacaagacatataccatgatgatgcttctctgaccctaaatcaaatgcaactatgtgtaaagaattaccttcatcagcaagttatagataagaactgacggagtaccatgatctagaagcaaaatatcatatcgtgcaagcagaccattggcacgacgtaaatctcctgcactagatcaatatcaagtgtttttgcatcagcttcaggccatttcactaacaccaagattacataatcaagattagctgcagcctgttgagcacgagaaacagttacagcttaagaatcttaccagcattgataagagcgtcaagcagaccatagataagagatgatgacaatttgggattcccagcagcagttccatactctatagtctccagcatttggaacgcttcatcaatcctccgagccttacccaatcccttaaccaatacaaacgattcgacatcaaattcaggttgacacacgaaatcaaaattcaaaattagaggaaagaaccaaaattcaaaattagaggaaagaaccaaaatcaccttcaagatagtagcgtaactaatagagtcgactccaattccaccaggttccgccatctcatggaacatccgaagagccaaatcaatttttccacagtgaacgcaagcttcgagaactgagttcatcacaattgtgttgagcctcccataccgtttcttagcggcttctacctcctccacgatctgaccaagctgacgacggcgcgtgaggagaacaatgcgagaagtgagaggcttgagattgattcgcctggaataaggagtagctctgcgaggataacaccgtcgtgtcggaacaaaggagcacgacggaagaagagggagaggagtgacaagagtagaaatagctgaaatccgattcatcttcaaggagaccagaagctacccatccgccattgatgggcttcaagcttcaccttgaggcttgagctaatcgaaatagataacgttggagagaatctgaaatcacagcaacaacaatcagtcaagttattcttcaccttggcgggtcgaacaaatgttacacagtgtggagatttaacaaatttgggccttgagctttgaacattaaagcccaatatacttatattcaacgttgacgtgagttttgacttttcgttcccctaatccaaaattgcttctagattaagctatatctctccagaactcctaattttcgacactgcaacttttttgacgcggaaacaaaatatgaaatatcctaaattccatggagtctcaatctcatccttataaatatcatcaaaactacaaccctttttaacgcggaaacaaaaaactaagaacggttccatttgttttcattgtctagaagagaagaagaagacggatgtgtttggtgttcgtgtgtgatcaggacgagagggtgatcggaaggtacgcagctcctggagcgtgtccgtactgcggaggagcggttcaagtggttgacgtaaatagccagtggagattctgcttcgttcctctctctaataaatccaaacgtcgtcatctctgttccacttgcggcaaacgactcatcgtccatggctgaaaacaaaaatcccacctcatacgagatcatttctatatgtacatatatccaaatctctgacttgctttgtgtatcgtgtttctaaacgtttgtaagaaaaagaaaagaacatgtcttctcttttatgatttctctgtatatgtatgaatcatgattatgaaaatgagaattttaagaaattgggattttggagaacaagaatgatcacttgcaaagcttgagctttttgaagaaagaagagacttgggatttaggataaggctttgtagcaatacacgtcggaatattctccggctgctccatccatagcttatgagagattcctcctaatttcagcttctctgacaaattcatcatctgcgtttcccctttaacttccagagtcacctaatccccaaaaaataaagtgttttaattaatccaccattgattccggccagagaactctaaaattagggtcatgttgactaaccttatgcatagaatcaatgtgctgcggatcacagtactgaagcgtgaccggatcgtctttgaacgaccagatcgctgccactgacgcatgacatccttgtgttacaacgctcccaagtggccacgaatcgattagatctcgtcgaagcacaacgtattgcaccacgacgtcgtcgggtttctccgccgacgaagcatcgacgacggcatggatttcgccagtctgctggctcattgaaggagaagccgttgtgaatcttcggaaatgagcaaatcggatcgtagaatgataaaacctaattcgcggcgccggagcagagagtcggcgggtaactatcgggaatcgaaacgctgcggagaggacggcggtcgccatatgaaaggaagacgcacatggacttttgctattggataagatttttcttaatgggcttttagtagacccagttattttctgatgtctcttcaattaaaatcaaatctaaattcgctctggtttatcacttaaacggcataaccaaactatttcattcgctcgaaatccaaaccaaataaattgattcttattttcctgattactcttttctcctttcgcggttgagattttatgatctttccgaacgaaatcaagcattccgacgtccgtacactatccggcgctgcttaaaccgtctctcgtcgcctgtctgatctgttatcttctctactctccggtgtcgttgagtaatcattcttttctgcttctgatagagttaattttctttgttacatgtttgaggctgctgcacgaaattttagctgtaatcccctgaaaacaagctctgctgataggcatgatagggtttctaaatcaggcttgtttctgttttgtatcgttccagtgtgttaatactgagcagaaatcgtgatttcgctgagtataactcttgttgatttggtcgctttagggttttgcttctcactcgttttttcagtgttgcaatttgtttgaattatagaattacttggaaatactagctgatttagatgtgatgtatgaacattgaaaattttggtgtagagattgattatcaacttctctggtgtttggaccgagcttggtcaaaagacctcttgatcagcaaatatgggagagatggtcaattacacacccttttcagggtttttatttt

SEQ ID NO: 72225 - DNA, 521 bp, Arabidopsis thaliana landsberg
aaaactataacctgccaagcgtgcaatttttaagtgtttttgaaataatacaatttgatagtatttactgaatttatttctctaaagaatgtaatcgatttttattaaattttgcaagcaaacttaaaataaaaatgactaaaaaagtaagattgctataagaaattctttgcttaataattaattcgatgttagaaaaaaactataattagtttaatcttcaagttggtaacaagtgtaaaaatttacaaacataccatattagaaaatattttcatttaatattacaaaaattagattatatatccatataattgactacattttgagtttttttttggacaattcaattttttcattttttttttttaaagttgaagaccaaccacacttttttttttgataaagggcttgaagacaaatctcattggtttggccgagaactatatctaaacatatgtgcagagctccagtcttcaaacattccattctctacaaacattttttaaaattttctaaat

SEQ ID NO: 72226 - DNA, 440 bp, Arabidopsis thaliana landsberg
cgggctaaccagatgagcgtgactccggaggccgaattccgcacgtcgttttctgcgctgctgatgggggtcgcccttctcggccagcaccatctgcaccacgccgcggacggtgtcccacaccaccaccgtgcccttcttcgtgcccagcgctagcagcggcgatgaggtcttgctgcgtttgcccttcggcaccgccgccgccgtcgcattctacacgcgaagccacacaaccgcaaagggtcagcagatgttacgctgcgcgcacagagagagcaggaagcggacccaacccgacgccagccgtcggcaggaccacaagccggattcgagtgcccatgggggtaaggggtcggacgtaccacgggcgacgagccccagcggacgcacgtatattgcgtggtcaagggcgccttttccacatactgggggcgcatgtt

SEQ ID NO: 72227 - DNA, 355 bp, Arabidopsis thaliana landsberg
aaattgcttttcatattgacatttttttagtaatgtgggaagagtgaaaaatgggaatacctatgtttggctgcctacagtcggctggagagaggagccacgagtctttgctctgtaagtgcatgtgaaagaaagacaatgaagttgcagataagaagatgatatcacgtaaatacttatttttagaaagttggatatgaggaagaatcttatttactatgtaggttaagaatgaatttaagtttccttttatattaaagagaaaagacttgctttctaaatatgaaaactacgaaacctctaagagctacaaataatgtggagtaagatcgaaactttggacacacaatggcct

SEQ ID NO: 72228 - DNA, 536 bp, Arabidopsis thaliana landsberg
gagactgcaatgtactgttcatggcctttcatatttcacatctttgcatttatgtaaagtgttctatacagacaatattgttaatcttacgtggtgcttgatatacccctttgtttatgtatgtacctcatttctgttctgttcccgtttataacatgctggtcacactttttccattgtgtcgatgttgcagatgagtgcatactttgctcctgcctttttcagccatctactgggtaaatgcctaagacggaagagccctatactttctgtgattaagcttggaattgcagccatagtgacattcgttattttttggtggccatatgtgcattctttggacgacttcttattggtaaatacctattttgataatttctcgagaaaactaatttgtttgtcccctggaaaaactaaaaaaatgtcccttttgtttctcctcttgagtaaataggtaccctcactaggcttattcgttttcccgccctttattttaatgaatggctgtgatgcagttttttttcctttgtcccttt

SEQ ID NO: 72229 - DNA, 1324 bp, Arabidopsis thaliana landsberg
  unsure (1)..(1324): unsure at all n locations
aaatgactcaactcagtcatcccacccagctaatctcgcctttttccttcatttttttgacaaacaaattttggtttcttccttcttcaatcacagtagtgagtgcccattacatacattactctgcaactctatcaaatcctaaattcccaaaatgcccttctctccttccttcttcctcttcctctcctccttcttcctcctcctccacctctccttatcctctccattcagtacgtctccttctctctttctcctctccgtctagatctgactatgaactgaaactgaattcttcctctgttttgcagatacttctttcttcattgactgtggaagtcccgaaacttctacagacgtattcaaccgtacatggcttcctgatcaattctactccggcggaagcaccgccgttgtctccgagcctcttcgattccatctaatcgccgagaaaaccatcaggtacttccctctttccttcggaaagaagaattgctacgtcgttcctctccctcctggtcgttactatctcagaactttcaccgtttatgataactacgacggtaaatctcattccccgtctttcgatgtctccgtcgaaggcactcttgttttctcttggagatctccttggccggagagtcttctccgcgatggctcttattctgatctctttgcttttatcggtgacggtgagctcgatttgtgcttttatagcatcgctactgatcctcccattgttggttccttagaagtcttacaagttgatccttcttcgtacgacgccgatgggactggtcagaatgttttgttggttaactatgggaggctctcttgtggttcagatcagtggggacctggattcactaaccacaccgataatttcgggcggtcgtggcaatcggacgaagattttcgatcggaagattcgagatcggtggctaggtcgttgtctacgttggagaaaatcaaaggagtggatcaggcgccgaattatttcccgatgaagcnnnntctaggcggtacagtttctggtggtggttcgttggtttatgagcttgaggctgatgcgaaacttgattacttgctttggttacatttttctgagattgattctacggtgaagaaggctggtcaaagagtgtttgatttggtggtgaatgataacaatgtgagcagagttgatgtgttccatgaggttggaggatttgcagcttatagtttaaactatactgtgaagaatctgaggagtactattgtgacagcgaaattgtcgattggttccggtgcaccgattatcagtgggctttgaaaaatacgctat

SEQ ID NO: 72230 - DNA, 1856 bp, Arabidopsis thaliana landsberg
aattctaacttttggctctccagctgatgggagtaaattgacatgctccaaagaaagaaacacaagtcacctagtgattttcaagaaaatgtgcttccttcaaaatatccgaggtctaagatgaaatagttttaaaaattgttatgcggggcatatattattagagtgttgtgcacttgtaaccttccagaaaataagcaatttggacgatattttaaggtttggtccatgttccagtatcgtgttagggtccactgcttcgagatctacttgattgatactcttccatttgttttctaattgtttgatgcaaaggttatccattaagggaaacttatctatatcacgtggaatactcactgcaaaagattcgcagtattagacttataattgtcactaatcagaccattaaacaaatatcaaattgattaatatgttgaatttaataatccaatttgacctctttcagatagggctttggggacaaatcttcttaaatcgcaccaaacttttattataagataatttttggttcgtggctattaaattaagcctgaaaatttaaacatatgcttcacttacaagcgtcaagtatggataaacaatgattaatcataagctatcataatgacaaaaagaagtatgatcgttatcagttctcttatgcataaactattgataaaattataatagtcacgagatgattgatcgagcacgataactattataatagtcacgagagaatgatgtgaaagtttaagaatgcgtctaaaccaacaataaaataatttaaatagttataattgaatacacattctatattagtaaacattcaaattatttaaaatatctacgagacacaatagcctcccaacaaccattcgtacattcactttctcattagaaagaaaacgtatcctaatttgttgttttctctatgaatgttaatatcatctaataagtccatatagactatatctaataaatccatatagactattgtctctgaatatcaatggatttgaatctttggccaaaaaattaaacaaagagacaaatgatgtagaagtcacattacatagtgggagttaaaattaaccagagtttgcattaggttgcaataacgcttgcatttacgtcttgcggtgcttacgttctgaatctctttgtcgatgagcttgaagatagttgatattgggatcgagacttggttgtgaaccacatcattcctttgcttccacatatatcctaacatttatctaaacaatctggtgctagaagaaagagattatcaaactgatgcaatgacaaacacgaaacaccactccataacaaaaaaacttaaccgtatatcgatcctcaactttaggaataatcctaacgccgcacccacccggcacctggcacccaccacttgaaaaattcatagctcatggccagtagggaaccgcggaggaaacttactcagtccattgcgaggataaggacaaaagtactccttcaattattctagaaaaccaatcagacgttgacaaagaacctcgtttgaaagtacaactgctctacaagactgcattgcccactacaagcagtgaatgttgtccaccctcagcttctttatacgttcgtgaagcatgcatgtgcattttgttggtgcgcgcatagtaagccatgccatgcaatgcaatgccaatggtttacgaacatatagacaagtaaagttttcaattatttcatgagtacctaaaaaccacattcatagaacagtttgcaagtattcgaaatttgggaaaacatgcatacgacctcaccgcatctctcaaaggccgaatacaatttttgaggaatgattaaac

SEQ ID NO: 72231 - DNA, 1771 bp, Arabidopsis thaliana landsberg
gtcaattaatctagggtcctcgctgtaaacgaataaaatccacaatcatatcatgaaatttctcaaaatcataccaccaagtctttctcaaattaaacagagaacattgaaacaagattctttctggcgcaaagaaaatcaagcaaccaaatcgataatcccagatcacattccattagaacagaccaaacgcagagaaaaaacgcaaaccaacaaggaagtaaaaccctaaattgaaacaaattcgacaaaagaaccaaatgaaattggaatttgtgaaaccaagaacaagttattttcttacaatttgctgcgtctctgtagaaatccccatggaagagatcgttgatgagccaagatagcgagagaaagagaagaaagaaagagagaagagagagtaattttcacaaagggaacagatccaaattgagaaatttaaaaaggggaaaaaacgtaaaccaccagcaaagcagcaacggtcgaatccagatgctgccacgtgttgatacatctgcatcgaggtttttattttcaaataatttgtctcccgagatgatacagtcgctacaggcccagatattattaagcccacggtattccaacttcataatcactaggataatatacagtcactacaagcccagataatagcccaataagcttcaagatcgtttgacgatgagattttaattcggaactaagtaaccacgtgtcagtacctcgtcaaagtagctccatgcagaactgacacgcccgcgtgacactcttctccattgcctaacacgcctcgtcgttcgacacatgtctcgtttaagtttagcctctccttcatactagtctattttcattcttcataataatcacaaatggtaagcttattaaagctacaaaaacaacatagaacattaaatccatactctcttagaaaaagaaaaaaagaaatggcggatcatcaacaacatcagcaacaacaacaaccaataatgaggagtctccatgaatcatcaccatcgactcggcagatagtgagattcgtaacggcagctacgatcggcctatcactcctcgtgctctcaggactaacactaaccggaacggtgatcggtttgatcgtagcgacgccgttgatggttctgttcagcccggtgttggtaccggcagtgataacgatagggcttttgacgatgggattcctattctccggtggttgtggggtggcagcagctacggcgttaacgtggatttataagtacgttaccggaaaacacccgatgggagcggataaggtggattacgcgaggatgaggatagcggagaaagccaaagagttgggacattatacgcactcgcagccacaacaaacacaccaaaccacaacaactactcattagagtttaataattatatggatctatatgttgtattaagttttatgattatcctacgtatgtttttttaatactgttcttacctttttgaaaagatctatctaaaattttattttctattttccatacaattttttgtgtgtttaattgctgatcggtattttctgttttatgattgtgaaatagctagtgtaaggaaagatgataacgaattaagtaaattaataaatgccaattacttggtcaccgtctggcttctagaattatatggtggctttcttggtatatgtaaatgtagttttgagtgtggtccgtttgatttgaaataatattgttgtttttatgttcaaaaagaaaattgcaaggtttgtgaattttgtgtt

SEQ ID NO: 72232 - DNA, 576 bp, Arabidopsis thaliana landsberg
aaaattctaaaagactcatgtgatgaataactctattgtatagcaaattaattgtttgataaaatattatcgaaataatatacaaattaacatggattatggtctgaaagatcagtacaatgaagaactaaatttgacttgagagcacatccttagaaattttcccttctaccaaaataaaataaaagagaaaaccaacttgaaagaaataaacagcttaaaattatcccaaaaatctcattagaaatccatccaattagggctaaaaataaactttctaaggatattagtaattaaattcccttaaaaacaaaataataactttgtctgtcaattttttgtcctcggaacatggccttaaaaaagcgattagctggatcgatcacacaccccatttcatccttttttcatataaggaatacctttcgtccttttaaagtcaataaaacccaaataatactttacagaaataattaatattgtttattcattttgagtaagaaaaagaaaaagtgtagtcctaaattatataaacttttacattacgtatatatgatctctacgtacatgaaattt

SEQ ID NO: 72233 - DNA, 428 bp, Arabidopsis thaliana landsberg
tgcgagcaaagtagtttacatgtttaatgtgatatatgcaaaataagtgatatattattaaattgtaattggtaattgatgcggatcaccacactaaacatatttgatcattgttcatgtgaaacttaaaatatttttaaaaagtcgagtatgagtaggtgtcttttggagatgccatgttctgatggcttgatttagcttcaagagtgtgattcgacatttgaaaaattaaataatgcatcaaaaaatggttagaaaaactctctcttcaagaatatatatgtcttaatatgcaggttaagaagcacatgaactatttagtctatttcacgtgcaattaagatgtagtcatattccaagagacatgttactgttgcaatcttaggtcgaaagcatcatctttttgtcgaacaaaagtttcaagagtc

SEQ ID NO: 72234 - DNA, 791 bp, Arabidopsis thaliana landsberg
tgcatgcagacatacatagatatattagtaatatactataggaaaaagcctaccaaaaaaaaaatatactataggaaaaatatcttatacatttagtgaaaatatatgaactttcgaaaggaattacaccaagcacttgaaattttatcattttcaaattatatatagtctgtatatgctaatcatatttgaaaaagggtcaaccccaaggtgttctaatttaatgaggatcgtcaatcatgtacacatgtatatatgtatgcacacttaacctcactataaaaaattggagaatccaacaaagagaaaaacttttaataaaagatcataaaaacacaagtaagctaagtgaaatttagcaaataataatcatagtcaagagagaacataatataatgtccacaaactatatagctcactagtaacaagtagcaactgactggttttcatcatcataataaacatcattataatcttattgttaacttctgtaaattaaaaaccattttaacgcacgttaaaatcctgacctagcttgagcccaaccataagcttcttggccgctcatctgtcctcctccaccactgccaccattagaaacaagatttcccggcatattatacaccggaagtccttggttaccgtcgcctccaccagcaccgctgcttagtggcgaacctccgcctccgagctgccccggaaccactcctccgctgcctccaccaccgcctctctctgcggcctcttcctcctccaatggcaatctctcgtaagtcgcgttagagaacgtg

SEQ ID NO: 72235 - DNA, 638 bp, Arabidopsis thaliana landsberg
agatcccctcttggatacttatctctcaactctcattaagactttgattttgactgtttggtctacccatatagtgtgtaatcatatctctctgaggcaacaattaaaaactataccacaatggtacaaactgcaccacgacactagctagaatcatttggttagaataacggggacacattttttttatgttgtaacgaacgaacgagaaatgtattgagtcactgttacagcattgaatgtagcacatgccgatagataggataatatcgtgatattgcctaaaaagcctaaaacaataggaatttattaatagtatgtggcaagacgttcgaatttaagagctctccacaatgaaagctacatatgtcaaattatgcaagttttcgagaaacacttaattttagggttaattatttttcaatatttacaataacaccaatgaaaggttctgcgttggctggaggatgtctttcaagtttcaccagtcgggctgttaccaaccaccgatcaaaatggaatagctgagtatttagcacccaacggttcaaattttcattactcttatcggtacaattacaaacttttttacatatttgaaaattttaaatggcttcggtagtttctgaaaaagaaaa

SEQ ID NO: 72236 - DNA, 425 bp, Arabidopsis thaliana landsberg
caccaagcaatgcatactattaattccaatgctggtgaatgaaaatggaggcggcttttttaatttaatatacgcggcaatcaagagcattgcattagcaaacaagaaccgggtgatcataaagacggcttctggtctataccatgagaaagataccggcgacgtaagccgaccatacgttacattgatgggcaaacctgaggcggaaaccaacttgacttatgccggaacagccgctaaataccgcaccgtggagagtgccacgcttatcgactgggccacaaattttttggcagccaacctaaacattatagtgtgtatacaaatttaaatgtcaggtactaatatacatactatgttacggatcacttggacctaattaaattttctatcgtctatagaacactttttcaatgacaaagcct

SEQ ID NO: 72237 - DNA, 1909 bp, Arabidopsis thaliana landsberg
ccacgtgtttgaacacaagtctcttaggattgacaataactttgatcccctctggagtcctgactctcactgagtatatcgagttaggactcccaacgttagtgacacgccttgtgatcatctccgtagtcttgccacgtttgaaaatcacggctatcgacgggtaattgagactaaaacccgggtttttccgcaatattccattgcagctcacgttcttatgagtgattgctaaaatatctgatcttgtgaatccaagagtgcagaggtaagttatgtaatccactggttgaatgttgtaaaccaatcccgggtttatcgccttttgcggattcacatgccctgctccaatcgcaaacacaccggctggtttgttaccatcctttatcgctttcccttgacgatcgtacaaatccgctgttgtcatcaatgcggatttgattgcagctggagaccagttcgggtatgcagaccggataagagcagtgattccgctaacatgtggacaagacattgaagttcctgacattacagtgaagttaactcttcttgaatcataaggaagtccggttggtcctagattttgaggccaagccgcaatgatattgactcccggagcaatcatatccggttttagtatcgaaggattggctaaactcggtcctcgagctgaaaactgagccacctccggtgctcgtgacctcccaatcaccgtaccaccaaaaattatccgcgcctttggtttcaccgtggcattaacataagccttcagaaggactgactcagtgtaaccaatcaatgtagctggtaagagatgaacgtcaatagaatcttcttcttggttgatctctgtattggctaagatcattgcaactcctccagcttctttaaccgcttctcctttctccgatcttccattgactccgcgatcacaaatcaccattttgcctcggatttcttctcttggaagtgaccctctcaaacagaactcacttcctttatctcctcctgtgacgtaaatcacctcaacctctctcccggcattctttataccttttcccggatacaatgactctccatagagaagctttccgttggctaatctgaccacagcgggaaatcttcgatcaagcgtgcctgcgccaatggttgagacccaaggagctgtgtttgcaacagagctttcgattggaccgttgttaccagctgcacagattacagatataccgcgttccatggctcggaatgttccaatggcgattgtgtcatcatacaaaggaatagggaaaccgccaagggaaagcgaaagaacatcgactttatcttgaatcgctacatctatagctgctagaatgtcagagctgtaacaaccattgaaccaacagactttatagactgcaatgtgagctccaggagccatcccacgagccacaccagctccattgccaagaacattcgccatcgaaacagaggatccaccaactgttgaggcggtgtgagtcccgtgtcccgttgaatctcttgcggaaatgtattcacgaggcatgtttggtgattcctctggtgaattagcgacacggtgtcctctgatgaagaatctagcaccgattagcttccggttacagctcgaagaactgaaactttctccttcttggcaaatccctttccatttccgtggaatcgaaggcattccggtatcgtcaaagctaggactttcaggccaaactccagtatcaagcacgccgataattgtgccttgaccaaaccgagatttagaccatacaccggagtttccaaaaccgtcgagtcccaagaacttgtaagagtaagtggtttgaacctgaagaacatggtcaggtctcactgcaacaacttcaggtgaatatctcagtatctcggcttctgattc

SEQ ID NO: 72238 - DNA, 301 bp, Arabidopsis thaliana landsberg
tggggctgtgacaaaagagattgttggcttacaggatctgctgtcagtccctgatctaactgctccaacctacaagatcaataccgtttaacgtgcatatagaagcttggaagattttctttccaaaagaattaaggagtaatggctaaaacattacgagtaaatgtgttccctcttatctgaagcatgatccattagtgacttgcgtgcccactcccaagctcccttcaaagaatcataatgaggttgataatagcaaaaattgtcggagagttctcttcgcacaatcaattcttccaag

SEQ ID NO: 72239 - DNA, 145 bp, Arabidopsis thaliana landsberg
ctccgaaatgcaccattagatttaaaggcggacgatctaatcaaaaaatatcacctttttgagcccttctggcatattgtatcacagtggcgggagcactatcactcactgcattgagagcaccaccataaaactcaacagttac

SEQ ID NO: 72240 - DNA, 172 bp, Arabidopsis thaliana landsberg
tatttacacaactgccacgcaatcatcgctccccagtcatgaccaacaacaaaaaccgccttgtctccgccggtcacggcgtcgattagtgcgaccacgtctccgaccacgtttaataagtgtatcttcaactttcttgcctttggttcgaccacgagatccggcacgcgtc

SEQ ID NO: 72241 - DNA, 260 bp, Arabidopsis thaliana landsberg
attagattgaatttcaatcgaaaccaaatataattgaacgtattaacactttcaagtttattcttctacattacaaaataaacacaaaactcaaatttccaaattaaattcgaaccaaaactggatcaaactttttaatgtggtcgctttatttggcatgcatgtagatgttcttttagtcatacaaagaatataacaaatttaacagtccaatgaaaactgggtagaatacgaatgaaccttatagtaactttgttttt

SEQ ID NO: 72242 - DNA, 565 bp, Arabidopsis thaliana landsberg
tttttattttaccaatcaaactgttcaagttggaactataaaatttataatatccaaactagtaaacttttttaagatcaattttctctactcatattttgcaaatcagctttaagataaactattaaatgctaatacaattaaaaagatttgagatttgcaatttatagaaagaataatattactataaattaacatgtacatcatatttctgtcattaactcattattaatttagaaagttttttataaaatacggattcaccatgtgcgtttgaaccaaagtacaaatttaccgaatattaactctcactatggcctatgggctttatgattcgcaaatacaaaagatttaagcgatacacatatattctcgtggttgtacaaatgtggcaatcttcgtatcataatttggattcaaattcaatagtgggcatgtaagaaatgtagaatgaaagatgagggatgcgaaaagttctaccatttagctatttttttttttggacatgttttagctttaatagtcaaagataaagaactaaatgtaatgacttgtaaaatagctt

SEQ ID NO: 72243 - DNA, 444 bp, Arabidopsis thaliana landsberg
tcagaagcgtacgaattgtataagtacgattttactgagtgtaacatacaaaaagtaataatctaaaattttctggacagagaattattaaaggcaataataaattatttcataagttttgtgtaaaagctacaagttttaaatttctatatctccactatgcagttgtcagataaaatattgtagagaaagatgaaagtggtaattttgagcaatttggagattagctggaatgaatatatatatatatatatatatatgcaaaatcatatggtttagggtagagcttaattatgtgacacgaaatcaacgtccttgtgcttatcatcaacatgggagctataattgtccacctcatgcatcttgatccacgtaactaaaaaaccatcacttgctcattgtttaaagtttaaatgcacatgcatatatgtaattagttttctt

SEQ ID NO: 72244 - DNA, 407 bp, Arabidopsis thaliana landsberg
cctgctggctgaccccgacaccaccaccgacgacgagtacatttgcagtggaagcgggtgtggcgcacgaggactgtcacaactggagcggaacctccctcacctgacgggactgggtccagctgtcgctgaaggatgggcatacggggtctcgtgagcaacactatttcgtcgacatgaatatcgctcgtcgctcaaagcgcattcgaggacagtccctcctgtgtgcagcacgagcgcaatttcccgaggatgccggcccgctggcgcacccggtgcgcccgggccagtgccgagggattatctatttctacaccaccaccgactacgagaaaggctcagagctggagcgcatgctggccggcatgctcacaaccgagggcttccggggcgggatggatctgtac

SEQ ID NO: 72245 - DNA, 499 bp, Arabidopsis thaliana landsberg
aaaaccggaaagagcattttttacaggttcatttgttacaaaattatttgagctaatagacaccatgaaaaaagactggtatcagataaaagcttcataaaacacagattagtatataaatgtaatgttacatgctagctttaattgaaaaagaacgacattgtcaggtacgtaacttgaaataactctttatcttcttttttttgtcaatgaaataattctttctataaaataataataataataataataataataattctttcttacataaagataaaataaatatataaaaactataataaataaaacagagcaataaatatataaaaacaatttttaaaaaacaaggtgctggcccatgctttttaaaaaacaatctgttgatttttcaaatacaaactaaatatacttagaaagttaattaaatatcactaaaacctacttttgggaaggttattaaaaatttccctccaacttgtgaagaatgtttgtgaga

SEQ ID NO: 72246 - DNA, 253 bp, Arabidopsis thaliana landsberg
ctgatcgctcttgaagcgcgcgcactgtcttcgtggctcccagtcgtgtgcaggcctgcagtttcctgggctgactcgcgacacgtcctgcacccagtgtattgttggcgaccagacctgccgtgaccttgccgggcccatgtggttggcgccgctgtaggtttgtgccagcaacgtgggcacgatgccgagcatgcccagcggggcgaggtagggcgcgggctggccggagctgaggtaggtggtgccgtcg

SEQ ID NO: 72247 - DNA, 241 bp, Arabidopsis thaliana landsberg
cacatccacaggacaggtgcatggccagatatcatgctattttacaaaaacctgaaccttctaaagaagcgctgggggaccaccttggaactggtgtattatgtgatgatccatctactgtcacttatggtatggacgcgcatgccatactgaaggtagtacattaacataccaggattagaaccaatttttgcgtccacagatgattactgtcatcaggggtactgttgctgctgtagta

SEQ ID NO: 72248 - DNA, 224 bp, Arabidopsis thaliana landsberg
cccgcgtgaccggtgccgtggcgatgcccggctggtacgctgccgcacacgggcggatgtagcgggactacacgtgctctgaccccgacggggccacgagacgccgggtcggcacctggatcccaccgggctatagagatcatcaccggtgtggactggggggtcaccccctgagaacccccgggagccggatctcgtgcgtcgcgggccgcgcggctgcgggg

SEQ ID NO: 72249 - DNA, 298 bp, Arabidopsis thaliana landsberg
aaggttgaagtttggtcattaattcttatctaccaattatctatttttctttaatttggtattagtcgatggatacaaaaaaattactgactataaaagtgactttgaagttttaaattgtgattattgccgataaaaaattgcttcttataaatttactgattcgctatcaactcaatgagataaccaggatccgtataaacaatggttttgctttctaagttttcattggtccaagtttgggtttttattttgggggggaatggaaaactatttttttttgtaggttttttttaat

SEQ ID NO: 72250 - DNA, 519 bp, Arabidopsis thaliana landsberg
caggaaatccctgttttgtgccgaagctcacaggcctttttgtattccatttgtttgctatgaacaggggatgctcatcgggcggtgatactatttcggttaatgtgaatcctaaaccacgtgtgcccactgcaagcagtaacagcccggtgaaaccggggaaaaatgtggaactttcagcactgagctccacaccgggagtaagctatagctggacagggccaaataacttttcgtccacagagcagaacccggtgatcgcaaatgcgaagcctacactgtccggtaaatactttgttacggcaacggcaaatggatgttcatcttctgctcaggtgagtgtatcagtgggtactagtgccgacaggccttatatcatatacccgaaccctacaaatggcagcctgcgcattatagcacaagtgcagaaggaccaggaagtaggtgtaatgctcaacgatattgcagggcagcgtattttttatgaggagataccaacaccaaataacttattgaaca

SEQ ID NO: 72251 - DNA, 250 bp, Arabidopsis thaliana landsberg
ttatcacacctaagatagtatgccggggaggaggcactatggattcgtgaacatgcacgcgccgaaactgtgtcatcacaacaatggatcagaaaaagccccaccactaccaatggttagatgagaaagtatctatgattaagttgcataagataggaataagcacgccaggaggcacgttaatgcgcgcggagatttgtggagtccagaccaactatcgctcatttcccacttgggggagcaatttcac

SEQ ID NO: 72252 - DNA, 576 bp, Arabidopsis thaliana landsberg
acttaccttagcaatgcttttttatttagaatcaatgatattcaagggagagagaatactaaacaatttgtgttaatgtaaacattcctacttgggctatcagtagaccaacatcgtatattttaccaaaacaatatatatgatgatagaaaaacaatggtaatttagaaaatattaaattttcctaatgtagatattcttgcatatagtaactactaaccagtgtcattatcccatcttgaatcttgatttgtctaggggttaatttagaaaatgggagaatttaagcgggcaatatgtgaagattgatgtaaactaaccagtggcattgtcccatcttgaattttgatttgtctacggaagaaaaaggggtcaatttataaaatgggagaagttaagcggccaatatgtgaagattgatgtaacatttccagcccccaccacacactcaaacccacaatggacacatgatggataagattataacccgtttagatctttttttctctttgatcaatctttacatgggttctggtcctacttgtatatgaaatgttaccatactctgctctttgt

SEQ ID NO: 72253 - DNA, 521 bp, Arabidopsis thaliana landsberg
  unsure (1)..(521): unsure at all n locations
aaaccagggcattctcacggattacaagattcctggagaaaaacatttaggttactgagtgggacaatgtattagggtttatctataacatttcttacgttgcaagaaaatctcacatactgtatatgtgatagcagatnnnnnnnnnnnnnnnnnnnnnnnnnnnnnnnnaccctagctagaatccaagttattgaaatttccacgatctaaagcctcatttgattaatgaccgtagagtgaaaacagagcatgaatttaccaagaaaaataatgaacaattctggtcttgtaatattttcatgaaaaacaaacacggttcagcttctgtgagaaaccaaattacaacatcaaaaaaccctcaagctagaaaactataaacataaaaaaccgcaattcaaattgcagatccaaaaaaacttcaaaaataatctcacctttttcttctgaaacaaggtgaggatcagaaatgtttatgaaccttatttttctcatcaaccccacaattttccagaaaaaaa

SEQ ID NO: 72254 - DNA, 501 bp, Arabidopsis thaliana landsberg
ctgctttcttgcctttatactcttcatctccttctccaccttctccagcctgcgtcgcttctggggcggcgaatatctcatctctaatcgcccctcacgccactaaatccccacctaactccaaaaaactccttatcgtcgctatctccggcgcttcctccgctgctttagtcgctctacttatcgctttactctattggcgaagaagcaaacgtaaccaagatcttaacttctccgatgatagcaaaacatacaccaccgacagtagccgccgtgtctaccctcctcctccggcaacggcgcctacaacacgacgcaatgcggaggctagaagtaaacagaggaccaccacgagctccaccaataacaacagctctgagtttctttacttaggaacaatggtgagtcaaagaggaatcgctgaacaatctcttagtgatgatggatcaagctcaagaaaactggaatctccagatcttcaaccacttcctccattgatga

SEQ ID NO: 72255 - DNA, 225 bp, Arabidopsis thaliana landsberg
gccggaaactacaacaatgagcaccatgcttagcctaacttattacacggagcagccatggatagcctcaccactgtctatacatcacatgcgacataatcttatactactatgactattcatgcatgggcgtactcggaccgcgcagctaactaaatagacgggtgaatcagcgaactaaccgtaacaacatgctcaaattgctacgagagaagataaccctta

SEQ ID NO: 72256 - DNA, 2200 bp, Arabidopsis thaliana landsberg
gaaaaccatgttgataaaccctggcttgatataataagataagggattgaagacataattcgttgagaattgatgcatttaccccttaatttatgatgtgatcaactaactaattagagcccaattaggattgagaaccggtttttgagtaaccggtacaataatagatccggttaaggaagaaagaatagaaagagacggtacttattcctccacacggtaaagcaaaagcccgtaggacgaagacgacgacgacgaaagtctactcaacttttttgcttccttctgattctctctctctccgcaatccaatcacgagaaaccttcacgtcaccatcccttagaaaaaccctaaaatctcatcaaatcccaaaatcagggtcttcgactagagattctctaatcccgcaggggaagggaacaacaaacaaacaagatggtgtttccgtggaacattgctaaatcagcggaggaagctttttctagatgggcggtgaagagggttgtcaaattcctgttgaagaagaaattgggtaaactcatacttggtgatatcgaccttgatcagctcgatattcagcttcgtgatggcactattcagctctccgatcttgctatcaacgttgactatttgaatgacaaggttcttccttcccttcctgattcttcttcttcttcttctttttatttcaaatgatgctatggaatcctggaattttgggcaagtatgttagtgtttggctctggactagaagtttaggcatgttgaggttttatgttagggatggtgaaactgtgtttaaaattgggtatcagctttatccacggagctctagttcattggtagtggtctagctctagttcatccaagagtactattatgagcagttttgaacgaatatatagagttgaaatctgtataggtttgtgattgatgatttttgaattctcgccaaggtcgttgaatttagaggttcatctatgaagtgaaagctttgaaattatggtttcaaaatcaagtttttcatagttcatagtttgctaaatgctttggtttcgatgtttttaatgtgcccagtttgattttcttatcaatttgttaagaagaagtagaataagcgaattctgacagtcccatctcctatattatttttctactttgaatccagtttgatgctccactcgtcataaaagaaggctcaattggatctttgttagttaaaatgccttggaagaccaatggttgtcaagttgaggttgacgagctggagcttgttcttgcaccacgtttggagagtaataaatcatcttcaaatgaagccagcacctccttctttacacgagaagatttacataatatacgtcttgaaataggaaagcatgagaatgagatgttgatgaatgctgcaaaatctgcgtctatcgatgtccatgaaggtgttaagacggttgccaagatagtgaaatggtttcttactagttttcacgtcaaaattaagaatctgattatagcatttgatcccgattttggcaaaaaacagtctgaagctggtcctcgaccaacattggtacttagaatgacagaaatagagtgtggaatttcagaggagcaagtttcggctaatgaagtttctcctgataatttccttggtattaatcgacttgcaaactgtgtgaagtttcaaggagccgttgtagagcttttaaatatggatgatgatgatgatggcgacaaaacttgtgataaaaagacatcaaatgatgtgactttgatcatgacaggcgtaggaggtggcttttcagggagtttaaattttagtataccctggaagaatggttctttagacattcgcaaggtggatgctgatatttctattgatcctgttgaagtacgatttcaaccgtctacaattagatggttcttacaattgtggaagacgttcacaagttttggatcagactgtttcccctcagtttctcattctgattttttgacggattcacctacaatacctactaatgtaatggtaacgcctccagctacactatccttgtcaggtggccaagaattggagcatgatactacacctaacttacagtttataccggattggtttccgtcttcgttcagcaagaaagaagaagatggagaagtagatattgcggcaaggtataaaggatgtctctagcatagatattg

SEQ ID NO: 72257 - DNA, 2179 bp, Arabidopsis thaliana landsberg
ttttgcttgacttgttttttcatctttcatcacaatctggatatgaatttacctatagtttttaacttaattctcttatctgtgttctcttcttgtttcctacagtgtggaccagttttttgaatgttttgatgcaatgaggagttaccaatcagcttctggaagccaaggaatgtggaattggacatcttctgttttcacagcaataaatgctgcatctagccttgcttcggggtctttgcttcttccttctggtaagaatactttcttgaattgtgtttaaatgtgtgcaatgagcatattggtatgtgttataaccaaatatatgtacggtttcttataccggtgttaatcctgatatgtaatcttaggttatgtcttgttctctctattcttttattgctaccctatacaccatcaagctttgtacttaaatcaatccattagctagtaatgccaagtagtttaagttgttatagtaacaaattatctgaacaattctcatcaatatgcagaacaacaacatgttgaaacaagttgtaaagtatcctttgctggagtttcggtggtattatttttccaagatgaagtcaattggaagggtgtttcaacgcggattcactacttgggtgccgaactcagagatatttcggtctcttttcaggtaattaccttgatgaattgtgtttccttcccctcactagtatctgtgctcgagtttcttacaatattcaataaggtcaacaggtatgccttcatgatctgaggttagaaggagaagtgaacagcatggagatcgccgattattgtcaaggtggaaatgttgttgacactgctaatgctgaatctcagacttgtttgattaaggatttacaagccaaagttcagactagtcttcctccctttgcctcttctgatatgcattctgactctgaaagattaagcgagatagtttctgatggattcctctttcgtaacaagggtttcgcagtcaagacattgttggttatagctgcagggggcagtggatttcagtttactgtcaatttccaatcatccaaagccagccatagaggatcaaactcattctcattgagtttaccccctaccacattctggctgaaccttcattcggtagaaatgttggtaaatcttttcaacgatgtatcagaatctatccccataaccagtcatgaaaggaatcaggtggcatcctcttctaaatcagaaagtttgcgaggtagtgtgtcaatctgcaatgctcgagtgattctgtggtttccttttgagagcatttcagaaaggttctgcaactcgcttggtcagcaatttatcgtcgtcgatctatcttcctctccgccatctgataaggaaagggctaaggaaagaagtccaggagaaatgcactttccatcagctactcgctctatatgcttcagtgttggtgatgctagcatctatttggtcacttctgaccttaaagattctgaaacaaattcatatcataggcaggttgaattctctgcgtataatattttacataccaacaataaaactaggcaccaactttcaacaattggcatgttttggcaagatagacctaccgttagcccttggttagtggagagagctaagatgttggctacgcaggaagaatctattcagacagataaatctggcgggaggggccttgagtttgctgctgttgctacgcccaaagatcaagacgacatctactctcgaagcaggaaagaaataattttggcttcttcgctctgcctttatgttcatttgcttccacttgctatccatttagatagttggcaatacagcaaattatgtaatctaatagaagaggcaaaaaattggctatcgcgtatggcagccaatacagctgagcaaacagaggaatctgttgtgtgtcaaacgtctctcgttgttgactgtgattctattgacatattggttaggccagaacctcgaatgggcataaaaaaacagcttcagactgagctccctggatcatggattcagttcaacctgagggttcagaaattaaatcttatgtctgtcccaaatcttggcagtgtctctggtgctgatttcttttggttagcccatggggaaggtacattattgggttctgtaacaggtctacctgatcaggaacagttattac

SEQ ID NO: 72258 - DNA, 240 bp, Arabidopsis thaliana landsberg
ttttattacatgcatgattgctccatgggcaatattgcgaaaatctgtatcaaaatcgtagcaaccttcaaccactctaaagaaatatgggaaatctctctgtggtccaattaagtgaattacaatagctcagacagtgcttcctagaaacagatctccgattgcttattgctcggaagtctccatctatctggactggactgaacgccatcaccgacgcctacattgaaacagaacctt

SEQ ID NO: 72259 - DNA, 237 bp, Arabidopsis thaliana landsberg
gtggggaaaagcctgggcgaccaattacacacatcgcttatggtaacacaaattttattctaaccgggggaacctttcctatggggcctaattagcatacctacatatacatacatgaaagaaatctatccacttactctaaactgaccacactggcaaacattaacattgcaagtaatgacaaacctatacattgcaactgactgttatctatgcaaacatgatgtacaaaaaaaa

SEQ ID NO: 72260 - DNA, 559 bp, Arabidopsis thaliana landsberg
ctttatacttagcacggtaagtagccgcatgtaaccatggcgatggctcattaactactactttgtagctgttatacgggtcaaaacggtatctggcaggcaatacagccgcgcgggtccatacattaccttgtaagtaaacatattgatgatttggcacatcataatatgcatcaatatctggcatataataatattcggcgtggtcataccccaccggcccccattcaggttggctgccaatgtttaagcctaaactaatgtgaacttgggcttctgctctaaatgccagacagcttactaataatgctgctgttaaaaggatctttttcataaatttttgtatgttgttttgttgtaagacgttcgataaatataatggtttaatcttttcgatgataccataacaaacaaaaaaggcgatagttttgctatcgccttttaaaccgctgttatacagcctattgattatctttgctttttatatcgtcttttttatcgcccatcgcagctaacacgggtttgccgattactttgtaagcaccgtcgccttttaaat

SEQ ID NO: 72261 - DNA, 203 bp, Arabidopsis thaliana landsberg
cttcaggttgacaaatcaatctaatgggatgaggtaaacagtccttaaaaaatgtaacatactgaccttcttatctactctatggtattcttttagtaaatctctgaaaaagattctaatccgtaatcttatcctatcttgtaatcttgtgttggttcacgcagactatctaattctttgatggccaggattccaatggtgat

SEQ ID NO: 72262 - DNA, 435 bp, Arabidopsis thaliana landsberg
  unsure (1)..(435): unsure at all n locations
ctcatgctacatagctacttcctcttcttcacctttttaactttcctcttccctctaacttcaaaacggagcagataaaccccattgggtacatctctcaaatctaaaatatgtttcccatctactttccaggctttaaccaatttcccgggagtattcgacaatgacacttctgtaccgttatttaccccaattggtaattctatagaaatagttgcctcaaacggattcggaaaaacttttacttgcgcctcacgctctgccgaaaggatattttcaaccacaatactgatgggtcccgaaatgaccgtgcaacccnnnnnnnnnnnnnnnnnnnnnnntagaccactctgcctgacttcacaatcagcctgattcgcccctgcaattgggtcactatctttcagccactgaaaattgacatctgcccaacca

SEQ ID NO: 72263 - DNA, 574 bp, Arabidopsis thaliana landsberg
taactatcactaactgaaaaatctccacataaataatcgaatgaaagatgaaggagatgtttttgtgtttgaaagggaaacatgaataattttattttcgtgtatttgttgggtccaagaagaaagatgggctaacaaaaaaattgaaaccaaaatttttgaggttgccacgtcactatccactttgtgattttaccatcgagttttttttggagtttattgcaatgatttattctaaaggaatgaatgaggaattgaagaattttgtgtctttttttcagtgtattccaaactcatcaaatatttccatgtagtggatttatcatatcataactaaagctgctgatatattttactaatcccatatgtcggtcaaaatcttaaataattttcaatgaacataagatctgtttcaaatgtatttaaacatcaaattagttgatgtacgaaacaaaaaaataattcgagaaaatagagtattcccatatgaatgtgaaaataaaataagaaaaatctctgaaactttcaatgaaatctaaaaatctaagctcctcaaacgctttttacatgaccc

SEQ ID NO: 72264 - DNA, 613 bp, Arabidopsis thaliana landsberg
  unsure (1)..(613): unsure at all n locations
ctactcttagtctagcttctgtattaactaccacccaacggggttttaacggctttttaacgaatccaactcatatccgcgccaactagtcattaacgatatcactacctagagggtttgaacggctcagtaacggatccaacacacattcgcacagctagacatcaaccatatcaccacaactaacaatcacaaatcttttcttctcaattctcagctacttattcacaaccaacaccataccttctctcctagataaagagatatccttcttaaactctagaaactatatacaatcaaattcaaaaccctagctactatatgaatgcactaaacccaatgacaaaatttaaagaacaacacaaatccaaattcaagaatcataccttatgccttgattagtccattgagcaagaacacttttcgaaacctcattcccaaacaccattgaaaacaactgatcagactcttccacagacaactccttccccaaacaagatcccacaacttcctcatccttatcaccaccaacaacactaatnggcanaaccctagctttgttcacaggagaaggactcttangaaacaaaaccatacgcttctcagcagcagc

SEQ ID NO: 72265 - DNA, 540 bp, Arabidopsis thaliana landsberg
ggagaacctcgtcgccacttataaaatgaccgaatcaacaacccttgcccttcacctcgaatttgttcccttcgaggagccggtgattcccgggcgcccgcaaggtaaacgcttcgtcgacgcgatgaaaaaattcgccctgacgacgggaatctccgtcgaactggttggcaaccgccaactcgtcatcaattcgacctatgagctcgcgccctatgtttgcaatgccggcgaaaaactctccgccaccgacagccaggtcgtgatctgggatacctccgaaaaatcactgccgacttcggcccagctcgccccgtcctactttaataaaatgagttcactctttcccgactttttttcaaatccgaaccccgttgttgctgaccgtgaagacatggccgccacacccaactttgtcgaggtaaccgatgcgctcattgtgcaattcaacgcttcagcgcccatggcggaaagcgcttgcgttttctagcgctcttctagcctcactgactctcttggcgggctgttcatccagtgatg

SEQ ID NO: 72266 - DNA, 1080 bp, Arabidopsis thaliana landsberg
aaaacataactaaaatgacaagtcttgagatatttaattactgttaaatttgtttttatttaatgtacatgatatatatatatatgtgtggttttgggaaatatacggcgtgttgactgttgagttttaaattttaattatcatagccacgtgacttgatttctcgataatcactaaaatgggccgtaagataatcagaatctgacttaaactcaaaacatatatgggcctatttgatctaatagtcacaatgggttaggtttttcggagaatcttcgattttgctttgttggaaattctttcgttcacgcgtttagtttaattttcacacttcacacatgggtgtgattggcataacttttaaataatgacatcagatcataaataatatacttaaattgacattatcgtaaaaatcgctaaattattgtgattacttctaccattttaatttaatataattggctaaacatttcttttttttttcttaacaacaaagatttatcatgaatgtttgaagcccatggtaatgcatcaataatggtatatgaaactactatgccacattttcaggtcatataaaaacaaaagaattattttatcacaaaaacccggagcgaccacaccgaccataatttaaacaaacatttacagccaaaacctaatatttaaaagaatagtgacattgggtccacgatagagtgaatataaatatggtctacactattatcagttagctatgtgttgctgcatgcatacgaattctgttccgaaaaataaatcatgcaatcaaacagtacaacacttcaattattgggactttttgtgtcaattagaggaagataatgataacacacaattactggccaccgaaggtacgacgaagaatgcttattccaatcgaaaatcatcttctattttttgggctttgatgtttcgtttcttgaagtcagggccggatctattctaagaaggcagtaggagtggactgactctacaaataattacgagagtttatgcattttgtcatcattttcttacgttagtaaaactcattttccattcaatcattcatcttaa

SEQ ID NO: 72267 - DNA, 383 bp, Arabidopsis thaliana landsberg
tttcttcgttctgaacagaatctgaaagttaccgaaatttctgggcgaaatcgaaaggaaattgtaaaatttctcgagaaaattgtgtgagagagtgtaggggaagaagttcgggatttagaggaggattagggatttctaagtatttatagggtttcgtgaatctgttggttagcgtcggaataaagttgggtttgcttcaacatgacgcaacgcttttaggacgcgttggtcactccgagtcactctgttgcagacagagtcgttctaaaaaaaaccctttactattgttaaaacttattagaactcaccataatccttcactttatatatttaattggcaccaagggtggacatttaaaaattttttaaattcataccct

SEQ ID NO: 72268 - DNA, 2816 bp, Arabidopsis thaliana landsberg
ctaaaactagaatggtcctggcttttagggttgactttatgtataaactcgttatggttccggatttgcaaatactctttggggaccatttgatcggtcacttgggttttggccaacatgttttacatgtgaaatttgttgtagtagacttgcaagaaaactctttactaataaacttacccacgtttgagattgcaaatggtgatacacacaggtcgaaatagtattaaaacgaaaaatgtgaagcctactcctacaagttagaaaacatgtacgccactaaagctgctagattattttaattagcagattgatggcattttctttgttatatgtccactcttaaacaaatgatcagatccaagttactatgatttgtatggttattaatttcagtgcatatatattccttctgcatggtcgaaatcatgttagactacggcgccacaaaacagagaactctttctataaaagtcagagcccatcagaaaaagaagtcagaggatacaaaacttggaggtgattggtgattgatcttcttcagccattatctaacatatacacctatttacaccacaaccaaaagatcctaaactttctcatgaatcagaaggtcttaagattcataggctctcttgttttcagcatcaatgactgtttaaaagtatcgaaattttaattgaatagaaccggagataaaagagccgcggtttcgtctgaagtgtcttaccattcttcaagccagttttgagcatcttgatcttctgttgtgtcaagcgatttagaagtttctagagggagaacgttatcattctccagatggtgatgaattcgcgagattatctcttgaggaacttgtaattggcggttactaatagcttcccatttaagaccattgaaccagggatgtttcttgattgattctggacctcgttggctaccaaaccgcaggttttcatcaacttcgagcatctacacaagagttttgaagatgcgggtaagacaatgagaaacaggagatttctacttttaatagatgtgaaattggaacttaaagatgagacctttgtgatgagatcttcagcttctgagcttagaactcgagggaaagttagttggccttttgcaatcttctgaaacgtgtcgagctcgctctctctccatgacccgaatggcatttctccttctagcatatagtagatcaaaactccaagagcccacctttttgaatcagcccaaaaaaacaaaaaaggtaagaatcttcaaatattaagccaagaaaacataagagaaatagagggaaatcaataccagtcagctgcataaccatggcctttgccttgaacaatttctggggctaaataatctgcatttccacagattgtaaatgttcgttccccggacaatttcttggcgaatctgaagtctacaatctacaatcaagagattaaaattacgatctgatggaagtaatggattatacaaaaacccaaagagccatgtaacggaaaaacacagacctgtagatatccggattgatccaacatcagtaactcgggggatgaacctctgaagagaatctcgttctagaaattccaaaacggcaagaaaagaacagagtttcagaccacgaaatcttagtaataaccagaaatgttaaagaaaaagttttgaccttgtgtatgtcttctatggcagacacaagtgagccggtaatgaaacggacagatgactcgtcaagcggagagtgaagcagagaagagataggacaggcaagagtagtgttcagtaagattgccgcaaatgtttgatcgacacaagtacacaagatttcgggaacaaaagctgagggctttattacgttcttcatcagattccgctctttcaatacttgtgcctctttacctaactttttcaccttttgctttgaaaatcttttcaagctgagcaaattttctttatctttcaaatgcacgagcccaatctcactacagtctgttgtactcaagcatgttgtccattcctggataaaccaaaatagtgtaagttgaggagcaccgttttaagattgatgtagagtaagattgcttaccaggtctgcaagagtggctttagcaagagctgtggtatcggtaacttttgcagattcctttgacagctcgaatgaagaatgtcttgtcctgaaaaaaaaacattatatggaatcagtcaacgataaccacaaaaataaacaaatacaagcatgaagaatgccatacttgggaccgtcatctgaaatattggtcagagggccgaccgctgactcgaaattttcttttgttaaaaccacacaaaccacttcgccaactgcaaccacacttaaggaatctttgagttcgccaagaagagcccattcaccaaagtaacttccttcatgcttttctatggagacttctgttccgatttcaagattgtcatactcgttagtgattccagttgtaaggcttgaaacattttgactctccaacacctctgtaccgaaagatatttttacgcgtcccttctggataacatacaggccctgaagtttttggtcctatacatgcacagaaacgtgtaagaaagaatctcttggagtagagttatttagtctttacaaaaagcaaaattaacttcaccttggtaacaattgtttgtccatcagaaaagcaagcttcggaaagagactctgcaacatggcttagttgcaaaattgtaagacgggaaagaagatcgacagaacgaagaagcttcaaggatgctaagtttaaaaccagacataaaattcctgaaatctg

SEQ ID NO: 72269 - DNA, 489 bp, Arabidopsis thaliana landsberg
tcgggctcatactgttccctgaaaacttaacttcacttatgtactttggacatcacggcctctttatctgggggattccttctagcatttgaaccacttcccccattgtcggtctctgcaatggctgctcttgtatgcaccagaagcttgtcttaaccattctcatcacttgttccatatcaacagtttgatcttcgcttaaacgtgtgtctaggatcgccttggtgatgcccttttcaaactcctcgtatgcccagatcgagaatttcttgtggttcgttttctccgagacatcaaagtttcttttaccgctaactagctctagtaggaccattccatagctatagacatccgattttgaggttatgggaagatttgcgagccattcaggagctaaatagccttttgttcctctaacactgctcatgttgtatctgttgtctttgggatcaagagtttggtaagtccaaagtccgagactttgccagc

SEQ ID NO: 72270 - DNA, 513 bp, Arabidopsis thaliana landsberg
cttaatcaaagtccatgtgattgaatgaacaatcattttttctcttctggttgtgagcacaatcatatggattactataatcttaaattacaattgactgaatgaaggacaatcatatacattacatacatttatgatcgattttcaaatataaatacatacttatatactagtttagacttaaattagtgggtggacactaatatacgtcccattaaacctttgtgtttctttaagaaaaggctatgcataattatgttggatattgaaaaacctaggaggattaattctttattcatatttcaatcaaacagataagtgtgaaacaaagtttatagggatttttggcttttgtttccaaaagtacattgttaattatcaaaaagtgtgatcctttaccataacacgtacttagatattaaataacatgttgaccaaaaaaatgcaatgctttaattaatgacaccacctaaccttacaaattacgtaacatatatggtttataatatctac

SEQ ID NO: 72271 - DNA, 670 bp, Arabidopsis thaliana landsberg
aatgctgaagtaatacgagcgatcttacctctgaatcgcgtaacaaattggaccagcaatcatctgcaagaaaccgaaacttgtgaaacgttaaagcagtaaggtttcaagactctcagatagaaaatatatgaagagacaagtcaaagggacaaataccaatattgacatgtatgtatcctaaatcagccaggccagatgaaaccaaagcatcagctgttaaattataaataaaatatcagcaactctaatgaacatatagcaaaataaaatcagatgaaacatgtgagtagctttttgttattagaagctatcaaaagaaagaaagttttaccagtttcctttatgacagtttcattgatattgcaagcaaagaaattccagctattccatctgtcgattaacaaagcacaagtccaatcagagtgattcaaaactcttaacttgtaagacagattcaaagtttcaaactttacaacagaacagagacaaaaccccataaaaattgttcctttacatgtaaggagaaacaagccacgaaaatcaaaatccaaagagctaattccttgaacctaccccatttgtggagttcgagcaaggccattgttgagctgcaagcgtccgtacatagaagtatcatagatcgaagtgaaggatttgctgaaaacta

SEQ ID NO: 72272 - DNA, 170 bp, Arabidopsis thaliana landsberg
gaaggcatacaaagccaacagaccgtaatgaatacaaaacaagatttatggctacacaaactgaggaagatagttctagacctgggccaagaagcactactggagggaaggtatagaaaccaccgaatgccgaatatggaaaaagaagcccccggatggggaaacgaccc

SEQ ID NO: 72273 - DNA, 589 bp, Arabidopsis thaliana landsberg
cttttcactttctttgtcgtaatatttgcttcgtcgtttttggtctctacagctttctggctcggggagcagtttataaggcgaatgccctttgtcaagcacatatattcagcttctaagcaaattagcactgctatttctccaggtaagactgtgtactgtttcattgtcttcaccagttccctgctttagctttttctcgcatccaaatatatttgctcaattcgtctccttttcttcaaatatatgtcattggttgtgtaatggagcacctaaagaaactcgtctttggttctagaaaaaagtgcaagcaaatttacgtggtttcagacacaatgatttgaattcacaagtaacctttttatgttgctatgtgggctgcctttctcgcgtgcgttgcaatggaagaacctccgatttttgttctcagaccaaaacactactgccttaaagaggtagcaatcatccgtcaccctcgtattggtgaatacgcatttggatttatacataatccgtgacactcaggtcagttttcatcacaaacgtgttaaacccaatagcaaatactacttgtctatgctttttttgt

SEQ ID NO: 72274 - DNA, 266 bp, Arabidopsis thaliana landsberg
ggcaaaggacatccgagctgtatgatgcttgcgacctcttatgcttttgaaacaccacacattttcactgggttccagggaactcttaaagacatgccggtgcacaaccaccgtattcgctgccacagctcgcttcggcaggtcgatcccgaccacgcccattttgacacgcagaaaatggttgaaaaccaactatccgtcaacgataccgacaagcacgctactatgacgctaggcgtacctcaaacgcgtgtgggaacagaaag

SEQ ID NO: 72275 - DNA, 594 bp, Arabidopsis thaliana landsberg
  unsure (1)..(594): unsure at all n locations
agccaacgatagcatagctggcgtacggctcgaacggcattcgccgcagcttcaggcggttcaattcaaaatatgatctgagagctttcgtctcgcccggccaatgcgcgacgttgacttcatcaaaagcaataatgcctcctttgggtacgagaggcgcaaggtgttcaagagcaatcttggttggctcgtagagatcgaaatccaaatagagcatcgcgacaatcaagtgcgggctattttgtacatattctggaatggtcttggttgcatcgcctttcaccaactcgccccgacgaatgtgtggcacagctctattagcgtcatggatagacaagagtttcgagatgtttccatgatccgtgtccgagaacattcgctctctcgcgcgnnnnnnnnnnnnnnnnnnnnnnnnnnnnnnnnnnnnnnnnnnatcgaagccaatgacgcggcggttgnnnnnnnnnnnnnnnnnnnnnnnnnccagatgattgaagagcatgaagttattgccacgatgcacgccgcattccacaatggagccgtgcacctcgagaattttctcgtccaacttgatgcgaaatatggagggcg

SEQ ID NO: 72276 - DNA, 496 bp, Arabidopsis thaliana landsberg
  unsure (1)..(496): unsure at all n locations
gggggntaggggccgccggaatcatgttttatcattcttattgccaatcgcgatggggaggggagaacattgtaacgtatcccgagacgacgccggtcgaggccacgacgtttcagaatatcgtgagccgcttttgggggttcgacaagctgatcggcagcgcgctgatcaagatcgtctattatatcggtcttgtcggaattgcgctttgggttctcttcgccgtcgccgccgcgctgggcgtcgcgcgctattcggcgagcgctgggctgggcgggattctattgacgatcgcgggcggtatcgtcgcggccgtattgtggcgcgtcagttgcgagctctggctgatgatcttccagatttacaaccggctcggcgagatccgggacaggctgccgccgcgataggcaaagtgcaagcgaacttcgacgcgtgttgctcgttcctctggtgaggagcgagcgatgacgacacaggttctgagcgccggccctgc

SEQ ID NO: 72277 - DNA, 274 bp, Arabidopsis thaliana landsberg
tctgtttcttcttcttcttattcatgtttttctctcaacctttccaattatattgttacggacatttgctgtggagtttaaaacatgtaaatgtttgatgatctttgcaagactccatttttgtttaaggtaaaccttgaatctcatagattgtcgattgttggtatttccattttcaggtacggttctgtagactgtagacttgctgaccagtccggcttaaccacccaaatttcaaagatctacaacaatcaaaatgctggttggcccaata

SEQ ID NO: 72278 - DNA, 496 bp, Arabidopsis thaliana landsberg
tacttgggggaatgtcaatcccgtgccttgcacacacccgtcctgacactatgcgaactggacatttccgatttggcgacctaaaccggacggaggccgacgccgattgcagggctagtccaatgcacgtgaactttttatcaaggttagtccagactgcaatgtgcgggatggatcacctgcattttcacgcataactaatgctctttggatatttaggcttgacacatcttcccacccaataagaatggaactacttttgaaacaaactccaaggaggaagacatgtttgctatttaaacggtgaattaacaccaaacgcataaggttattattctagggcataactagctgatgggatcccctttgaccttcacattttcataaggtgtggcgtgagagcatccttaaaaggacccaaagaaatgggaactatgtctcttttggctaaagatagcggaccctctggaggaagcccgcacgactgcttattagc

SEQ ID NO: 72279 - DNA, 469 bp, Arabidopsis thaliana landsberg
  unsure (1)..(469): unsure at all n locations
ggccccgtccagaagcacgtgccggtggagccgggctcctacannnnnnnnnnnnnnnnnnnnnncaccgacggccagaccaatgccggctacgatccggtcgaggcggcgcgcaccgccagcgaatatggcgtgcgcgtctatacggtgggcttcggcacccagcgcggcaatatcgtgggctttggcggcttcaccatgcgcgcccaactggatgaaacctcgctgaagaagatcgccgacatgacccgcgccagatatttccacgccaagggcgcggaggatctgaaggccgtctatgacgtgctgtcgcgccaattggtggtggagacccgggagatggagatcaccgccttcttcgcggccctgtcggcgctgctgatgctggcggcggcgggcctgtccctgttctggttccaccgggtgttctgacggcggcgggcccggctaggccctgggccggcgccgt

SEQ ID NO: 72280 - DNA, 342 bp, Arabidopsis thaliana landsberg
atggccagtaataggaccaactagctttaagtgagctaagtgaatgcctccaattggcatctgcgtaagagggatcaaaaaaaatacaagttagcttgttatccaagtaagaatatgtgtaccatgtgacacaagcaaaaaaaaaaaaaaaaaactaacctgtgtagcggtcatctggagagctcctttcatcagaagacacctttttaccggcgaattcaacctctaaaagagagatatctgttgcgattgcgttcacaccattggtgacaacagtagagatcagagaagcgttgtcaccactacccatcgtctggaacataactggagcgtaaaacataa

SEQ ID NO: 72281 - DNA, 533 bp, Arabidopsis thaliana landsberg
atcaacacttcctgcattaggtgcctcgactgcgttactagaggtacctttgactcaccggagggagggtaaacaaatgtgggctgtcgacaacgcccaacttcccctctgctcgcaacccacccaaaccatctgtcacacaagactcgacctctccctcccccgccttaggctttttgcacagattccggtgctaaacttccaagatccccccatttggctctcttgcgcgcttccacctcgccgggtacgtccgtccgtccgaaagcttgcattctcccccagacggtcggtccgcgcttcttgcccgcccacgcccacgcttccccaggctgccctcgctccctgggatgcaagactctccggcttgtcatgctaactccgcgtcttttgccttcccgtccagcacgcctcccactcgttgccatcagtcttgccgtagcaaacacccgccaaaacagctcaggcatcaaccccgctggaccctcgcgcaaccgtcgaacgaacaagaaacgacctaaagatcccgagtc

SEQ ID NO: 72282 - DNA, 541 bp, Arabidopsis thaliana landsberg
  unsure (1)..(541): unsure at all n locations
ttttgacaacgatttacgatataatgtctaaatttggtataatttacaaatagtatcatttatttaaatttaatatcacaataacttaatacataagtttttaaaaatattattgcaatataaaataaatctcataagtgataagtaacctagtacatgataaataaattatccagttgagaagggaaaaaaaacaatttacaagggaaataacaaaaaagtgcgttctctcgtctctgcatctatctacccacaagcaccttccttgcataacgagcgaagctctcttttgccttctctctcattttatgcgcttcctcttccccacgcgcctcatcaacaactcatctctcggtctcctccgatctccacacaccaccgcgccgatccgttctctctggtttcgcaccaagtctccggtcttccgatcggcgactactccaataatgacggcggtcgctttctcttcatcgttgtcgattccccctacctcggaannnnnnnnnnnnnnnnnnnnnnnnntcaagtttaacagagagtg

SEQ ID NO: 72283 - DNA, 1432 bp, Arabidopsis thaliana landsberg
tgggaatatctacttggcttataacaaaaatgtataattgcaattgatactttgcaggatggggtggtcctggtggttacgtctaccagaaagcttatctggagttcttctgttcaaaggataagttagacacacttgtggagaaatccaaagcttttccttctatcacctacatggccgtgaacaaatcagagaattgggtatcaaacaccggtgagtccgatgtgaatgcagttacttggggagtgttcccagctaaggaggttattcaaccgacgatcgtggatccagccagtttcaaagtctggaaagacgaagcgtttgagatttggtcaagaagctgggctaacttgtacccagaagatgacccttctagaaagttgctcgaggaggtaaagaatcttcttcttttttcttctcttcttttcagtgaccagattggttgagctgtaatgatgatggtatgatccaatcgaatatgcaggtgaagaacagctactatttggtaagcttagtggacaacaattacatcaatggtgatatcttctctgtctttgcttgatctccgagaaaaccaccggcgaagaggaaacattcgatttcgagatttgttttgtaccttttaaagttatttttgattcgtaataaccttattttgatgaatcaacaaaaacatcagtttgattgcaatgaaaaaaatcgccttagcggtttgttctttctctcttgtgtcaaaacaacatcacaaaatagcttttaacagaaatcaagaaatgttggcatttcttaaagacttggaagtaacaagaccagaagatgtccgcatcaaatgctccttaagcattgaaacaccagacgcatctgtcttcaaaagtggttgcaccaattcccacatcttcttcttttgaacctgaaacaacaaagaaaacacagaacttgaatatgccatgacttaagtcttgcagtactgaaatgattagtgctttgcaggctaaatgaccttattaggaggtgcaggttcaggaagctgctcgagatcttcttcgttaccaaaccaaactctatctccaggaacagagccttctggtggaacaagaagctcaacattttcatgagctgcgtcagatgcagctaaaagcataccacatgacttaacccctctcatattcctcggcttcagattagccagcaccaccactgatgcaccctgcacagaaccaaagtctcggaaaattgagccaatggtcaaaatctaatggggaaagttccgtacgcttatcacacaaaccgatcccagttctcaggattggaactatagataggaacaatgaagctaacctgaaggagatcaagaggaacatatttgacgagaccactgcagatgattatgggctcagcttcagttatgtcggcttacttcatgcatacagag

SEQ ID NO: 72284 - DNA, 697 bp, Arabidopsis thaliana landsberg
tttaaacgctcagataatcttgatttaagtttatatatatgttgcttgtcaaatattagagggtatttatctacatgaaacaattttttttaatgttacattaaataagtctatatgaaatgaaaatagcgttgataatttgaaagaaaaataaaggaaaagttagaattttttgcttaatattgattagttttaatgctaatcatgattatttattcccatctgacttgatccaaaaaaccagaaatagattaccaagttgatatgaatatattttcaaaccgaccaagtttttcttttgtgtggaaattttatttacgaaatttatatttttcatttatagtatatattcatgaattgctttttacgaatttagtgacaaccaattcgaaacctaaaagaaaataaaaaattaaacgggtgtaatatttggagtcgatatgttttcatttggatttatattgtaatatctggagtatatgtttttcgtttggatttttgttgtatttactttcttactttttggcttattcaagacatgcgattgtgttaagctttactctttatatacttagtgatcgttccattttgacatttactttcttacaaaattttttcaagtttcaggactactaataggaaaattctcttaactatcttcaaaattggggattcgaccattttttacataattttg

SEQ ID NO: 72285 - DNA, 1298 bp, Arabidopsis thaliana landsberg
cgccacttgcaacacttgggaacctgtctggtacgttctccgtgtaaactacaagggagacataatatcaccatctggttcctgttatcatctgaagaattcttgttttcccttccagtgataaaatgatctttataatacatatagatatattaaattgctgtattttaagattatagatatataaggtacatgagagtgtttatttaaaaaaaatcacttggaattcatattttgtgatacgttagattggaatccatttgggaaaagaagaatcatctgttcttatgtctcaaattttgacttcattcacttttcttcttgtcttttgagaaagcttccacaatctaactgttcgatgtgaaaactgagattcgagtaagaaaatgtgaactgtgttatactgttttttaattagataatttagattgcactcagataaattaataacattcctcgaatacttttatgtgattggatatattaggtatatctgccaaccaaccaataaactgctatgtttaaacaaattaaataaattagtatatgtttactcaagaataaagaagattgaaaagaaaattctatatgagctaaatttgctggaggaggcatcggacgtgggtacgagacctttccaagcacacgagtagtgcttagccatgtcatgctaacatacaccatttggttcatacaaaatccaaatcaaaatctatttttaaaatcttttgcacacgtctttgaaaaacacctctcatactatagctacggaagcttcaatttcaaggtttgtctaaaagctaacgattatgaatcggcgctacgaaaagccaccgccattgtcagtttcctccaaagggaagaagaagcattttgtcaatcacacagctcccaacactcctggaaattacgagaggactcaaaccagtccaacgttatcaacggctcgatcacacgaacccgatgataagctcaattacgagatcttctcaattctcgaaagcaaatttctctttggttacgaagacccaaggctactatggattcctcggagtccattacgacccggtgattccgaagcaggtccttctcccagatcaccgttgactccaaacggcgtcgttctcccgggaacaccgtcttcatctttcagaagtccgagaggaagaatctgcgttttgagcattgacggtggcggtatgagaggtcttttggcgggaaaatccctaatctatttagagcaaatgctgaaagagaaatccggcgatccatacgctcgaatcgccgattacttcgac

SEQ ID NO: 72286 - DNA, 1232 bp, Arabidopsis thaliana landsberg
tgaaaccaaataatgacttgtatatttgaatcgcactctaattctccctttcaagtaaatatcaacgtcgaaacaaaaggtatgaaaaaccaataggaagcaccaaaaacaggtgttttcatctatctttagatatgagagtgagagttgcgtttatagcattgcggttagttttggacacagcttgctttagcgttacggttggagacgctctaacacttcgtcgctgctgctcaatgacaagctcgctcgcaaaccactctattttctctgaattgctcatttctcctatccttttgcttccgaacaaaaccgactccacattgttttgcttcaacatctcatcagctatctccgtcagtttcttcacattctctgctcttggatcggtgtccacgttcggtccacaagctcctaatcgcgatccatttgcctgctgcaccacaatttatttctctaatgattttttcatccaaaaaacgccaaaacatacaacgttgtctccaatcatgataaaaaagaaaaaaaacctgaatgcgaacgtaattactacttcggtaaggcccaaagcccatagcaacagcttgatcaacaaactcagcagacccatcaccagagattctcgccatgggccgagcccattccttaacgcgccaattcttaacctgttcataatcataattcacttcaaaaagctgaccagtcccaagcgacaacaccaacaaatcctccactcctttcaccgccgggaactcctgtttgttatgaaacacgtgcgttatcgccgccgccgtcggattactcatcgctaatccaccccccaccgcaacgcaccgcgttttcccgtcgacggaacacgtgcgaaccggatcaaacgtccccggctccgcccatgtggcacggcaaatatctcggagacgaaaatcgaaactgtcgctttctaacgcgtcggcgcgtgagaatagaaacggagccgtgcttgagagatcgtagcaagagatgagaattggtttgagtgtgtctttaagcgttagatcggcgaatgatgctttcattgctttttctagcttcgccgttgcggcggttactgaagatgatccggatccggatccagatcttatgacccgtttaatcgccgctcctgctcctcctcctccacttccgctccctgatgggtagaatccttctgcgttctctaaaagaaacttcccagtgtcctccgccttgaaaat

SEQ ID NO: 72287 - DNA, 640 bp, Arabidopsis thaliana landsberg
cccatcaggcaatagtctttgcttacacaatttacaactctttttgttttgcgatggacggcaagcttggggccttcattcgcagcgaaatcaacaaaagcggcctggtggtcatggacaagatctgggacaacggttttcgcgaagtcaccaccagcaccaagcccatcgtcacgcccgacgacttccacgacctgaaaatccgtgttccggtcagcccgctatggacatcgatgttcaaggcactgaaatcggcgcctaccagcatcaacttcaacgaggtgtactcggccctgcagaccaaggtggtcgatgcccaggaaaacccgctggccatcattcatacggccaaactgttcgaggtgcaaaaatactgctcgctgaccaatcacatgtgggatggcttctggttcctgggcaacaaggcagcatgggaccgcctgcccaaagatattcaaaaagtggttgccaagaacgtcaatgaagcaggcatgcttgaacgcgtcgatgtggcggcactgaacgcccaactgcaaaagaaacttactgcggaaaacatgacgtttaacacaccccgaccccaaacctattcgcgctgtgctgaagaaaaacgggttctaccggcgaatggaagaaaaaa

SEQ ID NO: 72288 - DNA, 403 bp, Arabidopsis thaliana landsberg
aacgatactttggggagcaatctgtgggaccggctctcacggggaagtccacgcagtgaagacatttgacctcatacaacgggagtcggagggattcagtgaagctaaaggggacgtcagcgtcacagtcttgcaggcagcccgagatggagatgtataagaaccgaatgtcggtcataaaaccacatgctggatgggggaaacttgttgtcatgcaaacatcaggcaaagcaagacagacagatcttacgctctaagctacctgctaataagccacgaacaggacatgagctaaacacaacagcaaaagggacgaaagaaggacctcaccctgaacaagaagataatatcgcacctgatgtggtgtgtaacacacaaagtgtgggatgaaggtgccataatc

SEQ ID NO: 72289 - DNA, 618 bp, Arabidopsis thaliana landsberg
ctccagtgttggcgttttagaatactaaatcgatggttactttgtttagagatgaaactaatatttggatttttgcttatagccaactttttgaattaatccgagattttatgatcactatttataaaagaataaaaagctatacctaagttaggaagccaatggctcacatcaagtatatgcttgtcgtttagttatttgtactagatcatacataaaaaaaaggtcaaatgctttacgaattgtggatgatttgattcgtaatattttgtatgattgatgataaaacacctacatatgatatgagtggcttggatgactctagtctctttttagacagccttttctttctcgtatggcttgggaaagttcatttggtgattgtagttggttggagtcgcctttttttagcactttttgattagaaaattttccatttttcgttataaaaaattccacagcttaccaagagatgggtctctatgattttgcaaaagtattgaataactttcttgatggtagatatgacaatccaaattgggatatacaattttaaacatttaaaaactccaaaaaaaatatggaaaagaattgggtcttaaaagaataccataactt

SEQ ID NO: 72290 - DNA, 614 bp, Arabidopsis thaliana landsberg
  unsure (1)..(614): unsure at all n locations
gaagaaaaaacttcctgtcatttcccacccaacacgtaacagttattacgtgatggttaccaagaacaggtatgaactgaaagtatttgattcaaccggcgactggatcgttacatacccggttgtattcggcaacaaagatctcggagataaaatgatggaaggcgacaggaaaacacctgaaggtgtttttcatattgcagcgaaaagaaaacatgaaaaatggaattcattcctgctgctcgattatcccacccgggaaagcgttgaaaaattcaaccggagaaaagcatcgggagtaattccctccagcgcacgcatcggcggagccattggcatacacggcacctggcccaatgaagattatgccattgaccagtaccagaactggaccgaaggctgcatcagcaccaagaacatgtacatccgggaaatctttaacctgctgccgatagggacacggatagagatcagaagatagcattgccaattgccaattgagagttgcagattgcanattgatttttcaatctgcaatntgcaatctgcaatctgccttctgcaatcccccctcagtctattttacttgcattaaaatacggatgcaatacccg

SEQ ID NO: 72291 - DNA, 560 bp, Arabidopsis thaliana landsberg
  unsure (1)..(560): unsure at all n locations
atacctggccggtttgactgccggtttgactacgcccaaacaaagtgagagcgattctttcactttgtcatctctccaaggaaaccagacttgttacatacccatccccccttcagaaaaacatcgacaaaacaaaatcgtcggacactttcaagactgcagttgcttgaaagccctctacaacatttaatcacgtgatggatcccgtgcgtgagcctccaccgcacgggccaccagccctggcgagcccacctgccgcctcaccgcccaagcctggaccgcgactgcggttggtgctgaagaatgctcagcgtcggcctcgcggtagaccaagaaaagacgatacaacatctcgggcgactgtcccccgcacgactacccctcaggannnnnnnnnnnnnnnnnnnnnnnnnnnnnaacccgctgttcgcaaaccccctgctcgcaaagccccttcgaagcggccttcagccgccacctcgaagccggccatggcacacggcgcggaggactgcgcgacagtcctggaagagttcgtacacgatgctggcaacttggca

SEQ ID NO: 72292 - DNA, 708 bp, Arabidopsis thaliana landsberg
gttggttcaccaggttgcgcgcggcattgcggtactgctcgatggcgcactcgtacagtgccacctttgcctgtgcataggcggcgtcaaaggacgcctcgcgcacccccagcagggcctcgcgggcctggtccgccaggcccgggtcctcgcgcggggcgagcttctcgccgtgggccagggaggccagcgcggcacgctgttcctcgtggcggccgaccatctcccgggcataggcctgcacatccgcagcgcggctcttgcgctgggccagctggccgctccggatcgccgccgagctgatgccggaggcggcctcgacgaagccctgcggtgccgagaccggcatgtccagcgccagggccggtccctgcaggcacaacagggcgcatcagagacagaaggtgcgaaggcttggcatggcggggctcctcggcaggtcgggtgggtgtcagcgcgctggcggagggtcgtcctcggcctgctcctggtcggacacgccctggggcgtatacccggagccggcgctctcgcccatgcgctggtaggtctcgcgcagcttttgcaactgctcggcgtccagctcgtccaaccccatcagggcgtcttgggccgcgtgggtggtgcgcaacaactcgtcgatcttgatgggcagggccgttgtgtcgcggctctgggtgttctggatgaggaacaccatgaagaagg

SEQ ID NO: 72293 - DNA, 499 bp, Arabidopsis thaliana landsberg
  unsure (1)..(499): unsure at all n locations
atgaaaccatgtgctatggctcnnnnnnnnnnnnnnnnnnnnnnnnnnnnnnnnnnnnnnnnnnnnnnnnnnnnnnnnnnnnnnnnnnnnnnnnnnnnnnnnnnnnnnnnnnnnnnnnnnnnnnnnnnnnnnnnnnnnnnnnnnnnnnnnnnnnnnnnnnnnnnnnnnnnnnnnnnnnnnnnnnnnnnnnnnnnnnnnnnnnnnnnnnnnnnnnnnnnnnnnnnnnnnnnnnnnnnnnnnnnnnnnnnnnnnnnnnnnnnnnnnnnnnnnnnnnnnnnnnnnnnnnnnnnnnnnnnnnnnnnnnnnnnnnnnnnnnnnnnnnnnnnnnnnnnnnnnnnnnnnnnnnnnnnnnnnnnnnnnnnnnnnnnnnnnnnnnnnnnnnnnnnnnnnnnnnnnnnnnnnnnnnnnnnnnnnnnncctttcttgtcataatatgcggggctaggaataaaaaggtttttggtcttgaaaaaaaaaacacccaactcccttttttttt

SEQ ID NO: 72294 - DNA, 416 bp, Arabidopsis thaliana landsberg
ttaatgttttctgactacatagacgtacaattgtttgagttttgatggtaaaaactcacttttatttctttcttttgtaatacaatcatgtcatatacttacctttttgttataaagctaccatataaggttatctttttaactacatgttataaagtagttaagatctacttttgagcatttttgttattaaggttaccatatagggttatctttttcaatcatgtcataaatttattttttcaaacttttcttgtacatgttattatctacttttgatgtacttatacggcttgaaggcttaatcaagtatatggctaacaaaagataaccctttatgatttcttcttcctttgtgagcacgctctacggctacagacaaagagatttgaaagtcttgcgcgaattgacaaaga

SEQ ID NO: 72295 - DNA, 339 bp, Arabidopsis thaliana landsberg
caaaagtagcagtaactgggaagaacgaatagacgaaaagaaaagtcacatcaagaggattttttttttttactttttaacattttcacaaagaaaggtttttattccattttttttttccaggcacatatgaagaagaatttggttctttctttctaattatagtgaatcaattacaccctaaatattgaccttactgattgagcatccaatcattcttatcatgcatggatgctttgtttgtaagaatagttgaatgggtgatgaagtctttacctatgttttcgctgctgaagagaatagatgggtccaacccctatttgggatcgctgcacctaa

SEQ ID NO: 72296 - DNA, 518 bp, Arabidopsis thaliana landsberg
gaaccacctaaatctgaccctccaactctgtctctctgtttaacggctcttcatatatatacgttaaggtcttaagaacaggggaaaaggatggggcatttggcatcaaggcaactgcttcttctactggaaggtaacataccgggcatgctgaaatcaaaaaccaggcaaacaaaccaatactcttacaaaacatctatacagcagtaaatctcagatcttttcaaccatcacaacaacaattcacaacaacaatgtggtagtgatctcagaaaagaaacagaaaaatgggaagaaatcagaaatcaagactaaatatcttacggcgtggccctgtacttttcctgtctgctggagggggaggtaaagtgaaactgttacaaggatgaccttgaggaagcgaataaccaagaaaatgtataggaggaggagggaacacaataactttttttgccttgaacgatatatctccaatattcatgtttagctcttcatttgtttgtaacatatttgaataa

SEQ ID NO: 72297 - DNA, 1278 bp, Arabidopsis thaliana landsberg
  unsure (1)..(1278): unsure at all n locations
atgataaaccttatctgccttctctttagtttggaaagcattttgttatggaaatagtggtctaagtaacacatttctttggagatcccgacatgtagtatagggaattttgttagggtctaaaatatgatatatcaactatatatctttaaattgatagaaaacttaattataatgtgaactaagattagagaacgaatttcacaatctagaaactcattgtaaactttttaaatagtaagaacaccctgttttcttaaggtctatgattagcccaagatctatcactcttgttaataatctagattcaaacccatgaaaatgaccatttggaaagaaaataacaaattgattaccattaacacatgaaacaatttataaaccaaccgatcagaagaagccgacatttttgtacaagaacatttatagaaatgttttgttaaacagtacaaaaaagaattgcaagataatctgtttttttttttttaatagagaaattgcaaaatgtacaaatcgaatttaggctacaggttaaaaaaagtaggttaaacagtcctcttcctaattaaccgctgccacttttactacttttttattttcactgtgaaaacttaacgacacactgtccttttttttattattcctgagacttaacgaaaactgttaaaaaaaatagatcatccaccatccttaacggcgcaaaccccacaaaaacctagcgagtaccgttaaactccaacactcgccatctcagaccatccacgtgtccctcatgcgtaccnaggttggaaagaatatatcaccggcgcgtgacattgtcagaacgcgcgtggctttcctcaattggaaatttcacagacaagtagagggtaaaatagtcatttaacatcacccctgagagatcactgtcttcctctttcgctttcctcttcttaaaaaaagagttaaataaagagaagagaagagactctctcctcttcacttcgcgaactcagaaaaatcaaatctttctctctctctctctctcgttgaaaacccatttctgtattgtgttgaagctacgttactactaagaagaagtgaagcaaaaacagaggtttttgaaaatggagaaaaaacaaggctttttctctgctctcagacacgaagttgtgagaggtctttcgccgtcacgatccagagcaaggtctcgttccgttagtcccgctagtctagttcaccatgtcagactcacttggggaagaaagacttaactggaggaggcggtggtggtggtgc

SEQ ID NO: 72298 - DNA, 515 bp, Arabidopsis thaliana landsberg
  unsure (1)..(515): unsure at all n locations
atgaccccgatgatgttggagatctcgcgcgaggaggtctcgatcccgtttatcttttcgacggcgcggcgcacgacctcggcggacttctccgcccccgcgcgggtgcgctcgacgagctggccggcatcctcggcccgcttggtggcgtccttgagcgaggtggtgatctcctccagcgcggcggcggtctcctccacggaggcggcctgctgctcggtgcgcttggcaaggtcgtcggaggcggcgcggatttccgccgagccggcctggatggcattggcattgctgccgaccgagcgcagcgccgattgcagcttctcgaccgaagcgttgaaatcgtggcggacctcgtcgagcgagcnnnnnnnnnnnnnnnnnnnnnnnnnnnnnnnnnnnnnnnnngcaagcttctgcaggccctcggccagcgcctcgacggcgatgcgcgtttggcgctcgcgctcggccgctttctcggcgcgctggcggcgctccttctcggaaagcgcgcg

SEQ ID NO: 72299 - DNA, 540 bp, Arabidopsis thaliana landsberg
gatgagacttactaaatacgcacacatttaatccgaagatttcctctttcaatctctaaggactcgaaaacacgttcggatgtgataatgacgacaaagcgtccttaatcgtctcggtagaagccttcgaaacgcgatctcgtcctaaaaacgcgatctggccaaatcagacatgcaatacaaagacaaacgacaaagcgtacttaatagtctaggtaggattttttttcttaaaattgcatattattataaatcattaaaaaaaatgttgcattaaacattttttttgcattggtctttgaactgcaaaattcatgtgaaatgttttggtcttttggacatgctaattatttctattctcccaactgacttcaaagttattgcagcatctctctcagtcacatcaatacatcatcaacattaagatagtggccataatgttttcttaaattcaacacgtctgatcatatcatgtggacaagcaataactgcggctttcacagctgctgattacatttaaatatggctagggatatttat

SEQ ID NO: 72300 - DNA, 523 bp, Arabidopsis thaliana landsberg
cagcccacagaaaaaaataacgcgaagagaaaggaaaatagagaaaaaactgaaaaaaaaagactaaactttctctaaaaaaatcaatgaaataacgaaagaatgttcctctcctaaaaacacacgaaaaaaaaaaaaatgacatgaatacggaaaacaacaacgtgaaatcataagaaagtgagacaaataaagaaaaaaaaaaggaagaattgaaaaggtaaacaaacaaaaacaaatattaaaagaaacaaaaaaagaatacaaacacactctaactgccaaaaaaaaaactaaaattaacacaaaacccaaagcacaactaaaaaatcttagagtgctaaaagaaaaaaatgcaaacaaaaaacaaacaaaacgatcagatataaaaaaaaagaatctaatgacctacaaaaagagaaacaatccaaccttttctaattaagtaaaatatgaaaacctatattagaacttaaactgaacaccagagacgaaacgaaaaaaaacaaaaaactaaaaaaca

SEQ ID NO: 72301 - DNA, 627 bp, Arabidopsis thaliana landsberg
ttgtgtttttaaataaatgaattgatgagacaatatgtatatgcttttttatttatttctcacaacatcttttaagtccaacctccatatatttttcctgtaaaatattttgtgattttttgggaggtttaatatgaacatgatactctgaattatgctgtttgtttggttgctaaaatttcatattaaagattcttatgcaaatctgtagagaaatcttttttttgttagagacattttgcatatgtaataggaagtaaataaacttgactatgtaggagtagatgttttacttaaaaaatacaaaaattaagaaattatcctaaattacagtaacttttttgtttatacattaaaagcataaaattaatacttaatttaaacagttcaacaaaatagtaagaaatattgaagaataagaatggttaaaaactaaataaattaatatcatatttaatttaatggaaaaaatagagtagtaattttttacagtccactatgacacgaaccaatcaccgagtttagatagctttattcgttttgattcgatttaataactgagatttgagagagtaagaccattcttattaatggttttttaagacagtcttatgttaaaagatgtgt

SEQ ID NO: 72302 - DNA, 2306 bp, Arabidopsis thaliana landsberg
tagttagatagtgtgcatgtatcaaaccaaataaaataatataattttttgtatgtataggacaaaccaaaattgattacttcaaaaagatatatgtctcattatatttagtcttctactttttttctataaataatatatttattcttatcattcaaagtcatttttaccatttcttattttaattttacatttttaccttggtcaatttaatttattaacaatcaaaataaggacgttatcttctatttataatataaagtataaacaacgtcaagcatcttcgaaacgtgataatcctagtcaaagacacatgtgcaaaggccctaaaagtgattaaacactcataggctatttttttaatgaaactattcttttgtttgataatacatacacaaactatttcaaattcctatgaaataattcataaaccgtaaattactatcgcatgcttgccgaaaaaaaatattttcaaaagttaattaactagccgtttcggttcagtgtttgtaccggaatcgaaattaaaaaaaccacctcttcaaaaaccgaaacgtcggtctaatcgtaaggatatatatcagcgactcccaccgttaacaaaataattaaaaatgaaaacattatgaccacacgatcaatagaaaatccgctacgatgataacacgtggcatcatcttttagccattttttgcttccacagatactgtagtaattgaatataaatttataaatatcgcatttgctctcttctctgctttcacattctctccttcctcatcatcgttactctcgtgtttatctctccgacgtaaccatggatagcgatactctctcaggattattggaaaacgtcgccaaaaaattccccgatcgccgagctctctccgtttctggaaaattcaatctcactcacgcgcgtcttcacgatctaatcgaacgcgccgcttcacgccttgtctccgacgctggaatcaaacccggcgatgtcgttgctctcaccttccctaacaccgtcgaggtattttaagaggttttcatatatttcgatttaaaagcttcgtttctggttttgttttgcgtgctgaagaatcacatgggaagcagaatttatgaatatctgtaaatcgcttcttaattgagaaattttgatttccggattcagatgatttttttggatgaatttggttttgattttttttttttgttttcagtttgttataatgtttttagcggtgataagagctagagccacggcggcgccgttgaacgcagcgtacacggcggaggaatttgagttttacctctccgattcagattcaaagctattgttaacctctaaagaaggaaacgcaccggctcaagaagcagcttcaaagctgaaaatctctcacgtcaccgctacgctgcttgacgctggctcggaccttgtactatccgttgcggattcagattccgtcgttgactcagcgacggaactcgttaatcacccggacgacggtgctctcttcctccacacttctggcactacgagccgtccaaagggtgtaccgcttacgcagctcaatctagcttcatccgtcaagaacattaaagctgtgtacaagcttactgagtctgattctacggtgattgttctccctctgttccatgttcatggattgttagctgggttgcttagctcgcttggagctggtgctgctgtaactcttccagctgctggtagattctcagcaacaacattttggccagatatgaagaagtataacgctacatggtatactgctgtgccgaccattcatcagatcatattggaccgccacgcgagccaccctgagacggaatatcctaaactccggttcatcaggagttgcagtgcttctttggctccggtaatgctcttgtttccagtcaattgttgaggcgtttgtaatgcacagtgttttgtaaaacgttggattgctttggctttcaataacttaatgacttattttgtcttggtttttgttaggtgatattgtccaggcttgaggaagcgtttggagcaccggtgctcgaggcctatgcaatgacagaggcaacacatttgatgagctcaaaccccttaccagaggaaggtccacacaagcctgggtctgttgggaaaccggtaggtcaagaaatggcgatccttaatgagaaaggcgagatccaagagccaaataacaaaggagaggtttgtataagaggtccaaatgtgaccaagggttacaagaataacccagaagccaacaaggcaggtttcgagtttgggtggttccacactg

SEQ ID NO: 72303 - DNA, 413 bp, Arabidopsis thaliana landsberg
aacgttgacctgttatcaaaacttgtcacgccggaaaacacccttacgcgtgttaagacacaaaatagcgccgacagctatgaatatttgagaaatgcaggtttttcggccaggatatccttttttggaatccatgtaggatgctgtggatatgagcctatatgtgcatctatcttaagatcaaaccctacttgcgacatacaaaagggggaattatgaacgaattcacagcgaaaaactaatagatttggagggtgactgggcagatgatcggggagacatagattcgaattttaaaacatccttaagtgcgagcttacgatgatcagcctgacatacgactctttgtgatgaacgaagcattgatggaattacaaacggagtaaggattacacgggtggttgtgggagaag

SEQ ID NO: 72304 - DNA, 475 bp, Arabidopsis thaliana landsberg
  unsure (1)..(475): unsure at all n locations
cgtaacgtaaccgagaaaaccgggcaattannnnnnnnnnnnnnnnnnnnnnnnnnnnnnnnnnnnnnnnnnnnnnnnnnnnnnnnnnnnnnnnnnnnnnnnnnnnnnnnnnntttaagagtgatgggaagagccacgcaaggtgttagattaataaccttaaaaggtgaagatgctatcgcttcggttgctaaagtgcaacatgacgaagaagaggaaaccgttgaagtggtaattgacgaaaccgatgttgccgttgtggaaggtggtgtggaagaagaagaggcagacgaggaagcggaggacattgccgatgacgaagcggatacagaagaagataacaacgaagaataaaaactaaattataacagaaaaaagttcagaaatgaaaaagacaatcctaagcatgttgcttgtttccttcttttttgcagctagcgcccaaaaaagtgaaatcaatgcagccaaaaataac

SEQ ID NO: 72305 - DNA, 560 bp, Arabidopsis thaliana landsberg
agttaattttcactactttctatgaacatttattacaagttcagactccaacgtatggtacgaacatttctcattactgcatcagcgagtaaacatttctcccctctgaataaagtctaaaatcataatatttatacatgtcctcatcattatttctcttataactcgatttatgaagcaatgtagacgaaattaaaatttctagcaactaaaagttatacgtaaaattacgatctaacttagccaagatttgtattaaagttcaactgaattattgaattttctaacgaattagatattgttcggttgagctaaatgcgttttatttgcgaagtaactgaaactttggtccatgcaactataatcattattttcaaacaagtgttgatcgaagtttaaattcgatccgattcattagccatatcaatgaactaattgaggtaaacgcgtttgaaatttgtgaaaactaaattttggaccaaaaaagaaagaagggagaaaatgaaagaggaccacaacaaagtcatcttcactctaggagtgtgcagctttagcttgga

SEQ ID NO: 72306 - DNA, 393 bp, Arabidopsis thaliana landsberg
  unsure (1)..(393): unsure at all n locations
tcaaatggaatccgtactactgacatggcctgtatctcttggagggaattagacacgtctccctaggcggattgctaatcttttaactcaacctcccaccgaatgagctggcctgatctcctgcgatgtgccatttgttcgaagtcgttctctcacagattaagactgatatgctctcgtcccgttcagaccatggggggtgccctgggactgacatgtctgttgaaaagcgcctcatgaggctcaggattgcgggtgtgttccatactaccagatataacaagctggccatgggactctggtctctacagaaattcaaactggtaggccgtccccttgannnnnnnnnnnnnnnnnnnnnnnnnnnnnnnnnnnnnatctttctggaggaaa

SEQ ID NO: 72307 - DNA, 500 bp, Arabidopsis thaliana landsberg
tgctcacacttttgtctatgaatatatctaagattgacatagtgtttttattgattttaatcactcaaacacccttgaggatacgccttatttgagattcaagattaacaaggaataagaatagtaaaggtggcatatcagattaacaaatgaataacaaaatcaatagaaggataacaattgtaagccgaacaaattttatttttttaaaacgccataaagctaaaatttagttataattttaaaatgtgctagtgctagataaattaaattacttattatttccacgttttataattcaatgcaaagttttgtgaattacatgtattcaacaaatcaaattttcaaactgtaaaaacatggaaaattgtatatcattcaatccctaaatcaaactagacacgacatttatttaaaatacacacttactcaatcaatatgtttggaaaaataaacaacaacaatacaatatagttattatattgtcaaaaatatataca

SEQ ID NO: 72308 - DNA, 499 bp, Arabidopsis thaliana landsberg
agcgcgctccaggcgggcgcggtcgggtacctgtccaaggtctcgggcgcggccgagatccggcaggcgctcgaacgagtgcgcaacgggcaggccgtcatcgaccccgccgtgcagcggcatctcgtggacgcgatcgccgcgagcggtacgcccggttcacccgtcgccaccgacggtgccgcgaccaatgaggcgccgtccggcggcagccccgtggccggcggggcacccccggtcggctgggcacccgcggccggtacgggatcctcggccgtcacggcacccccgggcgtgtcccccgtgggcaccgcgcccctgcccgacgggctgacgccgcgcgaggcggaggtgctcggcctgatcgccgccgggctgtccaacacggagatcgcgggccggctcttcgtcttcgaggccaccgtgaagagccacatcaaccacatgcttgccaagatcggcgcgcgggaccgtgcccaggccgtgagctacgcctacc

SEQ ID NO: 72309 - DNA, 548 bp, Arabidopsis thaliana landsberg
  unsure (1)..(548): unsure at all n locations
gtagtatattttaatattattttcttgatttgaatttccatcattttcaagaaaaggttttttttttgtttgtcaaaccaagaaaaggtttctatgaatgaaatagaaagtagcgttgtgattcatgttgatgaatcatgagttaatacaaatgattctacagctgatttatactgataggatcaggatcacatgaaacgcaaagtagtaatgaaattattataatgaataaaattttcttcaacagtttgtgataacccaagtcagcaacccaaattgttttgtgggtttaggcctatccaatagaaccaacctcaggtttcagttcacttaaaatattaaataagttacaagactaagaagctaaatctgattgtttattagttctgtaatctaattatcattatacgttttctctgaaaatgttaactttttaatgactagtgagataaaaagagaaaactcaatgttacaaccctgtcatcaaactgatatatagttacgatttcctctaatggaacaacannaatatggaatcttaatgttaa

SEQ ID NO: 72310 - DNA, 3567 bp, Arabidopsis thaliana landsberg
ctgtactgttggatgcaacatttcttcttccgcaggctcatcctttgctttatccattgctattgttgcagcttggtaaactaaatcatgaacaatggagctgcagaaaagtattgtatcagtggcttcttcaagtgtgaggctcctcggctcttttccaccgggacactccacaagtacagtggactcatctgcagagagcaagaaattatgtctaaacttcgcaaggttgtaagaaaatatatttttttaaaacaacagtaaaaagcacagtgagatgccagtatcagatgagaaagcgagtaaatacctaaaatttcatttacaggagccgaagagctgtggtgatccacagaagcatgtaccatactcttttctgagcagtcatccactgcatttaggttgcgctctgactctggaatctcatcatgaacccctaaaccaggtatttcgggttcactactctcaggttctatttctgaggctgtcgtggtggataaaccgtgaggtgtttcgtttacatcattttcttgtagcctagagtgatcattgaaagggcagtcatcagtgataggtgatgctcctaaatcccatgtgctccttatatgtgccggtgattctcttgtctcccctttgcttatcacagtattggctacatcatttccattttcacaacattcatcgtccattaccaccggattatgctctgccagatcaccaagtacattggcggaaatacgaactaatccaacgctttcaacgaaatcagcgttcatcacattggtttctttacactccagattttggggttcagtgtgagattcttggtgagtttcatcgagtgtacacgtcatttgggcagcacacatttcaaaactgtcctctggcatgacatttagagcctggaaagtgtggctagacatgccagatgaagatgacatggtactcagggacttggagttggtatcatacctatgagtctccaagtcaagtgtactcccgcttcgttgtcgtatatggcttccctttcttatagaggaaccgtaatcccaagatgaagatgccgaagcagtttctgtggagcttctcagactaatactcctatcccttgaataagaaaagccctcatatgatctggtgaaacaactggagttattagcttgaataacaggtgacttcatactgactgatctctttataaccaaaggaacgtctccacgtcctaaagaaccaatattcacatcatgatgcttatcagatagctgagtttgagtatcttttgtgcctatactcaaaggaccacagccagtggaagactgagttccatccttgtaattgagcatatccacattttgctcttccaaagccctggaaatagaactctcgtgcagatgatattgttcttgctcgtaggaattatcacactgctcaatcttttctggtgtctccaaaatttcttcctcaaccataacaacaggcagcgaatctagcacatctatcacaggaatattttcaaaatataacttgttttcatcgaaaattttttgagatagctttggggaatttgttccaggggaatctgtttctacaaaactgtgttcctccctgcactctggacaaatatttatctcgcttctagttgcttcagtggcgcaatagtgagaaccacatctaccacaaacctccatagtttcaagagcgaccccttctaaaaattcattgcctacatgaagactaccatgagtcgaactgttttcaacatcaaaaacctggtgactgacctcctcattcgcgctagactcgcattcaacagtaaaatcttgatccatatcaccaagctgatcactgaaagaactctcatgactctcatgtctactactctcatttgataaatttaccataccaaaggcaatactttcttcatgtttatcaggataagccaaattttcaacttcagattggaatacagggactggatccattcctttagcatctggcatgaatcctgtaacttggccagaacttgaattgctccccactgttgcagtagaatgtcttaacataatgtgatggtaagacgaactacctttcccagaataaatgcctgtgctaggaaggctagaagcaagaggcctaaacatgctatgatggcttttaggatgctcctgcatgatagatatagatcataaataaaagttccatatatctctgtaggatcaaaaaggggtaattaccagaatatctattgaatgtatgctatcaataaagtattgactttggaatctaaggatgtaacagaaaacaaatgggaacttagagacaagctatttttgtcgtagatatgacagactgacaacaatgttctgtgatgtgttctcatagactgcaggttatatgttggaatactaacaggtgcaaacatgttgatgcaagcagagtaaaacatgtacttctagaagataatgaaaaatccaagaatcatggacaaaaaaagaagtggtatgccgcttaatatgtaccatttgacgaagagcagactcaaacggccttctcggtgctgaaccaggtgacagtaattttgaagatctagaagttctactatttggagaaaggctagctctttttgaaactgcacgttctgagccacctacaggaatagattgtaaagaatgaagatcatcatctccggatgatgctaccgagcctttactttgagaactaaaccgatcacgctcatgactgtgagatgaactgacacttctggaagcgcttggagaaacagattttctgctgcgtgtagagactgcatccctaccatttctggatgctggcgaggaacctcttacataggatgctggtcgatcacccaaagaagttcggagatttggtggcgcatccaaggagaaaccaggaatgtttgactgccacacttttattttgggtgaaggagagttgcctcgactagaacttacgggagaagttcccctgacagctggcgatgccatggtagttgacccagtgctcatccttcgcgaagttggggtcggagatcttgatacaggtcctgagggtttccctggagtaggagaaattctcctaactggggtacctgatcgtcgaccagacgctggactaggatggcgtgctgaagatggtcttccccttatctgctgcatattgtcagctcgaggtgatgtgcttaagcgatttgggcttgcactgcccttactactacggcggctcttctccatctacacaaacacatagcaaatcagaaagtgcaacaagatctgattcaagatcaacagcgttatacatagaataacattcaatttagtagagatggataccgtggaagatcttgataacgaaatctgactctgtggtctccctcttctcacaacactagctgctggcggttggtcatccaatgaaggaaaaagtggtgtgtctggaggcgtcaacaaccttccattggtaatccattaagatttgtgagaaaacgagtggaaacaatagaaaaaatttaggcatccaaaagagcatgctacaattgttacaaaaaaa

SEQ ID NO: 72311 - DNA, 367 bp, Arabidopsis thaliana landsberg
  unsure (1)..(367): unsure at all n locations
gcaactctggggnttcatcatgatggctaactagacgaatagggtagattacccatngcacgatagatatcaaaaggccgggtcgaatccacttttcgtgaccagagcacccccataacatcttaccacttcctaatactcaactgctcgtatgatgaaaaccatagctgagcnagggttataagaaacaattctaccaacagccaatatgggcnnnnnnnnnnnnnnnnnnnnnnnnnnnnnnnnnnnnnnnnnnnnnnnnnnnnnntaggtcacgaccaatccatttgagacgtcatttatggaccgcctggnnacgtctanntgatcgagatcnntccacatatagcnncaacgtacaaaccgt

SEQ ID NO: 72312 - DNA, 395 bp, Arabidopsis thaliana landsberg
ggaggagtgaacacggacacctgaccacgagatttgagtctttaaggcggccgagacatacttgttgatgtggagccaggcactatacagaagcgtcaaacactagaagcagaagaacaggagggatagacatgatggcaggacacggaacccacacaactcgggatcgcttcaaaggacgaccgccactcatggccacatgtagtcggacatgcgacgattggtcacgcctgagacattgatgaacgcaacgatgatgcattcaacaactgaaaacatataggtatctgaaatgaagaacggactgtcctgaaaaatgaacgactaggacgaagaaccatatgggtgaggacaacctgaaggaaggaatggactgcggatgtagaatgagaagg

SEQ ID NO: 72313 - DNA, 507 bp, Arabidopsis thaliana landsberg
  unsure (1)..(507): unsure at all n locations
ccatttgcttcttagccattaagacggtgtggaaggctttttaagccctagtcttctggttacgctaatcgcctcttcaagctgagccaagcgcgcctctcggcgnnnnnnnnnnnnnnnnnnnnnnnnnnnnnnnnnnnnnntgagtactgcccgtttgatggcatcgtcctcctcaagctgagcaatacttttttctttaccagcttgatattctgattccgcaacgctcagttttgaatcaatctcagcgaggcggttggcgaggataacctggagatcatgagacaactgaactcgctcacgctcaacaacgtaatcaacgaaatcattaagtatgcgtgcgccgtctatacctttctcatatcgcatcttcaagccgatgtaagggctcaatagatcagtcttttttggatctggctgcaccagcgaaagggtcgacttgttgaaatccttgaagccctgctcaacactctcgccctcttcttgataggcagagatcagatc

SEQ ID NO: 72314 - DNA, 606 bp, Arabidopsis thaliana landsberg
  unsure (1)..(606): unsure at all n locations
agttgcttgtgcccccagctgaggcactatattctggagtacatgctggtacttcatgcatgcattttttcggctttggcactaaggcaacgcggtccgaagggcagagacgctgccaggttccctctcgtcagttgtctcttgtctctggtatgagtaccagcaacctctcaagcggcgtccagtggtggccaaagcctctccccgcgcaggctctgaccgtaccgataccagctcggtacgctcacctcacacttacccgctttgctgctacgcctatgccagtgctgcgactattagcaggacgccacaccacagaacacgcacgcttctaggctgcagagcctgcaagtctgaagagacccggtcgtccgctcgatactctgtctagacccacgcccagcccccctgtagcctcgaaggatgtacttgtcttgctatacacaccccctccccaccctgtaagtactgggtcccttcagaggtacaagcacacacactgacagacgactggngatccactcgctcatggatggacggattcgagggcagtgtccatattatataatacgtacctgccgcatatattctgtccctttttttctg

SEQ ID NO: 72315 - DNA, 507 bp, Arabidopsis thaliana landsberg
  unsure (1)..(507): unsure at all n locations
cgaccgatctgaacctgaataatttttaccttttattaggccgttttgccctgagcaggttccactatggggaagcgggcggcgcatggcaacatgtggcagannnnnnnnnnnnnnnnnnnnnnnnnnnnnnnnnnnnnnntgcgaacccttttgccgcacacttcatagatacgcatgcgccgacaaaagctgatacagtacgctatacaccttatcaatttgcgaagcgcatgctgcaattgtctgcaaaggccacacaatatcccggtcatgcttccgactattactatcttttaggttgtgccgcttataacatgagctattacggcaacagctggctgctggtgaaagatagccggagcagtgccgaactgccgtattccattgaacagcctatgaagccggcagattccatcaactattatacgaccgctgaggccatggcttatttcgacagcgctgtgcatgcagcaagtacaaacagtgaactggctgcccggccct

SEQ ID NO: 72316 - DNA, 563 bp, Arabidopsis thaliana landsberg
ataattcgctaaatctgggagtgatgtaacagaacttgttcgagtacatttaattatgaataattgacaagtgtttggacccattttctgggagtattatattatgtcaaacttgtaaagttgtaagcctttcttcatgaacaataaaaatttgtttggctcttgtttcgctatgagagatgaagtaagacaaaactgatcagcagttgcttgttatttgaagaatatttatatgaaaattcatttacgctgtggaaatttaggacacatgccaccctattttccttgagtttgattttttcttttcttttcttttgataaatggttttttttctaagttagtatcatgtatcacatataatcgttatatctttttgactactcctacgtcctagcattagctcatttttaacaagatatttcatgtaattaaactcattctggaaaagaaaaaaagtattcgatcgtattttgtcacacagctaaatgtaaggtttcgtgcagtagcaggatcgtctcttactccattgagtgtcgaagtttagaacctatccatctaagct

SEQ ID NO: 72317 - DNA, 334 bp, Arabidopsis thaliana landsberg
ctacgtatctactctaaaaattcaacgagacaatatagatctcataatcacagattattatatgcctggtatgaacggtttacaactcaaaaaacaaatcactcaggaatttggaaatttaccggtcttaggtaacattttttgttctttacaacttaaattaaattatgatatttattcttttgttatagtgaaagatatatttatccgtttgtttccccttaaattggttttgatataaagttatgtcatcggacaccaaccaagaagaggagagtttaagttgtggagcgatgggtttcattccaaaacccatacattctactgactaaac

SEQ ID NO: 72318 - DNA, 142 bp, Arabidopsis thaliana landsberg
tcatatccttattaattttgcttttccattcactttattcttccattcatcgatattgtccgcgactgcccttctccgaaaaaagagaacgaacacgactttttggtggattccttttggctcgttagcccatccctttctg

SEQ ID NO: 72319 - DNA, 208 bp, Arabidopsis thaliana landsberg
atgaacttgtatgaaactgattacagttcgtttcttatataataagagtgggattgtggagagaaaatgggtgggctcctatagcctttgaataccaacaccacataatattttgtagtgaaatatcctatagccaatttttatttcattcaagtatgaaaaattgagttgttcttgaagatgtttgttaattgtgatgatgctttat

SEQ ID NO: 72320 - DNA, 580 bp, Arabidopsis thaliana landsberg
acaaatagcattcataactccagtcagccatctattgttgcataatattgatcactctggtaacaggcaatagagtataaatagataagtaagaatctatcactgtgtctggaaaaaaatgtcaaaccccaggtcttattaagtttgggtcggcagtgtcattttggatatgaaacagcctgttattcctaggtcagtaattcacttctgagccttgtaggtctctagtatttgtgcaggtttaccaaccacttaaagttatgtattcataagcagagcaatggtctaatatcactggctgattgtatttatttacaagactggaggaactgaattcatgtgccaaagggcattttaaaaatccgaatcattggcattcatttatgtgaacaaagctgattagaggtcaaaaaaacacacacatgatattgtaataaatccttggaaatctggcccataactgaagttctataaagaataatataaaagcttaccaagaacctatcaatgttactttgaaggatttcctgattgggtgaaaatacatcccatctgtagagtgtatcagcaaggctgactt

SEQ ID NO: 72321 - DNA, 194 bp, Arabidopsis thaliana landsberg
gaggagagaaacctgaaccgcaaccatctgctaaaaggctaagaggtgcctccttgttagatcatgcatagacaaaggctcatatcgactcccgctgaacgatcgaagatgaaataggactcaaaaatgatgtaaagcgttgtggagtctatatctacgtgaagtgatgggaaagaactaatgtaacatgaatt

SEQ ID NO: 72322 - DNA, 572 bp, Arabidopsis thaliana landsberg
caatgaaattagctctcctaatttaaaacctaggacatttttttactcttattagcgagaatattggtagtgatcaattaattttgctctcttaatttttaaacgcattttgttattatttagattatctgttcccgatctttactctgttttttttttcgttatgatatgaagctgcttacctataatgaaagtaacttcactatggctactattcttgtagggcactttcaattcttgcactcatattattttaattttcatattttttgtcgtcttacgtttccggagttcgcgaggctctttttttttttttctcgcgaggctctctcatcgccactatagtgttttgaataactaaaggtttctttttcaagatctaaaaaaccgaggatctaggaaattctgggacatttattcaaatgtgatgattcaccaagttgcttgcttatttttattttatacatataagaaagtggctgatcacttacagacacaacaagattgtttgaattgtctatacgaaattccaagttagagcccatgcttatttctacgaattcggatcttaa

SEQ ID NO: 72323 - DNA, 732 bp, Arabidopsis thaliana landsberg
accgaccacatcacacacagccacaaaagtatcagatacagtttcaatcttttaatttaaattagaaaaagtgatatcaaattttaaacgtaattgaatccaaaccaagaacaaaaccgaagatgatcgcatgtccatttatttttttatcatattatgtagcttgtcttttacttaaagattaattgttgtgatagaagttaatgattatgtggagtaaatatttaagtacttttctaaacataacattaggaatgtaagataatgcaatgatgatgatgatgatactaataaattaaatgatgtgattggtaatatatcatgtgccattaattgctttatcgacgtcatacacagtcctcgttgtacttgagatatgtattctttcaacgaccaaccacacacaatggcacaaaaaaacgattccttactctgtcacgcagtggaaaattaggggctaaacctaaattccatgagtgccctccatttctactaaaatatccaaattattttcgaccaatcaaaccataatataatttcacgtctaccagaactaggacctgatagagggttgtgtaatcgacgatggttttttttatcatcagttaactagaggaagaacatatatatttacaacacataaatagtgacaatctaccaaagtcaatattaattacaaaaatgtagaatttttttgttactacctaattagaaccataaattcatgggttt

SEQ ID NO: 72324 - DNA, 508 bp, Arabidopsis thaliana landsberg
catatcagtgaagttggcgctttttggccattttgtaacatttataacggctgcggagacgatggggcaggggccatcaattgctgcaacaaacgcacaaatgttagcaatggggtccttccatggaatctcacggagagttgcaataggtcctctcaatggcaagacatgaatatttgatcggaagtccaacaatatttggtgacctttcgatgtctccatctgcaagaaacatcttacgccgtattgaatgcctgtgacttcgccgtcgacgtttacatacccctgcccgttggcccaacttgccattaaggtatttcgtatagcctggttcattgattacttcaatattccaacggcggcgcggctgcactggccaacgtggcatttgattgtattaaacggcagctatgttgaaggtgaactgcttgacatacgctaaagagaccaggcggcatgcccttgatacaagagatctgctccatttgggcactccaaaagtcttgaa

SEQ ID NO: 72325 - DNA, 1538 bp, Arabidopsis thaliana landsberg
aacgtatattcaaatcatatgaatatattgacctcttggatttgagtggtgggcataataacaaaacacaattgggaagaataataaagggttatttaatgcattagtttctccaacaactatacatattcccaagtagccctagttgttaagattaatacgaataagcgagcaatttgcagtactaattatatctgacattttataaaataagaaggacaaaaagttacaatttgctattttttgcaccatcctcgatataaagattgctcatcttataagctttcgggttaggtgacataatcactcaccaatatattactgaacacaaatagattacaagttgatgtggaaaatgtattaatattacggtgatacatttttgggttcaaagagtcaatctcaaatcaatgcatcagacgtattttgttacaacaacataatttgtgccaacttttttttttgtcaaaacatgtattatatatccaagatttaaattccaatggtgagatagtgacaaacattagtataaacaactcgactccatgtcattattatttttgtgcaaaagccggttgtttgtttgtttgtgaatatttctcgagaaataaatctccaatatgcataaaatattattccacctaaaattattaaatccccaactatgattataaacaaaatgcacttaaaatttcaaaaataagtatcgaaaaaatcaaagataagcttaaatttcgatagatatttgaatgaatcagattacaacgtgatattaagagaagattatcgatcaaaaagtaattaaaaggagaaattgtccaaaatagttgcatctcattcttgcggagaagaggacacattgtcaaagggaacttgtggagggtgcaatacccaccaattcattggatttaattaattaacagtttgccaacttgatttcttcatttttctaaaggcttagaagatcttcaagattcgagcaagaaaaacgattttggagaccagaatggaatagttaaagccttttaaataatatacaactatgtcccatttgcactttcaaatacccaatttgccttttgtagaaaatacagatagataactctctaatgataactttattattcatacctcattgcttatgtaatctcagacaacctgaggaaagtctgcagaccaaaaaactccactactggatatttccattaaactaagccaagtttcttgaataatcaaaacttgccaagtcaataaaaccactacgcaacatcgcattattccatctccattcttaaggatgaaaattagatgtgagagtatccaaagttcaaagatcaaaactttatagcttatatgcatccgaagttcaaaactttgatatgtaccgaatgttataaactttttctaaacccaacgtttgaacttcttcatatgtcatatgtattcacaagaaaaagaaagaaggaatcatatttgaacttgtcctacattacctaactacatgtactacgtctcacaaccattaatatcagaaagta

SEQ ID NO: 72326 - DNA, 401 bp, Arabidopsis thaliana landsberg
gacttggaattacgtctcggctggagctgatttggctgggttttcttttgcctcataaggatgggtcttgttgattgggcttgatttcttgttcaaacatgatatctagacctatgcgaaacacaccagtatctcattcctctcctagcacaagataacctgaacgccagagaatgttatgcttttttgacttgaacttgggcaggactatttcccatgaccccctattctccattattaggagtgcttaattacctttgattgaaatatgccaaggccataactccattatgtctggttacctttgttccttatctccaaagaatacctgccgtggagtgtttgattttcaatctaacattaccaccacacagtcgttacgtcacgatggcttagccctg

SEQ ID NO: 72327 - DNA, 570 bp, Arabidopsis thaliana landsberg
  unsure (1)..(570): unsure at all n locations
tgaacttttgcaggtagaccaatttcagctgatcgagagtattctttaaaagattgtttatgttcaggttaagatcaaaccttctgaacgttctcttttcatcgtttataatcttatagaaatcaccgtaagcatgcccgtcctttgaatcgtatctttccttagcaaattcatcgttacgtatattcccatcctcattaacatagaagtacagccataccttttccgagccgttgatgctcagcgcttcccaggcaagctcnnnnnnnnnnnnnnnnnnnnnnnnnnnnnnttcaaagaataaaatagtaatggccttattcatctctatttaaaaatctttttcatcaatacttcatcgaggaagcacattccttcgagaataattacaggggcttcaaaatcaaaatcctgcccgtccctggctaaaatgtactccgggatattattcacatacgataccagcggcatattgttaatttcctgctggatatccggaagaaagaaaccgaactgatctttggagaaggcataaaatatttttacaaaatctgtaaaccgcttaaactc

SEQ ID NO: 72328 - DNA, 549 bp, Arabidopsis thaliana landsberg
  unsure (1)..(549): unsure at all n locations
aaggccagaaagtccctgtgtgccaatgcgtcagctcttctctttacatgtttctgtgaggactgaatgagactaggaagaaagcctcgaggatgtggcgacacgttacagataatcctttgagagggctgctctcaattgctgccctttctctacccagaggttgcatattacagaaaagactccaacnnnnnnnnnnnnnnnnnnnnnnnnnnnnnnnnnnnnnnnnnnnnnnnnnnnnnnnnnnnnnnnnnnnnacccctaccacagtcagtctatggaggcaaggaagcatttgtctttggggtggattcttaggattctcaatgcaaagctttcatggaggatcctacatgcccctctcattcttctctgtatggagcctcatcaccactcaacatagcacagtcatcatctcctgcttcctatccatcttcctttcctgcgcttttttaactatgcactcaagtcactttctgagctaagtatgtgaagaaccagtgcacatcacccaatttgccaaaacattttggataggtactatcacac

SEQ ID NO: 72329 - DNA, 550 bp, Arabidopsis thaliana landsberg
caggtgcctgcctagtgccctccaaggtgcacgacttcaagttaaagagtctgtgcttcagcctgcacacaaaggactccaagcggtaataacctcgcctcgttcggctctctcggcccacagacccggcccacaagcccgactaacaaaactgccagggccggggttgagggttgacggggtgggtcttatctcatcttgatcagcccgatttatgggctgccacccaagatggtctgtccatccttcaacggtcaagtgaaacagacgcaagctgacgaggccactttcgaagatgctgattagcgcagtcgttgccggccctttgcttctatcgttccgcatctaacctcaacggattagcatattagagatcttttagctgcatttttgttcggcgtgcctacagatggatttacccatgtgcataggagtactacccctgaatagtaattgaaattgactaggccatgccgccaccagatagcacccttgtctggctctaccatctgtcattccgggccctcattggaagcactcctgggggata

SEQ ID NO: 72330 - DNA, 469 bp, Arabidopsis thaliana landsberg
  unsure (1)..(469): unsure at all n locations
atgatctcagattgttgtaggcgttggcgcgataattgttcacggtcgttttatcaggatcgatagccaggacttttgtaaagtcgtttaccgcctccgtattttcattcaggttactgtaggcatttcccctgtataaatacgcttttgcactattcccgtttaattcaatagctttggtaaattcaggtatcgcggcagaataatttttctgtgcggccagttcattcgcctttttcaaataatcatcaaatgactgggcagacgccagatatggtaaaaatgaaataataactaaaagtcttttcataattatgttacgttcaaaattggcaataagtaagccaaatatnnnnnnnnnnnnnnnnnnnnnnnnnnnnncgtttactgatcaagttatttttatatgccgtgatgttaacatttgttcaaaattaaactcaaaggcaaaaaatcaagttaaatatgc

SEQ ID NO: 72331 - DNA, 531 bp, Arabidopsis thaliana landsberg
gataaaataatcatcttgtggtgcggtaagtcgagcgacgaacgggaggccatattggccttcctctcgaatgtgggctcaatcatgggcctagaaggcaaataaggaaccagttcgttaaagccttccaggctgatcaccgcatccgcgcggttaccgaataaaatcagggatatcaactgcatcggctgccttcccgcagatatggcccccctcagtatgcgaaatggttttttattaggactcacataggaatcattcagcctcttttcaagaaggttcgttgcgcgggggtgctgcgccgagaacaattccgcaacggaaccgccgattacgagaatatcgtagaagttgggatcgttcgtaaaaggaaattccgggcccttgagactaatgttgtttatgccttcctgggagcagggctgcccccggtgataggcatagctcaaataggggtgcggcatgagagagtcagcccaccagcacccctgcttttgctgctgcgcaaagcgatgctgaaaaaagaactgc

SEQ ID NO: 72332 - DNA, 147 bp, Arabidopsis thaliana landsberg
cggggggagagcgccaaatgggcacgcaaattatccgggctttttttttcatgacagaaatatatcaaaatgacgaaggtatctgtgtgctgacctaaacgctaatacaaggggtgatataacccaaaatcaacggtaaacgagttg

SEQ ID NO: 72333 - DNA, 500 bp, Arabidopsis thaliana landsberg
tgacaaatccggttaattgtttcaaatgtttgagctgtgcaccacctctctgtttagataatgccaccgtttaatttacgggtatccagacccacttgttttaagtggtaggttacaaattccagaatctcggtcattcttgcctggatgatgttggccaggtttttaacactgatttctctgggtggcaacccgcgtaagccgggaatggttataaaagcattggctttggcctcatctgtaagtgcagagccaaactgctttttcattgcctctgcctgttgctttaagacgcccagacccagacgaatgtcgtgtgtgatattttcgccaccgaatggaatcacggctgtgtgcttaagaacgccttcatagaagacggccaaatctgaagtgccgccgccaatatccagtacagctacgcctgcttccatattcatgtcacaaagaactgcggaggaggacgccagtggctgtaataccagatcctttgttttcag

SEQ ID NO: 72334 - DNA, 335 bp, Arabidopsis thaliana landsberg
gttttggatgacggtactactagctggatcattgagagatggaaccctaactacgggttatcccctatgacggagaatgatctacgagcgagggctcgtctaagctgagattgagttgcatgaacaactaccacgtgggagggcattagatcgataagggtgcagccctagagcgatgaccaagatccatggtacgagggccagaatcggcgtggggtcaataagaatttcgagatgtgagtgacttatcgcgtgcattatacgcgaccctggatgttgggatgcgcatagtcatggggcgcctgcgttgctacgagagcttgagaggaagctgc

SEQ ID NO: 72335 - DNA, 515 bp, Arabidopsis thaliana landsberg
agtttaaattatcacccaacgagtggcgaacttggttttgatgagaaagacttacttactggagcattcatgatctttattctgatttacagtgggctgggttatcttcgacttaatgacataatggcacgaagctctcatggatttactctggccctcctcgggggaacgatctttgcgatggggtttaatgagtctgccacgactgccgttctaattcttcatgctgtagactttggattcggagccttcaaacaaggagcgctctctgagggcgcacaaccactttggactaagcctgtggaaacaaaacaagcaagctgaatatgaattttaaacaccctctgatcgttgaaatggaatcaattagcctagaaaaagaaatgcttcattgggagcctgtagatctgatagatcagctcgtagatagatatgattctggtaaaatcaaaggctcagaccttaaagacatctcaaaaataataaccacccgctacaccgaatggtgcatactg

SEQ ID NO: 72336 - DNA, 386 bp, Arabidopsis thaliana landsberg
  unsure (1)..(386): unsure at all n locations
cgacccgcaccctgcacaagcgcgggcggctgctcgccgttggcgcttctggcttgacccggccttgcatgatgccagggtcgcactgttttcgtcggctccaccgttgccatgggcatgaccttccgcggccagatcatggggcgtggcgacgaaggcgccaccgaattcggtcacatgaaccacgcacccaatggtgccttgtgccgctgcggcatgcgcgggtgcatcgannnnnnnnnnnnnnnnnnnnnnnnnnnncgcaccgcctattccgtgcccgaaaccgtcacccttgccccagccgtgccaagccaggaatatgacgggctgattggccgcgctgaggccggagaccgtccggcccccatgctttaaaaattgcg

SEQ ID NO: 72337 - DNA, 543 bp, Arabidopsis thaliana landsberg
aaacaactttgaccgaccatacattttatcgacacgcgcaactgatgcgctttggtgacatagttttaggtatcacttagactttaaagggcccaattcatcagcccataacccccttgagggactaaaggactcggcccataactaaagactgttcagcgttcacaattacctccagtgatataagtttgcccccaaatccacagctacaaaagtttcaattgggaacatatataatacattacatgcacatgtttgcatgtgaaaagatcttgattagattactacctccaagatatgggatgcttgattagcaaaaaaccaatctaccttaattcaaatgattagtaaaccaagattcccaagtcgaaactggttctagatgcgtagcaccggaacaggttttaatcactaacactatcttttgagtgatccaagaccaagatacgggttaatgattcttaattgcgtttaagtccaatgctaatcaagctgtctcatatgggaaaatattatcatgattggcttctaataatgaaataa

SEQ ID NO: 72338 - DNA, 465 bp, Arabidopsis thaliana landsberg
aatacaattggcgctcggaataggactgttccggctggccgtcggctgttgtgcaggtcgcgcaccacttcggggatcgagaccaggtcgcccgagtcgatcttggcttcatattcctgggcgcggcgcgaccacatggtgcgcttgatgcgggcgcggcccttgagcgtgttcagtgcattgccgaccacttcgggcgaagacagcttgcgcatgcccaccgacttggccttgttgaccggaacgcgcagggtcatcttgtccttctcgaattcgatgatgaacagttccagcttgtagccggcgacttcctgctcgacgacgccggacaccttgcccacgccatgggtgggatagacgacgtgatcgttggtcttgaattcgcggttcttgttcgaattggccggcaccttcttgggcgcggcagcggcgggagccgcggtcttgggcggcgaggaggacttc

SEQ ID NO: 72339 - DNA, 533 bp, Arabidopsis thaliana landsberg
  unsure (1)..(533): unsure at all n locations
cnnnnnnnnnnnnnnnnnnnnnnnnnnnnnnnnnnnnnnnnnnnnnnnnnnnnnnnnnnnnnnnnnnnnnnnnnnnnnnnnnnnnnnnnnnnnnnnnnnnnnnnnnnnnnnnnnnnnnnnnnnnnnnnnnnnnnnnnnnnnnnnnnnnnnnnnnnnnnnnnnnnnnnnnnnnnnnnnnnnnnnnnnnnnnnnnnnnnnnnnnnnnnnnnnnnnnnnnnnnnnnnnnnnnnnnnnnnnnnnnnnnnnnnnnnnnnnnnnnnnnnnnnnnnccctttgtttgggaaccccttgaccaacctgcggtttatacccgggggaaagggaggggtgtctttttttttttttccccttttttcccggtggggaaccccttcttaatatggcggaaaaaagggggtactccccccggggtgtggttttcttttaaaacccccccttttttttatttgggagtgctccctctttaagcacgcattttttttttccgccgccccccctgggggtttttttttccgcggtttaatcaccccccc

SEQ ID NO: 72340 - DNA, 521 bp, Arabidopsis thaliana landsberg
tatctctttcttattcttcttcttcctccttcttctacttctttatctttctggatcttgaaataggactcaaggttacgggtattcaatcaacgtaagaacatataaccttcaacatgtttgaatttcaaattcttatgagctttcttttctttgatgcaaactcaagaaagagatattattgctttgttttcatgtgaatctcgctccaaaaacatatttaaaatcaacaatttcattcaattgaaagctaacaacaactaattcttgtcttcttgatttattttctattaaattggtcaatttattcccttcttgtttcagatctgttctttacaccaaattgagtactgaagatcttgttgagtgaattaaagagatgagatcaggagaatgtgatgaagaggagattcaagcaaagcaagaaagagatcaaaatcaaaatcatcaagtaaacttaaaccacatgttgcaacaacaacagccgagttcggtatcatcttaaggcaatggacttcagc

SEQ ID NO: 72341 - DNA, 551 bp, Arabidopsis thaliana landsberg
  unsure (1)..(551): unsure at all n locations
tcgtggtgataaattatgattaaatatgaaatgttattatattttgcaatgatctgttatatctggggtgataggtttcatattacctgactataacaacgttgatttccagatcctgttttcagacaaaaggatcatgaactaagttattgttgaaaaggctttcatcgggtttggtcttttaagtacgttgaaggaaaaattatgagttatcatccagattcgataaaattagagttaggtttgatttgattaaatgtggtgcaattgcaatttgttagaagattaaagtcaccactttctctaaaggagataaaaaaaggtttgattagccaaaagctattacaaggactcataatatagtctcatagccacgtaggtttgatttattgtctagtcaatataccatatggtttcatatccatcaatcgtcgtcatatgaaattctgcaaaccattattatgcctcatgagnttgaaagttgccggaattacattncttttttactgatttttttttttggtaatttctaattagtggtaatctccttt

SEQ ID NO: 72342 - DNA, 356 bp, Arabidopsis thaliana landsberg
ttttctaaggaaagaagaaaactgggggggagttgtattgggaatggcacttccaaaaagaacaaattgatccctttaaattaaacggtgagggcccacatagataaccacccccaaggaatatggggaccaagatcttcttattgcttaaggaaccttcatgtgaattctttgtctgaaaatatgcattcatttaattaattgcatatattttaaaaaaaaatggtatatgttggggaaagtttaaagtttcacactttgaaaaagagcctgtgtgttatattgccctgtgagaggtcttattacctcttgtggaaaggtaaacagaaaaaccgtgtgtggggaaacaacacagc

SEQ ID NO: 72343 - DNA, 305 bp, Arabidopsis thaliana landsberg
  unsure (1)..(305): unsure at all n locations
ctgttttttgaggggctggatcctctccaacttatttttttattctccccaccctagtgaaaatggggggggggttcttttgttttgtgaaaaacgaaaacccaaatgaaacgagagctgaaaccatcttcatccccgtgctcggaaacaacagggggagatgacgtatactatccacnnnnnnnnnnnnnnnnnnnnnnnnnnnnnnnnnnnnnnnnnnnnnnnnnnnnnnnnnnnnnnnnnnnnnnnnnngtggaaacgaagcgggtaccttacagatgccttatcatgacggcatttcaagc

SEQ ID NO: 72344 - DNA, 488 bp, Arabidopsis thaliana landsberg
gccccgaacccagatgtggtcggcggcgacaaagagcccgatgaagtctgccttaccatcgcatggcgcatcgggcgaatatacatgcgcacgacttacctttttcttacgcggccgcatttcttcctcggcgcggctccggaagcttttgaggagcgccagtccaaaggcgcatggctgccaagcgccccttagtttgtatcctaatcatttgtatgccatgcagatgcaaatggactctcctcccctcgacgatctcaggaacctgttcggctcgctggtttctcaagccctcaggctgtggcggcgcgcggtcgacaccaggcttgagcccttcggcctcaccgaggcgagctggctgccgcttctgcacatctcccgcgcttccgggcccgtccagcagaaagaccttgccggcgccttttcggcgacagttcgtcgctcgtccgcgtcatcgacgaattggagcgggcaggcctgctcaggcg

SEQ ID NO: 72345 - DNA, 572 bp, Arabidopsis thaliana landsberg
ctctgtcacgttgacgcctacaataaccgacattttagaaaccgaaccaaactttttatgacgaaccgggtttacttacctgaagaacgacgttggtggataaaacaaagacggctccaagaaggtagatacatccaacgaccttgtctcgatcaaagacgaatattggagtgtcatcttcttctttgtgactgatcgaagtgctgtgcattacgctcatagctaaagcgccaaatacgcacaacaatgtccctaagatcttcaacttgctgtacacacatttcagattcatcttctctaacctatccataaaataagaccacacttaatgttggaacacgtcgtgaaattacgagttagaacaaggatttagtgattcacccaacgatccaagcgatgaaaaaaatgagaccaggagcaagatttggcatcgctgttgccattgctggtgatgtcaacctgattccttctagaaacagagactggaacagagtaaccctgtttttgttttcgaatacagaaccaaaaaaagctgtgaaaatttaaccaagttttctaatttttacacaaaa

SEQ ID NO: 72346 - DNA, 459 bp, Arabidopsis thaliana landsberg
atcaagaacacggaattgtagatagctgaaatcaaggttttgtctttcaatatgatcctggaatgaaagtgaagggcaaggtcaaataaacaaaaatgatgatctgaatccagggaagccaatattaaaaattaatgtttagaaaagagaaagagagagggagggagagagacgtaccttaatacgaccaggggttccaactacaatgtcaacacctctctttaatttaccctcctgaactggatagctatcacctacatagagacaacatgaacttaacccaagtgatcctccatatgcatcaaagtcagcagccacctatcaaagaaaaccataccataagtaaaacctagagtaccaaaaaagattttgcaccaaatctcttaataacatgctgagaatcattacctgcttggccaattctctggtcggtaaaaggaccaaaacacttggtgacct

SEQ ID NO: 72347 - DNA, 512 bp, Arabidopsis thaliana landsberg
  unsure (1)..(512): unsure at all n locations
tccccttggcaaaaccgatcgctcgttttagcaattnnnnnnnnnnnnnnnnnnnnnnnnnnnnnnnnnnnnnnnnnnnnnnnnnnnnnnnnnnnnnnnnnnnnnnnnnnnnnnnnnnnnnnnnngaggctggctgattctgtatggcggcttccaggtcgtccgtagtccatccggttactgcgataatatccggttcatccactttccaaccctgctttttgagtaatgctactgtctggtgtggaaaattaaacatagctgctactgattgcccaacggtataactatcgcctaatgcgaggtatgtatgtatgtttgtatctttagcattaggtataaccggatgtgtcagcgtatcatttcccgaaccggattgttcaccatcggcaatgataggaaaagattcttttcggcaattaccagacaggatcatgagcaataatattaaatttaatagccgcataactatgatctgtaactatattaggtctatgagctcaaggtaagta

SEQ ID NO: 72348 - DNA, 575 bp, Arabidopsis thaliana landsberg
aaaggcctttttcttccaacagccacgcctcgcgcctgtcttctagctgtttcctagagctcaattagaggcgagtgcgaggtcaccgtagcccgagaatacttactctgtagttaggcattagacccctccgcagcagttgaaagcttacttgcccaaagttgagcaaacgccaacgcttggcttgacatgacaaggaacaggcttcagcatctttagactcggcttgaccaggcttcacaaggccccacgcattttttacgctatgtggctacgaaatcggaatggcgttagtatccaatagctgccgcttataccgtggccttttcgcgtccatgttcatctttgtatctaatggggcttgatccttgcgtgttgcagttggtgtatgaccatgtagcacttgtaaatctttgatgttgctagaagaaactgcatacgaattatgagtagtgcatcctcctttcccccggcattcccataagtaggtagccactacaactacctagtatagcagtatcttggacaatctggcttatgtattgcaatacctactactagtagtatgtacacta

SEQ ID NO: 72349 - DNA, 425 bp, Arabidopsis thaliana landsberg
caaggcaatgataggaagctcttggaaatttaagaaatttcttttttacctggacttggacaaatccgggtctggggaataatttgaagtgacagggttccctgcatatcaaagctactaagtccaccattttgtcgcaatgcaacattgagcttctcttcaacagttaatgtgaaaggatcagttggaggtggggcagctgctttggattggccagtaggcttaacatcttcaatgacctcttcaccttctgctttaagggactccattaactggttctttcccgacttgccaagtttcatgccagaactcttaggaggagcaggaacagaagaccgtgatcgatctgtgaagttaagcacggtggataagaatttcaaaacaaagagattatctaatcgaaatcaagtatatatatatagagg

SEQ ID NO: 72350 - DNA, 485 bp, Arabidopsis thaliana landsberg
aaagtatggaaagcagaaaaaaaataaaaacaattgaagtttttttttatcacgagctaaattttaggtaatgggtttacttaactaaatgttaagaaaatgaccaattagcactatcaaatatcaatgatcagtcgaaacatatccatcaacaagctctattttttcaagtctttcgttgaaaaggattatgaatagatcgatatataccttttcttttgatataaatttcataaatgagatattatccatacaagtataagtgtagttaataaatgggtctaaaagtccatagaagttccatggagatcacaacttttctgctcacactctaacttgccccatcttgcatccactctctcgcaagggaacaccaatttccccaaactgcaaaacaattttagaatcacacatatggatcataaatttcaatttcaattctcgctacgctaacattaatcttctttcagtttaccctctattta

SEQ ID NO: 72351 - DNA, 342 bp, Arabidopsis thaliana landsberg
acatcagtagtaacatcattccgatcaagatatttcatcacacttttataaggacgatgatgaatattgttgtgtggtgtgaccatccttgctcaccccctatggatacccagcatcatatgcatcagctatatcctcagcacagtcattgtgatcataagccatgaattcaattgctaagaatgacacctcctcattacaaatcttgactttatccggaacaaaggataacacgccttcaacagcaactacatccatacctatctactacatcgacagcaccataaagatagattctgcttgatgcgcacacactattagcgaaggcgatcattattgttc

SEQ ID NO: 72352 - DNA, 499 bp, Arabidopsis thaliana landsberg
ctggacactttgacgtgtgacaaaaaaaaattaaaatttataaaaacctggacactaacacgggaaagggggatggtcaatcctgattacgtttttcacttgatttcctttgatatcactatgatatcacagctctttcgaccagtattggattcgaatttgtaagtaaaacctagttgaaagactaaatctttcctgatatcaacatttttcatgatttgaaaataattagaactttccaagttgctcgtgacattacagtgaataacaagaacttgaacacccacacagaaaatgaaaccccaagctgttcagtaatgggccaaaccctaaatcagataatagagtagaatataggcccaagttgtatagagtccactgatgattaatcttgatcttgacttccaagatacaaatagaaaacaaaacaattgaaattgaagcatatgaaatgccgtacgtgtgtagtagaaagaactaaataatttccatgtttgaa

SEQ ID NO: 72353 - DNA, 434 bp, Arabidopsis thaliana landsberg
acttgctgcccaggtaatatgacatgcgctgcctgagcttatttatacccagtaatttttgggccccatatcccaaaccaatggcatttccaatggtgagctcggggtatttggtggcaaggtacctcaattcgtttgcgctgttgatgccttcgtccatccagggatgctccctttcgttactgcccaaaatcccgtaaaaccagttgtgccctacttcatgcacaatgaccgtttcgagctcaatatcgttgctcacatcaccaatattggtaatggtgggatactccatgccaccacccgcgctaatggtaccgtcaacggccgttacaatgctgtaaggataatcaccgttccattccgaataatattttaccgcatcgtgaatgtactggacggattttttccagtaacgtgaattgcccgtggtgaaa

SEQ ID NO: 72354 - DNA, 326 bp, Arabidopsis thaliana landsberg
acgggccctgcccctgggctacatgcccatggcatgggcctagattgccaattacatgatgttggatcgcacatgatcgacatgggggctatgacgaatgacggcgaaatgctatatcagctggacgcatccatggctaaggtgccatatagctgcaggctcatgcccgatgccaacaggggtgactaaccgacactgcaggatgagggtgagggtaacagacccatcaaggccggagcatgcggcaaaccaacaacctctgaagagataccgtgaagaagaccgaacattgcctctgccaggaatgatgtacaccagcagtgaag

SEQ ID NO: 72355 - DNA, 687 bp, Arabidopsis thaliana landsberg
gttcttggcacgatatctacaagagtcgtattgatcttgagttctgcgttgacctttaattgtaatcaagaaaattttttgaataagagataaactaggagtcaactttacctaaaaaaaaagtaaaacttataagaagactactacttttcactggtgaaccactaatcagtagtacataaaccaaaattttagcgtgtcaaatgattacagctttttgtttaaattactttctcagaagacaattagaagtttataagtactttttcaactatcaccagtttcacatgttttagccaaataaaaaatcattacatgtttataagttcatgaaccataaaatactgttccatatttagatgttatataatttgtagaatgtctacaaaacaaatgtgacttattacatgtgaataattccatattttctcagtcccaattaattctcagcttttacctaatcatatgtagttctcttggtgtctatgagagttctcaaaagtagtgcgcctcaaggtcacgtattcaaattttgatataggaaacatgactaatttaccatatttttgtgtttggcgtccaagaaaatgtgggtcaagttcataacattttgggttcatagaaaaacattagtttgatcgaccacagtattctggacaccaccctacaaagagtctgacccatgct

SEQ ID NO: 72356 - DNA, 594 bp, Arabidopsis thaliana landsberg
  unsure (1)..(594): unsure at all n locations
gggcatcgccacaacgccgcctattgcgctgccaagcatggtgttgccgtttctgttccaagtcgctgcgcgcggaagtggcgagccttggcatccgcgtctgctgcgtctatcccggcgccaccgaatccccttcctgggacggcaccggcgttgacccgcggaagctgatggcggcaaccgacgtggccgacgcattcgtggacgcctggcagctttcgcggcggacctccatcgaagaaatcgtgctgcgtccaccggcatttccctgattcccagcgcggcaacttttccctgacggcacgcaggcttgcctgcactccggctgagccatcggggtcgcattgccggatttataatgaacagcactgttgtgtgttaacgggatttgtgagataagttcaaccggccaaaaagccgcgtttcaggcaccgccggatgcatcgcggcgtcatcgcgaaagcgacattccagaccgcgtttcaaacgcgctgcacgaggagcaggacatgaaaatcaagatcaacaaggcctcatgcgtcggtaacgcgcgctngcgcgncgtgtcggaaagcttgttccgctcgatgagga

SEQ ID NO: 72357 - DNA, 315 bp, Arabidopsis thaliana landsberg
ctgtacgattgaaatcgacaacacggtagtaaagaagtagtttgcaacagatgatttgaattagttatttgatcgaggatgagagattagccaaaataagagggaaagtcaaatgtagaaacttttatttcttcttataaatatgctctttagagtttgcaatattcaacatacaagacaacaaaggggaaacaaggcatgacccatcttatgaatccaaggcatgacattaaaatcaattacatgattacaactcaaacgataaaagaaaatcggaacaaagaacgttatgaaggtctctttgtagctgaagct

SEQ ID NO: 72358 - DNA, 4329 bp, Arabidopsis thaliana landsberg
aaaatgatgactccaagtaagatttctaaccaaaagcttatttctgcttaatctagattgtttactgctattagccttgtcgtagttgtttctcaagtatacaggtatggaatgtctctcaaatctattggtcttagataatctactctcttagtttctgcagatatttgttcttgaattactgaaatatttactcttttggtttctgcagatatgttcgtattcttggtgcgttctatctgcgtctcactgggactgatgttgatgtctatcgctacctcgaacctctctacaatgactaccggaaagtgagacaaaagttatctgatgggagtaagtttcattttctttcgatggatccgttgtgtttaacttttgattgatttgttcactaactagatttatttctttggtttggaatagagttttcgctgacacatgtggacgaagtcattgaggaacttctaaccaaggattattcttgtgatattgcaatgccacgtttgaagaaaaggtttcttcttttgcatttgtctgaagctgaataattagtttttggtctctgcagtattttaagatggttaatttttcactctgatgataggtggacgcttgaacagaatggtttattagagccaaggaaaagtgttttggaagacgactttgaagaagaggaagaaaaggaggagaatgaagggattgctgatggatctgaagatgagatggtcagtgctttcattctgcaatagtttttatgtgatctgttttctgtttctatctagcagctctaagatgataccatcttcctcctcttttacaggatcagcgccgtaagagtcctgaaagagaaagagaaagagacagagacaggagacgcgacagtcatagacacaggtatctgaatccgtgacctttactagatacatttctatgctagttaacatttttcaaaaaaaaattctttgtgattgtggaagctgtttgatctagctaatgctcttgcatcatgtctagtactctgtcttttgagtgtctgtttccactatggcatctcaagccatcagcggttggatacagcttccgaaattaaatttgtagagatccttccaggtttctctgtactgacagtgttcagagagaagtattatggatcagacattattacaatccttaccctgatacagtatatggtagttgtcattgtgttactttgaaaaagatcagttaatcatgagagcacttcccatctagtttttagctcaatcaatgttttctttttgttacagattttcattatgattgatgttgagacttgagctcattgtttcatgaattataatttgaccatggttctgtgattggcagggatcgtgattatgacagagactatgatatggatcgagatcatgacagagactatgaaagagaacgtgggcatggtcgagaccgggatagggagagagacagggatcactatagagagcgagatagggacagggaaagaggcagagatagagaacgagacagaagagacagggcaaggcgcagaagtagaagcaggagtagggatcgtaagagacatgaaactgatgatgtgcgggatcgggaagaacctaagaaaaagaaagaaaagaaggagaagatgaaggaagatggaaccgatcatccaaatcctgaaattgcagagatgaatagactgagagcatcactgggaatgaaacccctcagggactgaactgtgaaatgaggacatctttatcaaaccgaaacttggttcatttgcccagctaaaccggttactacactgtgatcctactcactatagttttggtttttttgagtttacctgatccctctttaatgtagaacaaaatggagaatctgtaatggcattgtactgtatgttctctaaaccgtaaacgaattgtggtcgagaaattctgaatgtaacccggttcttgatattagttgtttttaaggtaattcagataaatataaaaacctatatgttatgcctacgtggcgatatcactttatgagtccatgtaaatcggacccaccaaaagcttataggtaaatgatacggtttcataatcattaaccatcacgacgcgcgtgctactcatgtcccacttacgacgacgtcgttttaaactctctctctgtgctcttccagtctctatcgatcgccttctgaattttccggcggaaaagcaaatgtccgttaacgacagtatcgatcctcggttcgtattccacgttgaagatgaatctttgcgtttccgtgtgggagattcaggtactaagatccgggagctcgaaaccgtcggcgatcgccatttcagaacccagcaaggtttctgcggaaatagaattgagaaagatgaaaccatgtattccgatggagatgatgaagagtacgacgtttctatccgaagacgaactgctctgattcagcctggtattgattccggtaacaattatgattctgctgcagctgaagaaaccaacagagaaagtaaaaatccaggtataataatactctacattacttctttcacgactaccggagattccaagattgttgaagctaacgaaaaattctttggttttacttaagctcagttggttgggaactggttgtgagagaagatggggaaggtaattcaacgattgatcgacatgaaatggagtttaaggtgaggatcactaaaccagatggtaacgtatctaattcccaccgtaacacgcaacaaaagcgagattttgcttctgtggagaaggagagagtcactactactagtgtcagctcttgggagtctctcaaggccatcctctctgatcctgtcacgtaagtttgttaagtctgcttgtcaatggtcagggaatttgataactaagatcagtttaatttttgaatctgagtcaatgtcaatgtaactttgatgattattgttgtgtgatggaaagtgtatcgtctagaaggctaattcttgttaacattcatagagatgatttttcttttctgttactttggtttggatagcggagccttgatgaatgatgctaccatactgccttgtggacattcttttggcgccgggggattaaaagaagttaaaaaaatggtatatgactgactcttaaccagtccatttaataagggtcttcttgcttttgtctcatgtgaatcttaataatctgagttttggtaatttttgttgttagaaagcatgtttcacatgttcccaacctactttagaaggatcagaaaagccaaatctctgtgagtttcacggcattactagtttcagagaaagacttctattcttcttcctgatcaagtttattggcttgttcagctctcagaattgtagttcatgctttccgccaagaagaagattcagatcatattcacacgctgaaaagaaggaaagaaaggtcggatcaggtttgtttttccaatacacagtaatcatgtgagattacattaacagtgagaaatcagataagcagagtttctttcttatgaatcttgctgcagaagagaagtttctgtatcccaaacatcactgaaactcctaagagtagccgaggcatacagtttcctttctccattggagatcatattatcatagaggtctgagatattcatgcataccaatgttacttcatacattctagggaatactactttcatgttttaacagacaaaaagttccttatggcttagggaaacaaaaggacgcctccaaggtttgtcggacgcatagctgttataatgacacaatgcttaaatggatggttaagtctcgttgcctcatttcatccatagatgctaaagctcttataacaaaattggatatatgttcccaggtacgttgtgaagacagtggacaattcagagtctatcaagttacaacattgctcacttgccaagatttcagacaattcatctgcgaaggtaacagtagctgaaatgccaccgtcttggctctaactcgtagaaagcaaatatctgtggctgcagaaatcagcatctgtaattttttcattcagagaaagtagttactacgtttcattatgtaatataggaacgagacaacaattttctgtactaaatccagtgttttcattcatacaaggaaactttgctcatctaaaaggacatgcgtattgaaacaaatgccaactttgtagctttgatataaaaagaaaaaaggtcgcttctaatgttacatacccgaatgacaaactgatcaatcgcctgttatttacactaaagataataaccatcaaaaaagtgctaacataaagacaacatagagg

SEQ ID NO: 72359 - DNA, 422 bp, Arabidopsis thaliana landsberg
tcaggcggatcgcaaacgcctgcccggcggggccggcgccgaccacctttcacgttgtattgcatggtttcgcgttcgctcatggcgcactctcgctgtcgaatcagcgccatggtagccgatggtcttgcctttgcgccgtgattgcagttccatcaaaaggccggggacggaccccggagaaaggaattgcatgaatacattgccgcccgtcgatgccgttgaacttcgccgcgccagcctgtgccagatcctgcattggctggcactggagcgcaccacgccgcaggcgctggccgatgcctaccgtgaggctatcgagcggctcaatccggccttgaacgcgtttgtcgattcgcgctcgggcttgctggacgagcaggtgcaaaacgcccggcggcgtagcccggacggtttgctgg

SEQ ID NO: 72360 - DNA, 355 bp, Arabidopsis thaliana landsberg
acaacagacctaccatgatatgcaagttggcgcttatatttttgcatttgttgcattttataaatccacacacgtgacgggatgtctagagagagctacactccagcgacgtgtgaacgaaccccgtatcacccatctgcctgtagcctcatggtgtacctttagtgtattctgatgctcggatacccagaattaagcgttcctattccggagccagtccgtacccactacgtcgcccggattattgatctatctaccactcattcttcaaccctgaataagcttacttgattctcatgagagactgtgcctatcactacagagactgtgctactttgcttcttgatcatcatca

SEQ ID NO: 72361 - DNA, 588 bp, Arabidopsis thaliana landsberg
tcagaagacgcttatcatcaccggcaccaacgacagccgcaagaagatgaacgaggccattcaggatttgttagggctgcgaggcaagggtcagcactacgaactgctaaaccgcttggacaccacccaggccgagcgccggcacagccgttattacgagaaaggcgcggtcatcctgcccgaacgcgattacagcaatgggttgaagcgcggcgaacagtacacggtgctcgacaccggccccggcaatcagttgaccgtgcgcggccaggagggcgaggtgatccggttcagccctgcgcgcttcaatcgcctgtcggtctacagccgcgagaaaaccgaattggccgtgggcgaccaggtgcggattacccgcaacgatgccgacaaggatctagccaacggcgaccgcttcacagtcaagagcgtgacgcaggaccaggtactactcgccggcaaggagggccgcgagattacgcttgaagccaacaagcccatgttcgcggggctggcctatgtctcgaccattcacagcgcccaagggctcaccagcgaccgcgtgctaatcaacatcgagacgaaatcgcg

SEQ ID NO: 72362 - DNA, 567 bp, Arabidopsis thaliana landsberg
tccatttggcagtccacatgaacatcctcctggaaaggaagatcctgcatctgagaagagtgactctaaagatgggtcacattcaaaatcaccttcaagatctcctaagcagtctccaaaggaaccgagtgagagcgtctcttctaaaacagaactcgaaaagactaatgtaatttccccaaaacctgatgctggtgaccaactcgacggtgatgtctccaaacctgaaaatacatctttggttgatagcattaaagaggatcgaatatgggatggtatattgcagcttagttccgcttcagttgtctcagtcactggaattttcaagaggcaagtctctttcattactttaaactcttatctcgtattttggagtggaacatagtgataacaaaccatgatagaaatgggttattagtaccaaagatatgcatgaagctaagtttagatgcttgtttaataggaaatagtcagactgatgcatgtttaatttgttgaagaacagatggaaggagaaaaagatcttagacataaatgttttaggtatctctgatttatagattatct

SEQ ID NO: 72363 - DNA, 533 bp, Arabidopsis thaliana landsberg
  unsure (1)..(533): unsure at all n locations
attctttccaatgtgtatttcctgaaaacgtcagaggattacnccgtcgtcgatgatgtggaaatatagggggggaagagtctaactccaccatcaatgggtttaccgttgctcccaacaccagaaggataggctccaagaggagaggaacactcagggcaagcaaattcaatccactcgacattctttgacacatttgacgctttcgccataaaaacatcctcaagaaacccatcaagaagaaacttcttatcaagtgtaagtttcttctcctccagctgaacactctcattagagtcaggcgagtcatgtacacaacatccaggtagtgatgccttatctatacaacgcgtcttcgattcatccacttgaccacaaacattctcacctccactctcatgactctcagcatttccttcactaattctagaacccggttcaactacaccaacatcacaacttatagctaaactcgactcagattcgacttcagttccacctttcttagacaagatacactctacaagatcatc

SEQ ID NO: 72364 - DNA, 484 bp, Arabidopsis thaliana landsberg
  unsure (1)..(484): unsure at all n locations
caaagcaaaacaagatgtttttgtgtggaagatcaaagtgaaaaaggatatcattcaggataaaaaagaattctnnnnnnnnnnnnnnnnnnnnnnnnnnnnnnattttgaagtccaattaaaaccacccgtcctctggtcgggtggtttttttgttaaaattaatcttcgacaaaaatctctccctctacacattagtgttaattttttcacagtattcaggtttttttcggtgggccggcaactatatgaagactaaagcgtcatatttgtcggctatttctatttttttgggacaaattatttcaaactgagtcaaaaatgaaactacgttacttatcgtccgcactactcatcacactatcaatgagcaccttatcccacgcacaaatgggttggcgggttcttcttacatgcaaggtaattacctggaggtgggcattgatgccaccggagcttatgagggtgccccatggaacgtttc

SEQ ID NO: 72365 - DNA, 483 bp, Arabidopsis thaliana landsberg
aattataactaataataaaatacaatcattataataataatttatttaagaaagtctttgtgagtgtagtcttcgattcaagggcttacaacaaatattattacatttagattacagaaatagccatacccaaggctggacacctctcacagaaatgacaatacccaagactagccatctactacagaaatggccatatccaaggctggcatttcccacaggaggagccgtatcgaaggctggatatctaccagtgaaatggctatagccaagcctgggcatccacaacagaaatgactatatccaaacaagtgattctactccagaaacagccacacccaaggtcccaaatctactaaagaaatggctgtcctgaggccttccgggtttaatccaacatgggtcaagtgacagaaatgtcagagtaacgttgcaaaatgtgtagcaatagcattatattatttcactacacaatgcatacta

SEQ ID NO: 72366 - DNA, 309 bp, Arabidopsis thaliana landsberg
aaataccggggaagtccttttatcattacccattccatctaaatcatatataaagaaacatatgtaccattgcatctatacaaaacaagttgaaccatgaacccaattaccaacatgttcagatgaagaatcttttggcttctatagcttaagacacacattatatctgagtgtttattaaaaggtgtaccctttgcactattctgatgatgagcatctgatatatagaagaattcggtttgcgtttgaggtagcgagaaggtgttgacatctggtctagagtatatgctgccttccgaaaacgccaag

SEQ ID NO: 72367 - DNA, 553 bp, Arabidopsis thaliana landsberg
agtaaatcgagtctaaagaagtccaacacaaacttgaccaccgaaggcttatcagccttaactgtgttatcttctcataccgcggacaactccttccacttatgcagctgagaattgtttgttcaactcccttaaatcatcccttgatagtctcacaaatccttcattaggcagcttatccaccacctcatctatgtttgccataaagtaaaagcgtttgtaatagtctacagcaagcttgtcaaggtcttgtgcattcacaacccatctatcctcattatcttttaacgcttctatccgattcctgcatctcctaataatggtagaagtatgaaaatatttcgtgttccgatcacccagctcaacccacttctctctcgatttctggaaccagagcacttcttcctactcaaggaccaaatcaaattccctcattagcaagttttttttttccacagagtatctgtctgattcacttctacaggtcttggacaaccttgatttcctactgtaacatatcttttcttttttgcacatcttcaaaacatcacga

SEQ ID NO: 72368 - DNA, 536 bp, Arabidopsis thaliana landsberg
tatgcggcgctcactgagcagaaatccatccatttggaaaccacgtggccttttaacgttgagacgatgcgtacggacacccatcttctccagatgatcacgagcaatctattgggcaatgcagtgaaatatacgaacgaaggcggtacggtacgcttctccgttaccgatacggaagatcagatcagtatcgccattgcggatacgggtatcggtatcccactcgccgatcaggagatgctcttctcaaagctctatcgggcctcgaatgcgcggtccttggtaacggacggtaccgggctcggtctctatatcgtgaaggaagcgatccatatactcggcggtacgatatccttcgtgtcaaagaaggagaggggagtacgttcacggtcgtgctgcctaagaacggtacataacaagaatgctataatccagagatatggaagagaatcagaccatcctcatcgttgaagacgacacccaactcgggaagcgctcacgaccgcgcttacgtatgagaaattctctgtgcttgc

SEQ ID NO: 72369 - DNA, 472 bp, Arabidopsis thaliana landsberg
caaatttgatggagtcaatagtcatatacaaacatatcctttaaaatgaacaacacaacttatcgatccaaactaaccaagctttccaaaccaaaccaaagtagtggactttcaaaaccgaactaaccaagttaattgatacttcttctcgtacttataacaaaaaaaaataaaaaaaattggttaacattcttgttatctatgagattgaacttgatatacgaaatactaatcgtccatccaccaacggaagtaacaaaatctgagaaaaccaaaccatcgaactaaccagtaaacccaacgataaccgaaatgtcaactattttagcgcgtgaaatctaatcaaagatgggacacacacaagtctttgagtaaaacttaagccgaaatggcttttgtgacttttgtcaaaccaaactaaacacaatgggcgccacagtgaccaccttttagtgaccctgacttctttttg

SEQ ID NO: 72370 - DNA, 313 bp, Arabidopsis thaliana landsberg
gtttgacgaacgttacagagatttatttttgctatttatattcttaccatttttagtcaaatttttcctgatttgaaattttatattttgtaggaatttgataaaagttactgtgatttattgtaaaactggatcatttggaagacaaaaacggaaaacatatggagttgcctaagctttactattaattatcatggttttttttttctttgtttgaaatactagatattaactcacggtatatcgcggggctatatttttattaaataaatttgaatttttgtgttaaaatgatctatgaatatatgctatt

SEQ ID NO: 72371 - DNA, 527 bp, Arabidopsis thaliana landsberg
agggcatgtcggtacgcgcaagcaacttctcgaccccggtgtgatgttgtgcgcctaccaggacgatagcgtgtacgcggtgttcgatcagggattgcagtgcgctggcctccagttcggagtcatagtgggtactggccacgagcaggctgtagccgtgatcattgagcctggcttgcagggcgtgcagggctttggcgaatattggattgtcgatggtcggcatgagcgcgccgacggccttgaagcgctttgaaaccagggaccccgccgcccggtagggaatgtagtcgagcgcctctgccgcggcgcggaccagtgcggccgtttttgcattgacgcgcgtcgggttgttcagggcccgcgacaccgtggccacagatacgccggcctgacgcgcaatatctttcaccgtgataggtgtcttcgtattttttttagtccgcatgggtaaacggtttcataattagggaaatccctggattaccttcaggtgttcgtcatgatgtgctttcttattaaaaatc

SEQ ID NO: 72372 - DNA, 409 bp, Arabidopsis thaliana landsberg
cctgccacggggaaacacgccgtcccgatctacttccgcggcctttacggataacggacaagggccgccattcctggaatgggagaaatgccatcacttcttttcttgggactccgtccatacattgaagcccggtccttccttctcaggccgtcacgggacaggaaacacctccgtccatggaatggaacccggccatgattcctttgaccgccatcacggataacggacaaaggccgccattcctttaatgggagaaatgccatcacttcttttcttgggactccgtccctggaaacctcaaaggccatacactccttggaaggggaactctttctccactcctcggacaggtcaagcttctttactcccccggccatggtcgatcggcacaacgaggggagggggg

SEQ ID NO: 72373 - DNA, 241 bp, Arabidopsis thaliana landsberg
aagaagaaccccgcaaacccgaacaaaaaaaaaagacaaaccccaggcagaaaggcgaaagagcaagaaagaaggcagagaagaacaaggaaaaagagccagagacgcagcaacccgaagaaaaccacaaaccaacgactggcactgaaaaagccgcggaggagcaaccacacacccagggccggcggacagagaaaaaaagaacaataagaaagcgagaaaagggaaacaagccacccac

SEQ ID NO: 72374 - DNA, 551 bp, Arabidopsis thaliana landsberg
ctttccctaacttttaatggtatggatttgactctagaagaaaccatgttagaccacagaatgttttttatcgcatgtgttcttttatatggaagctctaattagtgtctaccaatcatctttgaaaaacatcattgtataaagcctttgaacatatctagtctatttatcgatagtactatctaaagaaatcgaacctaaaagttcctagacgacacgttacctaagctttttttgttggtgtttctagtggacactgaaacaacagagagttttagcatcactacctataaccataatcttgatgcttcaaacggagtcatacaataacagaacaaaaaaaaatacatggaaactctggagcatattctgtgaagctagttcggataatgttgaatttccacaagtaacaaaggcacttgttgtttatgtaataaatgccatctttctctatagaatgagaacaaagacctcaagagacagtcaactttgtgcaacgatctagaaaaaaacactgtaaaaggctctcatgcgttcatcttgcataacaa

SEQ ID NO: 72375 - DNA, 427 bp, Arabidopsis thaliana landsberg
gaagcaaacactccaatggtgatgttaatttacccaatctcaccccattcccacattacctttataaacacacatcttaatcacatacaggcaatatatctgaagctcaaactcaaaaagtttaatcatcaccaacgaacatcattttatactcaaaattgtaaacatcaacccaacttttctttcttttcacaaatcaatacactaaaaatttgactgctctctcattcatattaaacacataatgctcaaaaatttacttaacaaaaccaggatccctttacactgactttaatcttacattcatattaacaagcatcatttcaccacaagattcaattataaacttattattaccaccaaacacaggactcgtaatcaacgttaactttattgaactgtaaatcacaatcacacttctttccat

SEQ ID NO: 72376 - DNA, 258 bp, Arabidopsis thaliana landsberg
taccactgacgtagtgattcgggattattacatggcagtccaccatatcacactgactatctgacagtgctagagtctttcattccacactaaaccacactggcataggaaagaagagactcagtaccactcgccaatcactcgaccacctggcgaggtgtcttaaatcgtcattactggcgtttggtttagggtcagaatttttatagtgatgcctttactttcagaaagataattgcagacacttggtcttgacat

SEQ ID NO: 72377 - DNA, 469 bp, Arabidopsis thaliana landsberg
atacactaattcattatacattccaagggtttaattataaaccgcatgttatggacaccttgacgggatccaacatatgtctattgtctctcttgctgcattaagattatcgaaacacatgcggaccaaatgaaacgtattatggaatcaatactatgaatacaaggcatatatactaatgaaacatgcagaaccatgatagtgtagcccaaataagactataatgcagtatttacttatcgaaattatatggaccataaaaagcgtcaatgtgggaataaaaaccagggaagactctaaaatctaaattatgatactaaataacgaattttgaccgatttgaatatgatgcattcattggtgccaaaagaggacatgaaagatcggatgcactgggtggagggaaagcctgaaagcactccgcacttgaaattatttccatttctgtaaaggataagctatgaccagc

SEQ ID NO: 72378 - DNA, 430 bp, Arabidopsis thaliana landsberg
  unsure (1)..(430): unsure at all n locations
gaagacgagtgaggcctgggggatgctgtactgtttgctatcatggcttgctcaacctgctttggtttctggttttctgtttttctttaaacgtatctagttttattttatgtacgttgcctgcacgtatatctgtgtgaagatgtctgatcctgtagttacagacagttgcgagctaccatgtggttattgnnnnnnnnnnnnnnnnnnnnnnnnnnnnnnnnnnnnnnnnnnnnnnnnnnnnnnnnnnnnnnnnnnnntaagtctgctttttatagaacctaggaccacctgccgaggggatggccccacctaccatgggcgaaactctccaacatcaatcactaattaagaaaatgccatacagctatatcttctggagaagttgttctcaatcggaggtttcctcctgtcagatgactctactgtc

SEQ ID NO: 72379 - DNA, 583 bp, Arabidopsis thaliana landsberg
catcgcatcaaacctttcttcatgataacaactctaacacagaatttaattctccattagtccagttttacaatccaaaaagctcaaaactttaagagagaaagtattcaactttcctgatttctcttcaacgatttactaaaatcatttcccaataagacaaactcgtccagcaattcgaaaacaaatcaagtacgaatctttgtaatcgaattgagaaaccctaaattgaattgaaggttcacgaagataccacaaatctaattagagtataacaaaagcttcgtaccttgccggtgtagttgacgaaggtaggagaacgattcgcggcggagacagcaacagtcgcaagatcagaagctatactcggtccatgtccgtagaaccaagagaataatataagtctcgaattttccaattcaatttttggtttgtgcttggtttggtttgctttttttcggttaattcaattttaggatttttcttcggtttagacaatttagctaattagtaaattgatcagacgaacttattcaacgtgatgatgatattactatagaggttattttatttcatggcaata

SEQ ID NO: 72380 - DNA, 437 bp, Arabidopsis thaliana landsberg
cacggtaatagtattacctcattctcaagcactatttcgtccttcacatttactaataacaaatagtgtatttatttacattaacagaaataggtcttcacatttgacgaaaagattctccagtttcgtcatacctactctgttgtgaatctgtgcttgctttttccatgtgctccaaaaaacctagaagtctagtatactaaataaatttgatttttttttaatatattatatacaatatgatcgattcatacgaaggaaaaaaggtggtcaaacatatatagataaatacagtaaatataacattggttaaaaatttcttcaaggaagacataaaaacaaatgaaggtacaaaaatattcagaaagatacgaacaaaaggcagaactctttaggggacaagataacatgaggtagctttgaaactctaacacttc

SEQ ID NO: 72381 - DNA, 157 bp, Arabidopsis thaliana landsberg
tctgccgagggcacgggcggggactgccggtccgccgacatctgccattcctgttggtctccgcccagtgcctgctggggctcacggcggcgcttgcggtacacattgatgaacgtggtggtcaggatgcggttgagccacgcgcgcaggttggtgc

SEQ ID NO: 72382 - DNA, 563 bp, Arabidopsis thaliana landsberg
actgcagcacgaacactctcgaaaaacttgtcatcttcttcgggaaggaaatgtcctgcatagtgtacatataacccatttacttaagtcagtctctggtatcagaacgcattgtaccacatcaggttattgacataccttgcttctttagtttttcaattcttagggaacgtaactcttgcatttcctcaacaatcagagctagttcaagctgaaacattgaatccatgagatgaattgtaaaagaatttctatgaaaccttattagagttcccattagataatgtctgagatggctttagaagtctcacctcgggttctagtctctttcgctcacgttttgccttgatcttctcaattgccttcatctcatcaacctaaaaacatataagaccccgtcagatatcaaaacgaggaacatgtgaattccacacagtgatgttcataacctttttatttgccatgtccttgggcattttcttttcccttcatttcatctgcctattgatcaagatttgtttaaaatcttttaaaggctttctgaaaacccatttttagaccag

SEQ ID NO: 72383 - DNA, 450 bp, Arabidopsis thaliana landsberg
  unsure (1)..(450): unsure at all n locations
ggggcacgcacacggacgaaaaanaatccataaaagcaattaacacacacacgggggggccaaaacccaagggagacgacacagcacaaaacaaagaaaccgcaacaaaaaagaaagcacccaagcaaagcacacacaaacaaacaagaggaggcagcacccaaacaacccaggacagaaccaaaacaagacaagaaggaacgcaaaaaccaccccaaggaaaaaaccagaaaaccaaaacccacgccaaaacgaacaaacaaacagaggcgcaaaccaaagaaaaaccagaacgcaaaaaccgaccgcgagacggaacaaaaacaaaagcagggcaaaaaacccaggaaacggaccaaccgcaccacaccaaaggagggaaaaacacaaaaggaccaaaccccaaaacgaacaaccaggggccaagcccggaaaaagaaaaaagaccaa

SEQ ID NO: 72384 - DNA, 605 bp, Arabidopsis thaliana landsberg
  unsure (1)..(605): unsure at all n locations
ggataaacattactataatatcgctataagaatgtgaaaaacaagcttataaagttagaattttattttaatgtatattacataatttagtcatcaggaacaaagttaatggataagaacttggctagatgcatgtgccgtcggcttataatcatgtcatcatgtgtcaaagtatatatctacgagacgctagtattccaaagggatggctagtaagaaaaagtaattatgtcatgatcgttattattttatgataagaccttaattacctattgatctcttgcttattttataaagataaggtttgaataattgattaagaacagaagaatttgcttggggttggttaatcgagtatttattaatcaagttgtttttgtttgactatcaagtttttactactgcttctccctaccaatttgattatatatacggttntttcaagtctgattcaactagatagaaccttaggtaatttaatatcttcaaaactggataaatttacttgaccatcattttatatcggttaagcttgaccatgttattttgctcttaaaaaattaatatattagactcatcttaggttagaaactcatagtcaatca

SEQ ID NO: 72385 - DNA, 279 bp, Arabidopsis thaliana landsberg
ctggcggccacgaccacaatcatttcacctttgtccattttgactcataattacaaaagccctagactgagcctgttgatcatacctccgagcccgatggccagctcagtaacaacgatctttctatatgacacactatgccacatcctccaaaacgtgtgatagcgttaagccctatcatatgttgaaatctacctctcctgtggcgccaccccgccgattgatacccacatcatctctcccttggattggccatcgcctcgaacagcatcctattgg

SEQ ID NO: 72386 - DNA, 805 bp, Arabidopsis thaliana landsberg
ttttttcgggattaaagagcactttttttaactgtacgattacatggttacgattatttttgatatataatattatcgcacaaatgatcaaaatagcacactaacctttagaatttatgacttagctaatgaagacaacaattagtacttgttaacaaaaacaggttagacgatggtaatttgaattttgacagtaaaaacaaatgatggtaattttgttaattaataagctttttgtttcaattacggtggccgacacctactaggctactacgattctagttgtctaaccggatcggttcaacttcaatttcactctttcaattttcacctagttttgtttctctgtaaaacacgtctatggtagctaggtgctcattatcaatcacaacatagtaaacaatttttgttttttaattgctttcagtcatttgctaattaaacacactcttaggaactattttttatagtggccactccacttatcgcacttcttgttattttcatagagaatctgttagtcgggtataatatcaactcaaaatgtttcattaccttatatagtaacagaaccctgcagttttttgtcattaaaccaaaattccatcctataaaacccctggtggtaagaaaaaaaaaactatattttttggcattggggtcttacttccagaacccccgattccggatggattcccatattcggtttttttttccggcaaaaaaaaaaaaaattaaaaaacccaaaatggtgtcattaaaaggggtctttttttttggaatgaattggggaccaaggggtttt

SEQ ID NO: 72387 - DNA, 1861 bp, Arabidopsis thaliana landsberg
aatcttgacacatagtaaaaataaatcaagaaaacgtgattatttttatggcggaagtagagggaattacccagggtccgcaacataagccaggccacaaggaaaacgaaaattgcgagcctgttaaatcacaatattttaagatcagctaatgccaataagaaagtgtcagtgaaatacgtgtaagcttctttattagcaggaggtagtgtagtcacatcactatttcacttagttatgcttccacaatcagatctagcaagacagtgtgggggataaagtggatccacagcatttattatgaataaaatatctagcatgttgatatgattctccaactaatagaacattaaatagttacaagccataattaaacacaacagttccacctgtacgacacaagaatatcatgcatgcaggcacagaaatttccagataatatcttttcaagtcatagttaagttacctgctgataagacaacggatgaattacagcaccgcttacttccaggaagtgatctggagtgattgagtgtaaatcttgtacctgtggcaggaaatacacaaacacataaggctcttgatttttatgatagataggaagtataaatcacattaaggcagaattctaaatgcaaattaagtattgaggaactccatctatcaggggaaacgaaaagagctacaagaacaaatttaatgaccaaaataaaagagaagagacggctacatatattttacttctagtctttgcatagtctcctgcttttctagtcagtatgtgacagggcagaaactaaacacaagatcctagaagactacgaggaacataaaaccaaagttagaaatagaagaatggaactcactgatacactaacagatagtggttgtccacccctttcaatctccaattcaagtatctggccaacaccgtcatcaagcagattctccaagttcaaaaattgtgtgagcacctgtaataacaatcaaacgcataaaggaagatttagcaaactgaggaaaaaggaactagacaatctaagtgcactgattaatacgttctgtggccaggtaataaccaatctctaaacaatacgtttctttactaatgttgccgcaaaagatatcacaattctcgattacttgaggcaaaaaaaatttaaattctcactaagaagatgcaatcaagacaacttactgttccattcacccgaacaagaacatctcccggctccaaatgtttatcagcagggccacttggcacctaccatcacgacatatcaaatttaggataaaaagtttcgaatttaaccatcacttaaacaatagccatattctttgaaaataattatgtattgaatgttattaataaagcaatgcactcaccacagaatcgacaacaagcattcctgtttccccagttggagatgcatgtcgaaccacctacacgatcaagagatagcattttgtaaggtgttagtgagcatcacgaggaaagctgatgccctaaatgatggtaagaaggaatagtatgtacctgttcagtttcgctcctgagaccaagtcgccgtatctcatcgaatcctttatgaagaaatgtcatctaaagtacacaagaaaacagataaaagcttacataagaaaaccccagaactaataattaagtaagagatattgaacttcctctgaatctcaaatctaacaatcgttggaaagtgaatagaaattaaaccatgaactatttcagatcccaaggatattctttctatcaccagccacagtagtccagatcaaagttccatggtcattcagatatcaagtaatattcaaaattttcaacgtatatattttccctctagga

SEQ ID NO: 72388 - DNA, 481 bp, Arabidopsis thaliana landsberg
aaagggaggaccgggtgaagatcgattccggctcttccgcgtgtatgctcgcgagcaccgcgctggggttgctggtgacccctgggctcgccttcttctacggcggtatgacccgcgtgaagagcgtgctcaacatgatgatgatgtcctgggcggccatcatcaccgtgaccctggcctgggtgctgtggggtgactcgctgaccttcgccccggggaactggttcatcggcgggctgaagtacctcgctgaaaacggcctggtcaacgacgcgtccagggcaccgggcatccccgacctggtcttctccgcgttccagctcaccttcgccgtgatcacggtggcgctgatcagcggggcgatcgccgaccggaccaggttcggcccctgtgtggtgttcaccgtcgtctgggcgacgctggtctacttcccggtcgcccactgggtgtggggcggcggctggctgagctccctcgcatc

SEQ ID NO: 72389 - DNA, 427 bp, Arabidopsis thaliana landsberg
actcgttcgtcatcaaaggcggtcacgtaattgaccccaaaaacaatatcaattttattaagttcgtcgcgctgaaaggcgataccgccatgctggtagctaaaaacattgacgccaaggaaggcgtgcaagtggtaaatgccaaaggcctatttgtaacgccgggcctgatcgacatgcactcgcataacttcttcggcaccaaaaaggaccatacttacagcaacggtcccaacgccctcccacccgacggataaacattccgaaccggcgttactaccgtcgaagaagcaggctgtgccggctggaagtcgttccccgatttcaagaaacaaaccatcgacgccttacgcacgcgcgtgctttcattcctgaatatagggggcgaaagcatgcgcggcggaaccttacgatcagaatgttgagg

SEQ ID NO: 72390 - DNA, 581 bp, Arabidopsis thaliana landsberg
ccaaattttccttttaaacacagtcaaactttcaaccgtaatttccaccctctcttccttactccactatattttctatctcacacaaactctatctctatttcaggaaaaagtgacttttcactcattttgaatagtaaatgtactacattactaattatgtttgataaatgtactatatctcaaacacactcttaaaacaattcataacgaaaataaaaaggtaaaaagaatataaagcacatatatggccttgtttaaaaaaacagcgtaaccaaaattaacacgaaaattaccaattctaaaattttcttagagagaaagccaataaagagacaaaatctaagcaacgtgaagtgccaaatttttttgttataaatgtaactgtctgcattgtctacaaatggtattactacttctccaaataatattccttcacactctactttatttctttcgtgaaagtgttcaggttattccgaattatcggttcattctttatgtgatggcatacaccttctttaagataatcaataaatttgtaaaatgtgaatcttgaactatgttagtgtctatacttt

SEQ ID NO: 72391 - DNA, 562 bp, Arabidopsis thaliana landsberg
  unsure (1)..(562): unsure at all n locations
ataaccatatagataattaaatgtaattcattaaaatggtttcttctttattaaacattcaacaatttggttgtgctagaatgagtatttaccgttgatttgccctggagagtcgagtccggacgagccactgaagcaagaaccatggagctaagtaaaactgctgcaacgataagaatgttaatctttgacataatatcttcttcctcaataatcctttctctctttctttttttttggtttgtaatatatagagagattgttacaggagaagaatcaaattacaaggcaaaattaggtaagacttttggagcaagatatttttccttttggaataagatttgtttccttttaaaattaaatttccaaaacattttatttttgttactcattactcattagacaatctttccacgtctctcttgttgcatgtttgtaacgcttacttatataaatgaatattccttactttgttacaagaaaaacaaatccttagttgacttccattagctatttaatgtngaggaaatgcntttgacttagttaaaaccttaatatatac

SEQ ID NO: 72392 - DNA, 542 bp, Arabidopsis thaliana landsberg
gcctccgaggcccgtcagcccgagcctgctgtcgaagacatttttgatttcctgagttccaagcccggcaagaagactgctgctccctcgtcctccgctgtggagggtggtgctgcccagaacgtgttcagcctgacagttcccgagggcgaggaactgcgtgccaagaccttccttgagcggatcaggactctcctgcaggtcgagcctgccagtctggtgctttaaattgtcacttcgcgttatatatctccccgatgacttggatctttctccatgtttctttcgattttcctttatccactcatgtcatctccaaactgcgttgggagggttcgaggcttctgtatttagtgtagcatagataatctgataccgcctggataggcttgataaacattacattacaacttgattggaagacttataattatttggttggtacgactggtcttcgtggtgtcatttttacctagatgtctgatgaaatgtgcatataccatccgttgacgttgcaaggtagaccagtctgcgagtatata

SEQ ID NO: 72393 - DNA, 460 bp, Arabidopsis thaliana landsberg
tcccgagcaccccgtgggcgtagccctaagggcacaggaatgagggtggaggatgtgccaccgagccacccaccgtcaccgagagatgcctcaccgataccccaccgtatccggctccttgcccggctgcaccacctggtccatataccgtgagcaatccgggctagacccgtgcacgtcatcgaacccatagagcttcgtcagcccgccgctcgacagcgactgaccgatgaaacgccccttgtacacatccaccgccagcgccggcaccgcccggccgacgaagcgcggcgtctaggagatgacgaaaagcgccggggcgatggtgctctcgcgccaggccgactcggtgaccccgtagatctccagcatgatttccgagcgcatccagccgggcgtaaaggaaaccggcgagcagccgcgctattgcagggccttgccatgcgcccaggccatgcgg

SEQ ID NO: 72394 - DNA, 522 bp, Arabidopsis thaliana landsberg
  unsure (1)..(522): unsure at all n locations
gcctcgaaacaattcattattgtctttgtatctcccttgctgtttgctcacgttgtgttgggttccatcgtttccacaagagtttttgcagtttggagctgctccagtttgttccaatgatccgtcaccttctgttgaagacctcgcggaccagattcttgaagtattgaacttctttaggtaaatcttgaatcatgtttcgactaactctcactctaaatttgggctatcataacaagagtaatttccgctattatcctctaactatctatgtctcttgcagcctcgaggcagtaatgtgcatgggaatcacagctggtgcctacatcctttccttgtttgctgtatgtactcattgaggcctttgaggatttatttgtagctgcattctcagaacattatacataatgtaactcattctttatcaggattggtttggagtttgcagattaaacataagaacggtttgnggttttgattcttatatcgcctctatgcaaagcaccctcatggctgaatggt

SEQ ID NO: 72395 - DNA, 569 bp, Arabidopsis thaliana landsberg
gcgagttgttagatggacacaacatttggtctaagttgccattcgaagaacctaagcaacagaagagcttgtagtaatgtggatataagtattaagaacatgtgtgaaacgggaaaaagggtcggatttccggatgtgtatctcgctaatccaataaagcatcctcctgacatgcacacgcatgacccatttgaagatgagattatagttgaaaggtacatggctgcttttgttgctgaagatccagatactgactacaatgatacaccacctgactctaatgatgaacatacaggggagcacttcggaggattcagaatgggtatacactgattatcacaggtgcgtctcggatgggtatcgtaagcttctctaagccaatgttacagcaagattggtcatggatgtgctcagaactcatcttgattataaccgaatgccattctagatggaactcatcggtggcaccattccatggcaagcagtgacaagggtatgacggctttgtggcacgtaatagacatcattcatcgtgaacatgcggagcgattctcacgactcacagatta

SEQ ID NO: 72396 - DNA, 302 bp, Arabidopsis thaliana landsberg
tgatgggcataaagatgcgctcttcgagactgtcatcaatataaaagttcttaagctagcttttagagtttttctctagtatatcgggccaacatagtaaatgcgtcaagaacggaaacagccagcttacataaacgacaatatgaaccaactaaaagccgcgccaaacgaaacacaacatgccgatcgcgcacgtgagatggtgtgtcgtctacacaccaaggcgatttcgactgacatatcccgataccgttccgtggcgagggattatcccgacgcgatcaacaacatggaatctgtta

SEQ ID NO: 72397 - DNA, 260 bp, Arabidopsis thaliana landsberg
ctttaaatggggaaccgcccaaaccaccactaccgggcctgccatatctgctcgggatgatcaagacaaaagctggagtcacaccccatgatactggccccatatacactacccccaccatctacatgaataggatgagtgatcttaccgtcgcgcactctgatggtgagaaactccactttgctggcaaagaatatgtatttgaccttgcaggaaaccaaactacactgtttttacaaaacaaggtatctgacacctaa

SEQ ID NO: 72398 - DNA, 225 bp, Arabidopsis thaliana landsberg
cagtgatttctttttgcaggtgcctgttgctgcaccggtttatctacgaggatatgcatgctaacttcaagcgggtgacggaaacagctgctcatatatcgggtatcagactctgggtaacgaatgagttcatgcattcgggtcttcgagatgctggaagacaaatcatggatcgtttgttgggaatgatcaatgggacatcgcctttgtttggacacctagtac

SEQ ID NO: 72399 - DNA, 519 bp, Arabidopsis thaliana landsberg
gctccaggaaacaaaactattcatcttgctgctcttatgtaaggacatggaaaaatcatagcatgcgagctgaatgaagaacgagttaagcgtttggaacatactataaagctgtctggtgcctccagtatccttctcttgccttctttcacgtataactcttttagcttctgtttgataatttgtcacaagtgagtttaattacatggaatttgaagaataaactcgattgtttaaatgcctgtcaagtcatgtccgtctatgagggcttttcttaacgccaatttgtagatatcgaagtctgtcatggtgattttttgggactaaatccgaaagatccttcttttgcgaaggtaaacattacttagtctgtagcatgactatctattttcttattggtccatgaaaggtttccacaccaacgtttttaggatcattccttgattttggatctatttaagatatctgcaatagagatagtacaagtccagtattttcattgtctttttgtgatagtct

SEQ ID NO: 72400 - DNA, 503 bp, Arabidopsis thaliana landsberg
taaaccctttccgaaactgcgcggcatccagtacgatggtcaggaccgttccatttacgtgcgcatctcgcgcatccgggccaaggtcggcgatgacccggagaacccgaagcgcatcaagacagtgcgctccaaaggctatctgttcgtcagggaaatgagcactcactgaccggtttcgccgcggaggttgcccttgaacagcatcttcgtgcgcatgtatggcggcatcctcgccgcgctgctgattatcggcgtgatcacctacgcgggtgtcaatctggtcaaccagtaccgctcggggctgtaccgggagaacatggcgcgcggcaccttctacctgatggcgcagggctatcgaacgcataccgatgcggtttcccgccagcactggacacagcggctcagccagagcctgggcgatcaggtgacgttgctcgatgccgcccagctggctctttcctaccgcgaaaactgtatctggatgaaggacgggtggtgtt

SEQ ID NO: 72401 - DNA, 1193 bp, Arabidopsis thaliana landsberg
catgggtattgtttaggttaggtgtaactgtgtaaggtacaaaatgttgtttggatcaattaacgcaaaccaaactctcactgccttttacgattccaatggcaatatacattgcttctttgggatttcttcacaatcccgcaaggtttaaacttcctctgtccagtgtccccccaaaaaagtgcatattacattcccataactggcgtatatacagagcaacagagaatatcagttaaaaacggtgtgagcaaaaagtgcttcggttaagtattaaaattggttcgaaccggtgaaaagtgcaattgggattgcgtctctttgcatccaaaggacccaaacggacccctcatcacctatgtatcaaccttcactcgcttcaccggagcgtgcactttcacaaacgcggattctcaaatcaattttacttctttttaaaacaatgttaaaagaataaaagatatatttctcataatacaatgcatgaatatactacaaaatccttaattttcctaattttctaaaagaaaaaatctaataattcgctgaaaatggaaaagaataatattttgaacaaaataatttccccattgttgcctatgactagctcgcacgttttaagcctaatctctcacgaatacataaaaataaaattaaaactcattgaccctttgaccttaaagcgcgtacctaacactcgcttctattttctctcttccctttatattacaccatcgaaccacttcatatcaacccttgaaaacttcactcgtcacacattcgattctttcatcgttgtgtctattataaatatatgtcaatttggtttctaaaaaattctaccattgattgattgatttttttttctttaagagatgaatttatttacaagaatctcatctcggactaagaaggccaatctttactacgtaaccctagttgctcttctctgcatcgctagctaccttctcggtatttggcaaaacacggcggttaatccacgcgccgccttcgatgattcagacggtacaccgtgcgagggattcaccagacctaattctacgaaagatctcgacttcgacgcgcatcacaacattcaagatccacctccggtgacggaaaccgccgttagtttcccgtcgtgtgccgccgcgttgagcgagcacacgccgtgcgaagacgcgaagcgatcg

SEQ ID NO: 72402 - DNA, 3267 bp, Arabidopsis thaliana landsberg
ctcctcgcttcaaacattcttagttttgaattctggttgtaagaccgaggagtgcgacaccaatcaccgggaaaactctccggtaccggaaaagaagaagcgaactatctacctccgacgacgaagtatcaattttcgctactataacttatattttctgctattgattttcacagtctgcgaatctggattctgttgcaccctgaacatatcaactgatctctctcgatttgtgtggtttttgagatctgcctgtgttcaatttgtatgggtttatagatttggggtataaattgtgttagttcagagactagagcttatttcttagtgattgttcgttgattatttgatttcaaagctttcgtgttgcattaattgcggcaatccactgtttccagaatgtttttttattattgattagccgatttcaaaaccctaaaatttcaacgattttgtttttcttaggtacaaccaatgcaaacaagcacgagatctcctcttactgaacatatatcagcaaacacaaatatccaaaggcgtcaagctggtaaatattatttgttatatgtaacttctccatggaagttgcctctgagacaaactccttgtttttcttttcattgtgacttgtcaggaaatggtggatcttttattaagccttctgatgctacaccaacgaagctgacaaaccctggaggccggattttggagacgaagcaagccattgctgccattcatgggaagaaatttcctgtaaggggcaacaacagcaacctcgtgataaacttctcagatgatgatagtggtagtgaatctgattgtaaaggacgtacacagacatcaaagattcaaccaaagggaaccatatctgggaatagaaacccgtctacattttcacaaacaaaattgaaaggaccaagacagattgatataagagccataacaaagaaggcattgtccactagcacctttagtcatgctgcgacgtccaaagtctccaacctttcatttgccaaggaaatgaaatccaataaatatattcattcctctgaaaggacggttagcaaagatgcacagcgtcctgaacagattgtggagtccaatagcaacaaacttcaggatttaaagcagcagattgcgcttcgggaaagtgagctgaagcttaaggctgcacagccaaagaaggatgccgttaacccaaaaatcactccagcaaggagggtcagtattatttctgatgatactagacatctagaaccaaacgaacctcccaagaaacgtttaaaagttagtggaattgacacaagtcagcctgttattgattacagagtggcagcatctgcggctgcaccaatgaatgcgccagacatccgcaaaagtctactgccaggtgagtctagaggcaaacattgaatttgctactggctgtttcacttaaactctatcttggttatggaattcagtgttttgatttttaccacatctgatatcacctgactctgatgtttatttcaggtgtcaatgcaaattctagttgcaaacacctcggaagtaagagtgatgagattgttccacctgttattcctcagcatactgtggaaggaaatacaagctcaagtgtcttacaaaaaagcaccgtacgtgttaccatggttttgtgttttatgctttactagaattggaaaatttgacgcaaagattatttaatatgctacttatgggtcagtatttttctttatttgagcgtttttatttttattgcagggcaaagcgaatcattacgaaggtggaagagaactcgaaacaatgaaaaatgttgataggagcgtgtcaagtgaacagttacttaaaatagtcaatggaaaccatcaggttttttctagatcctcaaataacaactggaagcggctggtaggaatttgtgatccttacttttgattttttttttgtgtctgcttgcaatctagccttgttcgaataattctggcctctacaacatcccgggaagtacaacagttcctggacatagtcaactggatatgctatccttgacgaacctagaggaatcgcttgacaaagagttggaggaagcacaagaacgaaaacgcctttttgaaattgaagaaagaaatgctcttaaggtttatagaaaggcacagagatctttgatagaggcaaatgccagatgtgcagaactttacagtaagagagaaattttatctgctcattatggatctctcatcgttcgtgactccagattgttgtggccttctatacatggtgagaatcctgaaaccgggtttcacttcttgaataatggtactggaaacattgatctggcaaccaaaacggacattgctcagcatactcagctagaaagcaaccacaaatttaacagtgaatatgttggcagtcatcctccacctcattcccgtagtggacagaatttgggttcagaaccgtacagtgatcttggtgctagtacctctgatggattgccttgcggtaacaagcaaactgcaagtagactatgctccccatcaagtgatgcaaacattttgccagatgacgagtcatttccagttgaccatgaatctaccgaggggaaccctggacatcaaaaagaaaatcttgatcaaacactaggcaatcagaatgctttgcttcttgaagcatcattaagatcaaaattgtttgaccgtcttggcatgagggcagaatctagaggtggcacatgtttcaatgaagagactgtgatagatagaggggatgaaagagatttcggaagtgaaggaacccagagagatgacggtagtcctttctccgaaatatatctgcataatgattctctaggtaaggagtttatctttaagagattggcattttgtttagttattatatgatttttttatcttatgtgtggctgtgcattcccttcaaaaaggaaaaataatagcatggtcgttttgcaaccatattttacattgcggatagcaaatgcatgaactggggtcaaatgtgattgagttcccatagcattgtcccgagatggatgaaccaacgtggtccccatgtgcttcactttcctttatattttcagtaagatgtcttcctgttttcaatttcagagccaggggccaataaactgcaaggaagtccatccgaagcaccagttgaacgacgctcaatcgaggaaaattcgctaaattatcagttatctatagatatggagtcccataggagttcaccacagaatgcccttttatc

SEQ ID NO: 72403 - DNA, 669 bp, Arabidopsis thaliana landsberg
  unsure (1)..(669): unsure at all n locations
ctggcgatgggcctgacctttgccatcgccctgacgctggtggtgttcgcgggcgccgaactcttcaccggtcacaccatggtgatggcggccggtctgatccgcggcacggtcggcttcggcagcgtcgccaagtcctggaccatgacctgggtcggcaacctgatcggggctgcgggccttgccgccctgttctggctgggcggcggcggcgccatcctcaagcagggcgccgatctcgccttcagcgcggcggccgccaagatgcatgcggcgccgctggcgctgctggcgcgcggcatcctctgcaactggctggtgtgcctggcgctgtggatgagcgtccgcaccaagtcggacgccaccaaatgcatcgtgatcttctggtgcctgttcgcgttcatcgcgtgcggcttcgagcattcggtggcgaacatgacgctattctcgctcaccttgttcgcggcccatcccgacaccatcactgtgagcggcatgttttataacctgctctgggtaacgctgggcaacatcatncgcggagctctgttcgtggccggcggctatggcctggccagcgggcgggcggctgaagcggcgcgcatccgccccctggctgtggcagcggaatgacccgggcatgaacatcacgggcgatccccgcgagca

SEQ ID NO: 72404 - DNA, 471 bp, Arabidopsis thaliana landsberg
gggttccgtcgatcttgtcgacaaatactagggacctggtcaactgtattaacagacgcacatcatacaactaaagcactccacgttgtgttatacaaaatatcggacccggactgctaacgcaacgattggcctgccattccaataccccgattgaacttcgaagtctatgcatcgctccgttctagcctgccgacgctctgttctaccaatgctaaggctcccacgatgagttcaactcctgggcggccactcattggacacggatgataaactctcgtgccttaacgagcacttaaacccctgggaagacatacctcgacccctcttgatcatcatagaccacccatcgttcataagcgtactctcattacgtatgaacaacataattcgggcgcgcgctagccggcgataatctgaataaatacactggccacctattcgatccatgggacttgtccctcggggtgc

SEQ ID NO: 72405 - DNA, 514 bp, Arabidopsis thaliana landsberg
  unsure (1)..(514): unsure at all n locations
ttgagacatcggcgtccagcaggttctggatgatccgtggaccgaatactctttcgttcatgggcggtcttccttgatcagagacagctggtagtcgagcgcggcctcttcgccgcagaggatgacgccttccgccgtcagcgcgccgcaggcgccgatggcgccttcctgggtcatggcgcgggatgccggcaggtacaacagcacctggaagccggcgcggcgcaattgctgggctgcggtcttgacgcagtactccatggccagtccgccgtcgatcaccgcgccgacctgatgcaccgtgaggtactcgatgaccccggcggagcgactctcggacaggtcgtggtagcaggcgccataaggatgcaagtcgggctcgacgcctttccagacgaagtagtcgtagtcgatgggcgcaggcaagccgggcagcagctcgaaacgcggggtgccgggcacactgtggctgaccctgtcaaancggcgttagccaacgtcagtggctgaagca

SEQ ID NO: 72406 - DNA, 647 bp, Arabidopsis thaliana landsberg
taatttactgtaaattatttacttgttgcacaaattttactgaattcgtagatttctttgacatcaacatgagaacacttagtaaaaagcaacaaatctagtcctccacaaaacagaacttttgttagatttataaaagattctcccctaacctgtaaaactcaaattttaaaacagttgacgtagagtttgatctattgcaattaaattatttgcacgaatactattaggtgggaatgtgagattaataattaggaaaaaattagtctttaatataatgattatgcatcctcttttcacgtaaagattagtctcatagttttgtcttctttagctttttctcctctttttttcttctctttgccaaatttcttctctttcgcttttacattttctccagcaaaataagacaagatctcaatcacttcttcttcttcaattctatctaaagctgtcacgagaaagccagagaatttctcagcttctcattttgtcaagcaaatacaaaaagaacacacttcttttttatttccgggaaaattcgtttttatgtagtggtcgtactaaacacgcttcctttatgtggaatcttaaagcagtccctttttttagttgaattccacagttcttttctttttttttttttg

SEQ ID NO: 72407 - DNA, 850 bp, Arabidopsis thaliana landsberg
atttctcgtgaacattataagaaaccaatagaaaggtatatagatgtaatattgcttgaaactccaaattaatatttgttttcctttcttatgaaagttaatttggtcatcgtaacttcctttgatttaatatattgtacaataacccgtttagagaattaatatattgtggttcacttaaacagctccgcttgtcaaactaagtgacgtaccaaaattaaaaagcttaagaaagaaaattagagcaagtctaaggagtaaatcaatagccgaccactttgtgaataagcttcaatgttaatccattgaatacaccagttttacgtcaaattctttaattcacttgataataaagcatagattaattaacgtggattgacaagagaaaaaaaatcgactatttttatactagatgattgccaagtttctttaaatatagttaatttattgtttttgacgcagtctccatactcaagctatgcatataaatatgtcggtacgtaatacgtgtgaccaaagtgttaagtgtacactgtaaaatatgagaacgagttgtatgtcgtatagtttttttggacaacatatgaaagtgatattgattaggtcacactaaaatacaaagagttagtttggagtctttgggccataattatatatggtcttcaagataaattcaaaagataattatatgatggagttaggtcgaagtctattagctgctcctgggtgtgtgattaaaaatctattgtgtaattaactcaaaatcaaacatatatattctgtttggtacagcttttggaataggccatattcactagcaccataccctattgcatgccctatgtaacct

SEQ ID NO: 72408 - DNA, 391 bp, Arabidopsis thaliana landsberg
gaattggaacaaaaaccgaaaggaaatggaacttaattttcttgaactctcctttttgacccttttctttgttaagcctcacattctcttaggtgggtattcacaagatgctttatcaaatgaaaatcatcttgggatcactcttgatcctttcaaacgcttaatttacccatctttcaatgcgggtatgaacatggctgtagttcctcgtgtgactcctactcgcttcttcaccgggaacactagtaccaatggttctacttcaagggtccctgatcctttaccatcctacaacaacctttacccatcaaactctagagacgttcttccttttcctcctcctcaaaccaccaagctttctagcaatttcgtctcccagggaaacgatttt

SEQ ID NO: 72409 - DNA, 491 bp, Arabidopsis thaliana landsberg
  unsure (1)..(491): unsure at all n locations
cactggatccacggcgcgccgatgctttttatttatccatccgcagctactggcccgccgggccggacggcgccctgcagcccgcctattcgggcatcaggccgaaaataacaggccccggcacaccggcggctgatttcgtcattgccgggccggctgcgcacggggtcgcgggcctggtcaacctgttcggcatcgaatcaccggggctgacatcgtgcatggccattgcgggacaggtcgaacaggcgttggccggccaattctagcccgtcatgtcgcgcaaccatgactcgaacgccagcagcgcatccgacggcccgctgtcgtcgggatagctgaaaaaataagcctcgcgcacagccagactgccctcgacgggcgcgcacagttcgcccgccgcgaccgcgtcgcgcacaaacagttccggcatcaaagccacgccgacacccgcgcgcacggnggggagcgtcatggtgaacagctcgtag

SEQ ID NO: 72410 - DNA, 214 bp, Arabidopsis thaliana landsberg
caaccaacaaatacaatggtgttgtttgctccacagcacgtggcacggtgggccctgagccaccagttgcatcctgaggacccccgatcaaaaccgaacaccaattgccgatgaaacaatatcaacactctttaatgatattgactttcttttttctctggacgttattgaccattgaaaaacataatcctacgcatggcgcgaggcaaacatt

SEQ ID NO: 72411 - DNA, 619 bp, Arabidopsis thaliana landsberg
cgcccgcgtttaggtgtgcaccgcctccgatcaggacctggccagcgccagcgcccagttgagtgcggtcgaagcgcaactgccgctgctcgacatgcaggcgcacgccagtgagtaccgtctcgccgtgctgctgggcgaacgcccgggtgagctgaatgtggatgtgtcgcccgcgacctttcacccgatcgacaccgtgctgccgatcggcgatgccggcaacgtgctggcccgtcgccccgacgtgcgcgccgccgaacgcgagtacgctgcggacaccgcgcgcatcggcgtggccaaggcggacttcttcccgcacatttcgctgggcggtttcctcggcttcctcgccggacgcaggaacgacttcggcagtccgtccacccgcgcctggtcgctcaccccgagcatcacctggaacggattgaacgtgcagcgcgtgcgcgccaacctgcacgccgccgaagcccgcaccgacgccgtgcaagcgaactaccagcgcaccgtgctggaagcgatcgaagacgtcgacaacgctggtcaccgggtacaaccagcaacacgccagcgtggacaagctgatcgaccaggcccgcgacaaccgttgagccgccga

SEQ ID NO: 72412 - DNA, 481 bp, Arabidopsis thaliana landsberg
cctcgccgatgggcgtcgcaccgatctgatcttttgctttcagccggccggcgaaatcagtgcggggctgggcgaggagcacacggtcgatgtctacccggtgcgtgacagtgtcttgctgcgtttgccggcggcgttggttttgcacgcttttcaacgattcccctaagcaatgctgcggctgacgcggctgattgcaaggcgcttgcgccagaacgcggattccaaaccgtatgtcgccgtgcatgggtgctacagtctggctgtgctgccggccacgccatcggcgccggcgcgcttggtcgccgagcagttgcaccgctgtctggcggtgctcggcgaaacgcatttgatcgacatgagcgtggtgggacatgccttctacgccgacgacacgctggtcatgcgttctgatacggtcgccgctcggcgcctgatcgaatacctcaacgcgctggaagcacatgacgtgcagccaatc

SEQ ID NO: 72413 - DNA, 1390 bp, Arabidopsis thaliana landsberg
cgcagtacaggaaggttttcaaccaacaacatgttgagccacgagtaaggagtgctgccttgaaacgtggcgctgaatacttggagagatacttccgcttgattgcctttgcagcctatctaggaagcaaagcttttgatggattctttgtggaaggagaatctaaggtgacgttcaagaattggttgcatcagaggcctgaggtgcaagcaatgaagtggagcataaggctaagacctgggcgattttttaccattcctgtgagtcaaatgtctcattatccaggcttgggaaactgtataatcttctttattttgcgtgttacaactttgaatatattcatgtaggaggaattgcgggcacaacatgaatcacaacacggagatgcagtcatggagtcaattgtcaacgaacgtagtggttctgtcttgagcaaaggttctatacttaaaatgtactttttccctggccaaagaacttcaagtcgtttgcaaattaacggtgcacctcacgtatacaaggtaggcttcaaggaaatgtgattcttgtgtggtttcctgataactggtaaccttaaaatgatcatacttaaccatgacataacgttcattgcaggtcgatagatatcctgtgtatagcatggcaactcccacaatttcaggcgctaaaaaaatgctcgcctatttaggcaccaaacttaaggaagaaggtgggggttcaacagaaagaatagtggtaacagacttgagagaagaagcggttgtttacatcaatggaactccatttgtgttgagagaattgagtaaacctgttgatacgcttaagcatgttggaataaccggtgcagtggtatgtttcaatcacagctaatattatgcaaattgcaaaagcagttttttatatttgtatcctcaatgcaggtagaaagcttagaaacacggttaaaagaagatatattggctgaagttcgagagactggaggccgaatgctattgcatcgtgaagaatacagcccggcatcaaatcaatctcgggttattggatattgggagaatattcaaccagaaaatgtgaagacacctgcagaagtatatgctgctctgaaagatgaaaattacaatatatcttaccggagaatacctttaaccagagaaaaagacgcattagcttccgatgtagacgcgatccagtactgtaaagacgagtaagtatcaatcatctgttttaatttttcacatgttacatatttaccgaatctcttccgtaattaacttgtggcgatgttttaatcacagttccgctgggagttacttgtttgtatcgcacaccggttttggaggagtttcttatgcaatggctataacttgtctcctacttcaacctggtcaga

SEQ ID NO: 72414 - DNA, 496 bp, Arabidopsis thaliana landsberg
  unsure (1)..(496): unsure at all n locations
gagggtacccatgacttacgtgggttaacaacgattgctttggccttggagccatagcagatgagggtggcagataattaactagcatctgattctgtcgagtcatatcattaagatgactctgagagacctggttttcgggcctatataaaggcttaccttgcaagcgatttgacatcgcattaccgggatttgccaaatgatgcaaatgagcagaaggtacagggagagagttgggtcctctagcactcaaatggggccatgtcccatcaggaagagcccggccaaaacgtgagttaacatcttgaatgctatcaaatggaggagccccgaattcactgtttgatgaaactaaccctacagatgaagccaatactttcaagtcttttcctgctcttgtatcaacacgngtggatgtatgtggataattttgtgacaaacttcaattttctcgtagctgatgacttacaccattcttaatgtcagaatctaaatg

SEQ ID NO: 72415 - DNA, 399 bp, Arabidopsis thaliana landsberg
cgacttctggaatcctcttaccgcttcgccctgtccaatgagaagctctcccttacttctttttttgcgtacaaactattcacccgggccgatgacatctttctggtcgccacgcagttcgcttacgatggcatttttcacaccagcctctactgggaatccaccggcagcgtgatgggaggcttgggattcctggtaaaggatttcggagaagtaaatttcttctacaccagcaaaaacaagtacggctatcatgaacagtacgaggtcggcttaaaaattaaactaaaataaagattcagacgtgtacactatcagaaaaccgctggtcatactcatctttttcatggtcttcggctgggtgaccgacggggcacagcaactcgcctttccgggtgc

SEQ ID NO: 72416 - DNA, 542 bp, Arabidopsis thaliana landsberg
  unsure (1)..(542): unsure at all n locations
acatttaatgaaaatatgtttcaaaaaccgttttaattagcttgattatttcttccaactgtttannnnnnnnnnnnnnnnnnnnnnnnnnnnnnnttattaatttgatcatatcaaagaggataccaaattttcttattaatatagccaaaatccttaacaattccaatttataatggccaagtccaatgtatatgtatctatacaatagttctttacaaaagtagcttatatgtttgacaaaagaaaaacgagcttacacattttccattttaattttttaatcttttgacgatgacattttctccattttgttaaaaaaaattaatgaaggtgtttgttcattttactcaaaagtcaaaacaacttggtttttataaatcaaaattagggttgggatccgacttgagacaatactaattaaggtaaaccttcttaaatgaaaaagctttatcgctcanaatactaatcaagtttcaataaagtaatgaaagaaagctttattaattatgtcgtgttctgcaccgaagtgatatggtcgg

SEQ ID NO: 72417 - DNA, 436 bp, Arabidopsis thaliana landsberg
gtggtcgaagtaattatatcaccaaatatgtaaatatatataatattggaccggagaggttgtatagtttatatgtctctctcttataaatacttcatatcactccactccctaaaccatcacaactacacacactctctctctcagattgatgtacattcttgcccaacggagtagaattgcatgaagtggagtagagtataatgcagccaaggatgacttgccggaacgttgttaaccatgcatatgaataatgggatgaataataatgggatgaacatattttttggcaagttggtccttcggctacattttgttctcttttttttatgcaaactttcccttgggaatattctacctttttcaattcattcaaatacgaccgatggtgaaacggaattaacatccgacgggtatggaagtatttaacaccata

SEQ ID NO: 72418 - DNA, 559 bp, Arabidopsis thaliana landsberg
gataagtattatctctgttgtgtcttgtctttcctttggagtaatgtatacaaatttcattatttagtatgacagatattgttccgcaagccgcatgaaagaattgaagtttggtccaaaaaaagagccgcatgaaagaatatttctgagcttcatcacgttcccctttatgagtagaagaattttgctctatcgaatcagcttcactagccataactccctgatatatttggttttgtaaatatcaaacacaaaaaaaaaagcgaccagtgttcctcgtcatcattcatatgaaatatagaacagaataattacaaatcaaataaaaagacccatatggctttgattagaatctataactcaatgaatcatttctagatcaatgtgccctaataggcatggagagagagagagagtctatggtatatggtgagagacagaaaatacatccaaaatttgtacaactatagcactagaaaaaaacccgaagttcaaatcatcataagaaccaagaaatctgacacccatatttatggaacaccgatcattagttttacat

SEQ ID NO: 72419 - DNA, 568 bp, Arabidopsis thaliana landsberg
  unsure (1)..(568): unsure at all n locations
actccgtagatcagtcgtttaaaaaaagacatatgggttagaccacagattcactacatataccacataaattggaattaactcatcaagtttatgtgtgaagacatagtttatgtaaagtaggtgaaacatgattgggattgatatatagcatgacttagtctatgctaatatttggtctaagcttaggttatttaagccaagctgattagacaagaaccaagtggttatttttttatcaagtggaaaatatatagtagtatgagagctaattgaataaattagacatgaattgattatgtatttacctaggtagacgagattattatactcactaagcttaatagatcagaatcctgtttaattattaagacggctagtgagcgagaccaaagattcaataaagaaggacaatgaggataggtagtcaccgaatatagcacaatgttgtagcctaagaccattgcaaacattgtatttaaaaacaatggttaataaggaatgatttatcaataaagttctaaatttgagacttatatagtgcanaattaaaattaagtacaacatg

SEQ ID NO: 72420 - DNA, 403 bp, Arabidopsis thaliana landsberg
aagacccttatacttcatcatcatacgaaacatcctgattgaatcaagttcttgtttataaggtacagctaatgcatacttacactactaaatgaaaactcatgatgaggcataagctatctacttcgcaagaaaagctttcatcctaggggcccattcatccataaaaaaactatttaataataaatattagcaccatataggagcataacttatatatcacagaaccatttattaaacttgacttaatcatgtacttaagatcggacacatgacatggctctgcaaaacataactcaggtcaagtatcccttgggatgacatgcgttatcggggcattgcttctcgagcattaattagacactagaaagagagacaacctccagagtcacaaccaaaggaa

SEQ ID NO: 72421 - DNA, 512 bp, Arabidopsis thaliana landsberg
cctgccgggccgggagccgtcccggcgccgggcgttaggattcgcagcggtccggcggggggacgggctgacagtccggcgaactgctcgtcgagccgggccatgctggtggagaagaccagggccccggcgaccggatccgggatcatgagagtgtgctgatcgtacgaaagcacgaaacccgaggacgtggtctgcgcgctgcgcaggttcgtgttcgagacgcgcatcgggcccagcgggatcgtcagcgcgaacctgttgcgcacggggaatgcgtcgacgctcacctcagtcccgtaccggacgaaaacggcgccgagcgagccgacctgcgtcgtcgccacgagcccgtcgggttcgccacggcgcggctggacctcatgggcaaccgtcatccgctggacgctgtcccgcagttcgtgagcgcggtgactgcgcatcatgtcgggcgactggaagggaatcccctcctggcccgcgggcatgtccgccgggcgagcctttctcat

SEQ ID NO: 72422 - DNA, 252 bp, Arabidopsis thaliana landsberg
  unsure (1)..(252): unsure at all n locations
aaaaagaccccaaacccacggaccgacacaaagaacgncaccccgaaggaacgacaaaagcaccccaaggacgccaacggaaaccaaggaccgcggaccgaccagaaaaccccgagcaaaaagnggaaagcaacaaanggacgcacgcaagacgagcacaaaggggcggagaaaggcaancacacaaacncaaaaccagcaaacgaaagagnaggggcggaaaaaggggggaaaacacaacggaccaagaac

SEQ ID NO: 72423 - DNA, 517 bp, Arabidopsis thaliana landsberg
cagaaacgttatatacaaataaattttaaacaaattttttaagcatcacatataaaactatagaaagtgtatagaggggttctcatcattaatttgtatttatattttcatatgtgtggtatgtctcacctgcaaaaagagcccgctatctctaaattaatatacttcagacctatgtatatcattagtgctccacccccacaaaatctttattaaataatcgttgtatgtttttaaaaattagaagatgttatgataatgtttccatgcaatgcaaatggacgcactttagcttatggagacccaaaacataaaaagaaataaagttctaaagggacgaaatgatgacaaattacaatgattaaaagttggaaacagtttcatactcacacgatctaacatactatagaccatacactttgatgtcctacacatacaacaaataaatgtagcataaatatttcatttatatatgtaatacttatttataccactattaatcaaaactatagtgatt

SEQ ID NO: 72424 - DNA, 407 bp, Arabidopsis thaliana landsberg
tcagatgggatgtcatgctctgactaaaggtacaaccagcgtgcctgcgtaataggcacgttttagagttttacgagaccaactaacgaacacgagagcaagcccgatatatatggggagctatgctgccaattatgaatcatggcggaaacgtatggtgacccatgctacgccttgatctttatgactcactctaaatcaaatgcaccggtaactcgttgactcaccacctttgtgactgctggcatacaaaccccaccagtgttctacataatgtcaagataatgaccagacaccaacagatgttaaagacccacaaaaacctggtcagagatacacaccacgaatcatgtcatcatctatgaggcgctataacattatgatggtaatgagcgaccatcccatat

SEQ ID NO: 72425 - DNA, 572 bp, Arabidopsis thaliana landsberg
tcgaaggatcgtaaaggttctccaagcgctacggcttcctcgaccgtctccggcggggaagccaggttgcttttaatcttggccaggttctcggaatgcgcttccttcgctgaatatttgaccaaattcaccagtagcttatcgatctccgtagtatcgttgcgccagtttttgctgtatttcccgaaccattcttcgttcagaaaaaccactcccgaataccggtaaacgtccgaaaatccgaacgcatcgatcacaatcggctcagtgggccactctgcattcaattctttgtcgctatatcgctcgcgaccatcgccgaggagggcgataaacctgtatgtttttaccatggtgacaattatttccgctcaatatatttcgcgggatttactgctacaagcgattgtttaaaaattgttatacgtgcccccgagctcttttcggggatgattgtgacaatcggaatgttagctaaatttacacctgtattaaggaataattgttaaatgatccgaatttcccaactcccgctcattcagaaccccgacagttttatgccacggaacata

SEQ ID NO: 72426 - DNA, 188 bp, Arabidopsis thaliana landsberg
cattttctattggcgggggtcaataaatcatagattattttgtcaaaaaaaaacaaatacttgtgaaatctcgttttttttatgttatcgttccatagacagcacttgtgaatgaagagaacctttttgatcattgaatcatttgatattatacaccagtcttaccaaatcctaggaaaatccgatgg

SEQ ID NO: 72427 - DNA, 549 bp, Arabidopsis thaliana landsberg
cagtcttcttggctgcaactacgcgatcgtcaggtttaactttccggatcggtaggctcgacagtcttgacgtgcttagtttcgttggaaggttgtccaacaataccagtaacgtccttagccttcttctgcttaatcttagtcttaggcgtatcagccttagaaaccttatccttacgagaagccttgaacttatccgcttcctgaaccttcttgctcttggaatcagtgtgcggaagaggctcgttgttttcccagcgcttctcaacaaggttcttaggagtcttcttctcgtgagccttaacggcttcgtctacagaagcttcctcgtagtagcggttgttgtcatgctgttgctgagacttggctcggaactccgtaaaaggaacgtccttcttcttttcaagttgctcatcgcgaacttgacttacgcccttgttacgctggcgacgatactcatcttcttgtgcagcgcgcatatcgtccagataaggaccatcaatcttggggtcgcccttttggacaatgtgtgcgctctcgaaagcaacg

SEQ ID NO: 72428 - DNA, 464 bp, Arabidopsis thaliana landsberg
  unsure (1)..(464): unsure at all n locations
gaactcatactaaaaataccggggaccaggcgtttgatatgtgcaatggaaccgctcctaatcaacaatgtaatgaattattaaagaccaaggaaaactggctatatgatatgaatattttccgggcattcnnnnnnnnnnnnnnnnnnnnnnnnnnnnnnnnnnnnnnnnnnnnnnnnnnnnnnnnnnnnnnnnnnnnnnnnnnnnnnnnnnnnnnnnnnnnnnnnnnnnnnnnnnnnnnnnnnnnnnnnnnnnnnnnnnnnnnnnnnnnnnnnnnnnnnnnnnnnnnnnnnnnnnnnnnnnnnnnnnnnnnnnnnnnnnnnnnnnnnnnnnnnnnnnnnnnnnnnnnnnnnnnnnnnnnnnnnnnnnnnnnnnnnnnnnnnnnnnnnnnnnnnnnnnnnnnnnnnnnnnnnnnnnnnnnnnnnnnnnnnnnnnnnnnnnnnnnnnnnnnnnnnnnnnnnnnn

SEQ ID NO: 72429 - DNA, 150 bp, Arabidopsis thaliana landsberg
agaacatgggtaggagcgtgcatatacagactagacatgagccccacgacatccgtgtgggggaaacgtatattcaaaattaacagccggccaataaacactgtacatggactagcaaagaccaatgatactccaggctcgtgacttaag

SEQ ID NO: 72430 - DNA, 1007 bp, Arabidopsis thaliana landsberg
gtagggatgatgggtggtctgatagggatagtgatcattataggtttgaaggataattggaagagaagggattctatagtggtgataaagatcagaaagatggggacttgctttatgatcgtggtagggaacgggaatttcctaggcaaggacgtgaaaggagtgaaggagagaggtctcatggtcgtttgggtgggaggaaagatggaaacaggggggaagctgttaaagctttgtccagtggtggcgtttcaaatgagaattatgatgtgattgagatacaaaccaagccacatgattatgtcaggggagaatcaggacccaactttgctcgtatgactgaatctggtcagcaacctcctaaaaaacctattaataatgaggaagagtgggctcacaaccaggaaggtagacagagaagtgaaacttttggttttgggtcttatggggaagattcgagagatgaagctggtgaagccagttctgattactcaggggctaaagcaagaaaccagagaggttcaacacctggtagaactaattttgtgcaaacccctaatcgtggttatcagactccacaaggcactagagggaacagacccttaaggggtgggaaaggaagacctgccggtggcagagaaaaccaacaaggtgccattccaatgcctatcatggggtcaccatttgcaaaccttggaatgccaccacccagtcccattcattctcttactcctggcatgtcgccaattccgggcacttctgtcacccctgtcttcatgcctccatttgccccaactcttatatggcctggggcccgaggtgttgatggtaatatgctacctgttcctcctgttctttcacctcttcctcccggaccatcaggcccaagatttccttcaatcggcacaccaccaaacccgaatatgttctttactccaccaggttctgatagaggaggacctcctatctttcctgggtccaatatttctggacaaatgggacgtgga

SEQ ID NO: 72431 - DNA, 394 bp, Arabidopsis thaliana landsberg
ttctcttaaaaattatctgcttctatttttaataataagttagaacggacttcgcagcataaaagcgaggcgcggatttagagatatcgtcacttgactcctgtctgacaaatcctcttcgccaatttcagtggctctgctgcttcctttgttgtgaagccacatagattagattgaggaatgatccaaactcatgtcatacacacatttgtaatctgctacacaaaatacttttacaaaccacacacactaaaatcttaactctccccactctttgccttgccctgggctctagaacccaacgtgactctccagatagacttttggagtcacaccattgagtttgaaggtacgtgatatgcttttcctttctcttgggaccgatcattgatca

SEQ ID NO: 72432 - DNA, 573 bp, Arabidopsis thaliana landsberg
gccgcccacggtcacgggggagagcctggtccacgagtagtaggtttcgcccaggaacgtgatcggcaggaggatgaagccgaacatgagcccgatgttccgcggctcgaagctggtgccgagaagcaggccgaggccggccatcgcgacgcacgcgagcggcaccagcgtgacgatgatccaccagtgcagggacaggtgggcggtcacccccggcgcgtgcacgaccgaggcgatcggcaggacgatgatcgccgagatgatcccctgcgccgcgccggacagcaccttggcgatggccacgagccagacggggcagggcgcctgcacccggtcctcgatctcccgggtgaagccgaactcctgggccatggccagggcgatggactgcacgccctggaacatgatggagatgccgaccacgccggggaccaggacggtcgcgaaggccgattcggcggcggtgccgctgccgccgccgacgccctggccgatcttgggaaagacgaagaggaacacgaagcagagcaggaacggctggatgatggtgcgcagcacgaactcccagaagtg

SEQ ID NO: 72433 - DNA, 400 bp, Arabidopsis thaliana landsberg
cagactgcactccctactctcactttgccctaccgtacccgcattcaattcaattaatcgtttttcattccaacttcctttaacctccttctccactctataccatctacagtcatgaacttcctcgctcgctccgttcgtgctgtccgccccgttcgcttgggtatgaattcgtctcttctctccacttttgatccttccgatctcaccttccatcagcttccgatcctttttgatccctcccaaataatctctaaaaaaaaatgcatgaatgtcaccctccctagaaacatccatgatcgatcaaagatgatgtcattcgtatccatcttacctctctccccattgatctcaccatacgcacacacacatttcatcttttggattgaccaactgactt

SEQ ID NO: 72434 - DNA, 604 bp, Arabidopsis thaliana landsberg
  unsure (1)..(604): unsure at all n locations
tcaacaataaagaaggggataaacgtgaaaaagttctctcctttgaaaaaaaaatacggtggaaaagatctctgatggccactgacatgatgaattttggtaacgaggttacaaattccaactagttaaaaactgttattaaaagagttgaaccaatgtaatttggtagcgagtttgtttttggtataaaactgcacgggttcaaatcatatcatcgttattgttatggtatttactattacctataaggcttacaaaattgatttttctatctaatactgttatttggtttctaaggtgtacttccatgcttgaatttttaaagtagagtaatttcaaatttatctacatgtcttgagtttcttgtattgaaaaaattgacttttatttttggaaacctatggaattctttagatattcttaaatttttattaaaaaatattttccacctgaaagaattattgttntgcaatatctttcaaccgtttttccaaatacttcaagataattgagtcattactcttttaacattcaatatcatcacattaaatattcttttatttttggaaatgtcaaatttattaatcaacaaaaaaatatattt

SEQ ID NO: 72435 - DNA, 526 bp, Arabidopsis thaliana landsberg
taagacaacaaattatatgttggtgtggtgggctacaaaattttatctccagaccccagaggcgagttacttgccgatcaatctatttatttgtatgtttctcaattatagaaaattcggatggtcatgtaatacgattttctgtctctttttggcgaaagctgctaaagaaagtgtgtcaagaataacatacttacatgtcttgcttgtctacatgttagtatattattcttacaaaggacatgtaagtatacatgaataaacattctttagaatgtaaaagaataaccaaactaaccggattgaaaatgttagataaactttgtctcttccttgtatgaatagggtttaacctttcttagcaaaaaaataaattggctaacctaactatattttattatgaacttgagattaaccggttatgtacagtgtgaatatgctacaactaactaattaagagatatgatgggtggtttgatcgaattacttttacttcatgacagctgagtgggtccaagtgcgaaat

SEQ ID NO: 72436 - DNA, 761 bp, Arabidopsis thaliana landsberg
ccgttcttgccggacttgttttcattaattgttgacaatttatgttgacgattctgttttaggtgtcaatatttgtcaatagtagatttccttatgattgacggtaaaggatccttgcaatgctttatctggactcgcgccgagatccggtttccgacagcgccgcgcccagggcgtcctccctgctcgagggcaatgcgcccggctccgatgtcgaccgcgtttacgccgagattttcgacgcggtcatggacaggcgcctgctgccgggggccaagcttaccgagtcgacgctgtgcagcattttcggctgctcgcgcgcgacggtgcgcggcgcgctggcccaactggcctacgacaagctggtcgtgcagttgcccaaccgcggggcctttgtgtggcgccccgacgccaaggaaaccaaagacgtcttcgaggcccggcgcgccctcgagtgcctgctcatcgaccaactgctgggcatgcccgacctgcctcaaaggctcgagcctctgcgggccatggtcgctcaagagcgccaggccttcgagcagggcgaccgcgtcagctggctaaggctttccaatgcctttcacgtcaagatggccgccctgcgcggcaacgatgtgcttaccgaaatgatgcacggcctgtgctcgcgcacgaccctgatcatcgcgctttacgacacgcccagttccagcacctgctcctacatcgagcacgaacaaatcccttgacctgctgccgttgggcaacgc

SEQ ID NO: 72437 - DNA, 748 bp, Arabidopsis thaliana landsberg
tttgaagctccctggctcaaatcatgtaagggattgtgtgcttacattagctgcaaatctcttattgatttcgacacttctaaaatcctctctgagattctgcaacatccaggtacatctatctttgtaatttcatcctcacgagattaataaaaaaggaagctttacattgtactcactgatcacttggtttaatagcatatccctcattatgatcaatgcaaattgctcgtgtctctatcacagaaggatctgataagttttggaaccaagagaaaccaataactaaccaaactaaagaaacttattgtagcatatggatgaaaaagctatatgtcctgcattcgttttctgatgagttttctctgcaattttgttcttgtttagattcaaatactcagaaaaagctatatgtcccttgggtggaggataagaacagtaacatgcgcatgttgcacatatctcatatggaagaccttgttgcaaactcaatgaacattttggaaccagctcctgttgatgcccaagggaatgaccgtgaagatggtagtgctctttttttctatgttgctaccattataagcttcccgtaatgagttcaaactctccttcttgaaatttaaaaccatttttctatttttgacaggtgtttgcaagcaagatgaaacccaacgaattgggttcatctttgcccagggtatgggaagaaaacctgcattctattttccccaaaaactttcacctttta

SEQ ID NO: 72438 - DNA, 610 bp, Arabidopsis thaliana landsberg
tacgaactaggacacacatttagaaacaacaaagccaaaacaatatttgtccttagatttcatgcgaagaaccaaaacatttcccctatgttttcttgtacatttttctccattttcatttattgtcacaccaagatccaaatccgtcaataaaaattgttaacaagagaatgcaaaatcaattaatgataattatcaatcgccatttgtgactattacataccagaaaaggaaacagaaatgaagcgctcttagacacgaagaggaaacgccatgcagaaaaaaagttagaagctccggaagatttttttttttttcaaaaggatttttggttttgatgatgacgagagaaaattcaagtaacaagaactagcaaaacaaaatcaaaattaaagttctaattttaaaataattttcttattttggattcgtaatttcgttgattttctttggataacagaaacttttcttggccttcccgtcactgtcgcatgtaactgtttctaattctagattatagaaaataatcaaatgatcctgttactcttaatatattatctcctataaatttttggtaacaattaaaatcgagaaagtaacccaccgaatt

SEQ ID NO: 72439 - DNA, 579 bp, Arabidopsis thaliana landsberg
  unsure (1)..(579): unsure at all n locations
gaactcttattttcctatgcagtgcaattaaagattttatgttgcatggaaactccacgtcactcatggatgtggtttctttagtcttgttttttttaatcgggctgttggtattgcatatttgtatattatgatcatgcctatctataaaaaaaatcaaatccgccaaaaactaaaaagcacattttggatatttctgatcatttatttcgcacaaacttcaagttttcatctactcctatgaatgatttcatcgaatttgatgtccgttatcttaaggttgaaaattgttgacaactcacgaatttagtttagtatgagaaagaataatttcttacaaaattgaaggacgattagctcgaagtctcaaatatattggagtatacatcaactaaacccacctataagtttttcattatttataatatctatgtcacattctttcatttgacatataataaaatattttctgttatctaataatagatgtgcttatttcttaagacanaatatttatttgtgtctgtgattatgctttcccataaaagattngcgatatatgtatatatatatatatat

SEQ ID NO: 72440 - DNA, 104 bp, Arabidopsis thaliana landsberg
gccggaccccgaaaacattgggatttatgcacacgaggcacacccgaccgggccaggagaaccacaagagggaccacagcccaaagctgagcagacgagaagga

SEQ ID NO: 72441 - DNA, 159 bp, Arabidopsis thaliana landsberg
ttacaacgagagaaggggcaaaaaaagcggggggaggaaagaaagagcagcgaccaccccccgaagacagacgagaaaaataccgaggaaacggaacaggataacgagatgacacacgagatacggcgaagcgcgcagacagaaacggacacgagggga

SEQ ID NO: 72442 - DNA, 558 bp, Arabidopsis thaliana landsberg
  unsure (1)..(558): unsure at all n locations
gcctgcggtaggctgttgatcgcctgctgaatactggtaaaatccccgttgcccgactggtccacttctatcacaggcgcctgttgcgcatgcacaggataacctgccgtgcagagcagcaccaggaatatgcggacaatatgcgtagccagttttttgagcatgttttatttaacgcctttcggtacctgtttcaccagccattgaaccagttcattggctgccttgaaattttcgtattcagcgggcagtcttctgccatcggtatattcattgtatatccagggatcacctgttgcgaaaacagtaccctttcctnnnnnnnnnnnnnnnnnnnnnnnnagatcatcttttttcaggtaggcttctgcaggcgctttcagggtcatggaggaaacttctttctggtatatctttttcacagacggaagtatcctgttgcctgccggcacatccactttatcccgagaaaaatcactggtgggtacacgggtgtagctgtcttcattaaatggatgccgaacttttcgccagtatattataatgttcaaatcagca

SEQ ID NO: 72443 - DNA, 297 bp, Arabidopsis thaliana landsberg
tgagcgcaccgcacctggacactttgttggcctgtctttttttttcgccaccgaaaattgaactttatccttccccgaattaccggcgaccgatgtgggggcagcctaaaccgggacaccgggcttgtggcagagcaaagaatgcgtcgtgctgcttggcaaaccgttggagtgccgtaccctaaatggctagagtccattatccgaaagcatcactagcttatgctctgacctgcgtagcatggggcacgtggaatcccgtgttattcatacaggaccaccttgcaaggataccta

SEQ ID NO: 72444 - DNA, 440 bp, Arabidopsis thaliana landsberg
  unsure (1)..(440): unsure at all n locations
tcaactcacagtagctagcctcgtcgcctgttacgcacaggatagtgacagaaaaattttatcccttcaccggagtgatgaagatgcttaacacactatcattcttagtactttatcatattgnnnnnnnnnnnnnnnnnnnnnnnnnnnnnnnnnnnnnnnnnnnnnnnnnnnnnnnnnnnnnnnnnnnnnnnnnnnnnnnnnnnnnnnnnnnnnnnnnnnnnnnnnnnnnnnnnnnnnnnnnnnnnnnnnnnnnnnnnnnnnnnnnnnnnnnnnnnnnnnnnnnnnnnnnnnnnnnnnnnnnnnnnnnnnnnnnnnnnnnnnnnnnnnnnnnnnnnnnnnnnnnnnnnnnnnnnnnnnnnnnnnnnnnnnnnnnnnnnnnnnnnnnnnnnnnnnnnnnnnnnnnnnnnnnnnnnnnnnnnnnnnnnnnnnnnnnnnnn

SEQ ID NO: 72445 - DNA, 521 bp, Arabidopsis thaliana landsberg
ttttaccttgggtgaagaagaaagatgtcttcattctatgataatactttcataaaccagcaatgattttcctactataaatgaatcacgtcctgaaacataatgaaagctcacttttgcagaactgtgctgtcattgccacctattatcaatggtgcacattcagcaattaccttacagacaaagaatgtcttcattgaatgtactgcaactgatttgacgaaggccaagattgttttgaatacaatggtatgttgttaacaaatcaaacctacagtgctaactgatcaatagctaactaatcatttaacgttttccaggttacaaccttctcagaattttgtgccagaaaatttgagattgagcctgttgaagttacatacgacgatggaaagtcatacatctatccggatttagctgtctatgaattggaagttcctctctctttcattacagactcaattggagtctcttaaaggtggaacaggtaatagagacatcactgttgtcaatttgtaatg

SEQ ID NO: 72446 - DNA, 426 bp, Arabidopsis thaliana landsberg
cgccacacctggatgaggcgtacgatgtgttccgacgcattgcctgtttgccgccatatagcggttgcgccatttgtccggattggggacagcggtatagagctgctcgttctcttgcttccattgggcgatgaagcgctggatcgagcgatcggagggcagacggatatcgtcccgcttaccgaagcgcgcctgcagcccttgcttgacgtgcgcgcaactggcgtgcgggtattcatgcagcatggccagcacgaattccttcacttccttctgcgtgccgatttttgattcacctttacggttgccgtaattgcctgctaggcgcgttaccccttgggttatcagctcaagacgcttgcggcgcagcgtggccgcgctggtggacggtacagtgatccggacttcgtccggcacttcaatttc

SEQ ID NO: 72447 - DNA, 474 bp, Arabidopsis thaliana landsberg
aattctcatatggacattacttatctctctttgtgctcacgacttcttcttccggggatccggggctaaatgttctccatatcccctatcatatgcgtctcgatctggcttctaaaaggcaaggcatgcttaggctcctgccgcccagcagccgtatgtctgaaatacttattacctactccccttcttgcccctttaatatcaggcgggatcaaaaagacgtatctgaccataacggcacgatggacacgtgtgcatgccgtctggcaatgaaagcctgatgctcccgggatcctaaccaggccaaccctgcctgcagatcgaccatattccacatattcgcatcctaagagcgcgccctatgaagcatagggactcatcgcgagattttcaaattgctgaacaaactcctttcttaccactttctcgaatattgcggccctatcccctgctcttccaataaacactgcccac

SEQ ID NO: 72448 - DNA, 615 bp, Arabidopsis thaliana landsberg
aatgcacgaaaaattcaagaagatattcacttcatagaaggtggtcaaaaatcgtatttaccctagaagaagcatacccgtaatccgttttatcgtaaacaatcccaagaatgtagacggtcacgttttatactatctatcatcacatagaatatttattaatattatttaacagtgtattattaattacgatagctcttagtaaaaaatattattgtaagtttgtaattattctaaggaatgttgatttcttataatcaagtggtattttttcagacatgcatgtactgatgtacatatccttttttatatggttaaacagtttctgaaatatacagatttactagttccctaagtcgggtttcatgctgacatatataataaatgacaaaatatgtaattttttttttaatccataaaagactaagactaattcaagtagctaaaaattagacatacggaatattaaaaaatggttttggctcaatttttgtacaatgctcttagatttttcatggatttatggtcaagttttgtatgagtgataacaaaaagtcagatctaatgtagtgtataataatttttgctctataaaattgattataaattgaaatt

SEQ ID NO: 72449 - DNA, 579 bp, Arabidopsis thaliana landsberg
gattactaactaaaatctaatcgcttgtcttatacatatatggatcatgtcaagcatttcaccaggatgtttactgtagtgtgcttgatttgatgtctgaaaacaaaatcgcattttgtttttttaggatcatgtatgtcaacatacgttgagaaggacgtcaaattggctattcattttaagcaagagacactgatatataaatataaatcaatgtatatatgcaacatcaatttattatcaaaacatattccaattaatatgtaggttggaatgatataaaccatgggagtgaacggaattgagattaaatatagcggaagtctagagcccgacggaattccaattgagatttatccccaacaaagcatgggagtgaacggaatctaatattgacgagtgtttctaattcaacgctatataatatgatatcaaactaatcatatttcttataaatatagtatttaatatattataataaatttccatggtgacttttcaatgttctgagacatgccttaattaattatcatttaccaactctatatacaatacgttatctcgtaatatgaaattaac

SEQ ID NO: 72450 - DNA, 206 bp, Arabidopsis thaliana landsberg
  unsure (1)..(206): unsure at all n locations
tctcgcgcgacggcctctgatatcaacgagctngtggcactgtacatctgcagcatgtcgtgataggttcgggcaatctgtgggtaaaagtaagagccggtggaagagcatgccgaaacgttggtcttcatgatgtttccgataaccttgatgttctcagcatcttgcctaattgtttattttatgttggtctgctttttgatttt

SEQ ID NO: 72451 - DNA, 552 bp, Arabidopsis thaliana landsberg
  unsure (1)..(552): unsure at all n locations
tccacttcctcgccgtcttcgccgctgcccttttcgctctcctcgcttactttgctcggtatttcttcatgtatgcgggggtggcctctagtggcttcttggctttcgcaaccgccgctcgacacctatcggaacagaatttgcctcgcccaacccgctgcacatagtagaagcgcccgcatccttctcgctcgcacaggccgaaggggaacaactctgcgagtggcaccccgtcgaggtcatggcggtctacttggtcgaggatgaactgacagatgcccgtcaccaccgagccaagttcagaaaagtcccggcgaagaagtattgtggcgtcctccctctccttattgagcacgagtttaggttcaagcgttatccgcagattcctcgaatgttccatcaagaagtttgccgcgtccctattcaacatcgaggcggngacaaactcttcggcgtccatcattgagaagattntgggactgttgatccaacgcagcacatcgcggagcgggctgcggtaatgatctgctaattcagtcagagacttcccag

SEQ ID NO: 72452 - DNA, 538 bp, Arabidopsis thaliana landsberg
ccaatatcatatcatagaaatattaataaccttttatcgtctgcaattctaacggtaatagattggggtttggggcccctaattaacattcaattctgcaaatctttggcatgatatttccagcttatatatgtggatgaacatatatggctaaatactacgacgaactagcaacacaagacacaagattatttcaaaattcatttttttttctaaatgatgaacgtttctctcaagctgtgcctcttgattatcattttgggcatcacatcttgtaagtgtttatatatttacatatgtaatccattttcacaaaataaaaaaatcaaatactaatcatatgtaatcctttcgaccaaaacaaaaacatattcaattattttataagcttaaacctactgattcatttgggttgaaaaacatttactgtgttaagctattgaattatttatcggtttagaggcccaattgttcgtagagaaacaaattccaacacccttatgattaatgaatgaacagattttggatccgaagccag

SEQ ID NO: 72453 - DNA, 606 bp, Arabidopsis thaliana landsberg
atactttgtatcgcccttaagcgagtaatcaattacacccggtttataaacaaaattatatttcatctgttcactataaacccgggtaaagtgaccggcttgattttataccaaccagttcccatagattgtgcctgtctatgtcgttaccatactgatcaaccggctgagaacgatatataaaggctccagaaggaatgaagtaatctttatccagaactcctgaagaataaattacattaccataaccatcttttactgttaatttaatccatgcctgtattaaatctagcggcccggtaggaaaattgtgccctgatttattgtttgtaacggtaatgtctatcccaacattttgcccggcactaatagaatcggggatacctaattgaataggaatgttcaggccattatgccacttgtcttttatttcaggaatttgcatttctcctttcagccattcttccaccaactctacctgtttttcactgcccggaagttttaataaggccggtataaactggttaccgccaaggaaccctgggcttcggtgcttattatcattagggggtcctgctataatccaacgaattcaccattagcccg

SEQ ID NO: 72454 - DNA, 160 bp, Arabidopsis thaliana landsberg
ataggtgttctcgattacccgtgctttgtgatctagccctgctctctatagcctcctggtagttgacgggcgctgggcccggaatctcgctgccgtctttgtcttccaaggtgtagaggtagacattcactaaatcagctcctattcatcgctgagggat

SEQ ID NO: 72455 - DNA, 325 bp, Arabidopsis thaliana landsberg
caaaccccctggccggtatatggatgagatttttctacagacatgtaattattatctgtcacaaactctttatgggccagggcggtgatcatagaatcggccatttgcttatactgtaaaaaatcagccatatagttttgtccggcaactttacctgtacaaaaaagcagaaagccagcaaaaacataagtagaaagcagtagttttcttttcataaaaaaggggtggtttataaaaccattcctaaatatacttcctgttgttgatcaccgcaaccgcgtacaatttatacacgactaataatgtcagttggcggtaaccatac

SEQ ID NO: 72456 - DNA, 499 bp, Arabidopsis thaliana landsberg
cgtaaaccatcttctgatcttcgtgattgcaggtacgttttaaatcttatcacttaatatatgataatatggttgctattttcatattaacactatttcatgttgttgtgttatagtaataatatcttgaggtgtgaattggtcggttacgaggctatcaaattctatgaggattttaagaagtggcaatacgatgttattatttgcgtgatccgatagggtgtcgtggacgtgtttcaaggtacgtatgcatttgtaacccgaaattattttatatttttgtgggttcccattatcttttatatataattattttaaatagatgtctattaggtaaacgatctataactgcaaccgagtgcactcagattagtttgaatcctcccattccaaaagttttgaattttagatcatcgtgagttttcttattatggatccttattctacattgtttcaccattattcttcttaaccagtttgtgtggtaatctttttattt

SEQ ID NO: 72457 - DNA, 514 bp, Arabidopsis thaliana landsberg
catggccgtgcgccccgtgggcatcgagagcgtgatcctggtttcgggcgcctttacctcttgaaccgagcacttcgcgcattccaacgcccccgagtacctcgcaatcgaacagcagtatggagatttacctgatcgaatcacgaacttgggtgatcggctcaatgcgatcgatgcggccagcggaggggcgttggatatctcggcggtcggtcaagccgctgtcgatgtgctggcgatgccacgcggccaacgccccttccgcgtagtcattgacggccagcgcaaaggcacggatgcgatcgacgccgtttaccacgagaaacaggtggctttcctacgccaaatgggactcgaagatctgactctgcccgcatcatcaagcgcggtgtggccgcgcatcaatcaattggagttttgaccatgaggattaatataagcaaagctggcatcgtgacgggcgcatcccggggcattggcaaggacattgcgctgcgggtagctgccgatggct

SEQ ID NO: 72458 - DNA, 957 bp, Arabidopsis thaliana landsberg
cattaaggtgtacaaggttgagatgcgccatcgagccccgggtagttggtcaaccccgaaactgattccgtgtaggacatgcatgagtgagatgaagcctgtgatgtccgcgaggaaggaagaaattaactggttgtttcttctgttagggcaaatgttgggatgctgtactttggaccaactaaggtacttttgtcagttgaattctaaacatcgaaccggttctaaggatcgtgttgtctacataacttatcttagtctatgcaaacagctcgaccccgaaggaccatttaacctgtgacttataagaagatcagatcgtatctttagcgtttgcttttggtttgcatcgtaattttattttttttatttttttgcatcgtgtttctctttagggttttgaggatgacgattacttttattgataatttgcgcttttgtattattatttcttgtgataattactctggtaatcaatacgaaaaatactttatttaaattaaggatatatactcatagaaaccataaaatgaaagcaaaagttgaaggaaaaaaaggggtcctgaataaaacttttgtagattcttaattcgtttgttaagtcaagatcatatcttttcgttattttaatttcttatatggaagactcatcaacttgagcctacaagatctacactatcattaatattctctttttttgttgtgaggaatagataaacacatatgagtgtatatagcgttaataatcatttttgtgatgaatggataaacatatgagaaaatcttattaatttaatgagaaaaatgaaaatgtcatgcctttagttttaatttttgttttaactttacgattatcattttctttttcttcttacatatcttttcttatgtcatattgtattatttaaattcgagtgaactttttgaattataaacttgacaaactttcgagaatat

SEQ ID NO: 72459 - DNA, 531 bp, Arabidopsis thaliana landsberg
  unsure (1)..(531): unsure at all n locations
tcggaaaacctgactcgttttacgaaaagtacattgtccctttcccgcgaaagatctttgatatggggaacgggggataaactgctgcgcagtccttacaccgttctggttttcaaaattcaacaaataggcaccggttggccagtcggctacatggatttcctcgcttgtggacgccttcagggccttccggtgcagaacctgtccttttgcattgaaaatcgctattgcacctgtggccgcgttcttgaattcgacgcgcaatacccggtcggtcgggtttgggaagagctgccagagcatattcttggcaccgatctcgttgccnnnnnnnnnnnnnnnnnnnnnnnnnnnnnnnnnnnnnnnnnnnnnnnnaatctcactgaacgcctggatgcggttagtaaatttcgcattgagctcgatgtctttgtcttcgatagataacgactgcccattgagtgttttcaatgtctcgtaaggggccgaatcggatcttttgcgttgcaacacgtaactggtagcagtctt

SEQ ID NO: 72460 - DNA, 147 bp, Arabidopsis thaliana landsberg
ccttgccctttggggatgcacttgcaaactcaggtagaatgcatactaaccagggcggcgtgtaacaatattaccccacgacgcaccaaaccccaaagcggtgcaaacagctaaggtgcctgcgccaaagtccttatagccttcatc

SEQ ID NO: 72461 - DNA, 511 bp, Arabidopsis thaliana landsberg
acccaacggatcaagaattgatagaacatttagaagcgaaagtgttagctaaagtacttatatctcaccctctcattgacgaattcatcccaaccattgaaggcgaagacggcatttgctacactcatcccgagaaacttcctggtacatacacaccttcatgcagtccatatatcacattcttgatatatcttcattatatgattatttgataagactaatatacacaatagagcattgtgtcacaccaaagtttgattttgttttagttgagtcacaccaaattttatatctcttatactttggtcacaactacactatatacatacctttttgtataacctatacatctatatatatacattcttcatgcatatcttatttataaattacacatgcatgtcttcattataatatatgattgcttgatatgactaccaacggagggtcaaaccaatgttttgatttttcttttcttttcatttggtcataccaaagtttgaatcttttt

SEQ ID NO: 72462 - DNA, 222 bp, Arabidopsis thaliana landsberg
aggaagcaaaacgcagaaccggagccaaagcaacgggagaggtagggactcgcaggcacaagggacccacaaaggtgccagaggcacaggccagaacggaaggtgcaaaggcaaggccaggaccagagcagagaagcggggacacgaaaaaaagtgagaagctgccacacacacagaaacaaacagcccaccgaaaaaagaaagaaaaatgacggcacaaaa

SEQ ID NO: 72463 - DNA, 510 bp, Arabidopsis thaliana landsberg
gtatgtccgtatgcctgccagcacacatgtatattcttatttgacttgttttgtgtgaatttttagaaactttgatgcgtatgatgaattccgttggttatgcacacgtttgtgtataatctactcttacaataatacggttttgttggaagacataacaaaatggaaagtgacattagggccacctaaaacattctgcctctccacgtgtgatacaaagactgtgggttttaattattccccccaacacacacccttagtcaggtctctttttttcttttgctatcatctactcttttccatttccgccctgctctcaaacatgtggatttatggtattttatttaggcggaggaactggaaatagtcgattacactgaagataagaacaactccaaaaataggtgggctgcctctctggtttttgtacttccagtaacaaagcacccggcctttaattatagcttgagagacaccgcggggaaaaatttaatctctgagtaaagactg

SEQ ID NO: 72464 - DNA, 575 bp, Arabidopsis thaliana landsberg
gtgactagcttccatgtccttggagagaaatccctgcgaatctgccttgataattagatagcatctattcttgcttagtcttgactagagctctaactcacaaagcttcagcttaaggccaattttctgagtttatgatagttctgtgtgtgtctggatgcccaaaaatgcattgatgagcattcttctaggatcttatccaagcctgacttatcacatgttacagaatgcatggttcagataataaatcaaagatcttaaatgattattatggcgtgactgcactcgcttgagacaagattctccacttaaatttgatctataactctaaccatgcaatcatagcgctgaattgacatagaaatataatgaagcttttgatcaataatggagacgaccagaggctccatttcagtggcctaagaactaaatatgtattagagttcatgaactctacgagggtttaataatctcaacctatacaggaaaaatactcactgatcaatgataatctgactttatacatatatcgtaggagagagatatgtttaccccttcacgtgcgatgctattat

SEQ ID NO: 72465 - DNA, 440 bp, Arabidopsis thaliana landsberg
ggctttcataaagcttccccccctgcctctctataccgaggtttatctagcattcaacaaagtgtgaaggggttaccacgaggaaggcatcattctaccaactgttatggaagaaatatgcaaataaactgcagctcgagcgctgggtcgaacaccccaagcggtgagaagcaacatattaaaaagacatgtgttcctagaccgtaataaagacagaagtccattattaagcatattgtgtcctacataagtcgtcaaaaaagactactacaacgttactagacacatacactcatgggcactatgttcgctaaaatttagctaggattgcggacaaaatatccttaagaaacagcgggagacccagactgctaaactgaatccagaaaataaggcactgaaagcacgcttgtcaaggacaaggacaagctccattacac

SEQ ID NO: 72466 - DNA, 644 bp, Arabidopsis thaliana landsberg
cttttcctagataatagatacatgcatgcttgtatttaacaacttctgaatattcattatttggatttttcaagtcgtgatggtcgaaagtgactggaaccggtaagagtggatattcctttgtcttgcacgactcctttattattaatgtcttgaaaagagacgttagtccttagtacacagatacgaatgttgatccttttaagaaattaacgtgtcgtcttcataaatacattttcattatttacaaaacgttccgtgttaagacttatgaggttagctagtgttcatatgttgcagttttgtgttgagttattagatatgacttttactttcttgtttagtttacaactgctagctcagttcttgatcttattcgaacatgaaggtttcatacataatgattcacaaataaacatgaacctttccttcttatctcatttgaagcatcagcagctccggtttctcgacatactcttttccactggcagcaaaaacgagctaccgtttggccatttagaactctatgatccggaagaatgttaacctgagtcaaaataacagaccttggatatttacaacattttttggtaccttgaataaatgaatgaacagtaatttgctttttccatctttttcgattg

SEQ ID NO: 72467 - DNA, 768 bp, Arabidopsis thaliana landsberg
caccgtgccgcagctggccacgccggcggcggcgttgctggcgcgcggtcatcgttacccgttggccacggttggcgcggcggccggttccggtttcgtgttgggccggctgaacgtgcatccgttgcgcgtgccgggtctaggctcgctgctcagtggcggcctcgccgaagtcgtggcgcacggcacccgcttgctggccgaactgggcgcggcgggcggcgacccaccggcatgaacaccatcgatccctctgcatcgccggccatggcggctggcggtgacgctccggtgcacgtgatcgtgcaggacctgccgcccggcgtgacgcgcgtgcggcgcttgtcgcacagcttgcgtagcggtcgcggtgtacgccgtcacctgcgcggcattcgcgtcattctcaatgcgatgctgctgctggcattgctgtataccgccacgattacccgcaccctgttgatcccgctggtgctggctgcgttcatcggcttggcgctcaatcccatcgttgcgtttgcggcgcgtcggcatatcccgcgtgcactggcagccagtgtgctgatgctggcgctgatcggcggcattggcgtcggcatcagtttgctggcccagccggcactgggctggttccacagtgcgccgcaggcgatccgcagtttcattcccaagctggaacacatcacgcgcccgctggaggcggccaaccgcgccacccagacctttggtgaacgggcatccgatgcgttcgacgccgcacccggc

SEQ ID NO: 72468 - DNA, 611 bp, Arabidopsis thaliana landsberg
atccatatcaaaattttgtaagcatgtcgacaagagaaacaaaacctttctcctaaataaataaaatagtaatgattaattgattgtaacatttcgcaaaaaagaaacaaaagtataatgattatttattgatactgatagtgatatcagtgagtaagtgagagtgataataatagtgatagtgatatcagtgagggtgagagcgagacttcaaaatgttcttcggatgagacagctaaagaggcccaaaagtagttagagagacgaatgtgctttgttttattcttaatataatataatgtcgatgatctcttcgttatcgcgtggccatttatcattggttaggtattgccgacaccaacattccacagcccattccatatctaaaatcttacttggctaatttatttaaaatgttggtttttagatttgtcacaaaatagttaattgtataatcggtcaagtcaattcaatccaattcaataaatctcatctcactcatatactacaatatttcgtcgacattgaggggtttattttatgagtttcaagtaattaacaaattatcgtccaatcggtaaccaaacttatataaaatttaatgctaatag

SEQ ID NO: 72469 - DNA, 638 bp, Arabidopsis thaliana landsberg
gatgagctctttcttgacctacactatgtctggttgaaaaacatgagccattagaagaatttttacatgatgtgtttggtaattaattaagtgtagggaaataggacaattaatagtcaatctttgattagccacactcttcactaataagtactctttttatttttgcatcttccatttcataaacctttctatcagtcaccttttttttttttttaaatgcaagtctatttctcaattatagggatcactctctcctttctccaatctaatctctctttttctttcctttaattatcttcgagtatgatgcatatgtgacacgtgtcagattattatttgatactttttttttaatttcaatttattaactttaatgaattcatacatataaataatttacttccttgcgtttctttgccaaccgcatataacttatgtttaagagtggaaaagcattggtgttcaaaaaaaagagagactggaaaagcattagaccaatggttgcagactaaagagaaacacaatttgcacgtcgttctcgttttcaagaaaattcactttgtaactatactatatatgccccacccatataacttgtgtttaagaatggaaaagcattggtgttcaaaaaaaaa

SEQ ID NO: 72470 - DNA, 583 bp, Arabidopsis thaliana landsberg
tgcatcttccgaatcgaacatataccttgcctgtgcacgtgccagctcggttttacccacacctgttttaccgaggaagataaatgtacctattggcttcttcggatctttcaggcccacacggttacgctgtatggcttttaccactttctgtatcgcttcgtcctgtcctaccaccatgcctttcatatcctcacccatacggcgcagcttctcggtttctgcctgcaccatgcgtttcacgggtatgccggtcatcatgctcaccacttccgcaatatgttcttcggtgatgggatagcgtttgtgtttgctgtcttcttcccactgtgtcttcgctttttccagttcttcacccaaacgtttttccgtatcacgcagggaagcagcttcttcaaaacgctggctcttcaccaccttgttcttctcgttctttacatcctcgatctttttctccagctccacgatctcctgcggcacattaatattcttcaggtgtacacgcgctgctacttcatccagcacatctatcgtcttatgcggcagcagcctgtctgtcatgtaacggtcgctgagtttacgc

SEQ ID NO: 72471 - DNA, 4512 bp, Arabidopsis thaliana landsberg
ttgtgctctcagttattcaattgtgaattcctaaatttattgtgtgctgtgataattcaccagatcaaccagtttaaagacccgtgaacaaaaatgcccataacatttttttgtattgggtttcaatcaagttaaggcccattttggtttagtatacggattgtgttgggcgaaaggagtgatgtaatatgtacttatcagaaacaaagtaggaagacatcacagtatcacaacattgatttgtgtgcttcaatcatgcggtgtacaatttgcacttttcccacttcacaaaattcacaccttaaatatcaatttgtgaaaagtattgacttttaactttaccaaattaaactcttttagtgaacaatctttaacaaccattttatttcacatatctgatgactcaataattcgtgcaaatttcaaatgtccttgtatattatcgtgtttgaatttcaactttttttccaaacatgaattaacaatccatgattttattgctaatatgtctatcatatatttaagtttacagaccaatcacaatttcctcaattagaaaaaacaaacttaccaatggaaggatagcagtgtatgtccataggactcgacacttctatacatagtactatttgtattcaaattatacataaaggaaataaatctgtctatacatggttttagtaccaagttttttaataagaaaaaagaaacaaatgatagtttgatacattaccaactaggctaagatattttatttatttttacagtacagcgttaacattttttttaacgagaatgaaagggtggctagagttacctgagtaaaaaatctaaaaaataaggtaaaaatatctgatagcattcgtaacgaaatcaattagtactagacaagaagatggtataaaaatagaagaaaagtaaaaaatggcacgagtgaatatgttcgcacgtgtaaaataagcgtcatcatcttctcctcttcccaagtttcggctctcactttctctcgttctctctctctctctctatctctatctctcgatttgggggagttccgtcacggtggactagtacgtctcgttgccgttggtggcgtagtcggaattaatttcctcggcgttgagattcacatggtctagaattctagctaagtggttgttgttgttgttacgatttccgatttctcgagttttttttttatatttagcttctgtttcgtttatccctcccggagacactccttggtcgaatctctcatgctgaggtaattcgtcatggatttgtttaattgcataagcttttttgcaattgtctaagcttttatcggtttgttttgtttttgatttacgaatctagattttgcgctttcttatgtatgtaatcaggatcaaatttgctgggttgttaaacaatttttgtctgtgttaggattctaattacgcgtgttactatacatgaatcattttcattgtttttcttcttgatccaaaagtgtgagaatcttactttaggcgtaattcacattttttgcattaatttcaacggttacacgttttttttctttgctttagatttgttataatttggttgttctaatattcataaccttggagttttggtattacttcaggtgttttggacacttgttgtcaagaagaaaccagttttggttctgattaatcgttggttggaaaatatactcaattccaggccatgccttcacttcaactattgcagttaactgagcggggtcggggtcttgtagcgtcaagacggtaaccatttccttgctcttcattgtattctagatggaagttttttttgttcgtttgggctcagatttcatctttctctgtttcattctttaggaaatctatactgcttgcggctgggattgtagctgctggtggaactgctgtttacctgaaatcaagggtcgcttcccggaggcctgattcttcgcgtctttgcaatggtcagagtgatgatgatgaggctttggaaaagctgactgcaactgatcaaaatgcaaagataaccacgaaaaagaagaaaggaggaggattgaagtctcttcaggttctgactgctattcttctctctcagatgggaaaaatgggtgccagggatcttttggcactagtcgccaccgtggtatgcatttcctcttaattaataagtttttacttttgttttatgtttttgcccaagtcagatagattttctgtctggttgtttaagtttgatctcgtgctgttgcaaagtcctgtagatattcatggaaattcacaattgcgaaccgttgctttattgttatggaataccgggtgtctctctttttagctgaaagaaacaccaatctaactttacggccaatagtcgggaaaagtctggttacttttcttacttatgcgggactagtactctttccaatctgttattctataacttgtaggttttcagaacagctttgagcaatagattggcaaaagtgcaaggtttccttttccgtgctgctttcttaaggcgtgcgccactgtttctacggctcatctccgagaatattatgttgtgtttcatgctatcaacattgcactctacttcaaagtacataactggggcattgagtttgcgattcagaaagatattgaccaagattatccattcacactattttgaggtagcaactgccatctcttctgccattcaattgtttactatttctttagatacgagtgtttttgactagtgagagtatcgagtatacttcagactgctggatatctcttcactcagttttaattgttgttttcagaatatggtatattacaaaatatcacacgtggatggtcggattacgcaccctgaacaaagaattgccagcgatgtaccaagattctcctcagagttgagcgatcttatactggatgatttgacggcggttactgatggaattttgtatgcatggcgcctgtgttcatatgctagtccaaaatacatcttctggatactggtgattcatgtttaatcttctatacttcaagattgaccttatgttgggccatttatgctgcttttccttgtatccgttcacagtacaattctttcggtctggtatctataaactaacctatacaattgttgtgtaggcctatgtactgggggctgggacggcgataagaaacttttctccttcttttgggaaattgatgtccaaggaacagcaagttagaaggagagtaccggcaacttcattcacgcttaaggactcattcggaaagcatagcattctatggtggggaaaccagggaagaatctcatatacaacaaaagttcaagaatcttgttagccatatgagtcacgtgcttcatgatcactggtggtttggtatgatccaagattttctgctgaagtatcttggggccacagttgcagttattctgattatcgaaccattcttctctgggcatctaagacctgacgactcaaccttaggaagagctgagatgcttagcaatataagatatcacactagtgtcattatatctctctttcaggcgttgggaacactttctataagttccaggcggctcaaccgactcaggtaatgctttatgttggatctcatgtcagacgcttaaatggtgaatactgtttagctgtttctaattattggaatgttgttgcttccggcagtggttatgctgaccgaatccatgagttgatggctgtctcaagagaactcagtggtgatgataaatcgtctttccagagaaatagaagcagaaattatctaagtgaagctaattatgtagagttttccgatgtcaaggtagttggaatagattcatgttactgtaatcctttccaaaatgtcgtgttcttaatgtttcttaacacactctaggttgttactccaaccggaaatgttttagtggaggatctcacccttcgagttgagcaagggtctaatcttctgattacaggtgaacgctttatatctagaacataatatgactatcaatttcccttttcattgctttttttttttggcacagtaaagcgtataccactactgtttagttctatggtccttgagatgagtagcaaagatgaaaatctcagtaccccttgttgtccttatgaagtgcaaaaaaatgggaatgtgaatttgaaatactattctgaaagaattaattcttcttgtattctggaagggatagcactataaacttgtcaaaattagatttggtatgcctagttattgacgaaccattcatatccagctcaacgactagggtgttagtggaatgctggcaacacatcatcttctggggttgatttactggactatttttggctttctgggttttcattttatgttatattgattaagcaataacatctagattcgaaattttgatttctgcttacctgatatatcattatttgctcacaatatgtatcgtaggtcctaatggaagtggcaagagttcccttttccgagtatt

SEQ ID NO: 72472 - DNA, 549 bp, Arabidopsis thaliana landsberg
cttcacatatgttcgtgtggcaagaacagctggagctggccatgacggatctcgtccatcatgccgagtgttttcatgttgcgctggcccggcgccttgccgaaacgcgccatacgggcttccgactgggacgcgtggtattcctcgcgcgcgatagcaccgtagtgcgccttcagcacgctgatccagccagggtcagcattctcgtagagcttggagcgctccagcgcggccttgaccgaatacgccccggcatccttttcgcgttgcaccttcacatattccggatagctctgcttgaagggctcgtcatacgtctcccacttttccagcgggatgcccatcgctcccgaaagctcggggggaaatagttcgtcctcctgaacgtatttcggcgtccagttcgtggtgcgcgcgatgtcgtaccagtccattctctctaacgttgccatagcgtccgtttctcctttaatggtccctggcttgataagccacgcgggacactctgcaaattccgatattatattcaaaaccgcttttacttcaccg

SEQ ID NO: 72473 - DNA, 374 bp, Arabidopsis thaliana landsberg
atccatctttctcacttatatatgttgaatcagtataactgttatcataaatgtatgtttgatatattatactatggagatgatcacatggtataatatgttcaatggtgaacggtagacgatgtatgaatagatgtcgacagttaaatcagggtatggaggacaacgatgtccagtcacgttgcattggcatacaaacgccaatctacatacgatgttttaaaatattagttactcttttcaatcatcttccattgttaataatagtaagtgttttagctaaatatcatcattaaattttttaggctaatatcaattagtgtcatatgtaattagtttagacaattcacttaacataatattttattgtagcg

SEQ ID NO: 72474 - DNA, 2307 bp, Arabidopsis thaliana landsberg
aaatttccgagaaaaacgctaattttttaatctgtcaaagtaacgaaaaatgtctcaaatccctagcagatactcaccctaagatcaactgatttctggagctgacgaatgacaccattcttcttcgactgagcggcggcgacaccaatgaccgccacaagcaggaatctttggtaaggcgtgaagagctcccacgcaagggattcctctctgctcaatccgccgccgattgatcgcgctgagctggcttcatcggaattgacgagtaaaccctggagagagatgtaagctagcgggggagacgattgtagaggctggcaacgacgggtaaagtgagtagagaggcgacgagtatacggagagaagaaaggggagagatggactgaagcgggcggaattgggtaagacccgggatccggatccgacccgggttcattcatggacgagccgaagaggaatggaggaatcaacgaggttcgttcgtcttcaaagagagatttcaattcttcaaagagagattttttcaattttcaatattcagtattcaatcttgggttctttggagttttctgtaatttcaaaatgtgagatttcccccgtaaggaagatgatgcgacgttcatcatctgggtctacattgaagccacgtattcaatttttgcctttttggttcattttttttttactgtctctcttgtaattttcttcactaccacatttttctggtgttttgatttccacggtttttgttttaaaaaaaacaaacatatatgttttcttcttattcgtctttttgttaagattaatcgagtagtcctatatagaaaaatcgtacttttatttgtctttttttttggcacttaataaatagttctagacgcattctttgaaaaacactagtccaaaactcacttggtctctctcgtctcggggttctacctttctggctctcctaaaatatatctcaccttcaccttgtgaattatctcagccagtagagctccagttcaccgttacgctttgcatggtgcgtcaatactaaacctttattcgctggtctatctctcatgtcagtcatgtgcttgctcatgcattgtttacgggaaccacatttttgtattagttctcctatcccttaattgggtatttgattgaaccacattttgcaagcattaatacacgattacacgtgacgtctaagtgatatatcctccagtgatatagacacgtgctatgccctagtccttgggaaatcgacctttctttttgtttttcttcgttttctgaattatgaaaagtcgtctgttgttgactcccctgcatactacctacatttttgtaagtgttattctgtgcaatcaatcccacaaatttctcatctttttgcactcaaaacacagtttactaatttagtttgtcacgtcaacaaaaaaatagccgacaaaagttatgttttgtggatgatcatttcataaaacttaattgtataatgattgttgtcatcataatccatgttaatatatttcaatcgaccgatgatttatatgaatcagtttttaaagttctaatacacggcaaacgaacgtcaagcacatgcgcgggcacatgagttgtcttttgaataatcaaagccattaatgtcacccttctgacttgacacttccttctaaatctcttgatacaattataacaactactaaatctccgaatcacgtttactctagctgctgtctccaaacctgtcctgtttttagggccgaccatgaattttaagatatatctcaagggaaataactaaataccctaaactacgttgttgaattaagaaagttgattttcaacgtctacaaacataatttcactaaaggttgaatctattagcgtttctgtttgacgaaaacaaacgaacagtttaatcttccgctggtctatggacgataaaatgaacaagacaaaataaaaccttacatatttgagtcgttgttctttatcaaaaaaaaataaaaaatttgagtcgttgctcgtcagattttatgtcactagacagcaacgaaaacaagcacataataatcaaaaccgtagcagaaaatgccaatcaaaggtaaattatggttcatggaggcaatttgcaaacaatgattaggattgtgtcatactgtagaaaaaattaacaaaacaatttttttattattcattgactcgaaggttgaacaagaaggtcgaaaaaataaacatctttacatgggggttcatattatttatgtacaaattgcttccaatgacaaagatcacatgctcatctacaac

SEQ ID NO: 72475 - DNA, 663 bp, Arabidopsis thaliana landsberg
actctctattacaccaagatgactgaagcatctatgacatcattattggattatcaaagaaaacttgagtgctcaatagtagtatttcgttaggtggacctatagttctatacacgcatgcaagtatgtaacaattaacataagtgataagccttgtttaagagcataaatcgtaaggacctacctaggaatatgctcggccaactaaaccgggattatgatccggttttcagaatttttttgcgtgtgaataaagaactcgtggtgtaaaggcgaaccgagtcgggtgtttgattaattccaatattaattgtgttgttcaaatgttttcaagccgagtttcttcccaaataaaagtcatatctcatgaaattcctaagagaccaaaattcccgagtcaaataaacaaacaaaccctgattttatctataaacacatacacatttttattaagttataatcaagctaaatataaaaataaaagaaaaatctctaatctccacgcatattgtttactttactgctcctaatgaaagtgaaacacatgtatatttatgaacgtaatagtattgtggtatttactgatcaggtgtatcataaaaaaaggcgactttaaaggttcgtttgagtttttatacatattggggttacccatttaaaaat

SEQ ID NO: 72476 - DNA, 312 bp, Arabidopsis thaliana landsberg
ccttatgcgcaactagacacagattatataggaatagtttggcgtctagattcattaatcaagccaatgcatgattcatgagtaataaagagaggtcttctgaccatatcagagaaattaattaagaaccagttgaaggaaataaataactctaaattgtggaaattttagatcaaaagtagataaatagtcagatatttcatgtggattttacatattttaaggatcaaatgcaacccatgcttttaaaagatttcatacacttttccgcgaagcagtgaaacagtgtgtaaacgtgaaccttatgaacaa

SEQ ID NO: 72477 - DNA, 481 bp, Arabidopsis thaliana landsberg
  unsure (1)..(481): unsure at all n locations
tgctgtcgtgaccgacctggaagttcttctttggtatgtggatttcgntgatggccaggatagccgcagcttgttctccggtgagatcgctgcatcggctcattttgctggcgcctaaagcaccgggaatcatttttgccgccatcttggcgacgtcgagtgccgccaggttgccgcccgacacattacgataggaatcggccagatcattcatggaaacagtactgccacgggcgccgtagcttttttgttccatttcgatattggcgcaattcatgtccggcatggccactggaaagtgagtggctgtcgacgccagcacatcgacgtcggccatgggtagcagcgtgtgtatgaattcatccgcgctcgccgtctggcatggcagccaggccagcaaaagcagaatctgccatctggatttaggcatttaatcctcctaatcaaaaagttaggagcaagttttgccgtaccgggctga

SEQ ID NO: 72478 - DNA, 530 bp, Arabidopsis thaliana landsberg
tcgggaagtcgcaagttaaaaatataatggcattaagaaatgtaagattacgaaatcctcttataataaaggggaaatggttgtgattaatgtcattaatatatcgttgtttagattaatgtcattaatatatcatgttagtataaagcaattttgtttttggtattttgcagaataaaatatgggaaaataaaaaagaatgtcgtagggaggcgttaatctcgggtatcaaaaaacgtgtaagcacactgaaagagacgatgagggtactttggggaatttcaaataaggaatgggaatacgcggtcgcaggagtatttctcacctgtgaatacaaaatgtttctttttggaataatgagataacgtgttacgtgtgtacgtagcattgatcaaaaatgtcaatactctttatatccatgggagtaactactactaaccaccaattattctcattatacccgtatatcactgtcccctgtcaacatttaaatatttaaaatatcctgaccatatttattactttaaaat

SEQ ID NO: 72479 - DNA, 569 bp, Arabidopsis thaliana landsberg
  unsure (1)..(569): unsure at all n locations
nnnnnnnnnnnnnnnnnnnnnnnnnnnnnnnnnnnnnnnnnnnnnnnnnnnnnnnnnnnnnnnnnnnnnnnnnnnnnnnnnnnnnnnnnnnnnnnnnnnnnnnnnnnnnnnnnnnnnnnnnnnnnnnnnnnnnnnnnnnnnnnnnnnnnnnnnnnnnnnnnnnnnnnnnnnnnnnnnnnnnnnnnnnnnnnnnnnnnnnnnnnnnnnnnnnnnnnnnnnnnnnnnnnnnnnnnnnnnnnnnnnnnnnnnnnnnnnnnnnnnnnnnnnnnnnnnnnnnnnnnnnnnnnnnnnnnnnnnnnnnnnnnnnnnnnnnnnnnnnnnnnnnnnnnnnnnnnnnnnnnnnnnnnnnnnnnnnnnnnnnnnnnnnnnnnnnnnnnnnnnnnnnnnnnnnnnnnnnnnnnnnnnnnnnnnnnnnnnnnnnnnnnnnnnnnnntctggcctttatcttctattccttctatcggaaaaaaaaagaaaattgaactcaaaaaatcaatctacccatttggataatgggaaacagaaaaaaaaaccattcaattacaaacgaatttccaaaagtttaattt

SEQ ID NO: 72480 - DNA, 269 bp, Arabidopsis thaliana landsberg
  unsure (1)..(269): unsure at all n locations
gttgcacaaaaaacaacacacaccacnangaggnagnngcaaaaaaaaaacaaaaaaacnaanaagnacanagggacacaaaaacagaanncgaacaagcangnaaacnannaaaaacangcaagaggcnngaaacaagggncaacaaangaggaaaccgaggaccngncgaaaaaaacacaaaaaccaaacggaacgaaaanaagccggagcggacaagcgcanggggaaaagaaaaaaagaaacgagaaagccacagaaaaaaggga

SEQ ID NO: 72481 - DNA, 2078 bp, Arabidopsis thaliana landsberg
gcactcgtggcttgaagtgatggcttgtcatatctaactcaaagaatatgtttgttgtcttcagaatgagtaccaaccacctgaattgttgccgcttcttcagtttattactggtaagattggtaatgaggaagacgaggacagcatgttgtttcagcttctcaaatccgtggtcgagtcgggaaatcaagatattgcaatgcatattccttacattgtctcttctctagtaagtaatatgttgaagtttatgcatccaagtgaagatccatggtctcaggtatgttttagtcctgcctttcttaaattttttgcttatattgaagtttcaacaacatgaaactgaaggtaacggaatgtattcctcgtattttgaagtaaaaaaaattgacacacctatgtttatatcacgcacatgaaatccttgacgctaccaaaatatttgtagtattttcagttgttcgtggtctaggtattgtgaaatgtcttatattattttcaacgtaggctattctaggtggccttgagacattagcagcgatgactcagacttatgaaagctctaagcctgaagcggatgaggagaataatcaggcgactgaaatatggctaactggtcaaggcaccatcagcaaagctttgtcagcacttttacagcatgcatggctggtagttaaattactactcctttgtactacaatttatagaaattgaaacactgttctaattttaggatactgctctgccttttctctttgcatggttcaggcaacagatgtgcctccgacttcatgcatagatcatttgtcgacgatgttgcggttcattgtgattgctgctactaattgcaatgtatttgtggagctcagattaactgatttactcatagtttgggccgatattcttgctagttggaatggttgggaagagtcggaggacttatcagtttttgactgtatagaagaagttgtgggtataaacaataaatatggttttaggagtttccttttcagagatataccatcccctccagccatgccagtccgtccacgatctgttgtagaatccattggttcatttgtcagcaaagccatacttgagtatccgtcggccacaaggagggcttgttcttgtgtccacacattattatatgtacccgactactcatctgacatcgaaggggtggggaaatcattggcgatggtcttcgctgaatcagccttttctcattttttagcattgcgtgagaaaccttgtacattgtggaggcctctattactggcaatatcatcatgctatatctcctattccgatattgtggaaggcgttttagagaaagtgatatctggaggtttcgagttatgggtatcttcattggctttttcatactcgcttacgtgtgatgacagtccatcagtagtatcggaagtaaaactatatggtgagtagataaatctttcctttctgtggtgaagttacgattacagttcacatgttaaacatgtgcctttgccaactcgtcacataatcataaaaggtttagttgtatgtagaaactgttgttaatcataaatgcatgagcatagactaaaagacctcttgtttcagtgatgacgctagtaaaggtgatcgagcatcttttagatgtaaggcacgggaatgcaactgatgatttggcaaggaagtgctttgtttcattgatggaggcttctcggaggctaaaggaagtgaacgaagaaacagacgatgatgaagatgatggagaacctggagaagaagagacagaatctgaagaaactgattcaaatgacgaggtttgatttgaattctagtactcgttattaaattataatcaaagtatgttctgcaatcaatttgctggtccagatgcaaagtagtttataaacggctaatttcaagaaacaacattggatcttctagtggtttgtttcttctcaaataagcagtctcattttgtgtcttctttttttgaacaggattccgagagcgatgagtgtgaagaaacggaggaagagtttctagaaaggtatgccaaagttgcagcagaattggaggat

SEQ ID NO: 72482 - DNA, 244 bp, Arabidopsis thaliana landsberg
  unsure (1)..(244): unsure at all n locations
tcatcgacttctttgctttctgttccagccangatcnatcccccgtctcattctagaccagaagtcattttttggagcttcggccacttttccctgggcttcgacttttcctgggtttatccattctcgttccacttaccgtgctctgtttcataaactttgtgatttccgacgatttgatactgactaccaactgctcgacgaaatgcctgactcaattggtttgcactccggaagatgctat

SEQ ID NO: 72483 - DNA, 594 bp, Arabidopsis thaliana landsberg
agattatggggtcccaagtcttgctccatcagtatcaatcttacttacacatggaacttgtatgtgtttacattatctactttacgatttagatatcaattgcgagatgatgctgattcttgtcttttattttgtgtgtcacagctgatgatatagttcccttcccattcggacgcaaaagttcggacattcttcgcagggctggatttcaagtcacgttcataccaaaccaagggtctaaacatgaattagcttcactttgttttccgttaattaccaatagattttattgttctgaatctatatttggggtattccttgtgcaggtatcatcttccaatcgttccccaagtaatcaatgaggttcgcttatggatcacatcaaaactccaaccctaaagtcaatgctcgacactgcatagagaaaggaattggggagcaaaactatcatataatatatattttaaaagatgtttgtcttattatctctttttctagttcataatcaattatataggcgatgtctctttgctaggagtctgaaaaatgtatatatttcttcggttaatgttataataaataaaagatttactt

SEQ ID NO: 72484 - DNA, 556 bp, Arabidopsis thaliana landsberg
aagatgttgaaaatagaaggaaaataaatttttgttaatggggaatagaatccaccttcaagatctgtggtattttacaaaatattgaaccgacttaaagtaagtccaacaacatgcatttgtttagtttaattggatttattatacaccaaaattattgtgattggagtacattttttatacaaattacaaaactcaaggctaacattgattacctcagaagtcgacaaatatttcgttaaaaaatagagaaagtgaaaaaatcttgtattttctgtaaattttagcgtatgtattaatttgttattaccgtcatctgagatcatagcgtatgttttaagaactcttcgcttggatttatgtccaatggtcaatgctcatttatattaatatatttcttgtcagcagcatgataatataataaacatgtgtctaaaaatatttaatagaattaccatgtaaaaatgaggtataacttataccacacaatatttcctttcaaggttattttacaacttcttcgtaaattaaacaaattgttaaccacgaaaaaaat

SEQ ID NO: 72485 - DNA, 408 bp, Arabidopsis thaliana landsberg
aggctgccgcgtgaatgaacaatactatgtagcggtttgacctgaacaggctgagttgcatttttaacgacagtggctcagctagaaatagcgcaaactacaagattgactaagtgggaagagtccattatgcggcggttgcggtgttgaaacaccttcaccttttcaatgctgcacttgtatgatattcttacgtttgtccacatcttgacctcaccggactgtggtttcctgaagaaccatgctcgataagcgacgtgcatcaggatgaatcttgtctgacggaacctctaactgatcacagctctaatgacctgatgctgaaatattctcgacctagagtcggatcttctctgttttctcgtcttaccctcacacctgcaggttgtcatctgacagacagccgac

SEQ ID NO: 72486 - DNA, 319 bp, Arabidopsis thaliana landsberg
  unsure (1)..(319): unsure at all n locations
ccctcacccacggcctgactgcccaggtggacaagatgctagttttttgcgaaaccatcgacggacgagtattggggcatggtagaaacggcgatccccctttcgaactggacacttttaatagtaacgggtgaaaatagttttgacatgtttgcaagattagaatagcctaatataggatatcaacccacattatcccgcaaacgtgcgatattcctgaacaggattgccttatccgactccgaatgcgcgagttggatggccgtttnnnnnnnnnnnnnnnnnnnnnnnnnnnnnnnnnnnnnntaaaggttaccaa

SEQ ID NO: 72487 - DNA, 591 bp, Arabidopsis thaliana landsberg
aacaccgccatgctcgatgtttcttttaccgcccatatgcccgattttttggtaaatgccatataaaccgcgcatctggggagccgatatggaaccggtaccgggaaaacccacttaccgcatgggcggaacctcgtgcctgagtggcgattatatgtttgaatattcgttcgaccgcgagctcaaggaaggcgacagcattgtgtttgacgacatgatccattataccatggtgaaaacaagttttttcaacggggtcaaacacccctccatcggcatctggaccaaagaagggaagttcaaattactgaggaaattctcgtacagcgattataaagccaaactctcgtagacctgaatggtattgcagcagtttttatttattctccaggcggccctttttgctactatttggctgatctacctgcgtaagctcgatatttttcaccctgaaaaatggatgaatatgatcatcgtgtttgtcattggcctgggaacacccctgttggtgatgtatgccccacatgtactcagggattttacatgaccccagccactgggacaatttcagggatttttctgatgtggcct

SEQ ID NO: 72488 - DNA, 575 bp, Arabidopsis thaliana landsberg
tgtctctttgagaaagctctctactttgttgctcctgatgatttaattaatgtaaattaaaaactgttatcgtcggtgggcatcagatctttagtaagaatacagaccacaaattaagaaacaataactcaacatttaagagaacaatcagattcatgaaaaaatcaaacaaacaggtcggtgaagaaatacccatcaaaataacagtaagatatggcgaatgaaagacggaataagaaaaattaaactttgcgtctaaacagtacatgatgaggaaaatgattgctaattaattaattaatatgacaaaaatgaactcaacaatcttttatgattatctgttcaatgcccaaggaagactaatttcctaacatttgtgattgtaaagtgacaaatgaatagtcaatgtctacaatatagctcaaaagttacagactatcaatatgctagttagttgtattaaatctcgatatagaattggttactaaatctgtatcgtatcttacctggatgacagagaacaggcggaaggcacgatcctggccagcagacaaaatgtgccgtccattagagta

SEQ ID NO: 72489 - DNA, 511 bp, Arabidopsis thaliana landsberg
  unsure (1)..(511): unsure at all n locations
tggacgagttggtaaaaagagaaatacgcaggaaaaaagaatgtttggcttacaagggaaatgccgggnnnnnnnnnnnnnnnnnnnnnnnnnnnnnnnnnnnnnnnnnnnnnnnncgacagggcagtgttttctttatacctgttcaatatcgtaaaggcagaaccgggccaggccgttttccagggtgcaggcataccacatgcatatatggaagggcagaccatggaactgatggccaacagcgataatgtattacgcggcggacttactcccaaacatattgatgtgccggaactgctcaggcaaacttcttttgcgagtgttgagccggagataatgacgggcagggagcgtatggcaggtgaaaagatctatccctgtcccgtgcctgatttcggtttggcgaggatcgaactcgctgccggcgggcaatatgaagccgtgagccattcgctggagatcatcattgttatggaaggcggtgtactggtcaataataccctggtgc

SEQ ID NO: 72490 - DNA, 558 bp, Arabidopsis thaliana landsberg
tggtcctagaagttgcctctttgtaatgaagagaatgcatcaggggatgatgttttagctaagaacccgaagaagtgctctgtggctaagacgattgtgaagaaagaaataaagattgagtcaaacatagatgaacttggtggtagattgctggtgaatgcatcaggtgatgatgttttagctaagaaaccgaagaagtctgtggtggctaagaccattgtgtggcaggaaataattgagattgagtcagccacagacacagacacagatgaagttggtggtaaaacgttgtctctttgtggtaaagtggatgcatccggggatgatcttttagctagagatggcaaaaccaaaagaaccaacctgcagattgtttgtgttgatgattgcgattccggtttggttcatgatttggaatataaaaagtacttggcacattttagtgaaacgcggaatgtatatttgcttgaggacaatgtaaggggtagttctccagtgcgtataatgtatcatgaagcacctgacaggagtttaagaaaagcagtagaaaccgagaag

SEQ ID NO: 72491 - DNA, 536 bp, Arabidopsis thaliana landsberg
actaacctctcttggacaggatattcctcagactccagcatacgcacaacttgactcattttaggtctcttttcagaatcaggatcaatgcatctaagtgctgtaagaagtactcgtttcagtgctctagtcgctggcctaactgctatgttcggatcaatgacttcttctaatctcttagatcctaccatcatcttcaaccactcaaccaaattcacctgcaaaataatgttgatgaggctcaaaactcatcatatttatcaaatccattcatctctccatgttctatctacctcattagcaggccgcgcgtaatccacaggatctcttccggttattgcttctaagaccaagacaccagagctgtacacatcactctcttgattcaaaagtccggtattcgcatactcaggagcaacatacctgcaatactcaaaacacaaaccacggctcagtaactaatccgggagtttctttttgcttaaaccaaagttgcttaattacccaaatgttcccatgactctagtagtcacatg

SEQ ID NO: 72492 - DNA, 727 bp, Arabidopsis thaliana landsberg
gtcgataccccaaccttgggtgaccgatgccttccaatgggagaacggtgagatcgatgttcgggcggtgatccaacacagtcgcgatcgcttgcggcggagccaaccgatctttctccgatcgcacgctgacaaccggaaaaccgttcgggaaattcgcgatcaactcatcgatccggcgcttcaaatgaaatccggcggttttttggaaactcaaaatcgtgacgaacaagcgtttcgcgatggaaaatggttcttgataggtaaagtaattccatagacaaaggaagagttttaagaagggaccgccgtcacagatccaaccttagacagtcctcgcgtccttgaccgatcagccacagggccgccgccgatgggaacgaaaagctgtaaaggatcttcggaccttcgatggcgtctaatacttgtccgagttcttcggcccaaatatgcgggagaaaggtattgcctttcatagcttccgacagtttggcgcattgggtgagattgaatgaaaccgcgtcgaacccgagactcaagacaaagtcctggtgtttccgggagctgttgcgatgtccgccgaaatggtgaatgaacacgaccgtcgccgcccgccgatggcgggcatcgatggccgagcgatgaatttcatcgaacgagatgtttgacggactcatttgtgcgcgtcttcactccagagctgatgccagtcgtacgtcgataccgc

SEQ ID NO: 72493 - DNA, 4117 bp, Arabidopsis thaliana landsberg
taagcatgccacaaaatcaaccgctttcatggagatcgctgatattcaaacaaagcaaaacagagtcaatcataattgagccgttgatgattggtcgagcagatgttcacttaacttatatttgtacctcgtgtcctgaatgtagaaggtctggacagagccaaaccctggaatcctggcaaatacatcatgcacctcaggttcaaccagaacattcatattctcttggtgatacaagaaagaggcagcctggaaacaaatttgaaagaccaacaacttttcatggacttcctaaattgcaggcaacctcaaatgtggaacaaagaaaatagaatcttttagacttaaaaagcaacgcgtttacctctttagcttcctccatcagttcttgcccgagcttcttcagcagtaagacagtttttggggtagttttccaaagaagcatctgctgttgagtacttggatgtgtgaaggccatagaggattctgtcaccttttcccttgtacaagacactccatcagttcggactaagaacatctctgctttctttctcgactgcacccttactacaccagtggcagaagcacacatatttccctcaatagctccagcttcatcatcactggaatccgaggaggaaccactattatttctctgagtctgagactctcgaaccgaatgggatcctacagcgcgacttaagttatcactaggaggcacagcaataggggctgcagagaagccatttcccctgttgtccgatatacttttgttggtgttatcagacgcatgcacatttccatttgaaaacttcccgttgccaaaatctaaactttgagaacttgtaggtagaagggtcccattggagtttcctgtctccgcaagtcttcttatcgaatctttatcaacaatctgatttccgtttgtcacaccagtatatgaaaattgtggagttggcactgttcccaatattttggacggattagtaagataaccagcaggagcaatacttttgctcttcaggaatttagacatttcttttcttgaaaaaatattgcctggtggaacttgagatttaagaggatcgctcaccatattaaattctgatgcagatgtatctccctcaaaccttccagattccttgctctggcttgaagcagatctactatcaacctcattgatttcagagactttatcagtatgctcatcaggtacacccttaccagatactacagcatttgatccaagcttagtttcagaaacctcccgacgctttgactcttctgaaactggaatttctttcgtgatcggtcgtgtcatgtactgcttccacctagaaaccatcgcagaagttctccaaacaccttctttactgtgaacatatatcggtcttttgctgctatctgatacaatagaagcaaacagctcgacctgctcagctttaggagccatcctgacatcaattggaatttgcaccactgtaattttcccaagggaaattgcatcatcaagtgccgtctggtagaatgtatccttaacgatttcagctctcaggtcaacaattgttttaaatccgttttctatcaaccacttcaatccttcttgggttacctgtcctcccctccaaaatgcaatctcagactcgtaggaatcaatatcctctttcgtatttgacgagtaaatagggtcccaattcgcaaaaagtgtttgacaaggatagttatcactgcgtggaaaaccagcgtcgtagcagacatttttaagcttctgtaatttcctccaaacaattccacttctctcatcatccggcgtcagataattctcaagagcaatgtgtaagctttcacaacaccgtttcatttcacccctgaaaacagcaagtggtggaagcgactcctctgcaaccccaacatcatccaaattaaatgaattcatagaagatgacctcccagagagaatttctttccttcctttgtttaaaagagataatatacaaccaagcactgatactattttgtcctccaacaatggtttttcctccggtgagaaatcatacggtactcgacattcaccagtcacagggttgcatagtgtctccatcaacgctccatgtagtcgctcagctgatctaaaaattctacaatacgcctcaacctcagcaatgtcccctggaactggaccaatccaaggcaagtttgatgtatcgcgggatttcacagccttcaatatcaaagtgtatgaagtcagtcgaaatactaaataagcaactctgatcagcaaaagtttcgcttaaaaatcatgaaacgattcgataatctaaagatcctaagaacaattaaattcagcttcgcaaactctgtctctctaagtttagattgatcgaacaaagtgaatgaaaacaagcaaggaagtcgagagaagtaagtaagtaacctgagaatccaaacctaaatcgggagaaaaagcttcagagagctgcgctctgatcacaaatctcaagcggcgtttaaacgggacatcgtttctccgaaaccggaatccgaagggaattaatcgtccatcggaactcaaaccaatggagaagcggaggcgggaagagattccggtggccggagaaaggcgactcatgataggtacgtggcaagggcaaaagcataggaacatgagagaaacaactcgagaaacggttcagggtaatggcggagaatgtggatattttgagatggtgttttggaagtttgcaggaatttggtggacctcgtggattcgtcctcttcttcattgccgaagaggttgaattaaaacttgtgcttcttccatttgattgtgactggattgacacttgagctgcgcgtgcactccacgcgcctttcactttccatctcttcttcttatgaccataaaaagataaggaaaatgattttttttctttctttcaatttctcgtatttcatttgttcatccatttcttcgtttttactatattactgtggaaaattatttatatacagtaaatcactaattttatcaaacaaatttgaacggcatcagattgaattcgtaaattccaacacatatatgctcttaagaaaattattgcatatgattctggcataattactatcaacaaaagtatgatattataacacttgattagattttgagaaatgctaatagtatatctacttacctttcagtttacaaaatagaaagtataaatcaaaaaatggatacggattattcccaaaattaccaatcaatctaatataacaacatctgaaatgtatccatacgattacaaagatacaatagaagttttcacagggacaaataataattcattattcaagttaacaaacaaagacacaaataaaaagaaacactacgcagagaccaacaaaggacactcttcgaaaaatccttaaaagaaaaaatgacaaaaaagactattatatattaacaataaaaaatgaagcaagcaggtgaaaccaaagaaatgaagatacatataactcttcgactggtaaattcaaactataaaagcagcaaagtatatgatatgtgatcatattcatatcgcacgtgggcttctggctagaaagcattccaattatcagaactccgaggtgtctctgctgtagttgtcgttgttttgaatggtcctgtagaaccgaacgggtcatggtcgtcgaacccaaacccatgactgtaatcagagtccctggtgcttccaattgagtcgaatcttgtcaatgaggctttaggcgtctccgatgcattgttgttgctagaggaatcatagctttgtgcattgaaggaatcatatctttgatagttgaaagaatcaaaccttgatgcgaatgggtcaggctcgcttgtgctgcgcatcgagtctgtgcgggatagagagaaagcatcgttgttgttgctgttgaatgaatcgaagcgggagaagctgttgttagagaagtcatcgtgtgcggcgggtgtacttgggacagagtcgaacataaaggggcttcttcctgggaacaggttgtctgaacgaggagtctctgatgcaaatggcttcccaccaaaatcagacgtgctataagcaggagtgctcgggacaga

SEQ ID NO: 72494 - DNA, 497 bp, Arabidopsis thaliana landsberg
aagggcacgaagaaatcatgacactgcgtcgtgggccgcatttttgtgactcggtgcaagaggggcaggcgctcggcatcgtgtgcactcgcatcatggtcgagaaactctgcgtagcgggtgttctcgcacacaattggcagattttgcagcaattcatgttccttcattgcgcattcatttctgttgtcagcctctcgtccgcccgtattcagagaaaatcgcatatacgacgtacgctctaagcacgacgtagcgcttgcaatcagtcggttggactgaaaacttcaaacacgattttctcactctggaagcaacctcgtaagtatcagccacgtgtcgtgcaaacagcagtgctccatctgttcacgggctaacccggtttcttggtcgtccttgcgctgacccatctcagagacgcaacatggctgcgctgatcgctgccctcgcctttgtggccgtcaacgcgcaggaggccacggaagcggtaaaattgc

SEQ ID NO: 72495 - DNA, 578 bp, Arabidopsis thaliana landsberg
acattgtcacagtagctcttgtcgacattaattaaagcaaagaatacaaaaatcttatcaaatgtgacctagtattttgcaggcaatcttaagcagaatacgatagatccaacgaacaggaaacaaatatccgaaacaatcttccggaagataaagtaggatgacacaacatttctttgtgacatttctgagtttgaagcgcttcactgcttttacacaattcggaattgtttttacgtcggccaaacaagatgcaggattaggtaataatccattctctgattgaggtgctaatgtaggcgatggagcaccggcaatatcatttcctttctcattaccctttgcttgtatggatgttgttagtaagattatcaaagctagcatgaacgtcgcccacattctttgcatgattctgcttgttttttagtgtgtgtataactttgtgtttatctcaaagaaaaaaaataattcactgtatttatagttcatatatggctgttttttctttgggtagaaaatctcatattttttattcattacattttagtgcatgcatgtaatattggcccctgattctt

SEQ ID NO: 72496 - DNA, 520 bp, Arabidopsis thaliana landsberg
tacctttcagtatgactctcaagggtgcgcatcattggcgctttgcaaacaagcggatgcagcaagcttcctgcgggtgcccttcttcccacgcgacgatgccacactcaacggccgcccgcgggaaacgtttcgtgatctgcgcttactgacggtgaagcagacgtctgcctacaccctagcgctagctgacacccctgtctaccaggacatgtggcagcgttatatggccgatgcgcagcgctgttatgatgcactggttcaacattacggccaggatgcggtggatgcgctgtccatgcaacagcgcggtgttgtgccgccgccaacgttgaaggagcggttgttcaacctcaaccccaaggcggatgcagcgacggcacgactggtggaggcactggtggggcagaagcgcctctccccccaggaagaagcgctggtgcacgggctaaccaacagcctactgtcgggtacgtccgcaaatgcgccgccagtggcacctgcgatgtttatgtttttt

SEQ ID NO: 72497 - DNA, 529 bp, Arabidopsis thaliana landsberg
aaaaaacgaatcttaaaaaaaaaaactgtaagtaaaatgttttagaggattttctttctccaagttcactctctgcattttgatctatattatatagacatttcaagacattgtatagtttataaaacccgatcttctcatatcacgaaacaaattctatcaaatttgattcatttcactttgatattgataagatcatatatatataattttcagaaaatatattgttttattatttatcaaattgtatcattttttacatttgctcaattcggaaccaaatttactttttaatatataatggtttctgatttatcgaatattatctatagaggttttaatgtactttccaatataaaaaattatgtattttgataacaaactagaaactatttgacaccagcttcactaatgtctacattagcgctaattaacattctagaaagctagcgttgacgagctagctaaataataaatgattcacaaacataaacttgatcaaatcagcaaaattgaagtataaaatagt

SEQ ID NO: 72498 - DNA, 510 bp, Arabidopsis thaliana landsberg
  unsure (1)..(510): unsure at all n locations
ccgcgtccaatccggattctgctcaaacgagaacgagtacttatgcgattgcacatcacaggcgcaaccgggggagcggttatcgagccaggtgccgccgacgctgtccgcgcgctcgagannnnnnnnnnnnnnnnnnnnnnnnnnnnnnnnnnnnnnnnnnnnnnnnnnnnnnnnnnnnnnnnnnnnnnnnnnnnnnnnnnnnnnnnnnnnnnnnnnnccacttctcgtatcgaatgccatcgtgttgcgcctgttgtgacaatcagtgttgtcagattacaatttgacaacgcttgatgtcaacattgcccgaatgaagactgcaaaaactcctgttttcacccgccgcttacgcggactcgatggtgaagaacgccagcgacagcgccgtgagcaactgatcgaagccggcctcgatgcctttggcggcaagggctatcacaacgctggcgtgcgcgaaatttgcgccgaagccaagctcacggaacgctatttgtacgagtcgtt

SEQ ID NO: 72499 - DNA, 168 bp, Arabidopsis thaliana landsberg
ttcaccatacttccctatcgacatgatcttgtaagtataacgacatgtccaactatataattcgacacatatcatgtccaaccctcacaaaaatcaaacgcagacctttctctgattactgatacaacatatatatgctcctacccatgagtacagagacgaaacttc

SEQ ID NO: 72500 - DNA, 521 bp, Arabidopsis thaliana landsberg
tgtcaggccatgacgcaaagctgtggctcctagttcactagctatattgggatcagcttcttgctctaaaagatacttaaccggggcaatgtgtccttgcctcgcagcatgaacaagcggagtatcacctaccaaatcataacaatctcagtgatcaactttcacatatatagaaaagttctgcaaattgtaaaacacatggaaacacaaaccagtttcatgttttgcatcagcattgagtttcagttcttccaaaagatatctgcatatttcagtttgtccttctctcgcagcgaagtgaagcgctccacgtttgtttgcgtctttaatactctgcacagctttcgtcaagtcttttccttcatcaagctggttaacaacatctgcttggagaagtgataatcagtacacagaacatataactgctcaaagaaaacagagaaacgaaaagtaaataaagcactcactcttatggaattcgagatttgccgtacaagctgcattcaggatctgctgaactt

SEQ ID NO: 72501 - DNA, 544 bp, Arabidopsis thaliana landsberg
gcccgtggcacgagtaccatgaaacgactcgcgcggcacgtcgcctttcaggagttcccatgcacgcgcgccagacttgcgttgccgttgccggtgtcatcgccctgctttgcacgccttgcctgcacgcgcaggagacgcccgtcgcgcccactcccgcgcaaccgtggtacgcctcgatcaacacgctcgaccaggccatggccgacggcaagctcagttccgtgcagctgacgcgcgattttttgcgccgcatcgtcaagcttgaccagaacgggccgaccgtcaacgccgtcatcacgctcaacccggacgcgctggaaatcgcgcgcaacgccgacgccgcacgcgccaagggtggccacgcgccgctgctgggcattccgatcctgctcaaggccaacatcgacacccatgacggcatgccgaccaccgccggttcgctggccatgctgggcgcgccggcaccacacgacgccaccgtggcggccaaattgcgtcaggccggcgcggtcattctgggcaggccaatctcagcgaatgg

SEQ ID NO: 72502 - DNA, 604 bp, Arabidopsis thaliana landsberg
acaccctaagagaattacatgttataacaaatgatctttgatcaaaagaaaaacaacaacaaatgatcaagaattgctttcttttttttatatgttgcaaaatgaatagacgagccaaacttatactcaaatattggtttatctatttttaagaaatattctttatgcgagagagcaaactccccaaacgatgttaaatggatcacaacacataagtcgatccgaatagttgaagttttctaaaaaggcagtccctataattgtattaaacacactaaatcctccacacacacaaaaggaaatcacgtaaacgagacctttacatgaaacaatcaaaccagtttgattttatccgattttgctaatgagatgagttctgtatattgttataatggatataggagaactaactaaaataaaaaacgcaaagaaaactttatacagtacatattcttatggtcttacaaattatcaacgatgtgttggttatgtacacaagggtaaaatacatcgattcatattatgcataatctaacggggaaaataagaattaaaactaccttttgggaaacttggatttcaaccattgaactgtttgggattg

SEQ ID NO: 72503 - DNA, 394 bp, Arabidopsis thaliana landsberg
ttgaatgctgaaggccaacttgacttttgttgtgcgacaactggcgagtaacgggactggattaacacctgagcaaatctggggcttcggcgaccctgtgaaaacaacgatagactagatgggcctgaaacaccacaacagcgacacgagccacaacgcgcaaaatggaaccaaacgtacgttgctacattctttgacagcaggccgactacaaaaggataggggaaggtgtacttgtacatacactgtgttggtaaccgccccaggcgtgcgggaaacctgaggtagagaagagagaggctacagatactgaggctaaccaatgagtgcgccaacgaatatgatagaggaccacatacgtgtgagaggcacgaccgagaagatgatggatgag

SEQ ID NO: 72504 - DNA, 439 bp, Arabidopsis thaliana landsberg
gatatcttcttttagttctttctgtctctttttatttccttcttctgattaaagttctatattttcagataaaaacccggcattctcattcgatgatacctccacttgttgcctcctcttgctcttcaggtatgccctatgacctttatatcattctctatgactcctgtaaggttatcaaacccaaaattgaatgctacataaaaactgttattaacagctctctcatcctatgaactaacaaccaccataaagatgatgattatgacgaataagatagatttacgacatgaaacgccctgtacaatgccattcctacaaatagttagaacaccaaactcagatatacatatatgaggatcccactagaccaatgaactaatagacaagccagcggtctattatttgtgcgcacataataacataccgctctcgaaaa

SEQ ID NO: 72505 - DNA, 626 bp, Arabidopsis thaliana landsberg
tgtcttatcgtatatgatcatataaccttattgccaaatcaaaaccacatatttttcatgtctccaacattaggtccttttttcgaggttctagattctaactaatttttgaaacaaacctaaactttctttgagacataaggttaaacaatcacatcagtttaaaacttacctttctttctccttttttttttacttatgtgaaaaaaaaaacacaaacgagaaaaacaaaaaaaaaatagtgggaaaatgggcaactgtgggagtgaatatagtgatgttcgggtttgattccttggtttttttctagaagcatatatccctctttttctctcttgtcttttggtattttttgaaaaaaaaggaaaggtttataaattatgtgcaatgaagccatattctttttggtaatcatagatgaaaaaccttttgtgctcgtaaagggttatattctcgatagtttgttgcaaaatgaataactaatggaatattattgggactataccttctctttattttattaaaggcacattgcttcaatattgtccaagaattttttgattcccaccccttgatgggaaaagacaaattttatgtgggggttttttcttatgatcctactcttc

SEQ ID NO: 72506 - DNA, 500 bp, Arabidopsis thaliana landsberg
tcccttcttttatgaaaagactatttactgttttttttaattctcgttttcaggtacttctttgcggaagtggtcgacttcttcagaaacttttttctgatagttttccacgtaaatattctgttcatgttactgcccttagccataaggttgaaacatcggccatgtttcctggctttcatatacttagcgatctcctcgattcttaaatcttatccttcagtaagtagttgaattcactgtgaacttgaagtgatcttttcttctttgaggaattatattcataaatgttaacaatgctttcatcatttgatttactctcaataggtcggagattcggcgttatacttgagcttatgggcattgttcgtcaatgagttattaggtaaaagcaaatacttcacatcctctttagcattgtttagcctttgcatataaactctgcttctgtttcacatagatatgaagttctcgttctttcttttctgtggatatctcgg

SEQ ID NO: 72507 - DNA, 370 bp, Arabidopsis thaliana landsberg
ttgttgactctccctgcccttttatgctccgatcacatagcacatcagcatgtttgtttcactctttactactaatgtctctaacagacaataatgattagcgacccgcaacatgaatgctcccaatcgctgtttgtctgaatattcagaaaagacactcacattgagactgatatgtcaacactgagatacttgttcaagagataacagagtaagaggacttttacccctgagcattaagactgcaatactcgaccttgcacgctaagaaaaacgcccaatcatctatggatataaaagtgaaagaaaaaagtcaaaatcataaactgtatctgacgaaagtagatcacattgctgacactcttgcttt

SEQ ID NO: 72508 - DNA, 501 bp, Arabidopsis thaliana landsberg
ggggacagcttaacacttgtgtcactaacagtatctgcaagtgattcttagtcgtctgaacctacatcgtcattagctgtgtcatcgcacatagagtcaatagctgtgtcatcttccacattatcaccatcatcgctctcagccatagagttactaactgtgtcatcggccatagagtcaatagcagtgtcattttccacagcatccccatcatcactctcagccacagagtcactagctgggtcatctgccatagagtcaatagctgtgtcatcttccacagcatcactatcatccctctcagccacagagtcactagctgtgtcatctgccatagattcacaagctgtgtaatattccacagcatcactatcatccctctctatgtcatctgccattgtgtcactatcatccctctttatgtcatctgatacaggtaaatcctctgccatgattgtagacgttacacgctttcttttcgtcttcttcttcaaattttct

SEQ ID NO: 72509 - DNA, 1944 bp, Arabidopsis thaliana landsberg
tgcatgaagctaaaggaatagcatttccagattgtaaagctccagttacttggctctgcagattcagtaggagagaaagagcactcaaagaaaggtgcatgtatatgtcagtggaggttaaggacatatttgttttctctttaacagaagtgtatcccccagagatatcgactggatcaagaatgataagaccagacccagtttcaacaaccaggttctttagcaaggctcgaacccagatgtctttttcttttgaggcatacctgttgaaacaagagcaaaaattacatcaacaatgtaacatgaaacttaagatccagtaagcaactagtttagaaaaaaactggttttcaatgtcacgagcaggacgtagtggtggtcagatgaggggttactttagtacaatcctttctttatacaggcatatagataaagtaatcaagcaatcatatttgtgtctgccgaaatattgggttgttacgctcagacccaaatgtccagaactgtcatgtatgacaaaatggtataaatcactgatccagtggtttagagaacgctgcacttacataaaattaaaatccaatttcactcgcaaaagcttttctacagcagaagagtcatccagagatgactttgtaccgtcaaagaacgtgaactcaggagatacaacctgcacaaaaataagctatgaatttgacaaatccagcaaaacaagaatatttggatttccttaatcagataggcctggaatccagagtttgtggtaaatcactcgaagaaggttgaggaagagatctctatataaccaaaggttatgagtaaaaagagaaaaagaattatacaccaaaatcagggagtaacgactcaaaaagtaaggtaacaagtaaagagaaaccatgattcaaagaagataaaaataacataatttaggcactcaaaacttaaataaacccgtgaaataacaaaaagagaagtaaacctacctgagcttcaaaggtaaaactctgaccagacttcgaatcatattgacaagtgtctgaaacatctgatgatttgtgcgcattgctaagcacattctccggattagatgaggcattttctaacattgagatgtcaacaccatcttccggagaaaataaacagctactatcgttactcaaataaatgcacttgctcagaagcgatccattctgccacatgcataaaaggaaaaacagaaaacaagcagctagcataaatcaagaatcttggaaaaaggggagtgtggagcaatgattacaacaagaaagttccttctcctcttctcactataagtgcttagcaaatgtgtagaaatttactctgagcaagctaagtgactatgcaaattacataagtatgtattaaatattaaattgtttaaaagagagaagagtctcaaccttaattttcacattgacgaagcgcagcttctttccatgcccaacgattatgatgggttctaatcttcctacgtttaaatccttctctccttgctcactcaacgagattacctttccgcatccgtcataggtatactcatcaatgcccagtgaatctgctactaattgtctacgtggggacaagtgcacaacatcttctgtctgtttatagagtggctcagagagaactatgcctctacttctggtgataggatcatttgttggatctaatgtttcatctcttcctgttattgcacgcaaagctggaacaaaaaattcaccaaccgcaagaaggaagtcaggaacagcaaggatacgaggttgttgcacccgcaaaacacatgactgagaggatgctcgccatctataatccatcagcaacatcgttgaacatggtgcatcaaaatcaagaacagccctagagttggctcgcttaaagcttcccttattaagggaaaagggaagagattcagaagaagcctgc

SEQ ID NO: 72510 - DNA, 1574 bp, Arabidopsis thaliana landsberg
tgtatcggccacagggttagtgtggaagaaacacgacgtgagctttaaccatttttgtggcgcaaatcaaatcaaactatttttgggtgtggttgttggactggtctacttctagtagcagcttagccgcgaaggtcgcaataccataaacagaaaattatttcgatgccttgtggtttttggtgacttgtttcctaacatacgtcttaaaatacaaatgaccgaaaataggccattttaactttccggcagttgtaaaaggatcgataattgagtaaaaagatgcgtctgcgatcaggaataaaagatgtgcaaaagtaatgtgaaacaataaataaataaaaaatcccctttattagatgatatatatgacaatgacgcataaaagcatataaaggtggtgtttgggcctctaatcacttgcgctcatcctcttttatcttatgacattcacctaatcttttataaagtttaagcattgactaccactcatactttttatatattttctctactataattaagttgacttttctttgtcaatcccaattaatttctctttggatcatttttactaaatatgaaataattagtagaaagatgcaaaaaggggagagatgcgactccctcatgttccaagaccttgactattagtatagtttgttcatataccatatgacctagaatataagttatcagaaaaaagaagaattatttaagggggacaaagatcaattgtcgaatcaagaagtcgtgaaaaagcagtgaaacaatttgatgggagagaacaaagaatcaaataattatattttagcactaagttctcatgtcggtaaaccttaaattaatcaaagtactcaatcttggtaaataaaggtttgtgccatacataatcaaagttatcaatcttgtaccccaatttatggttgtaaaaactcttttaacatgctaaaatcttatcatacagaactaaaagctcctaacattaggagattgaagcaaatgaataattgaagagagaatcagaagatgtaaagtggggaaagacgagagagattctacgagcaccacatattcgtattattatttcaccatcgttataagacatgcaagaaagcaaaaaaacaaaggagaataaaagaaaaaaatcagacaatatattggaggaccctacaaagcaatataccaccaaaacaacgactcttgtacatatccaagcgtaagattttgtggattgaaccaaaaccatcttttttatatagcaacttttaagctaaagagactaataagaagttttctgataaaaatcatttccagaaatttcacgcttctttttttttttttatatatatttgctgattatttttttggctttttcttgtgtttctgattattgttggtgagaagagtaagtgggctggttttttattggagaaaaggcgttggtgaagtttctacttttgattctgactttttttttgccggcgatgccgacgccggtgactacggcgagagaatgcttgacggaagaagctgctcgtgccctcgacgatgctgttgttgtagctcgtcgg

SEQ ID NO: 72511 - DNA, 666 bp, Arabidopsis thaliana landsberg
gccgggcttgtagccgcacacggccgaaaccagaaagctgaggatcaccacgttttttatgccgccggtgaccagcaacgccgtgtgcgaacccagcccgctgacgttgctgaaatgcccgagcagccagcccaccggaatcaggcacaacagggtgatcaggccgaccatgccaatcggcatgtcatgttcggtacgcggcaaggtatgcaactggccgctcttgcgcgcacgcgaggcgcgcatcgcgccggtgaggccgctgatcaccggcttcaccagcttggccagcgtccagatggccgccacgccgatggtgccggcgccgacgaagcgcacgtagtggctccacgcgccctgcgccacttccgaggccagcccgctggccggatgcagcagcaggaagtgcggcaccgcccagccccagccgatcagcgcgccgaccagcatcgccacgcccacccacaggccaaccagatggcctacggcgaacagcgcgaacgaaaggctgaaatcaaaaccggtggctgcgctcttgtcgctgcccacgtggaaataatccgacaccgccgatgcgaacaccttggtctgcacgatcacgtagaacaccgccgagaccaccgcgccggcgatcaccgccttcaacccggaacccgccggactcca

SEQ ID NO: 72512 - DNA, 517 bp, Arabidopsis thaliana landsberg
gctctcagtggttaacagcatttctggagccatttgtaagttgcatcatctttcttactagtcacactggcattatatttaaatgattttatctggtcaactggactgggtagtggttctttgtggcaaagtttaaatttgaaaccttgttctccttctcttctctattgtcttcgtgaaatgtaattatttatgtttatctcttaaaactgactagttttttatggtctctatataatatctataagcagattgtagaccttctttggctaaacgaaatcagcatttgtaggatgtagtcttattttatgatggacgttgaccaaggccttcataaaactagatattacgtgtggagcttcttttgggtatcacaatacttgtttgaatttactattctatcacaggtcattctgctgatattggctgcaaatgcggcagtgggggtgatcaccgagactaatgctgaaaaggctctcgaagtagtatcatgcttcggtttagcaattatactatc

SEQ ID NO: 72513 - DNA, 129 bp, Arabidopsis thaliana landsberg
aacatgccaattctatcacctatctaatttttgcccgccaacagcaacatgtgaggggggggtaacatacaaaaaaccaagtcgcagacagacctcaaggacggaccttcaaccctgaagagaaaaaga

SEQ ID NO: 72514 - DNA, 558 bp, Arabidopsis thaliana landsberg
tcttctaacctcaaatctcttccccttttcttgctcttaaacgtttccatagtcctaatcagattactgtttccaaagtcttaatctttctttctgggtttttaatctcttctaattcttttcaatttttaccagcaaaaaaaaaactcacaaatcatcgattctttcttctgggtttttgtaaaaaatcgatcattttgtttctttctattgattgtgtgtgtttcttgcttcgtgacatttcagagtttccgtgtatttttgtttctatttttaaaagattctaatcgaatttgctcaatttcgcttttaaaaattgcaattttgatctctcccccgtctttctcggcgattcatttttgcttggatatatctcaggcgtcgatatagagaataaaaatcgacactttgtttcatttggaggctaaagatcaaagctttttgatagtgaagagcctcctccaccattatgaagaaaaacggtgacggttcttctcccaagtcgccagacggagttgtatcacgatcagctcgtagctcgtttcgtgctttgtctaa

SEQ ID NO: 72515 - DNA, 354 bp, Arabidopsis thaliana landsberg
atgtttcgcaaaacgcgattatgccgagtgtataccattcacaataataaccacggagtgataaactcgtgaaaattaataagctatttcccaatctatttcgcatgtgttaaatgtataactaactagtttagacaaagaaatttattaagtagctttttggcgtgttaagattattccgttatgaattttgtagtcctggtgattccgctattgtattgctcagttattcaactaatgtaccagtcaaggctttacaccttagtttagagtattctcgctttgatgggtttgattggtgtgtgagatggatagctgtacaatagaacaactaaataatggctagctgaatga

SEQ ID NO: 72516 - DNA, 381 bp, Arabidopsis thaliana landsberg
cttcttactgagccgcatgcaccgcaaggtgtctggctttctcctacggaataaaaaggactagtatatagccggacttactgtgaaagatatgcacctttagggcgggaggttgggaccagaatgtctaatcacctaataagcttactgagctccctcacgagcgaagcggataccaaaaacacttgttggggtatcaactcttacggaggatgggcaatatacggaatgagactagctgatgctatgcagggagtgcgacccggagctcagactatgtgcgtgggaaagcactcgtgaataacaggcgatagcctagtcgggagagcaataaccagaacgtatagcattacctaacgctgggcgccaatgagtggatct

SEQ ID NO: 72517 - DNA, 475 bp, Arabidopsis thaliana landsberg
  unsure (1)..(475): unsure at all n locations
tttcggttctgatagtttttctagtgtttgttttccagaactttgtttcgtttgccttctataaattgaacagattatgaaagaatcatttcaactatatgactaacttcaatgtttcactttgttgttatttttgacttttattcaaactaattgtaagacaatataataacaaagcttgacatggaagttattgttttgacaattgttatatgagaaataacatctctcatctcatttttatattatttttattgttggacaatcctcaaattatacttcaacattaccaccaattaaacataattaggaagaaaaaaaaaactcttagaaaaatattatgttaaatgggtggaaaatataatttagcaattgtggtggaaaatatatgagatgattcatgaatattcatatttttatcatacacacgttgatggatgantaatattttaaggaaaatatgtgttacagatat

SEQ ID NO: 72518 - DNA, 507 bp, Arabidopsis thaliana landsberg
tcgttgtgattactgaagtagtttttaggaatcgtttgttactaaaacaatgctgggaaatgttcatgttgctagtgctgacattagaatatcatgttttggtgtcggttatatatatccaaaattacgacttgtgttgtcgataacccaattcgttttgttttttttgggattttgtatgttctgagttttttctgttgggttctaatgtcttccctcaattcatggttgagttgacaccttaatttggaacatgtgtatttgatccaattcttgttctattggatcacaactcacaagtgaatatataactcttggattttccaaattcgtttttgcattgttctaaggttctcaagagttttttttcttctttctataatgaggttttgggttccactgttaatggttaaattccctttttgtttgaccatgacttatttgcttgttaatgcgtatatgattttatggcaaagtttggtacttttaagttgctcactaatcaat

SEQ ID NO: 72519 - DNA, 480 bp, Arabidopsis thaliana landsberg
actcattattactttaatagtattatctcgatccttattttttaggttttagattcccatttagacagtcttgcgtgtactgttacaactatctgactggaaaacaaaacgaaaagaattttaggattgggatcgtagaatcctgaactggggacatgattttgacattcaatattttaagtataaaaaatcaggtaaaggactgtagtgatacggcaccaacattatctaaaggtagaggaagtgaaaggactactaaactttcaaatgtggggaatctaagactaccatcaaatcaagagacaaaattcttgatctaacctgtgcttaaaatatacataaacgaagctttattgatcattatggacgactagaacagtgctagctataatgagagcacatatacagtgcacaactttgcggttagctcatgcaagatagcagttgactaatttgatagatcgactcataatgatataa

SEQ ID NO: 72520 - DNA, 591 bp, Arabidopsis thaliana landsberg
gactacctctctaactggaaaatggaaactatacaggattaatttgttattcaagaggaacatacattcattatatgaagcatgatactttatgaacaactaacttttttttgttggtcacatggaacaactaactttatctaaacaatattatacaatattatatatataggtcaattatatcataaaagttggccaaaagatggctttagtatgcgcctaaacccatcatactgtattatgaaaaaactgttccggcaactagtattttttttgttgcaaaagacatttcgccaacagttcgtcattttaattgatataaatggttgaaatctgttcaagaggagaaaaaaaaaggaggtcaattgacttaattagtaccataaaaatctgcaaaaatgatcaattaattgcaaataaaattgcaattgattttttttgtaaaacttccccataattaattaatccgtcaaaacacatcacaacatcacagttagaattataaaatggcttagtataaggagctgattggatcgggaattaaaactataaatacatcatttaggtctgcaataatgatttttaaaaata

SEQ ID NO: 72521 - DNA, 156 bp, Arabidopsis thaliana landsberg
gctgaactattcttttatcctgcacaaacagccaccttgggggaggggaaaccaacttaaagcaagaacgctcacacaacaggcggaccaacattgagctctcatgatgttcgggggcctaacggaatacctgccacctgaaaaagttacacttgc

SEQ ID NO: 72522 - DNA, 496 bp, Arabidopsis thaliana landsberg
  unsure (1)..(496): unsure at all n locations
cgacatccactcgcggctgctgaaggagcgggtggtgttcctggtcggaccggtgaatgaagtcacggcgaacgtgatcgttgcccagttgctgttcctcgaatcggagaatcccgacaaggacatctcgttctacatcaattcaccgggcgggtcggtgtcggcggggctggcgatttacgacaccatgcagttcatcaagccggatgtgtccacgctgtgcgtgggccaggcggcgagcatgggtgcgctgctgctgacggcgggcgccaggggcaaacgtttctgcctgcccaactcgcgggtgatgatccatcagccgatggnnnnnnnnnnnnnnnnnnnnnnnnnnnnnnnnnnnnnnnnnnnnnnnnnnnnnntcctgaaaggcaagttgaacgagatcatggccaaacattccggccagagcatcgatgccatcgggcgcgacacggaccgggacaacttcctttctgccgagcaggcggtaaactat

SEQ ID NO: 72523 - DNA, 575 bp, Arabidopsis thaliana landsberg
tttaacaaactaataaagaaaagaccaaggacattttcatatcgtctagtcaattcgtaaatcatgggtcgagagtatggttgatgtcaggttttgaattctagttctatatgggctgatcgcaaagcccattaacagtctcgtttatctttctatttttgcttacagaaaacatcacgtagtttcttccttaaactgaattaaaaaaggaaaacgacatacaatccaagtttctaacgataacaacatctctttcacttccttcatagctcatttcaaaccacacattcaaactaactctgcaaaagaaaaaaaaactcagagcagaggagatcgagagagacaaagagagacaaagagagagagagagagagagagagagagagagagagatcttcaacaagcaatgtctatatccatggcgttattctctccgccgatctcttcctcacttcaaaaccctaatctcatccccaagatctcaacctctcttctctccaccaaacgtttctctctaatctccgtccctagagcttcctccgacaatggtacgacttcccccgtcgtgaaaattc

SEQ ID NO: 72524 - DNA, 560 bp, Arabidopsis thaliana landsberg
  unsure (1)..(560): unsure at all n locations
tgtgtaatttcatagctaaatagcctaaattgattttcattattaacataatagtatatttgaaaatagagtgttaagggtactctgtttctgccacttttgaaacagaggaattatttacttacatggttttgaagtcaagtcttaagatgtgatggaagaaacatgacaggattctacctttgcctctatggctctatagactatatccatcactgctgcataatggcatattttttacatatccatttttccaagaaaagagtcataaacttatgcatgataaatacagttgacatgatttccatgaaatctaacccagcccaacaaggcccataggtagaacccatccaaaatccagcttatgagtgagttacccatgtgacatttagtcactcccaagtcctaacgccgatgtgagctgtgtaaagaatatcaatactttcactcacaggtcagacacntgaaatttgcttcaacttgagtcatccaagatgatatttatagaatcaagcccattcttatggttggatatcccaaaatctcatgaccacttgatc

SEQ ID NO: 72525 - DNA, 6665 bp, Arabidopsis thaliana landsberg
ttttttgtggtctctaagttaacagaatgttggaacttttatttcctttcctgtcctgttattaattgtgttgggctaagatattcccttcctggttttcttttgcgttgcttgctcagggtggcttggcaatgagacaatatattccggagctgatgcctttaattgttgaagctttaatggatggagctgctgtagcaaaacgtgaggtggctgtttctactcttggtcaagttgttcaaagtacagggtatgagatattgaccttcttttacgactttcttcttgttttatatgataatgctactaggcaattttgaacatgctaattttcttgtaaactaagacaatgctactatcttgattggcgaaagcctggttggactagatgaaaatactggattctaagtgaattttttgacacaaacggggcctccatctcttcttattagctaggtagaagcctgagctatccttaggctgtttatgtgttaatgtatacatatgtgttatgtttatcctttaacctactaaaagtgagaaaattctatatgaaatgacaatattgttatccctagctagttcttctatctgcggtagatctttgtgatggtttttttttccgtctctcctgagatggcacattattccggagaaagaatattgcctttctgtgtccggacttgtcatgagttgtattctctgtttgtcgtgcgaaaggattgatttaccaatacctaggatattatgctgcctagatttaatcaactgtatcactggtgtttatgaagttgtagacatttgtagacagtgcggtgatcaacttgcatgttactgtttagtagcttgggacatgtgctaattattgtgcacataactagtacaaaatgaagggagttccagaagtttacaatcctccctgcatgttatttacggctttaatttcattatgagcgtaggtatgttgtgactccatacaaggaatacccattgttgcttgggttactcttgaaattgctgaagggtgacttagtgtggtctaccagacgagaagtgctcaaggtagtttctagagaattgttttactctagactattctagaagatatttttgtgataaacgtggttatatctacaggttcttggaattatgggcgctttggatcctcatgtgcataaacgtaaccaacaaagtttatcaggatcacatggtgaagttcctcgcggcactggtgattctggtcaacctattccatcaattgatgagttacctgtcgaactccggccgtcatttgctacatctgaggattattactcaacggtagttcttaatttgtgtgaatatatttcatttgtagtctgaattgtgctcaattactttccttattgttataggttgctatcaactcgcttatgcgaattcttagagatgcatcacttcttagttaccacaaaagggttgttagatctctgatgatcattttcaaggtaactaaaaccatcttgactgttttttaaaataaacttgtgttggaactgcaatgaggaggttacaactttatcactactttgtttttgcgaggttagtcaatgggattgggatgcgtgccttacttgccgaaggtaggtgtaaataatattgtatctccggcagcttttcgataaatgctctctctgttttacgttgtggtaatttgttgggttggttccacctctgaatttgaaggttttacctgagctttttcacactgttcgaacatctgatgagaacctgaaggacttcattacgtggggtcttgggactcttgtttccattgttcgccaggtatatccaccttaatattttcagttatggtcaaaatacgaccgactttgtgtaaactcatagcttatgttatctgtgtacagcacatacgcaagtatctgccagagctgctttcattagtctctgaactatggtcatccttcaccttgcccggtcccatacgcccatcacgtggtcttccggtaagttgtatgctgcctagagtatgctatgtttcttattgattaaggacagatatcttatggggagtacttcgcctctcttactgataatcaggttctgcatctactggaacatctttgcttggcacttaatgatgaattcagaacttatcttccagtcatccttccatgtttcatccaagtattaggtgacgccgagcggtttaatgattacacctatgttcctgatattctccacacactcgaagtgtttggcggtcagtaatacttatcttgttttgacatcctcatagtcattttatattacttgggtatgcgagttctagtaattaacgtatgcagttcttttacaagaatgtaaagaggttccacattattagattgtgtagtgtaagatgatacaagtagtttcgttattatatgcatatttgtttcttatccattaaatccaattttttttcggtatataggttctttgaatagtcagattgtttactcctgtagtttccattttctcaccatggccagatttcactctgatggttgacccttagagtccttatgtgcaggaactcttgatgagcacatgcatttactccttccggcacttattcgattgtttaaagtagatgctcctgtagctataagacgcgatgccatcaaaactttgacaagagtaatcccgtgtgttcaggttaggagctttggttatttattttgattttttttttccctttgctgatccagaaaaaattccatattaagcttcttgtaatacttttaattatccgtatatatcctcaggttactggtcatatctccgctctcgtgcatcacttgaagctagtattagatgggtgagttatactgattgtcactatctgaaaaacagtatattggttactttttcctaagggttttcttacaatacttcttcaaaacttaggcattgtgtcactatctggttttctcttaaatggttgacaatgcattatcaaaaaggatggaattattattatctcattaactttcaatccgtcattgttactgttacaaatctgttttccataagttgtttgtattgcttagttacaattttttctggccacatgtatttgttattagaactccgcagatgttagttacatttcttaatatcatgggattttatctgccattattgatgggacccaattgttttctagtggattttcatttcacgtttttctaaaccttactcgtgatttcagtttcgtacgtataaatattcttatggggtatatcttctgtaatcgcaggaagaatgatgagttgcggaaagatgctgtcgatgcactatgctgtttggctcatgcacttggagaggacttcaccatattcattgaatcgattcacaagcttttattgaagcatcgattgcgggtcttgcattttactatcttttaaataaaaatagcagcaaaaatttatctgtcatgtattataaatgtcatttgtgaacttctgtctgtaaaatctcactgtacaacattttttcagcataaagaatttgaggaaattcatgctcgctggcggagacgtgaaccattgattgtagctacaactgcaacccaacaattaagtaggcgactgccagttgaggttatcagggatcctgtaattgagaatgagatcgatcctttcgaagaaggaactgacagaaaccatcaggtactcttttctgtgtcgtatataatcacatatagattcttaatgtgttaaaattttgttatcaagtttcaagttaaaatcatgattttactctaacattgtacaaaatttctggtcggcatagtcattattagtatgacttcattgaggcaaacatggggtgtattgtagggttccttagctgaataaggcggatctttttttctttctttttcctatctaaatgatgggtaggtttatctatagcaacgttcattcattgaagcttagtcttggtcctgagccatttgcttcaatgagtttgtaaatatgtcctctatatttcctcttctccatggacattcagcttttaaaaacaaataaaactatatatgggcttgatttaacatgatcctctagtaaagtttatttggttctttcttagttttgaaagagctaaaactttcactcatggctttgatgatctggtgaacaggttaatgatggtagactacggacagctggagaagcttctcaacgcagcaccaaagaagattgggaggaatggatgagacattttagtattgaattacttaaggagtctccctctccagcattaagaacttgtgcaaaacttgctcagttgcaggtgtttcatctatgctctttcttttcctctctcaaaagggtgcattttaatgattgtgttttgcagccatttgtcgggagagagttgtttgctgctggctttgtcagttgctgggcacagctaaacgagtctagccaaaagcagttagttaggagcttggaaatggccttttcatctccaaatatccctccagaaattttagctacactactcaatttggtatgttcgttgttacattacaagaaaacttaaacatgataaagacctttgattgagtcactggctataacgaacagcaaatttgtttcctgtggctatgcttgtgcttattgagtgcttgtgttttagcttaggcgattgttatgagttgactacattttccaagactggaaacaaaaacttcttaggtcaccatttctttagcggttgcacctgttaatctttctatgtaaaacacgttttttgttgctaaaaccatcaacaaaacgatctgtgagtgtacatggaaacatgacgtgtaatttttatttaatctaatattaacactataatccaaatatctgcttatacttcgtttaatctatattacgtttaggttggataaacaatcataagttcagaatcaatatcatcctacctttatgtgtgatcctgttgcttggtcctgtcacttgtgcttgattttattatttctcttcttaggcagagtttatggaacatgatgagaagcctcttcccattgatattcgtcttctgggggctcttgctgaaaaggtttgcgttatgtatttgctagttaaattagatttggtacttttttcatttgcgtatcaagaattcatctgattttcttggtaatgtgcaatattccaactttgtagtgccgtgtttttgccaaagctctgcattataaagagatggaatttgaaggtccacgatccaagaggatggatgccaacccagttgctgttgtcgaggctcttatacacataaataatcagttacaccagcatgaggtacactgtattttgtatcctatttcgaccatctttgatatttgttattattgattggttggaattctttgtataggctgctgtcggtatactaacctatgctcaacaacatcttgatgtgcaattaaaagaatcatggtaacatggcttttctgaatcatgatgcacttattttcagttctgtttgataggcattccgtcacaagattgtgtgtggttccattctttgatcctaatcagtggaaaagcactaacagtgtttgtttctaggtatgagaagctgcagcgctgggacgatgcactcaaggcgtacactttgaaagcatctcaaacaacaaatcctcatcttgtattagaagccacattaggtttgtggtaaccaagactaatattgggaggatttagtgggtttttttcttcgataatgtttttttctaagttctgttggcatttttttgtcggtattctgttagtagttcatagagaactgtgggttcataacattcttacaagttagcagaacaacagatcaacgcatttttttccagtctaaaattcatatgatgcttctcttttcttttcatgaaatggcctgattctattgcttatttaccacgttgtaggacaaatgagatgtcttgctgcacttgcacgatgggaagagctcaacaatctctgcaaagagtactggagtcctgctgagccatctgcgcgtctggaaatggcaccaatggttggtaacttctacttatgctacattcggtgatatagctacatggttacataatgtctttttgcaaccatactaggctgcacaagctgcatggaacatgggagagtgggatcaaatggcagaatatgtgtctcggctagatgatggtgatgaaacaaagcttcggggtttagcaagcccggtttctagtggcgatgggagcagtaatggcacattcttcagggctgttctgttagttcgaagggcaaaggtacacttggacctatatttttgtactataaatcttatcaggcttacttataatctatttgcagacactaatttctgcgtatgtgtgcctgtggatatttttctttcctttttagtacgacgaggcacgcgaatatgtggaaagagctagaaaatgtcttgccacagaacttgcagcgctggtaggtttcatttctggtagtattttcattataaacttttgtgaaaaatatctatgaatcatctgttgtgaataaagggaacagatgtatatcagcaaagatatttgtaactggtctcagccttttccattagttcttaaa

SEQ ID NO: 72526 - DNA, 583 bp, Arabidopsis thaliana landsberg
agtgatagtacttaaacaaaaaaataaataaacctctaatattaactagtactttttttttttgctttgttattaaaaaaatataactctttatttgggaaaaaatatctgtaaccaaaaacttaaccgtctgtaacaaattgccgaaccgactaattgaggagcaagggcaaattggtaatttcgtttagatttcccgcttctttcatcatctccaatttctcacttctcgagtgttaacaaattacaatcccagacgaattagatcagaagaaggagagaagaagagaagcggatgaggttcctcggagactacaagttcgctttacttacttgctccgttatcgctctcagcatctacttcgcgattaacgtcgaatttcgtttcgcgaacgattcaccgggaactcgtaccggagttaaggtttccgagaaatctcccttcaacgacgaattcatgtacatgtcaatcgctgaagatatcgatcgatcttacctccactacgattactaccgtgaatcttgccctaccgccgagaaaatcatcgcgaaagctatcagagatatctacaatgtcacaccc

SEQ ID NO: 72527 - DNA, 456 bp, Arabidopsis thaliana landsberg
ctaatgggggtagaccggaacgaagcatcagcattatgaaactgcttaccacatggaaactctgatagataggaacagatatactgaacgatattatagggctagacacgtgtatataaataaatagatgaaaagtgcctaccactgtgaaaattcatactctatcgatcaagcaacaatatcttaatctaaggctctagacataacagagagagaacttgtaataaaccatacctacactactgaatgatatagggatcattcagattttaactatataaactatcctttatagttgctacttaagtaaacagtacatgaagacatattattggtatactgacttttatgcatgtatcttactagttcgtttatacaatacctaacattagatgacatgtattgggagacggctcaacacaatactatgattggcctcaaaaaaacaaaatatgc

SEQ ID NO: 72528 - DNA, 574 bp, Arabidopsis thaliana landsberg
tcgaatagctcttctctatagtggagaatactcgtgagataaaacagtaataagtcaaatacagaatcagatccttttagtgacttgcttcgaatttgcgttcttaaggttcttcttgtttttgagctctaacaaaaataatttatttattttcatgtataaatattaaaactgattatatagagagacaggtgatagttagcagtgaatgctcgttggtacaactcctcattcttctccgcaaaaatagcaagttttttaacaaacaaaaaaattcatataaacgattttatttttttgtgagtttgagattcgttaattctggaaaatttgtttattttcaaaacaagaatatggattcgtcataaaagctaggctatgatcaacatgtttcatacaaacaagaacagggcttttcaagaaagtagcattctctgtttctgatgtctcaatcccttttgatttttttgtgttggcagattcatcacatgtcggttctttcttctcggacaggacgagatcgtcaaacgtaccgacacacttccgtctcgtttctggtaccaacaactacaaa

SEQ ID NO: 72529 - DNA, 2161 bp, Arabidopsis thaliana landsberg
aattctgcaggacagcattgctcggaggactctgcaggtccgacggagatttcatacattccctgtaaaagacaagctgaaagtaaccctactcattaggtgagccaactcatgtgttgatactttagatctttgcacaataggaagttgttttttgtttttgttgatttagttttggattttgaggtccttaatcaaagttttgtgatatttgaattcttctcgagagtccagacttagtataaagttcaaacatttgaagattaaaacctgtaactatatatacctacatttccattatgttaaccccatctgcagataatttgaatggctcatttcgtttccacgttacaaatgctaaatttatgctgtggttcaaaggctagtttgtaaattcaggtttcaagctgactctctcagtttttttccttttttggttaggatccatccgtgtgtccacaaacgattaactctggagatgaacttcttgagaagatgtcaagcagatctttggaagaagtaatgacaccgtcggtagttgccatgaacctcaaactaaacctgtctcctgtgcctgacaagtgagtctatctttagatgtggttacatgcgaaaactgaattgactataactttgatttgctcgtctatctaatattggcaagcttctcaaaacgcagtctttacatgttcataagaatattatggacagatgttactttcagtatatgaatagcttgtgttctgtgatatgaccagaagagccaattgtttctgtaatgttaagttatactgtgtatactttgctttccatgcaataactaatccacatctgcagatcttccgaagaagcagagtacataaagggaaattctgatccggagatccatgattctcctggcgaccctgttagaaaatttattgatgaggatgctgaagaggaagatgacagtgacaatgatttactccgatttgaggatgaggatgatgacgaagatgaagacgatgatgatctcagggatatgattgtcagtcaatttaaggaagatccaactgataaagatagacgtaatgaactgcatcagaagtggctcgagcaacaagatgctgcagggacagagaaactcttacagaagcttaaacgtggtgtgcagcatgatgaaacattattgtctgaagatgaagatgacgatgttgatgatgatgatgaagagaggcctgaaggtgctgatggtgaagaagtgcaaaaacctgaagccaatgaagatgaagatgaagatgaagatgaagaagatccaagtcatgcaaattccatgcgaatgaccataaagaaaataaaggaaatgatccctttaatgttcacagatgaagatgatgtttatgtgtcatcagacgatgaggaaatggaaaagaagcttctgcaacagcgactgtacaagaaaatggtaagtgatcccggttcaatagccctgtctgctccatattttatcatttgatccaccatacctctctatatagtaaagattgaaaagcttgtttgatgtttcgcttgtgctgccccattaatatggatcattgttgtttggaacaggagctaaaggccaagtcttcatcatccactgcggatgaaaactctgaagaaattcttcgccacatcaagaagcctgagatcaagaagaaagcaaaaccttcttgtaagataccacccaagtttctccctgtatttgtaatcatcagctgagtttatacacacattgctgattgcttctaaccattttgtttaaattgttttcagcttttaaagagagggcactcatggaaataaacaaaaaccctgcagcatccaaggtataagccttcttcagttactttcgtataccaataaagtttcgtagatactacataggtcacactttgagacttcttaaaaataggacaatgaattgcaactttactaatgccgtgaatcttttgcagtcatcgttcttgggtagacttacaaagagttccatatcagaaggatctcgcaagcgcggttcaaatgttgtacgtggatatatattcgaacgcgatgacagtaccagcaaaagctcaaactcagtggcagaggaaccttcagttccagagacggtaaagctcttccctatataacatcacagatt

SEQ ID NO: 72530 - DNA, 3232 bp, Arabidopsis thaliana landsberg
ttcattctcacgggcgacacgatcctcggaaagtgaagccacacgctgagcgtaagaaacggaattgatcgaaggagagtctttcacatatcggatttcttcacgagtccagttcgctgattctggagactgaaggttctccgtcgattcaacatttttcggttcagatttctgatccttgggtttggccgcgtacgatactggctcgattgtaacagcctttttgcgagattcgtttgaatcgggagatggattcgaatcggatgatgaagatgaagatgaagatgaagatgaagatgaagagaagagtcttgggatttgttgaaatggagacgaaaagggtttgattagaccttggcggcgagcttgagagagtaggagcttcatagctgccattgtttcttcactcactcgaggtttttcgtgtgaaatgtgattttgggggtttaaggagatttctgatttttaacttaaaagcttttctgtaaatgttataaaactttagggaccaaagatataaataatttgagatttttttttgaaaaatctcttattcacaattaataaccaatcttttcttatctcttgaaaatggaactattgttttgtagattttaacattcgatcattaatttattcatgggtatttctgtttcttctaatgttacaagctaacaacagagattatgagagtgaggtcagtttgcaagatatcaaaaatggctgaattgtcccaacaataactcaaacatgtcgtcgggggttagaagtgtcgttcctccaataaccaagttaatgtctggtcttccgctctctgacacagcctcttgagcttccaaaaccttaacaatggaggaaacatagacagttataaaaaatatagccctacaacgtgaatgcgaggtgacttttgtgatgaagaaactcacctctataccgttgatacctccaatgacaaagacaagaatgacactctggtctgccaggcttggttttgcctgcaatagcattgccaaacattaatgtatatcttgtgtaggaaaatgaaagtcatgggtagagagaaaggtctaactaacctgaccaagaccaaaccttccaaatccgcttttaataaatcttccaacagttgaagaatggtattctaaaccgggtatctcttgtttgctcaacacttttgttataagcctgtagactagccctttgtttccagaaggctcgccaggaaagctgctctctgaagccaatgagccttctcttaatggtagattccttgttcttagactcgataacttgtggaggaacctaaataagctgtctactctatcacgcaaatccagtttcagctgcatatcgtcataggactcgtctgctttactattgtcaacttcttcttcttcctcgtcaccccatttcccccatggatcatcatcaagagcatcaatgtctaattgatcatcagagggaatttctttggtttcctcagacttgagacgattcaatctgccctcaagctcttctgtcaacccattaagaaacttgagatttcctgctgatggattctccagaacagcatcgacaatggcttcttttagaaaatgctcttcttgccaagagaaaggcccacctgagccagatgtagggaaattttcgccagcaagaatgtaaccaactattgtaagaagcagggcatcacgaaaagatagcagccctcgtgatgaggaatctggtttctcgtttttcttcgcttgaagttctgccacagcgcttttgttgatcaggtcactaatttgagcagccaaaccctgactcgtatcaccagcacttacgtttaacatcatctccgcactgctaaaagtatcccatttggcactttgagattcatcaagagcagcggctgtagctgcccctaactgaataatccctttatttttcaacaaagacgactggctttgggacaatgctttgatcatggcctggagctccggttttgtagcataaccaggacgagctctcacgttaacagagatattttcgcgacgcatagcctcttgaagccatttcttcaccagtacacttccatccttcgttttcctatcaatcatggcctctaagtaaggtgttcctctaaaacattcagtagcgacaagagatccatttagtagttcagtccagttggtggtagatttcttgtcacattcattaaacaaacctacattttgtggagcagaggtatatgaatcccagccacgtaaaaaagcttcaattccttcaggaagaccagaatcccgaatcttgcttggttcttcattaagcagttccccaagcggcacttgaacatcaagagaaggacgattgatgcttgggaccccttgtttaagctgtgcttgtgaagaaaatctttctgcccgaggcaaagatgaaaagatacgatcgaaaagtgaatccccgtgacagcagggagtgataagatcaagtgtgcggtcaacaagtaacaagccagcagatcgcttacgacgcgctacatcataaacacttgacatgtctgttagaatcttcccaacattcttcgattggtcaccaagtgaaaatatttccaacttcaactccatctacaattttaaaaaagtgacgacatggtcacaaatttaagaaaaacgtacagaagaaattaaattattgacaaacaagggaaacagatatcttctagtgttctagctcacgtacttcatgaacatcgtgaattaagttcaaagcggttactgcagtgttagtttaccttaagggccagctggtaaagaaaatgtgcggtaagagttgcaccaggaggaacatcatcagtgtcagacatagatccagtacttatgggaggcaaaccaaaactaagagaattctcatgttgacgggacaaggacgcttctgcgactgatccttgggaaggtaagacaaacgctcgaggagtgaaaggacaaataatcaaggggaagtggtgaactgagacaaccaaaccttgtgcaccacctgatgaaatatctacattttcgctttcaataggctccatagtaagggattcaagtgcagaagagaacttagaaacccctttgtctttagatattttgtcgcttttcttagtatgttcattggaaacctgaacaagtaaggtttcatactctcgatacgcgtctggacctagaggtgaatcagggatagctgaatgagacccctgtacaac

SEQ ID NO: 72531 - DNA, 444 bp, Arabidopsis thaliana landsberg
gctcgcttttcgtattatcacaaggaaaaacgtatatttttggtttacaacgatttattaattttatcttattatactaagtctttaaatgatttgtattcttagttgattggactatggactattgattttttttttgggtatttataagatatgacctcaaaagattgaaaaattaggtgagcaaaataagcactgtttctacagtaaaacatgtaagaaagttactctactatccttttataatatttttggttttaattttttaatattctcatcttcttttctctctcatatttctccagttaagtgtttacttttggccggcgatgatgatttaattggtggtgttggtgatgatggcattatcggtttgtgacttgtgagtgagtgtggccgtgtgggtgttgtgtagacttgtgtaactagagcttgagtgagctg

SEQ ID NO: 72532 - DNA, 382 bp, Arabidopsis thaliana landsberg
ctccggtctttattttcatgggaatgcccacattaccatgatctttcgtttcattatggaggcaatacacccggatggacgcactctggggcaaacgtcgtgtaagtgggtcttgtgctatataccaaagggcacctgggacaagtgtctctcctataaactgcggaactgtgggaacgattctagaatgacttcttctataaaggaggctagctgtggtaaaagcgttcaccgaaatgtactatgatcgtgggatgagctgccatgacctgctctataccatccttcttgcgctgctttcgattattcttacaggaagggcagcttgggactattgtatgttgagacggggaaaatatagtccagcatcgctctgtactct

SEQ ID NO: 72533 - DNA, 536 bp, Arabidopsis thaliana landsberg
atgcccggcacaaaagacaatgaagagttcctcgcatctatgaacatttaaatgcgtaagacatagaaaaaagaaaaggccccggtaataattcaccggggtcttttattttctattgttactgcggtctatttagacagcaggttggtattaaacaatttgagtatccgtttatattcatccgtccagctgctgggctccacaaaaccatggtcttccactgggtaagccgccagctcccaattatcttttcccagttctatcaggcgttgctgcagcctcacggcatcctggaaattcacattcacatccaccataccatggcacatcagcaggtggttcttgaggccgttggcgaagttgatgggtgatgacctcgcataagcaaggctgtcgctatacggctcgttcagaatattggaagtatatccatggttatacgccgcccaatcggtcacaggccttaatgcagcgccggccttgaatacatcgggagtggtaaacaatgccatcagcgtcaggaatcctccatagct

SEQ ID NO: 72534 - DNA, 400 bp, Arabidopsis thaliana landsberg
aaactgagatttacacatcatactggacaattcaacatcttttacttgtttcataggtgtttaattctcgaagacttccttacatatacacgttccctgaagttttatctcaagcaactcattaactggcatgaatgacgtaactcatcaccgtaagcaatgtaaccccgtgcgaatgagggagcatgattgggtccctaaacaacagttgacttatggtgaccagtacaaagccaacatagctataccgcactcgacgactttcgcaactaattaaaggagctcaaccatatgctttcacacacgaatatacaccttgtcgaagtccgtattatgcctaaacatttgctaaacccaaaagtggcactaaaaacattttccaaaggcaaagagacttcac

SEQ ID NO: 72535 - DNA, 453 bp, Arabidopsis thaliana landsberg
tagtttttatcagtgacgtaaatatataaaaacaaaacgcggaaacaattaaaaataaattcaaatttaaatcgccgatcaatccatcttcttcttcatttggtattgctgcttacgtcgtcagatctgctcgttttttcgctccatttttgggtcaccattactcagcttccgtaagtgttttgattgcttgttttctccgaagttttgaatcaatgatctgagaaaatttccctgtttagatcgacgattctcaaggtttttgttgtgtgcttgttggaatcgttttcgccgattgagtttctagatctgaagttcaatcggtgattaccattgagatagttgctgctgttactaagggtttgattctctggtcagatacattgagccgataaacattttatggcgttttctacaaatttgttagcttcctagggttgttttcttctccac

SEQ ID NO: 72536 - DNA, 569 bp, Arabidopsis thaliana landsberg
cctgcttcgacgttgcgtttgtgctcgcaatgtcgggcgaaacggtatgcgaaaaattcggggcctcgggagaggttttccgcacggatttcaggtgggagctggcgcttggacatgggtgcatcgcataggtcacgaacaggcgtcggcgggggtgctgacggggtttgttcgattgacgagagcccttgatgggcggcgatgcgactgcccgagtttcgcgttttatccggcggataaaatatagcaggaaagaggccaggaagccagcgcggccggtgtgattttggatgttcccgacttccacgattttgaaaatttggagcggcacggcccgccggtggtcatatgcgcgggcgagtgaggggcagggggtcgaaccggggtgacgcatggcggcagagcggcggggcgctgccatggccgtcgcatggtgtccgaatgggtatacccgtccgtacaaatgagaatgataaatttttatgtacgcacgggttgacagtacatcaacggtcatgttttagttcgtacatcacccaaacggactgaaggaggccgagcaatgaata

SEQ ID NO: 72537 - DNA, 597 bp, Arabidopsis thaliana landsberg
  unsure (1)..(597): unsure at all n locations
aaaagcatactagttgagagaatcatactatgcatgtgcctttacgtgaactttttctaattcaatgattcattcattaaccaaaacctgaaattcaagactccaaaggaaaattaaattaccttggttggagtttaggtctagtaaacttggaagtgtctccatgtttggattgatctctgacccttttcacttcttctgcttcttgttggaaaagatgaagagaagaagcttgtctaagagtaacaatgtaaacagccgtagtagagtttatatcagaatcaccaccattatcttgtccaaatgaattcgacaaaaacccaaaacagaacagaaggaaaatcccaaaattcaccatttaaactctcctcgttttttcactcactggtaaaactctacgaaacccacaaattgcttaaataagaagataaagaaagaaaaaagctgcaaaagaagaagaaatcattaagcaaacatggtgaatatcatcaagtggaatctgcagaaaaaaaggaactgccttttatatctctnntcgtgtggagacggtgaaaagaagagtgtgctcatatttatacttataaatagtattatata

SEQ ID NO: 72538 - DNA, 474 bp, Arabidopsis thaliana landsberg
gagcgcaggtcctcgtgccgcaccgacagcacccggccgttgtagtcgccgcgctgttcctggatggtggcgacgtaccgcgcgagcgggccgaccttctccttcggcagctggttcatgcgctcaaggtcgatcacgagcttaggagcggtcgcgatcggcgtgggcgcggcgtcgccgggcaggagttcggataccggcacgccgtagaactcggctagctcggcgagcttctggacggtgaccgaacggtcgccgcgttcgtacgacccgacgactacggccttccagcgaccacgggacttctcttcgacaccgtgaagtgagagcccctgctgggtgcgaatggcgcgcagccgcgcgcccagggtcttggcgtactcagatggcatttttccttggtttcccggccagtcgtcgcttacggtaacggttacgcacagtgacggtaggcggcgagagcgacaaggtcaa

SEQ ID NO: 72539 - DNA, 382 bp, Arabidopsis thaliana landsberg
atctctctctttcagtattcacaaaccataaaatgaatctaagaagctaatcttcatcatcactctcatcactaaagtagctaactttcttctcctttctcttcatcctcctctcttcttcttcctctgcttctctttttctcaacctctctccagcttcattatccaccaccgaagcccaattctcctcctcaaattcctcctccgccacagccaacgaaggcgccgccgcagaccaactaatttcctcagcctcaccttcctcctccttccgccgcccccttttcttcggcggcggtggtctctcccttggacctaactgatttttagggcactcgtacgaaagatgcccttcgtctccacactcgtaacacctcgattt

SEQ ID NO: 72540 - DNA, 185 bp, Arabidopsis thaliana landsberg
  unsure (1)..(185): unsure at all n locations
aaacacacaaaacaaacangcaaaccacaggaacaccacaccccggaaaagcaacaagggaaggccagacacagccgaagaaacacacaacccgagacccaacaacagcaaacacaaccaacgccaaaagcaccagccggacaagcccccaaaaaggcaacccacacgaaaacagcaaaaccagg

SEQ ID NO: 72541 - DNA, 525 bp, Arabidopsis thaliana landsberg
caagcaatagtaccggatatataggctttatatttacactacccagtgtgcgtggggtagggtaatcaatcttcaagccggagcaatgattgttcactcattagccatgggaatacagtactcccaagcattcttgaacccaagaaacatggatatatcaatcccagattcactttacgcccatcagcctaaacaaacataactcattttaatcattccattgtcgagaaataaataccaataattttatcatctaaaggccaattagggaatcactggaggtcctaaacatcaaatgacagtaaccatcattgctaatttgatttctgaaatataaaatttggttcaagcaactgcaaatattatattaggaagcttaatcataccactattgttggtgcccacagaatccaaaagactgcagtggaaaactgaagacaggcttgtgaagtatccagaaaccattattcttttgtctgatcacattaacaagctaagattagcgtatactctttaaggaatttt

SEQ ID NO: 72542 - DNA, 181 bp, Arabidopsis thaliana landsberg
ttctatcgaccaagtttggtccaaatcaagaaacctacgctgaggcaaaaggatgaaacaaagtagtttagtaatagcattattgatctgctcatttgaatgtaaacgtaaaaaagaaacccaacagcatcatcatttgaaaagtaaccatacgtatgatgatgctgttgggtttctcttt

SEQ ID NO: 72543 - DNA, 169 bp, Arabidopsis thaliana landsberg
accttccatggactactgcgtggtgaagatcccccgctggaccttcgaaaaattccccgacgccgacgagaccctcaccacccagatgaagtccgtcggcgaagccatgtccatcggccgtaccttcaaggaagcccttcaaaaaggcatcccaagcatggaagtcaaa

SEQ ID NO: 72544 - DNA, 347 bp, Arabidopsis thaliana landsberg
agcctgtggccggtgccttcagtgactacgcccatcgctactggggcggcttttcgggttttttgtcgggatggaactactggttgctgtacatcctggtcagcatggccgagctgacggtggtcggtctgtatgtggacttctgggtgccggggtttccgcactgggtcacggccctggcggtctgggctgccgtgaccgccatcaacctgacccgcgtcgcgtggatcggcgagttcgagttctggttggcactggtcaagatcctcgccatcgtcggcatgatcgtgctgggtgtgttcctgctggtagcgggcgcgcacgggagccgcgttgggatccacaat

SEQ ID NO: 72545 - DNA, 173 bp, Arabidopsis thaliana landsberg
atcaccaattaaattaaggtctcaaaacttacaaatgtaaatgactaaatgagaaggtttcgtattcaaacacaaaataggtcattaaaaatttaaaagtctgtttgtgtttatcaccttcatatatataagtctaggttgttggtttcaatgctcgatcggtatattttatc

SEQ ID NO: 72546 - DNA, 249 bp, Arabidopsis thaliana landsberg
agcatgagctgcggcaaagacacgcaactcggcgggatcgctcggcagctcatcaggcaaatcactcacgggcccgagtctgccatgctttgtgctccgatgcagcgaagatctgtatctttacgcaagcgctttcggctgcgggatccgaggcgcgtgcatccgcgtccaatccatgccggacagaagcgcggacagctgggcggcattcattcgcatgacgcccgccacgatgggaggcatttgaag

SEQ ID NO: 72547 - DNA, 2406 bp, Arabidopsis thaliana landsberg
ttgtaatcatcaaatcttgttatggacagaagtataacctttgacaatttcatggccataaatagacgggcagactgaatgaagtatgcgacggaatgtatcagaaccatattcttctttgaacttcacaataaattccaagtctctctgagagaatgaatataagtcaccaacatctgcagtctgggcactgctactagagtcttctgagttctcaaatgcagactgccgcttggtgtttttcactgaaactgcctctataaacaaatagtaaaatccttgattcttggtcttcgatttccctgaaacaggagcattttaaatgtttgttaagcttgagtatggcttaataccagtaatgaggcttctagctccttgatctttggtaaaatgtcaatatgagtaaaacaaacaacttagcagtgctctattttactttcctgcaatgagattcccaaaaaccatggaagagaactttaagagacaaatttccagctattctacgggtaaggatagcaggcgtttgggcatgttaatgtttgcaaattatggacacaacaaggatggagagaactccatgaaaagttataaaatcaatacctcccccaatgtccatgtaattattaattactcctataatccctgtaactgtcaccacatcaccagggatacatatgtccacaaggtcttccatcagctcacattctacagttctgggtacccgtccttcttcgtggtcttcaggcttttgcaattcctgtaccctaaaatgcatttggacagctggttaacaatggtcagatacataactaacaaggatgaagtacacaaaatgatgagacgcaaataggagaacacctgattttctgaaaatcaattgtctgagcagaggaccggattggagtaaacgttttggacttgcatccatgggaatcacattttagtggaggagaaaactttccatcagtaaattcccgggttatgccagttttgcactttccacagtcaaaagccatctgtgtgacaaggggtttcacagtactaactttaacaacagtcccatgaacggttacaagctttcctgcaatttcaaaagcatacactcatgctatgtctcacttaaggttttacatcttattatttatttcgctagatgagacagtctaccaatataagctgctctcaggtttttcagggagatagaagattcaggataattgtgcagacgaacattgatcttcataacattctcaaactcattagtctcccattgatcaaaaagaacctgtgagagatgacataagtcttcatcttatgccaaccaagaaaacaaaccccaatgaaaagtaatagcataccttgtgaacagcagcattcatacatgggataactcctttaggattatcctctagatttatgaaaaagttctcgatatcagatattttcttgaattgttggagatcaagagacaaagagaaggaaccaccaccgtcttcattcacctggctcaagccatggaataaacttataaactgtttctcctatttttagatactaagaagaactaattgacgcatagagaagttgattaatcgttttctatctaccctaattcttcatagaagtagagtggaaacgaaatctagctaaatagattacaatttcataaccggaatttaatttcgaaatcaagctataccaagctttataaaattcagatttataaactttttaccagaaatttgatgatggccaagtgaggatgtacctgagaaactatgtctctaccaggtgatgcggagaatacgcggatgagctccgccgtgagctgcaacttatcctcgtcgatggccaaattctcgttgtccttgaggtatacagctaatattttcccgatgccgagagaatcaattcctgttgattcagggcgacccgatgccatgcttccaccaccgtaaaatcccatcaccgcttaacccactgtaactcgctcgtcgtcagtcgcagagaaaaatctcgcttaggccaatgggttttggcgggaaaaaggtaaagggctttttgtgatgggtttttggtaagtgggccaaatgattgaaccctaaaacccaaagataaccaaaagaaaggataaaatcaattaataaagctttagttgtccgccacgtggactgaaccgcacaaaaattcacaacaaaaaaaaaaaaacgagaaacccgtttctggttcgatttgacgtcttcgtttacttcatttctataaacgagctcccgccgccggaaaattcgctgttcatcaccaccgtgaccagaggtttgttgtgagcaccttctctatctttctttcttcacctgtaggttactgtatatgttttgttgggaaatgaactgaagaaaatttctgatg

SEQ ID NO: 72548 - DNA, 622 bp, Arabidopsis thaliana landsberg
ttcatatcatcaggccgttcgcaagatcgagaaaacagacaattttggcagaattggcagtgattgtcgcctgtattgtcactgcagctctagctctggttgtagctgttgctgtagcgctgcttcccttctttcctaagtgcggccgcacgatagagacggtcgtgtagggctctgctttttctgggcactcatggcctaccagcaccaagcctccagttacacaacaatacagcaatcctgaactgatgcactgcctgctgggaaaccggaggtgagccacaaacggagcgaggacttggattgctgttatttcgccatcgtgcccttgggtgatcagcagaacatagagtaaatgccatgtagagcaaagaaatgaacatggtgagaacgcaggcattgaactgcgtgcaggacagacaaataacgttgtgcagatcagcagatcaaacaagttgatgctggtacaccaaccatatagcacgagccgagccaatagcacaaaatcagcattctccaaggactcccactgaacagttcacagcgtcggaacggcaaattttcaggcaatgtacaagagctgaatagcctaaccatcaacaatgtcacctgggactgacta

SEQ ID NO: 72549 - DNA, 498 bp, Arabidopsis thaliana landsberg
atacttttacgcccgtgagcagaccgacgcccgtcgtgcggatcacgttcttgattgtgcgctgcttgatcattttttgatggaatgctgttagaacaatgctaaaacaagggcgatgctaccatggccggccagccgaataaagtggactcgtgcgttcagttacttggcgtacaagtgacgtattggtccggctggaaaggctcccgacgacgatgacagtggcacgcgccacccccttgcgtcaggggaaaagaccgcgttggttccaagaggttccttgaaaccgacagttgcccgcattgccggggacgggaatccggcaatgcaaggcagcctgacccgacggacgcttgtggtccattggtaggcgcatgcggggcgccgcgatctgtaccgtgccccgcgacggcccgatcagtctgcctgaccgtgcaagaaggtcgggatgtacaaccagtcgggctcgcccgccaccgcttacttgatcggtgcggt

SEQ ID NO: 72550 - DNA, 121 bp, Arabidopsis thaliana landsberg
tcgtgatagggagacgtcaaagtcagaccctgtcgaccgggggaacccactggctgttcggtcgcggtctacaaatgatggggaacgcgtgtctgaatgtatccactgcctttgaggaagc

SEQ ID NO: 72551 - DNA, 110 bp, Arabidopsis thaliana landsberg
ttcgatattgtacattcacgtcatactattgagcacatccaatggtttgatgttgataaaactttggctcaatgggttagaattctaaaatctggcggtaaactcgaggt

SEQ ID NO: 72552 - DNA, 183 bp, Arabidopsis thaliana landsberg
ttgttttttcaatccaaaagtagtgagtattaaacatccaaataaatacattgaaaatttttagattttttttggctttttatgagtaacatgatatccatacttacttgcattgtatgatagctttactaaaagcataaaatatttgaagcggatatatttttgccgagataaactctgttc

SEQ ID NO: 72553 - DNA, 339 bp, Arabidopsis thaliana landsberg
ctcatggggaagtatctttggctgcttcacaaccttttatttttttgctctctagcttcctgtctgtgtaatggtaattgcaaatgtcatgacctgagctttcctctttgaatgccagataaatctgcgaagatatgtctaaggtttgtgatatcattgctgcaggagctcctgtacattgctatcgctttgatactgatatttcctttcgatattttctacttgtcaagtcgatattttctgctgagaacattatggatgatagcttatccactgcaggtcacgcgatagacagctgttgattaaaatgaaactgtgaactgtcgaagcactaggatt

SEQ ID NO: 72554 - DNA, 121 bp, Arabidopsis thaliana landsberg
  unsure (1)..(121): unsure at all n locations
cggggtttctgactgcctgtatcanatatactcccatccggattggtgtgggtggtggtgggtctaaattcaccttaaccttttgcaatgaggcgatctggtgagatacccgactggatca

SEQ ID NO: 72555 - DNA, 185 bp, Arabidopsis thaliana landsberg
tcatatgtttgtttttcttagaaggtggaaaaaaatgcaagtgggagatactcccaactgttaaatcagcgtaagatttaggtgagatgatttgatggaggtacgtaccacgtacaccgtacaaatggaaattagataatgttggtcaaggtagggagagataattttaaaatttagaggagaca

SEQ ID NO: 72556 - DNA, 345 bp, Arabidopsis thaliana landsberg
cacgcgggatacttctccgacaaaaacattttcaagcaatttttgagcacgtacaccaagggggaagattgtggttccgccgttgcaacacatggacttctgcataagaagaattatatgtgatctaacatactcatcaaagggtatgttcgggccggcaattggataaatgcccgaaacatgtttgtttaaataccagattgaacgctcaaatcttgcaaggctgtgattgctaggtcagtccattttaagaaccacataacaaggtagagtgtgcttagagaaatgcacagcttggagtgatcccctgacgaatatactctcggcctggtggttagcgtatcc

SEQ ID NO: 72557 - DNA, 258 bp, Arabidopsis thaliana landsberg
gactgccacgggatactagtgacttgggagagtgagcatgaaccgtttttaattttggaatgaagacgggtttaattgaggttgctgcattcccaaccttacgccggcttaagactatggagatcgcataagggttctttttggtaagtgagaacaacgatgcacaaccacccatggaagaaaccaagagcgctcaacatgttaataattacggatggatggcacggggctgatgcaacctggtgaatgcaagcaaga

SEQ ID NO: 72558 - DNA, 530 bp, Arabidopsis thaliana landsberg
  unsure (1)..(530): unsure at all n locations
ccgctgtgcgcggcggcctcggccgagcgcgggcccatcttcgtctgccggatcgccgcgttgagccggttgcacgacgttgatggcggcgatgtcgacgaggagcgcggacatcgcccgctcgtcgtagtgacgggtcgcctccgcccagaggtcgtcggggaccgggtccgggcgatccgcgaggcgggtgagggcctcggtgagcgcgagcgccgcgcgctcggcgtcggtgtagaacggcgcctcccgccaggccgcgacggaccagatgcgctcgtccggctcgccgagctgcttgagctcgcgcgcgtgcatgtccacgcagaagccgcagccgttgatctggctcgcgcgcagctgggcgaacaggagcgtggcgtgggggacgccgcggtccgtcgaggacttgctcagcgcggcgagggcctgcatggcctcgggcaggacgtagacggggtgtttcattcgggcttgcatgggtctcacctctcgtnctccatgacggacgagcccccgcggatgtgacg

SEQ ID NO: 72559 - DNA, 199 bp, Arabidopsis thaliana landsberg
tctaagtattcaagatcactgcagttccttttcgggcggctgtaggacggacggccgcctataggtggtagggtagggtgggtggttcccatcactattgcggtgcaaattaacataaccgagcgcggaccgtgcttaaagcgagtgaaacttacatatacctcgaagggccctagagactctaccatggtactcaacg

SEQ ID NO: 72560 - DNA, 452 bp, Arabidopsis thaliana landsberg
tagcaaaagatttattcttcaaaggagaagtgttctataaaatctgaaagcatcgaacgcagacgacaccatgagacacataacgtctttgcttattataggacatcttaaaatttggaaaacttgacataaaagctatgcagagccatcaaaatacaaacttctaccgaagaaaacaatgaaatcgaacaagtaaattaaatgttatgcttccttctaatgagtaatcatagttgccaacaaattatcaaatctattttttcttattttgtttttgcaagggttaggccatcgaagacagatcctccaatgacaataaccatgaagacaaccacattcaccattattttctgttcacgaagcggatatatgttttcgttatggcaagtaagactattgatccttagccaaaaaaaaaggaaaaaatgtagtaagactattgataaacacct

SEQ ID NO: 72561 - DNA, 2561 bp, Arabidopsis thaliana landsberg
attgttcaataaagtccaaatagcgctcatgtatatgtagcaaagtgtaggaaacagattcttcaaaaaggttacggaaagattaaaccaagaggaccaacctttggttgaacacgccactatagtttagaacaatactctgacaatcgttccattcacctaaactgtcaactttccaaatctggcgacagcagaagggtaattcaagttaagaaaaacactttattttagatccccatgtctatagaaataagatggtatataccagaatatcctgacgtagggatctgcaactcattctctttttcaaggtctcttcagcaatcataatagtgtctgcatatgccggctgcggccctgtcatcgtgtcgcacgccgtaaaacattgaatcaagttcttgatttttgagtcaatttctttgatctcctgtgttatctctgctcgtttgccagttataataacctagaaaaatgttgacggataacgagtctattaattacttgggttaaaaccaaaatacactaaaatagcataagtgtaaacaaaaataagagaaagcatagcatacattacatctgatctaaaaaatatcatgagaccctgtgggcagaacattacatctgatatgtaaacaaatatttttttctgccattagagtgaaaaaagtcatcaacctgaaaatgttccatgcctaccaaaaaccatttaaagcctgtgaaagagttaaggcgtccaaattattgaaacttggaagactagaccaccaacatactactataatgggtatttcaaactggtctagttacctcttgtgcttggtcaggatttaacaagccagtagaacggaaaccatgttgacgtagaaagttagcacaattcaacctcaatgtttcggatgtttgtacaccggtgctcactgcttgaaactttttctgcataccatataaatgaaatttgattaagcaagcagaatcaatagaaagtttgaaaaggaggaacaaagtaattaccatcattatctccttcttgaggtgcagcaactcaagtttagctttatcgtatgctaacttgcagagtagtgatctactctcaacacgtctgcaataataattgcaacgaatgttatatacttggcactgatttattttaaagagtatatgaaggcagtacagggagaaacctttttgtcttggcaccactcaagtggtcacatactttctacaattagaacaagatcatcaatgtacatttatgtagaaagaatgatagcagaaagttttcttataggctgacctgagattgaatttgtagacaaagcatctcacacaaatgaacctttttcatgtgtgttaatatatcttccagcttgcatatctgcacttttggaacattagtactgaaactataaaagctaaaaggaaacagtctcagtagccagattgggtttccacagagaggaataacataccagtcttgagttcagcttatctgccaatggagcaagcatttgattgatttcctctgatacttttcctggaatctgcaaggtagtggaacaataacttaattgtatgaagaaaagagggactaacatccgttaacataagaggttatcaacagtacttacttctacccagttcacttgttcacgaactctgcggcaatcgttagcatcaatgtttccatcagggtgttccatcactgaattcgaaatatactttgtacttctctcgactttggggctacaatttctagcagcacaatcaacatcttctgcttttcttttcaatctggatggtccctgcaaattaataaagttcagaaatcaggctcaacattaaattgtatcattacatccttacggatagctctgaaatatgatagttcttctcctgcattctgagtaatttatttcagaaatgcactgctcaaggtctttgatggaatcccagtcaaaattttcaatctgaatgaccttttagcgggttcttaacctcttacaatggaatgtctggttcagctgttggtgtaaaaaggccaatttggaattttacaaccatctcagagatcaacaagatccattcacgttcagaaataaattgtgtaattcttatgtcctgtcgaaagatagttcttcaaaacatgtacatgggtctaggattataccttagcatgtgaagcctcattcttgcttctgtccacagatgaagagccagaggtactaggaaggttttctttagctacagcagtaaagtcttcagctgagataacttctgtttcacaatggactttaaagggattattatctttcagaaggatatgagcagcactgatattggttctgttttgctttttgttccgcacactatccttctctctttgttgagcagagccattcaagaagcctgtatcggtaagtaatacgctagattctgcaagcagggaatccactttctcagataatgtattcatagaacaattactagcatattccttggtcacatttccatccccagtctcagattcttcgatgtctttactatgctgctcttgatcttga

SEQ ID NO: 72562 - DNA, 583 bp, Arabidopsis thaliana landsberg
tctatgacaaaaaaaaacagctagatatttttttacctagctttttgaaagcaaatccatagactgcattagggtgttcgttgctccccagcagagcgaacagctcatttaatgcaattactatgccaagaatctaattaagcaaccaccgcttgactttcagatggtaaacccaattgccctgaatcgttagaaactaacgccaagcgaacgtaaaccttattccctaaggcaggatttccgaatctggctatgtatgccgtagcgaagtctacgactcccgcagctggagtaaatacgccaaggtacctatattgatttttaacaaaagagataccagccgaaacgcctggagttgcgtaaacaatcaaagaaaaaccagtaggcacggtcgcagggtcaacggtaatcgttcccgttgttaacgcacccgatgtcaatgtcattgtaagaccgctaccagttacaaccggcacagataccaaaacaggtgcatcagatatcaacgaaatttccgcacgaagcagatttaagttgaaacttacataaagagcgttacccgccaaaatctttgatcaccaaa

SEQ ID NO: 72563 - DNA, 188 bp, Arabidopsis thaliana landsberg
ttcactaaatacacgcttctaataaaccccattagtttcatgagccatatctacgtttccaatatttgaattggaattacatgattgcaattcccattccctaacatcatttgttctacatacaaaaacaaagaaagttttttatacgcaaaatgactcacatatggaatgtttatttcaaaaaaaaa

SEQ ID NO: 72564 - DNA, 604 bp, Arabidopsis thaliana landsberg
tttgtgtcacgtcattttacgcttttgtcttttgaaaagctcattaagtaattaaataatcatgacccatttcacttaatcattctaatcatatgtcgttgttaaaagccactagatagtagcttactaccagaaatggcttcgacatgttcacttcgaagaatcaaacaatctaaatattattggcataatcaaatactctaggaactataacaattttcttgaccgttattttctcgaataaaatcatcatatatttgtggaggaaaagaaagaatgtataaagtcataacagatatcatataatatatccaaaaacacccgaccgatcaagtgacaatgcgcagtgttgtattattatattatcactgtttgaaaaattgtcgaactcaggattggtttataactttgcaagacgataataactttggagttttgcataatggtaagtagaaaacgccattttccatgcatctcccgtctttgtccaccgccaaactagtagccatcctctaattaataatgtattactacagctttgtatatattcgtattggagtttacagactaatcacatagtggttacgtttaggaaagataaaac

SEQ ID NO: 72565 - DNA, 332 bp, Arabidopsis thaliana landsberg
tggagttttctccttaataagataaacgtgaacgatgcttaggttataattgggtcggattaacattcgaaaacataaatatattggttaaattctgagcaaatttgcacatatatgttctacatactgtactactattataaatcaaatcttcagtaactagcttcctataaaacttagaggccaaccatctaatagacatagaggggtctgagtccaacaactatacatagggcccttaaatatatcatattgtttaaaaactatcaaagtaattaatgaggacaataatatttcgttttgggcttgctaattctcaggattggagtcct

SEQ ID NO: 72566 - DNA, 601 bp, Arabidopsis thaliana landsberg
cttgatttacgtccggctataaactcctgcatctttttaaactgttccttcgtcatcccactgttatacgcgtgagctcgctcctacgatttcaacaacagttttagactttctcacaatcacaaattgatcaacaagttaaaaatggcagaatgtttaaccttttctagtgtgagagcatgcccaagatcaagcttaagtccatcattgataacggatttaatcctcagaaccatgccttgttcattcttgattatagcctctgcgatttctctagctttctttaacgcttctccttcttcaaccacatggtttacaaaccctaacttcccagccacgtctgctgtcagtggcatcgatgttaaagaaacttctcgagctttgtttgctccgatgatcctcgacagcttctgagacaaaccccatgaaggaaatatcccaaaccttcaaacacaaaacagaggattcacattcatatcatcaaaaacattcatctcaaggcaacataattttgagagcataaacaaatgagattgaatttaagatgttgaattgagtagagcttggaacaacatgattttctatgatccaaagctaaatc

SEQ ID NO: 72567 - DNA, 484 bp, Arabidopsis thaliana landsberg
gagggccaagggaatggtccggcttgtcttaaagtcattttcgttctctcccaagaagtaggtttggtgtgggatagggtcgttgtgatccggtggcaagtcagcaggatattccatcccattgccttcactatagcccttcttagagcccgtctgagataaagcatccgtaaaatgtgctgccaaggtaatatgaaggcagtcggaagaatactcgttcacgatccctgaatagcaaaaatcgcgtatctgctgatatgttgagtttgtctcattagagaagcttccatccagtttaatgcgattccctaggacctgcatccattctcccctcattttgatggtatcaccagctttggcagagtctccaaagtgatcgtagaatttgaacagaggcgagtcgagctggctctgtacaatgcttgatttccccttctcgaaccagacatcggcctcttcccagcgagcgtggatgcggcatagc

SEQ ID NO: 72568 - DNA, 500 bp, Arabidopsis thaliana landsberg
gtgtgttagtatatcttatattataaatgaaattattcaatatgaatcaaaggatataagttccaatcatttctaattgattttaaaattttcacaatcttaacattatggtccagcactataacgcattgatggaaaaaaatatatatacacattgatcatcaacgttgataagatagacgaatcttaacattgtggtccaatactatgagatcccgacaaagagtatgtactaacaaaagttaacataaacgtttgtgataatgcaacaaagataaacacaaaagagtttcatacatattctaagtggtccattaataggttgagacactatatatggattccccatggtggaatttaaactagcattgaattttctggtgacaaaaaattactaactcgttaaattattaaaaacacttaaaacacatttaacaagaatgcatgctatttagaaccgggtatatatatctatttctattaaactaatcctaaccctc

SEQ ID NO: 72569 - DNA, 394 bp, Arabidopsis thaliana landsberg
aatttgcgcggaacaaccacggagggcggattccattctggtgcggttggctaacgctagctatctgctgcctgacttacccatctttgctaagaattgacgacgctgcacccataatgcggacgtaagctttttccattattccaacaaaactctgccataaatcatacgaaccagccatctcgtcccatctttcacatgctaggacagtctgaacacaggattcttggggccaggaaaccatcatattatatcaacaaaggtcagatccacccgagcgtgaattgcctactgacctctgatttcaaggggaagctgccgaccagcttacacatctgtcttgcggttcatgagacatattcactggacgatgatcgaacgtttgcccagctac

SEQ ID NO: 72570 - DNA, 438 bp, Arabidopsis thaliana landsberg
  unsure (1)..(438): unsure at all n locations
gctaaacttatagcaaatatataccgatcaatagaattaagatcaaatctttgatnnnnnnnnnnnnnnnnnnnnnnnnnnnnnnggactccaattcgcaaaagtgctacttcgcacacgtgccaactcgcacatgcgaacgaagaacacgcaacggagaataataaacaccgnnnnnnnnnnnnnnnnnnnnnnnnnnnnnnnnnnnnnnnnnnnnnnnnnnnnnnnnnnnnnnnnnnnnnnnnnnnnnnnnnnnnnnnnnnnnnnnnnnnnnnnnnnnnnnnnnnnnnnnnnnnnnnnnnnnnnnnnnnnnnnnnnnnnnnnnnnnnnnnnnnnnnnnnnnnnnnnnnnnnnnnnnnnnnnnnnnnnnnnnnnnnnnnnnnnnnnnnnnnnnnnnnnnnnnnnnnnnnnnnnnnnnnnnnnnnnnnnnnnnnnnnn

SEQ ID NO: 72571 - DNA, 115 bp, Arabidopsis thaliana landsberg
actcaaaatcaatattataaaaggaccgtctcttaagtggagcttagttacatttactgaatccattatgaaattcctaaaccataaattcagttcgtgcaaacatatatacgat

SEQ ID NO: 72572 - DNA, 507 bp, Arabidopsis thaliana landsberg
agcacgcgatcccgtcgactgacgtgaacacgctgctgccggggtacaagtcgttttacaagatcatcgcgcaaagcaataatgcctacaaagccattaaggaggcccagggcagcaccgcttctgcggctgtgaaagcgcaaggcctgggcgaatgccgcttcatgcgtgctacggcctattattacctggtaagctcctggggcgcggttcccattgtgtacgacaatgtggcacagctcaacacgccgcctgttcgcaaccggatcgaggacgtgtggaaacttattatcaatgactaccgctttgctgccgaaaacctgccggtaacgaccgtgcagggccggcttaccaagtattcggccgaaggaatgctcgcacgcatgtacttgatgcggtcgggtctgaaccagaacggtacgcgcaagcagtcggacctggatagcgccaaatactatgccgaaagtgtgattacgaaaagcggcctcgcgctcgctcctacgtatg

SEQ ID NO: 72573 - DNA, 371 bp, Arabidopsis thaliana landsberg
tccaccccttcgtcgccctgaccatcgcggccgtcttccttggcctgacctccggcatgccggtggccaaggtcatgaaatcgttccaggacggctttggcggcgtgctgggcttcgtcggcatcgagcttgccctgagcaccatgcttggcaagctgatggccgactccgggggggccgaccagatcgcgcaaaccctcatccgtgccttcggcaagatgaacgtgcactgggcgatgatgttcgccgccttcctggagggcattccgctgttcttcgagatcggcttcgtgctgctgattccgctggtgttcatcgtcgcccggcagtccggcgtgtcgctgatcaagatcggcattccactgctggcc

SEQ ID NO: 72574 - DNA, 2852 bp, Arabidopsis thaliana landsberg
gcgtcggtgaatgagattctgataatacgcttcatagtgaatttggggaaattagggtttcgtcttcgtctccattaaaaggaaagcatttgagagaaagaatatgtttttattctttcagaatctctttttctgatgcttttcatctttacttatttacttctctatttttttctaaccaatcctatgtgggccgtatgggcctcagagctgaaaatgcagtaaaatccatgaaatttctcaacatggcttgaagcccatcttctaaaggaaaaaacgctttactcttttttccttcatctatgtaataagaagcagaaatttaggaataagtttgaaactttaatcacacataagagtaagtgcaaaaacatgaacaatgttcttgccttccgtgtcaattttgtatatatatatatatatatatgtgtgtcagtatataatctcattttatatgattataaactcatttgtcccatgtcttcttcttcttcaatggacttactcatgtgtctgcttcttctaatctctccggttgttctggccaagtcttcttccaccgtccctgctatctttaccttcggtgactctatttttgacgccggaaacaaccattacaacaaaaactgtaccgctcaggctgattttcctccttatggttcttcctttttccaccgtcctactgggaggttcaccaacggaagaaccgtcgctgacttcatctgtaacaaattacctcccaactcgttaactaaaacatttcttcttctgcaaggaaccttacttttgtctcttttttcttttcttgacgcaataattgcagcggaatttgtaggccttccattacagaaaccattcttggaattgcagattcaaatcttgaatggaacttcaaacttttcaaatggcattaactttgctagtgctggtagtggtctcttgcttgataccaacaaatttatggtaaatatctaccttgaccaaataaaatgtttgtttcttgtgaatcactcattaagtacacatatcaaatgtagggcgtgacaccgatccaaacccagctacagcaattccagacacttgtagagcaaaaccttatcgaaaaatctataatccaagagtctctcttcttattagaaactggttctaacgacatcttcaactacttcctcccattccgagctcctacactttctccagacgcttatgtgaacgcaatgttagaccaagtgaacaaaacgattgatcagatctacaaactaggcgcacgccgcatcgctttcttctccttaggtcctgtaggttgtgtccctgcaagagccatgcttcctaatgccccaaccaataaatgctttggtaagatgaatgttatggccaagatgtataataaaagacttgaagatatagtgaacataatccccactaagtaccctggagccattgcggtgtttggagctgtatatggtatcactcacagatttcaaacctaccctgcccgttacggtaaactcaatatagttaattaacttccatctttgagatctttttcaaatgtgtctatgagaaagctgaatcatgtttttggtgaagggttttcggatgtttcaaacgcgtgttgtgggaacggtacactgggaggattgatgcagtgtggaagagaaggatacaagatttgcaataacccaaatgagtttctgttttgggatttttatcatcccacagaacacacttaccgtctcatgtcaaaagctttatggaatggaaacaaaaaccatatcagaccatttaatctcatggctcttgccaccaacaagatcacattttaatacttatatctcccttgtatatagaattcataatgagtttgtatctgaattaagactcgaaatcattgtgaaaacaaaagccagaaagtgaaacttcgctccacttctggtctcttcttcctcttctactgtaacatgaacgctacaaaatgtttttattgttctctttcatatcattatgaaatacaatatctaaaactatctaactatacctctatactatacgcattctacagaaagcttaagttcgtcatctgagtgatgagtatccaagccgttaccaaagctatcatcttttctttgagggtgtggatccgcaaacacttcctccctttgggggcggttcgcatagaatatccatagcaccagacatagtaagactcctacggagatcagtccgagtcctgcgttcacaatcctcagattacgtactaacggtggacagtaatctgaggtaatactcataaatgtttccctaacaaagttgcaatctcggaagctaagcaatggaggcgtgtaatgctctagagcgtaactctcattcacagctgctaccaactgtccaaaggtatctggcgttactctccccacggtggtgcagattccagatggtgtaacctcgcatttgtaattctcccagacctgaaaagagaagtttagtaagacatgtctcagacctggtggtgttttgttcaagatatacaaagataggtgagtaggaaaataccgatgatgcattttctattgatagttcccaaggcgagcactggcgatctttcatgtttgcatcaaatgggatgcataaaggaggcatcggaggtccagactggttgtaatagcggtcttgacctggagctgggtttggattggcaacagcctagacaaaggtgtttacaacggtcacgatgctggtgataacaactttactatgtgaaagagtctggtttgctgtttgctgatcaacgcatgggagaatgctgctgaaagctgattatgggtgaggattattaacccatatcttcattg

SEQ ID NO: 72575 - DNA, 2572 bp, Arabidopsis thaliana landsberg
  unsure (1)..(2572): unsure at all n locations
catgaatgatcgaaactaatacaaacttatggcaaaatacacaaacccatagtaaaataacaaaacacatgactctcgaataataatggtccaatcaatgtagcagcgtcccgattaaaggaccacgtggctacagaagatacagccacaagagacaccgagacggaagggagggacgccaccaccacgttaagtttatttagatccatcgagtcgagtcccctagtgggacccacttgtactcaatgtgcataatcaaattaattgaatcttaatttttaaacaaccatgctttaacagaattataaccaaatcattaattgtcaataaaaatctttatatttttattttaccattttaatttttaaaaattaatttctttatcttctctcagatttcttcctatataaacccaatacattaccagtttaatacctaacaattactcaattagtacaagttgttatacaactaaatcttcatttgttaaatcatctttactcaaattgaatagtagtgtgcgtgtgaaaacaagaaaagtggaaaaggacaaaagagagagtaaaggacgcctcctaataaagcactcttcttccttttcactttcctcattgaagagagagccaaattcagcttaaagccccataagcgtaagcgtaagcgcggggataaatctctctcttcctcacctgcgttttcgtggagcatcttcttcaacaatggctgcttctccgatctgatcatatcctgatttgaattttgctatctctcatgcctcgaactcgttttgtcgacgtagcatcctagtgactgaggaagaagaagaagatgagcttctttatcctctccgtcgtcgttttcgtttctctcgctttcttctctcttccgcattccgttgattcatctgtttccgcttcacaggatcctctcagactcatattaggtttctcctctctttgttttgttgcacgctgatgcgattttcgcgtttgatttatgctgtttcgtttataaacgtgaatcgcggttctatgtttttcatcccaaacgacgctttttttgaagtttctgggatttgtagcatagtcttggttccagaattaccaatatctaaatgcttcttctgttaacgatctgctaaattccagattagtttgcttcctggtagtattaagcaagcttatagaattgttatgaagtttgaattctgattatgtaattttggttttgctacaaaatcaggttcaccgaattttggaacatggaaaggtggaatctcattagcnnnnnnnnnnnnnnnnnnnnnngttgtctctgattacctcctcttagcagctcatagaaccaagagacctgacattcttagagcttttaagccttaccatggtggctggaacatcaccaataatcactattgggctgtaagtccctctcctcttctttgtcatctccgattttattagttacaggatctgttagtaatgaacatctatttgcagtctgttggatttacaggtgctcctggtttcatactagctgttatctggctcttgtcttttggctctcttcttgttgtttatcattgcttcaaatggagaatatgtgataaagctaaaggatcatcattcgatacacgaagaatctgtttcattttgttgattgtgtttacatgtgttgcagcgtaatattcctcaactcttctacattgttttttggttctctgtcatttgaaatttgttgttcctgagattgcactggtttttttttttcagggtgggatgcattcttttatctgttggacaagataagtttcataccgaagctatgcatactcttaagtatgttgtaaaccagtcagactacactgtggagatcctccagaatgtgactcaatatctgtcccttgcgaaaacgattaacgtgacacagattgtcattccgtctgatgtaatgggtgaaattgacaagttaaatgtcaatcttaacactgcagctgtaacactgggagagacaacaacagataacgctgctaaaattaagagagttttctatgctgtgtaagttgccctgtactgttagctgagtggtaccaatttatgattaacagggaagacagtgttgatataactctgtatatgtacattttcaggcgatcagctttgatcacggtcgctactgtgatgctcatcctttcttttgtaggtctatgtaagtccagttgatgtgtatatgcttctttggtatctcctttttattagctgtgacatccacttgacttcaactttttatctgttatttgcgttattacagtgctttctgtcctccgccaccaacatgttgttcatatgtgagccttttaatccccaacttcttcattttcgttaatttatagtggtttaaaataaattgaaagctgactgatggggatgtatataatgatagattcgtcgtgagtgggtggatacttgtggctgtgacatttgttctttgtggagtctttctgatcctaaacaagtaagattttgctgttctgaatgtttgttttctcttgccttattaagtaaacacgcaa

SEQ ID NO: 72576 - DNA, 524 bp, Arabidopsis thaliana landsberg
  unsure (1)..(524): unsure at all n locations
atagttgtcttgtaggcaaaaccggagctaatttgaattaaatggccttggaacttcttgctggtttcatgaagccaaaatgctaaacttcgaatcaaaaaagcagtgtttttttcttacttttaagatgtcaagatcaaccaagaaatttgtcaatgttttatctgtttggcgataaggtctctgcattaaattagactttacattcaaaaggctagatttgtcgtaaccttgactttgacattgccaataccaaacccaccaacccgagaaagtcagagctctggttgaagttgaaataggtattatctaaaagccagtgtatgtatgtccctcctacacaaagatacagatattatataattgactcaacagttgaatccatattttatccctatcactgcatgtagacagtagacactaggtgcaaacgctagatatgtcaagataatcctggagattgaaattgaaaaggctaagatatgtttgttcctttgcagatatctagatccatangcgacgtg

SEQ ID NO: 72577 - DNA, 556 bp, Arabidopsis thaliana landsberg
ttgtgttaaaaaaaaaactagaatcatggttgcgtcattgacgaaacccatctcaataacggctctcggtttctattctgatcgaaagaacattgctttctctgattgcatttcgatttgttctggattcagacattctcgaccatcttgcctcgatttggtcacaaagtcaccgagtaataacactcgtgttttacctgtcgttagagcccaaagctcttctggtaagccaacaatgatgagtctctgatccttttttcgatcaatttggtttcttttgtgtgtgtgtgtgtgttcatagcatttctcttttcatttcttgttagattatattccagactcgaaattttacaaggtggaagcaattgtcaggtaaactttgaaaattttgttttgatgtaccaatcaaagctcataattgtgacaatgttgcttgtttcttctctgttcatgtatgaatgttggactgataaagaccatggagaatccagcaagtttcatcggtaagatcttcttgtcctcaacttgatatgtgaaaagaattgactttgctaat

SEQ ID NO: 72578 - DNA, 598 bp, Arabidopsis thaliana landsberg
taccaatttacaagtcaactgaaattttgatatttttaaaaaaaacgttaaaaacacaattataaatgggtgtgggtaagcaaacaaaactaagccgtatgggtaaagtgataatagggttatggcattttggttaatgggcccataaattttgaattttccttgataattaatagtatattatatgattgattcttattttccgaccaaacctagtatctctatcaaaatatacactcaaaccattaatttccacttgcaaattaatcgggtgaaataagtagaaatgagtatgtacatatctttgttgcatcttttaaattggtgatttcgaaattattcaattgaaaagaaagattaatcagctaaaaaacttatcttggtggaactagctatatgatgacatctaataattatgatatatattattgaatttggtccgaattaactgacctaattatgtcatcatgtaagagattagtagattattcaaattattctatatctttagagaataacgagaggaagttaaatgattgtttgtgcacacggaaaattaaaacttgttctaaacattttatcgcataattgattgtga

SEQ ID NO: 72579 - DNA, 574 bp, Arabidopsis thaliana landsberg
acacttcttacttcgcatggatttgccttcccaagcaagacatagtctttagagaatccctctttttggctttcatatgggtccacatcacgcaatctcataaacccttctgctacatctctcccctttttcttcggtataaacacctgagaaaccacatcaatcaattatagcgttaactgctagattaagaaaaggtgaagcagatatctaggctagtttgatttgagcacaagaccaaacatagattagcaaacttgaactgcgtatatgtcttaaaacaataaatctttgtacactgaatagtaatatgcactttgttagtacttaccaaaccagagaatttgaaatccgggtataggtatagggcttcgcggagagcctctttatcagtcagaacgtattgagtatcttttaatagacatgtgaattctgaaactgcttctgcaagatcttcatcagatctctttctcgaagatttagatacctcaggagcgtatccgatcactgaagtttcatgttctctagcaaattcgacagctttgctccagtttccatggtagagcaaagcagc

SEQ ID NO: 72580 - DNA, 545 bp, Arabidopsis thaliana landsberg
  unsure (1)..(545): unsure at all n locations
ggcggacatacgtcgagatgcttgcgaaggccattgcccttttcatgcgctagccaaccagcttgtgaggggggcttctggagccggatacaatttgcgccagatggccgagttacagctatcctctttgcgcatcccgactcccttacctatctacagagctaccccgacctcctcctcctcgactgtacgtataagacgaataaatacggcatgccgctcctcgatatgattggcgtcgacgtagctcagcggtctttctgtattgcttttgcattcctaagtggagagacagaggctgattatacgtgggctttagagcggctaaaatcactctacgagcagtgtaatactaccctcccgtctatcatcttaacggatcgctgcgttgcagtaataaatgctgcgtcgacactctntcctacggctataacgctcctctgcctctggcatgcaaataaggctgtccttactcgatgccaaccagcgttccctcaagcagtcgggtggcaggagttctacggttactggcactcgattattag

SEQ ID NO: 72581 - DNA, 545 bp, Arabidopsis thaliana landsberg
catgcagatggtggtgatctcgacctcggcgctggtgatgatcagcctggtcaacgcctatggctcgcagaccaccgccgcctacggcgccgcgctgcagctgtggacttacgtgcagatgccggcgctggcgatcggctcggcagtgtcgtcgatggcggcgcagaacgtgggcgcgcagcgttgggaccgggtcggccggatcgccgccatcggtctgggctacagcctgctgctggtcggcacgctggtggcgatcatctatctgttcaaccacggcgcgctggcgttgttcctgccgcgcgacggcgaggcgatcaccatcgcgcagcacatcaacgcgatcgtggtgtggtcgtacctgttcttcgggctgggcttcgtgctgttcggcgtgatccgttccaccggcgcggtgatgccgccgctggtgatcctggccatcgcgctgtggtgcgtgcgcgtaccgttcgcgtggctgctgcacggccacttcggcgccaatgcggtgtggtggagcttcccgctgggttcgctgaccatgt

SEQ ID NO: 72582 - DNA, 522 bp, Arabidopsis thaliana landsberg
  unsure (1)..(522): unsure at all n locations
caaaaacgggctgagactaaaaagttaatttgaaatcgaaatggtttctttttttcagcgccattatctatctatccggccaggacccattttnnnnnnnnnnnnnnnnnnnnnnnnnnnnnnnnnnnnnnnnnnnnnnnnnnnnnnnnnnnnnnnnnnnnnnnnnnnnnnnnnnnnnnnnnnnnnnnnnnnnnnnnnnnnnnnnnnnnnnnnnnnnnnnnnnnnnnnnnnnnnnnnnnnnnnnnnnnnnnnnnnnnnnnnnnnnnnnnnnnnnnnnnnnnnnnnnnnnnnnnnnnnnnnnnnnnnnnnnnnnnnnnnnnnnnnnnnnnnnnnnnnnnnnnnnnnnnnnnnnnnnnnnnnnnnnnnnnnnnnnnnnnnnnnnnnnnnnnnnnnnnnnnnnnnnnnnnnnnnnnnnnnnnnnnnnnnnnnnnnnnnnnnnnnnnnnnnnnnnnnnnnnnnnnnnnnnnnnnnnnnnnnnnnnnnnnnnnnnnnnnnnnnnnnnnnnnnnnnnnnnnnnnnnnn

SEQ ID NO: 72583 - DNA, 489 bp, Arabidopsis thaliana landsberg
aaaattgaggtaatcgtgcggcagcaggatcttcttcatcttttcgtaggcttgcggccgatgcttgcgcgtccgcggcagcttggacgcggtgtagccggccagaatggggttgccgaccagctcgatgcaacgcgccacgccgccgaccgcctgcatgatctgcgcgcattcgacattcgtgctggtgtcgcaccacagcttgaccggcgccagcaccttgccgtccgcatcgaccgggacgaaaccatgctgctggcccgacacggtgatggcggcaatgctctggcgaacgcccgcctcgacctgcgcgaagcaggcatccacggcatggacccaccattcggcctgctgttcgcaacggccgtcatcaccactgatcagctccagcggcgccgccgcggtggctacgacggatcgcgcgtcgtcgtcataaatgaccagcttgacactatgcgtgcccagatcaatgcctgcaacccggctcat

SEQ ID NO: 72584 - DNA, 503 bp, Arabidopsis thaliana landsberg
  unsure (1)..(503): unsure at all n locations
ggcaataatttgaccactaaacctttgttaagctttaagaaactcggctagtgacttcggggtcagagatgccttgaatggctggcgccctgctcagaataaaaactttacccatgaggaaaattcttaaaagctcggagcnnnnnnnnnnnnnnnnnnnnnnnnnnnnnnnnnnnnnnnnnnnnnnnnnnnnnnnnnnnnnnnnnnnnnnnnnnnnnnnnnnnnnnnnnnnnnnnnnnnnnnnnnnnnnnnnnnnnnnnnnnnnnnnnnnnnnnnnnnnnnnnnnnnnnnnnnnnnnnnnnnnnnnnnnnnnnnnnnnnnnnnnnnnnnnnnnnnnnnnnnnnnnnnnnnnnnnnnnnnnnnnnnnnnnnnnnnnnnnnnnnnnnnnnnnnnnnnnnnnnnnnnnnnnnnnnnnnnnnnnnnnnnnnnnnnnnnnnnnnnnnnnnnnnnnnnnnnnnnnnnnnnnnnnnnnnnnnnnnnnnnnnnnnnnnnnnnnnnnnnnn

SEQ ID NO: 72585 - DNA, 756 bp, Arabidopsis thaliana landsberg
cgacgtcgtgttgtctttttttttttgttactaattaatttcttgtgtggtacaaaagcaatttttaattttttgttgtcagataaaatttaagaaagaaaccaaaacatatatcatgaatgttagacgttttaatttggggcttttgtttttgttgttctagtttttatgagttattggattttcatatttggtgtagattttagtattttttaaaaacttgaatgttgacaatatctttagttctttttagttgcctcaattaatttcatccttagtttttgcattaagcattactatttctcacaaacgtttgacctaaaaaaaaaaaattctgacaaattttacataagttaagtaatcacaaaattacataaataggttggtaaaatatgtcgtagtggttaccggtgagagtttagagatgggtcgatgtcaccaaaatgtttccgagcttgtttcatttttgggtaacaatttgaaaatgtattcattaaaatcaactatacaacaaatcattaattgtttttttttttatttggtgtagaatgaaaaatataccgtaacttttgaaagaatgaaaaaataaattaaaagacagtttcgcagaagattttttttattacatccaaatagatgaatatatgaagagattagtggcgtgaaagcgactcatggtttgcttcttcttctttagtttggtgctttgtttcagcatttgccacttttttgtctatcaaaggctttatcattgcc

SEQ ID NO: 72586 - DNA, 764 bp, Arabidopsis thaliana landsberg
acctaataaggacactatttttcaaaactcttaactttatcaccaactcgaaaaagaacaaaaaaagaagaccgaaaatgtaattcgatctttaacattaaccggggaaaagaaagttgagtgctcataggttttctatgtaatttatggtaaagttgtatacatattaatgtataactgttaaaaccgaaaagaaaatgtgtgattggagacgatagaaatttccaatcaagtgagtggtggcaaagaagaaactacgtaagctaaatttattacaaggcaagaatagacgagaatggtagtagtagtagtagttatataaactagacatttattatgtactttttgactaagcatttaatttggtaaaattaatactctgcaactcttctaggccaaaaacaagtctgcacatagtagtacatagacacacacaagacacaacaattgtttgtatactagtagtaaataaaaagcttgattgtttatagtaaaatacattcgattgactaattcgtgattaatgcagagaaaccaaaaataattgcttactaattctaatgctctgtctctgaataatgtagtaaagtactctaatatacaatgttatacaacgttggtggcttagttcggtgtattggacaaattagttgggattttatactcgaatgtcaacattcacttagagggaaccgatggttctaaatttataaggccccaaattccttttttctacaatctttttttttttttttataagtgtt

SEQ ID NO: 72587 - DNA, 433 bp, Arabidopsis thaliana landsberg
tggaacctttgctaccctttattttagcatcattaaagccttttccatcacctatagactgagtgtaaacaggtgggggagatccagttccaacggcctttggctcgctttgggaagagagacgcttaaatctgactatttggatcttttcttgagttgcctaattgcaccaacattgacacatacaacttcaatcaagagaagcacaacaaacttaatagcattcatctttatgtctctcctttttgttttctaattaagatgtttttttttcaagtgtgttatgatgtgttcctcccacatcgcagcctctatgtgtatacacatgatattatgaggatatgagttcgtttcttacaggaaaagatatatactctaatgcgagacttaatattttagcatataactactagactttcctagatgtcaaatt

SEQ ID NO: 72588 - DNA, 549 bp, Arabidopsis thaliana landsberg
aaacctgagatattaccctctcttttttgggttaaaacttatctttgttaagtacttaagtatctaacatatccatataacttctgatgtagtgtatttatgtgaactaaacccattttctgatgacttcaattaataatgaatgaagatatataatagaaatcatgcaacttgttgattccgtgattatatacatatatatctttgcgatattcattaagttacaaaaatgtgtaccaaaaacctctgtaatgttgagagaatggacatatatacactatgaaacgaaagccgacaatctcagtgaaaggataaaaagtggtgatgcgaacacaggatttacatatatattggcttttcatgtttgttcctttttcatatgatccaaaaccaaataaagttttgtgccatgcatgtttgtttatcatttaccttgttttactaaatgtttaatcaaatataagagagtatatagtggttgtgacttgtcgtaggtgtaaaaactgattttgcagtaacactttggttttagttgtatatataagtctc

SEQ ID NO: 72589 - DNA, 429 bp, Arabidopsis thaliana landsberg
  unsure (1)..(429): unsure at all n locations
tgatctctttccctctccctcgttcggaagcaaagctattggttcagccttgaggacattcagagaatggatccgtcaatttagacgggatgactagccaacaacgccgtcctttccgagctgtgggcctatgcacgcgataagaccctcccgttctaattacatcaaaatataagtaggaagtggggtttgaaaaacgagttattatacacagaagcagaagatgttgtgagaaaggtactgctgcctcgtagttcattaggcacgaacgcaaactctcaataacctccatgcgcacacgcacatacctacctgcttcacgcgtcaatgaacgtcttgaggttgtttagccacgccaggtactcgcgctgctccttgatgtccatgtagtcgggcacgaacacggacagggcctgagtgactncgcgc

SEQ ID NO: 72590 - DNA, 565 bp, Arabidopsis thaliana landsberg
ggtatcattgttcataaccggggctattttattctacactctgaaagaacacaaatctgatttatgattggttttgatggttcttttcctcatcagggattcaggaagctgcgttatcctatgagacaacgtttattaagacacatatgatgaagattaacggatttagctttggtttcgtgtgtttgttatcacaagatttcctttctggtttctgtttttgactttaaatatctttgtcattttatttgtacgatgaatgattaactgtgtagaaaatttaacaaatgacaaactggttctttcaaagagtaaaaacaatcttcaaatatgcaaaacattcaaatcttcgaaattagctcaataaataaaccgcgaaattaaatgggatggaaaaagcttaaccggcgattccgatattaagtttaggtttggataaaccgggtttgaactccccctatcatagtttacgcatatatctccagaacaatctaagaacggcggctaacgaacgtatttttccggcgatacttcgaaaccaaattcttcatttttttcttctgat

SEQ ID NO: 72591 - DNA, 516 bp, Arabidopsis thaliana landsberg
agtcgcaccgactgggcctgcagttgacccagtttcacggccaacgcattgaccgaacgctgggctttttcacgcacctgcagcagctgggcatgctgccggtcgacatgggcgtgcaacgcgtggatctgcgccagcgcctgggcccgtggactggccagcagcaacgccaccgtcgcgcccgcaccggcgcacaccagcacggccagaagcagcatcgcgccgattttcaggcgaatgcgcgagttgcccaagtcgacggtacgtggggccttgcgtgcgcgggaaacgagtatgatttgcatgcgttgaactggttgctcgtgagtttcggcttaaatgcgcatttccaacccttccccgtcgcgtcgaactgcccatgggccggtcgacgtacgcgagtgcgcaccggtggaatccctggccaagctcgcgcgcaaacgcgaacaaatggacctcaaactgcgcacggcactccctgccctgctgcaagaccccatgcgattggccgacttc

SEQ ID NO: 72592 - DNA, 1070 bp, Arabidopsis thaliana landsberg
  unsure (1)..(1070): unsure at all n locations
aaagttcagtgtcatttttttttagtaacttttttctttgcaaagtcactataagaatttcaaatccatattaaatgcttctgtatactttttcttctaattaaaacagaaagaaaaaaatatgggaagcagctgtgagagagattttgggactgtggagcagcagatcacgtgctcgtgacgtaatcctttttttttttggtataggaaattaaaaaattgcaattgatcgtgttatttatttataagcaaatcttataggtaagttgaacatataacttttgttgcaaattatacctaacgtttatacatgtattgtgtaggttagaagaaaatgacactatacaatccaaacgactttaaaaggcatttatatttcttgtatctttgtataattgtaaccattaaaagtttaagattttgtttgggaatcatgaaatccaaaaagttaccaggctgttaaaaaatagcagaaccatgcattttctacaaaagagttttgtttaaccgatgcggtcaaaattatgttttccaagaaaaatagcattgggggactgagagtcacgcgctgagtgaagcgggtgagaatcagcgtctggagcctttacataagcgacggcttgagcaagtccgtgagtggctatagccgttactgattggtccgtaggaaatgactagactcgtagccaagcatgtgtggtccttttttttgtttttaatttgtcaaccttacttgtcctttttactctttaattaaaaaaacaaaaaatcaaaatagcgacgttttatttctcaaaacaaaaaatacatagttaacggaaattatgtggaagaaatggtgagagctattgacactgtgacaaaaagtatggagagtttctacagatttgtacgattttgggtccaatcacaataaaaactcattgctcccactctactgatgcttattaatatccacttcgcttgatgcactttctttataaaaagattcaagataagcaaagcgagctgctctagtagtgacacgacaacagcatgtncactctccattagcgtcatttccttaaaca

SEQ ID NO: 72593 - DNA, 725 bp, Arabidopsis thaliana landsberg
cctctattattacagtcatttttccatgaattgttgcagttctcgacaaatccgtcaaatttttgggtcgtcaggaaataaaattcattactaagccagacatttaattaaattttttctatcatcataagaagccaaaatatgtttatacatcatattgtaatcatagaaaatttggattgactatcagcttgttggttaagttttgtttaacgtggcattagcgaaattcatatgagctcacacattggcggctggtctagaattcatcgtacaagtgttatgattatcttaatttggctaatttctcgactattcttgcatcatcgcgctttttttttccccataaatttatttgttattcaaagttagagattagtgtgtagagtgtatctttcattaaaaaaagatcgtgtatagtggtctaacatttaggctatttaccattttatgcaacctaattgaagaagataacaagcatgcaattgattttttatttttttcggacttctaatttaggcaatcaatttcttgcgagttagaaagttggaaaatttgaggcttttgacgacttttccatcaatatcttccacttttagccacaactttttttgtttttttgttaaatcagaaagattatgtttttttttttaataaacgttttcatgtatcttagcaaattttgtgataaatatcttttaaaacttcaaatccatcacatattt

SEQ ID NO: 72594 - DNA, 528 bp, Arabidopsis thaliana landsberg
gcacaaaaaattagtagttgagacgcaaatgagtctttagactccatcgcatctactaacttgaacagggtattcaagcgctgagacaattatattctaaaacaaggagaaatgggatattgctgcaaaggaaaaacagacgagcttacccagtcttcgaaagcctctttaatcagagaaacaagaagcaccattgacagtggagctacatttgttattggactcacaggactgcaggacaaaaattaatcagcaaaatctccatcaaaccagaacaagagtgttatatgaatagtaacacattataacacagcttttggatttaacgtaccttatcggtgtcattgatagacacgaaattccaagaaagtatatgttcgctatgcgcctaaactgtcaggaaacacattataactaagattaaaattaacagaaaaatcttgtggaaggactgcgaatgttggaaatgtacatcagctgtcacttcatttacgattctaatcctaattccataggaaaatttcacat

SEQ ID NO: 72595 - DNA, 599 bp, Arabidopsis thaliana landsberg
attctaccttaaatgctctctatactaaaagatctctcctaccaactacgaaagccacattaacaagcaattcctgaaaaagttagtagaacgtaaataatatgcaaatttgtcgtagaacaatttggaatatttgaggttccaacaaatacatttttgattaaaaatgttaataaggtttcgaaagtggaaaattttttttagggttttcttcttcatttattcgtcagggctgctgatttacagattttgtgtattgtaatgcgaaaagaaaacatatatttgcatatatcagagtttgattatggtaaaatctaaatcaacacaaattgaacataactctttctgtgaaaacaaatcactataaaatatagagtacaactttttgagcctctaatttataagttttctactaattgactataattacttcgacatcactcttcaacccattttgatattagattggggtatactcaaaccatatctttgaacatcaaagactagatgcatgtcgatgcagaatcctacacgattcgattcacaaaaacaaaaaaaaaagttaaggattaaaatctttgtgaacaaaacactaagtt

SEQ ID NO: 72596 - DNA, 680 bp, Arabidopsis thaliana landsberg
gtaaagcattcctttgagcttttctgagcctacctttgtgcttataagataaccactttcgaatttcccatcgatgatcccagtaatcacggtgccaggtttcagttcttgagagtctgaatatgtttcagaaagcaaatcccaacactcaaaataagatgaaagaagagaatctaaaaactttggatttataaatgcaaaaaacatgcaacatatccaaaaacatgaatttttaagtacctttgtcacggtttgcagatttttcgataaggagcttcaatgctttttctgcgaagaaaggacaaacatgtatattaatcttggatcttcttggagaattagaaagagagagatcatgaatggtattttaagacctttttcccaaaatgtagaaagtggagcttggaagtaatagagatgctcaaattcaaagagcattttaagataacacttccttagaacaaatgctgaatttgttattgttgtcttaaaattgaatgcgtcaatcacttctttgcatctacgatccttgatcacctaaaatcaataggatttttaaaacagaattgtataatatttaatgaagaaaaaatagatttaaaacttgatgttcaatggcactatgaactaattacccttttaagaccacctcgagatgtgacttcgttgaaaagccgatg

SEQ ID NO: 72597 - DNA, 497 bp, Arabidopsis thaliana landsberg
aagttattgtaatgataaacatgagtgtgagttttgtgacgacctacgctattttcctttcgtgtcctgctaggaaactcgtttcttcatcatcatttttgctgataagaataatacatatgtataaccaagaagggaaatatacaaataccaaataaacactttataaaagcatttttagcttctttctttcagcagtcgtcagcatatattttagttgcgtcgaacaaacgctttcaatcgatcaggaatcatcagcttagttagttctaatcggcccttcacagtcagctttattaaactaggcatggcctcttcttcaattcgcaactcatctaatccatggtctcttctttccatggacatttcaagattcgtcaaccgaccaaaaccttgtgcactgatgctcatgatcttcactcccgtgtaattacaatctttcaagaccagatcttccagtctaggtaacttctgcaagcaggcattgagctttccac

SEQ ID NO: 72598 - DNA, 631 bp, Arabidopsis thaliana landsberg
aaattttgcatatactttagagttggctccatctttagccgttttcttggctacgatattggcccatttacgtcccattaggaatctccttttttcacattttaatctttcttattataacacaagtttttttgattttcactagaggaaatggattttattagcaaatcaagctaggatagcactttacctgctaagatggtcttgcctttctatctttatcaacagacactcatccacattcaaaaaacaaactagaccattatctgcaaatagaaagtttcagccaagtttgacaaagtcagctcaaattactgtttgaagtttgtagatataagcgacaaaaacaatcatactgcaccttttgttgacagtctactccagacatatcatagttcaagtaaatactttgaaattcaacagttcttataggcgctattgtattctaagaaatcaatagaagagtttctaagcaaacctctaatactcaataaaaatcaaagagcaaactagaaagctagccgcaggttgctcaaaacactgttttgaggttgcggatagggctgacatggtttgaagagattttctaagagtataatttacgtgttcctaagatggagaagtagactag

SEQ ID NO: 72599 - DNA, 381 bp, Arabidopsis thaliana landsberg
aaacagagtcgacgaatggagatctttacatgattcgttctctcaaaatcttaatttgtttgatttcatttatgaagcagaaacaagttaatagacacatagagagatgatacgctgcacaatgcggacagtgctacaagaagagatttatagagtcttaagagtctcaagaagcgtacaaggagatgaggagtgaatcaccaaaacaagtggttttggtttgtgaatcagtatggtttacccaaaacacttgtttggtgtgtttacttctgatctcttcgtactcttcttgcgattctatgacactctacatgtaacatcggcatggtttaccaaaaagccttcaagggtgcaggagaattttgattcttagagaacatt

SEQ ID NO: 72600 - DNA, 600 bp, Arabidopsis thaliana landsberg
tgatgaatccaaataagctgcaggacatgcaatgtttgtcagtttgagacaagaaagatctgtttatggattttcggagcacatgttctgagtaagtgactagaataattgcctgtaaagagggataatatttgccatgtattcagtaccgtagttcttctccatgatttttctactttctatcttgaaaacaacagcaataactagtgcaatagagcaaccagaaaagaaacctgtgggaagttgaagaacaattatcactgaacaattgtgacatctttgaaaatctgacactcttaaattcccttaccagagaagaatgtaaccctgtgcctttctcttttaacttttggccttagacacttcatgccttctcttcgattaccacttgaaaagtgcttaacaaaagttacctctactctctccaggagtctgttaacctaaatcagaatacagtgaacaaaacaatttgatgtactaacataacagaaaaatgattctacgactgaaatatacacaaacctcatcagaacttccaatcaatgaattatccacaattttcatgtagtttctagatgcattccttgagcaatctacaaa

SEQ ID NO: 72601 - DNA, 480 bp, Arabidopsis thaliana landsberg
  unsure (1)..(480): unsure at all n locations
gaaacagatacccgagcttccgagaagcgttgcctccgcaacatttcttgtattttagctcactgccacagggacagggagcgttccgtccgactttgctcataccgactgcttcattctttatgaaaataccagcgatgagaaaatccgactcgcccgctctcttcttagggagaggaagaggagtcggaaaatcgtcgagattctacccgcgacgacaattgtcgttcacaaggtaactcatcacggcactatgcggctgcgataaaagcgccgcggcagattggtcgaaccattgtcgatgaactgaataacgccgtttgtcgtcgaaagactggtgannnnnnnnnnnnnnnnnnnnnnnnnnnnnnnnncaaagacataatgaccnnnnnnnnnnnnnnnnnnnnnnnnnnnccgcttatcaggcaggcgattcatgccggtgatttgaggatgaacgaccaggatactcagcgt

SEQ ID NO: 72602 - DNA, 518 bp, Arabidopsis thaliana landsberg
attaacacatgacacaaaggcattctaaacactttaactttaaactcagtatcacaattcataagggtcaggtgaaattggattttggtaaacagaacaaagaacccatgaacaatataatcatattctttcatcatcaaaatcaaaatttgagattttggtattctctggtcaattctcaagtcaattctctattaacccaataattctcaacaaatcaagtttcaaaaaacccaaaagccacttcctttagcaaccaaacaaacaaataatcaaaacccagaaaacaaaattaagaatcaaaaaagagggaatcatcaaattcaccttcaacaccagaatgaaaaacaccaagtccaagccaataaccataagcattcataggagttagatcgtagacattcagataaaccggaacagaaccggattgcttcttccgcttaaccgagcctttgaagcacaacatctctctcagtctccggcttcatacatcacaagatcgaggaaagctttgagat

SEQ ID NO: 72603 - DNA, 338 bp, Arabidopsis thaliana landsberg
aacttgcttaattggtggtgttatttatgtatacctaattaggcaattaggtttcaagacgaggaaaaaaacgatgggacggaggtggcgagtggtggtggtccaagcacacaaagcagggcgccacaatttgcctaaccgtaaagagccacattgctttctcttttaccccatgccgggaggctgaggccttgttcgtcattctattattctcaacctatagcttcaacaactaacataaatattcaaactctttgcagcataaaggaatagggtgatacaacggagctgtgtacatgactttggctcattatgatatatcttttttaaaacattta

SEQ ID NO: 72604 - DNA, 739 bp, Arabidopsis thaliana landsberg
ctgtcatgagtctcttggctgcttaagttttgggtgtactatgttgtgtctgcagaagctgatggtctgaaaagaaagctgaccagtaaacttggaggcaattcggctgctcttgtacctgactggacggtactattctggtttcttctttttcgttgagtgatagtgacaagatatttaggggtagatagatgccttaaaagaactaggttggtgttgcatgtgcttgctcttaaagcaaacgagaagcaattgaaattattttggttattacacttaagcatgccaggaatgagggttcataaaagaaaacaaggataggcctggtagctttgctagagaatcatatacgtactagatgaagaaagaagactttgccatgagtccacagttgtctgattgagttatgtatatagctctgtccctgatccgttgggtactttatgtccctttaacaggtaggagaatgtgttgcgacatggtggcgtccaaactttgaaaccatgatgtacccgtattgccctgctcacatcacgaaaccaaaggtagtaaaaaaacacaatgtaaagcttctcagaatttccctttactcttctccttatatctcctcttttttgtggaatggcaggaatgcaagagactctacattgttcacttgtctgagaaagagtactttgctgtgcccaaaaatttgaagctcttggccgtccctttgttcgaactctatgacaatgttcag

SEQ ID NO: 72605 - DNA, 532 bp, Arabidopsis thaliana landsberg
  unsure (1)..(532): unsure at all n locations
tccttcagctcttctctgcgccctccatgtcgttcccccgcttcctgctcgctcttcccgccgcattcctcagcgccgctacggctctcgccggcgagacgccggagttcagcctcgccatccgcaaccaccgcttcgaaccggccgaactgaaggtgccgtccggcgtacgcatgaagctcgtcgtgcgcaacgaggacgcgacgccggaagaattcgagagccacagcctcggccgcgagcgggtgatccccggcggcgccaaggcgggagatctacatcgggccgctcaagcccgggcgctatggcttcttcggcgagttccacgaagcgacggcgcaaggcgcgcgtcgtcgccgagtaaggggcgcggccatgttcgcacggcgttgaatcgtgtttcgcgagtcgctggaagcggcgctcttcgtcggcatcgtgggcgccggcacccaacagcttangcgnnnnnnnnnnnnnnnnnnnnnnnnngtcncgcaagcgtgcctcgtgcgctcatgctggcgctcgc

SEQ ID NO: 72606 - DNA, 308 bp, Arabidopsis thaliana landsberg
gcataagacagtccaaagggacaatacccaatttacacacgagtaacaagctaacaaaaggaaccagatagtaaaaggaagcgaaacattacacgagaacgagaaagaggataaatgaaactacgaggggagacacaggacctcgacaagggttatgaaaaaacgcaaagcgcgaaaaggggggtagtgagagaaaaaggtgaggagacagactaggccaaaacgcccacgacgaaggcgcacagcgagaagagtaagaaaagaggaaggacggaccaattagaaaccgcagagaaggggaggggaga

SEQ ID NO: 72607 - DNA, 614 bp, Arabidopsis thaliana landsberg
  unsure (1)..(614): unsure at all n locations
attggattttattggccaaacccagtcaaaagtcaaaaagtcatcaaggttcaaaataaaacaaacgttagatttgtttaatgggctttattgggccttgtttctatcattttccgatcgtcaggttggtgaatgtctggcacgtttaaattgaaaatctttgctaattcaagaacagctgatttttgtaagcgggatttataaaaatacttttttcaattttttcacgaatttaatgactaaattatcttttatttaatgaaaacatgtaattagaaactaaaattacaaaaatttattttcgcccaaaaaaatagtttccgtcagaatttttttcctccaccaaattaataggatagaatggaccattctctttaagacaacgggatccttctaaaaatactctgcttcaagtaaatatgtattgtctccgtttctcgcgaaatctctagtgttcgtacagctcttacctcaatcatatgcttgggcactcaaccggtgattatgaaatctgattgtcaaatatcaatcaaggccatcaatttacgatcacccaatgtagagatccatatgtggnatcttatctgatattttcttacttgctagttctctaa

SEQ ID NO: 72608 - DNA, 612 bp, Arabidopsis thaliana landsberg
  unsure (1)..(612): unsure at all n locations
ttatcaccgacctgaagtctctcgccaacatgcatggcaaggagttcggcaaggtttgccgcgatgctatcgccaactacgattacagcgtctctgccgagcattaccgccatggccgcacgcagatggcccgcctgatcaaggagggcaaggtctacaacgtcacggaagagcatatgccgtggctgatcaacgtnnnnnnnnnnnnnnnnnnnnnnnnnnnnnnnntgttctaccagaaggatggcgcgccgatctcgcacgggatcaagctctctcccgacaaccctctgtttggctacggccgccagatgatcgtcaaggcgatcgacaactacaaccgctacctgaccgagtttggaacggataccgcatgggttcctaccacacagcttgacgagctcgacgaagccgacctcccggtttggtaccagcaacgcctcacgacaggagcctgagatggctaagtgggtcaagggtgagcgcatcaccaatatgaaggacgcttacgacgcgattgctgaccagcaagttcttttcatgcccacaagccgcagaattccggatggcttcagaattggagccttagccagatacgccgcgaagtcagcg

SEQ ID NO: 72609 - DNA, 703 bp, Arabidopsis thaliana landsberg
acttgaattatcacgtccaggtatttattttccaagaccagtcgatgttgcagtttttcgccaagttccaaacggtcaagggagtgcaggcaggtgatattgtattttaggagttcttttactttattggtttgcaagtgaccgataaaatgactttcatgcgctacctcctgtaggtcgttaaatttttcttttacctcctgaatcttattttctgcaataagacggcaaccggccgtaatggctgctttaattctatccgcagatactgtttttgtggctaaaagtaattttacgtctgtcggcttccggctactgtttttacaggctgtgtctatgcgacgcctgatcttttcaatattgtgttgtaaaccctcttgcatttttaaagaccgaaattttctgtaaactcctcaaaacgaggacacaaagttaagtcttttccgccaactgtttaaaaatagcaacgcaactgcttattggaggccatcattgggtaaaacaagattaaattatgcttattttgacaaacggcgccaaatcaactcattaaaaccaaatactattttgtgtttgttgaaaaaaaagagttataaataaaataattcacaatgtaagtaatggaaaatcattgtattataattttgatggaaaaaatgtaactgaacaattaagggttgaaaaaaataacttaaattgcagc

SEQ ID NO: 72610 - DNA, 1206 bp, Arabidopsis thaliana landsberg
tcttgcaatttgggcttgatcacttttcattattactatttgtttatgaaagtaataaatttaggcatgccttttttcttttttttgggacagaattattataggtatgcctattactactctatttgtttcaaaataatgtttgtaatcaattatattgttaagcgaataaaaaataacttcaaaattctattagatattcactctttatcaatcatgttatatatttttgtagctggtaaacaaataattaatttttgaacaaaaaacaaaaacaaatacaattagtttttacaagcaagtatgcaactgaaatccaaagattttcttgacgccttttcgagcatattctaatccttcattttgatttagctcaagaaacgccataatagaaccatatatatgaactaagtgtttttaaaaagagtaggtcatgactcatgagtaatcttttccacgatctttaagatatattattcttggaaggtcgaaaactataatatttcattttctgtcgaatatatatatatggatgacgatggttcccatgcatgatgaagaaaaagacgaaccctatatttatctgtttaattaaaattttctttgtggagataaactctctgtgaaacgcattccgccacctaatttatcatatattttcatgtgaaccaaaataattaaaatttgtttgccatatatatttatttgttgttatctttctgagtgataaaggtgacaaacatttttgtccactgatacccaatctcttccacttcagttcccttcctttcaaattttatctcgtgcttttacagcatatcccacaattcctgtaaattatctcaaggatttggtgcataaattctattttttcgtacttttttgttggatatgtaaatcagaaccaaaaaaacttaacattgattaaactttacaatttacgtatgtcccattagaggggaactacagtttttgtaggaaaataagaaatttgcgaactaaagacactaaataatcctacttttaaaatcacaatagttagtactcaataaaaaatattgtatattgctgtgaaaaaatgtaaatagtttggagaaactgctactaataaacaaataattaagagatgtcggagatccaatttaatcataaaaataaaatgattagcacaatattgcactactgatttagatgcgatacacgtgg

SEQ ID NO: 72611 - DNA, 642 bp, Arabidopsis thaliana landsberg
ctggataagaggtggctaagctcgcgtgcgtaaggtgaaggtgtcgtcgcaacgcaactttttgcgcggcgatcgacacccaaccaccaaggagtacgtgatgcaaaagtccatcgttctcgccctgccgctggccctgtgcggcctggtgtttgccgcgcaggcgggtacttcgaagcaggcggctgcgcacgcgaagatcagcatgacgcaggcccgcaagatcgcgttgaaggtctatcccggcaagatcgtgaaggaagagcttgagcacgaatccggcggcagtggcctgcgctactcgttcgacatcaagtccggcaagaacacccacgaagtgggcgtggatgcgaaaaccggcaagctgctcgagaactcgctggacaacaacgacgcggattgacgccgggcgcgatatgccatgccggtacgcagggcgtgccggcatggccggggtgatgccggggcggttgctctgccgggcctgcatgcatctgtcctaagcattcgcaaagcttgggcgacaaaaatggcgcgcatctcgcaggtcagccgaacgatccggttggcccgacggtctttccccagccgtgccaaggatgcccatgaagcccacgtgccccgggtagcatgcttacctgt

SEQ ID NO: 72612 - DNA, 574 bp, Arabidopsis thaliana landsberg
  unsure (1)..(574): unsure at all n locations
gcgctgcggnnnnnnnnnnnnnnnnnnnnnnnnnnnnnnnnnnnnnnnnnnnnnnnnnnnnnggcccgcggcttcctgcaccgcaccgaccagcagttccatttcctcaaccggggctacgcgacccatgatgaattcctcgaaacgctggcgtcgcgcaagcgcaaggcgctgaagaaggagcggcgggcggccctggaagacggcatcagcatcgactggctgaccggcagcgatctgaccgagcgggtctgggaccagttcttcaagttctacatggacaccggcggccgcaaatggggccggccctacctgacgcggcagttctattcgctgatcggcgagcggatggccgacgacatcctgctggtcatggccaggcgcaacggccgctacattgccggcgcgatcaatttcatcggctcggaaacgctctacggccgccactggggctgtatcgaggaccatccattcctgcatttcgaagtctgctaccaccaggcgatcgactttgctctcttcacaagctcaaggncgtcgaggctggcgcccagggcgaacacaagctggcgcg

SEQ ID NO: 72613 - DNA, 583 bp, Arabidopsis thaliana landsberg
gcccgttttcttcccatgccctcttgccttccctcgcagcgcttcggcgtttctcacatatctcgttgcggcgtgtcgtagtacacgtccgagtacgtggagcgatgcgaggtgtgcggcgcgacgccggcgaccgagcccgacgagagcgcgtccagcaggcgctgaaacgacacctgatcgcgcagcaggagcttgatttcggtctcggtgtgcgcggaggacatggtgggcgagcagaaaggaagttgtgagcaaacaagaaagaaatcgggagaagcgcagttcactcgcttggtgtcgcgtgtggcgtttcgaacacgcagcgcgcgcagtctgcacacatgggaacgcgaatcgagaaagtgtgcacgaggcaacgacgttccaacaatgtgcatgtgctgcactgtgccaggagcaagtaacagcggtgcacatcgtcacatggcgcacgatgactgtgtacactgacgagacatcgacgtgcaaagaacccaatggagagacaaccagtgcgagcggagaagccgtatgagacagcacgtgagacgcagcatgagagacgagctccgatggacac

SEQ ID NO: 72614 - DNA, 118 bp, Arabidopsis thaliana landsberg
gcagacgcatgctggacggcccggaagcagccggcacgaaaccgcgtgccgcgcagccggataccgtgcagcgatgttgcacccgatgcgtttttcccgggatcaggcacctttccac

SEQ ID NO: 72615 - DNA, 503 bp, Arabidopsis thaliana landsberg
  unsure (1)..(503): unsure at all n locations
taataatcaaacactcatattttatacacaggctttttgtaaagtttgtgtgcgaggcttgttgataattttgatatatgtctttaagtattaccacaattattgaactatccatacgacgtcttacatagctgattgatcatttttatctcttctattttctttagctgaaataaaatctgtattttatattaacaattttagaccattattaggacatatacatagtgatagacctataattgaaactaatagtacaactatttaatacaaatgttggcaaaagaaaatagactaaatagtacagtagcaaatatagttaaatagttaagtataagaaaataatacttaatttcgagtttttattatcgatattancaacgtatactagtagtatataataactgtcgacatgtgtgtagagtagtacatgctccacacgtgaatgtctcctttattggcaatntctaatactaatagctagataggggtaatctatatag

SEQ ID NO: 72616 - DNA, 505 bp, Arabidopsis thaliana landsberg
gccgaggcacccacctatctcaatcgcatcgtcgaagcacgaaacccgctttcgcattttaacgacatcacgaagcatcaggccttgcgcgtggtgtgctactcggcggacgtgatcggatccctaaaggcctactacgcaaggaacaacttggcacaaacctataacgcaccgtcctttatccgagtctgggacgatcaggggaatagcaagcagatcgagaaaacggacgcctgttttttcgatttcaagggtactgaactgcgccctggcgataccttgcagttggaggttcagccagacgagagctttccggaggggacctaccggatcgaatggcaggtgtgcaacgtgccgcaaggagaatccgggtcaggcaggtccttttcgctggcgatcgctaatcgtcacgtgacgcaaaacggcctgccgatccaagtgaagattatttcggatcgtgactggcacaggcacgggacctttgatgccatgtttatcgccacgt

SEQ ID NO: 72617 - DNA, 412 bp, Arabidopsis thaliana landsberg
actcctacattgatggttaccctgcatttggagcgacgtgtcagcatgcctagcacgactacataattttacacctgtacgatcttacgccaaaatggtccaagcatacagcttgcatgtctttgctctctttatacctgtatcgtacaaactctgactttgcatcacttgctgcttcccttgagaatctttgaggacagtgtactgcttctgtttacctgctgcgcatatggataccctgtagcaccaacactaagacctacgtgcatgggagtgtggtgatctatgacgacggttgcccgtgctgactatattactatgccagaaaatgatcgtccctcttgaagacggaagaaaccccttatgtgtgttatgcttcgatgcacatccgtcacgagttcccaacgagaat

SEQ ID NO: 72618 - DNA, 587 bp, Arabidopsis thaliana landsberg
  unsure (1)..(587): unsure at all n locations
aatcacattctttttctctgttttctaagtgcttcacacattcacaaacttttgatccatgtgaaaccttttttttttaatctgttatttgtttagtcgtccacaagtaaaacgaatccaaagcttgaatctttttgtggtggcgattgcaaaagcgttgtcgtttaatagtaaacctgcaagaatcaagaaaaacagagaaaaaaattgaagactgccacttattcaatagacaagatgaatcaaatcttttttggatgtttgctaaaaaagaatctaacaaaaacataacatgacactagtggcagagatcgtttttggtacaagaggactcaaaattaaaaaaacaatgagttctttctacatcaatcgattctttaaaaccctaagatcctcaattgcaaaacttgaatacaagaaaaaaaaattggatacctttttcttgattgtcttcctcagaagcaaacttgagttttctttaaagcttctcttaatcatgagacaacaccactaccacaaaaatctaatagctatataatcgnataaaatctctcttctttctctctctctatgagccccacagaaac

SEQ ID NO: 72619 - DNA, 2182 bp, Arabidopsis thaliana landsberg
ttttcatgctaactgatctaattacttgttacagatttttatttgcggggactattttcaagacgaaagtggggctagagaatttggcaaaatatctcttacaacaaagtggataaagactactgacacttcattgatgttacggaatcttgaggttaactacaaggaggtaagaatcttgtatcagttttcttctgtttatttttaccagatcaagttatttcttcgagggttaagcatgtttcaattattgatattgtgttttacagacagaggatcagcccatgtccgttttgcatattcagtatccagaatggcctgatcatggagttcccaaggatacagtggctgtccgtgaaattctaaaaagactatatcaagtaccacctagtctcggcccaatcattgtgcactgcaggtacgatgcatgtcaatgagggatacaagtgttgttcaacgtctcctgagagaattgtttttttctctctcagtgcaggtataggaagaactggaacatactgtgcgatacataacacaatccaaagaattcttgctggcgatatgtctgcgttggatcttgctaaaaccgtggcactatttcgcaagcaacgcattggcatggttcaaaccatggtaaatctttcagcgttacaatttttagctaccaaatttctgtatctcaccacataatttgttctgaattgttcaattccttactcttttttgaaggatcaatacttcttttgctacaatgctattgttgatgaattagaagatctaaccgcggggacaaatgctggaacgagttcctaaaggtacgcaatttcaacaatcaaatctgagtgagccatacctgttataatctatgaatactcttatcttgtctatcttttgatccagctgaagggttcgtctgcttagagagggaaaaaggcttctacccaactatatcaatttcgtaatgtgattcaagaagaaacccgcgtgaatctctacattcaagatttttcaatttctgtaaatttccatatctgataggtttcattgttacttttgttgtggaaatgctgattaaaaagcaaatgaagtcgccaatgcgagattcttcaaagactatgaattcggtttgatttggtttgaagtgtaaaagaaccgaagattaatttaatggtttagacttaaccgagtttctttcgaaaataaataaatcagaagcggttaaaattggcgtaaaatgtcccgagtcatcgttgctcgcgggaaatctagctagtgtcggcgcgtgtctggcacgcgcagtaaagttaagctataaactcccaaatcgagacgcgagtctttcgcctttggcttctggatcctcgtgatgatgatgatggagaattcgaaatcaaagtaagcaatcatcgtcacttcttcgaatacccctactcaaatcgagaatcacccagaggtaagtttagcttctccagatctcaacttatatctctctctctctagcgcgcaattggaattgaatttttgggggatctttcctttgatcgcacgaatttggtcaccaatttgatgcattttagcggaatattgtgtatctaggtttaaatttggcgttgaggatacaaatttcgctatgtcgagagtttagtgtagtatctcaagactctgagccctagcagtcattactaagaatccaggctaagttagagatggtgtttttgtgggggaatcatattttattcgcgttaaattcttctctcagtgaaatgtgatgatcccttcgctcaatttggcctcattttgctgctgaaaatggatggagtctagtctataaagctttttgtctagatgttgaacatatgagtctggttctgattgattgtttagtagctatatcactcatgattgtttcaggtactccgatcggtcgcatagtgaactttgtcatgttttctttttctacttgtatagtggttagtgaaaattatcctcaagaagaaagttttcatcatcttattgatccagtgtcagctacctgaaacgggtcagattttgcttattatgcggtctatttcgtgagtaaaggaatttgctttagtgatttggtgaacgcgcttagcttagttcttgttcgttttttctcccctgtgaaggatccttttaagctgttttaccacatatatga

SEQ ID NO: 72620 - DNA, 534 bp, Arabidopsis thaliana landsberg
ctcagatcacccacactctcttccaattatcaaacaaaaaatacttcatccctctgcaaaaacgtgccccgtgattcctactctgcggaaccatgagattctgacttagcatcttgcttagcttcttactctctccatctctcacatcctgcatcggcgcttgcaatagaagtatctcgagattctctatctgtttggcattgtagcaagtgcctcaaaacacatcaaaaaacactcacaacccaaacttttctaactacaaaagatgaatatcaaaacaaacctcattcacaaaacttcacataccatgatgtatccataatgataaggatcgagttcttccataatcaaagcagcatattcatcagcttgtctccgaatgttatccaactcgtttgcagaagcacttaaagttataatctatacacatatagaaaatctacttatgatgaagaacacaaagagctttcagattgttaataccaatcactaccaaaatcaagattctacctctcttacttcggcttcattcac

SEQ ID NO: 72621 - DNA, 532 bp, Arabidopsis thaliana landsberg
  unsure (1)..(532): unsure at all n locations
acacaacacacctcctccactgtaataaaaatagtattaaaaaacatattaaatgatttttaattaatcaaccctcaaaaataacgtagagatcgaaatacactgaatcgttgacaaatcccaaaacatgcactaaatgttttaccgcagatcgaagaagggatcatcagtgtaaaaatttggcgtcgcattcacaaaactatttatcgaaatcccagaaacgaatttggaacatagtgcgttaatcattcaaaaggtattatctttttctccgaatcttatgcaaaaatttccccttttccgtatcagggctagatttggatttgtgggtactgttcaattcannnnnnnnnnnnnnnnnnnacttgccctttgagtgttaacacttttgattgaatcgagattgttattaaaagttgatccttttgatgccaatgcaggtctttgttattgaaaaatcgattctttgttctggtaattactattgtcgatcgattctgtttcttcttcttcttatgcaatgtatgtggaa

SEQ ID NO: 72622 - DNA, 440 bp, Arabidopsis thaliana landsberg
tgtcaggcttgtaatcccttattgagtctatttttaaaagactttttagaaaatctcttctttccctctttttctcacacttcaattatcatttacttatgtatttattatttgttgatttgggtggtgtagagattagagaaattttgtgaaacagattcctgtgtttactcgaatttggctgagattctgaagaaagaaaaggaggagggaacatccaagatggttgctagttgtagtagagctcttttttggctcactaggtaggtatattcacttcttcttttttttgttaaaaacccttcttcttttttcccggcgatatttaccttaattaatgtataattcatcacctaattacagaattctcataattgatatgcatgcacattaggattgtattctaagttctaattcataaactgcacttttcgtaatta

SEQ ID NO: 72623 - DNA, 220 bp, Arabidopsis thaliana landsberg
ggaaactccctcatgggtggcagcgaatgccctctatccataaaaccgattactaactcttaacttttctaggattactaacatcaggggaagggaatgacgaatgggtctcaataccaccaaccttggttcccaacgatcacgaccgaaagagggataaaggcaaccatgcgaagcgaaaccctcataatcgccatgagattatcatcatctggcgacc

SEQ ID NO: 72624 - DNA, 382 bp, Arabidopsis thaliana landsberg
tgagcgtgctggacatacaggacctggacgtactgttcggcagcggggcgcgtgccgtcaccgcgggcgaccatgtggtcctcagcgacggcgccggggaggtggtcggcctcgtctgcgagtcgggatcgggcaagtggaccctggcgcgggccgtcgggggcctggtgccgacgggctccggcgcgatcctgctcgacggacgggcgatcgggtcggtcgaacgctcgacagcctagtggaccggacatgacaagcaataggagaccgatgcaacataagggcctgatgattctccggagcacgtggacgagaccaggtgcggctacttaacactggaaactgaggaaacaccaacactactatagaagatacctcacca

SEQ ID NO: 72625 - DNA, 1322 bp, Arabidopsis thaliana landsberg
aaatatgggcttaacttatatttccggggattatccaaaatacgtaaaatcgaggcttaaggggtgggctcaacttgtggctttgtggcccattactcgtcatcaccctcctatttctttatgattcgctttcttacaaaaaaaaattcacttcaagaaaaaaattaaaaaaaattgcatgcattttcaagtttcatttttgaaaaattattttcgggtttttgatttgcttaatttttttttacagattttgttctgtttttgtgtgttgacggtgagattttggcaattgatatatggtcataagccaaaagtatagagttagataagtttgatgattgacttctccagcattgtaatatttaacattttacattattgaaaaaattatactacattaaactcgaaggtgtaccaaagaaagaatcgttttatactccctacaaggggacgagaaaaaatcattaatgtagtgtgtgtgtatgagggagctatgaagaaacagagcttgtagctactacgggatcttgtggctcatcatcgaactgatacttgttgtaaacttggagcaatagatcacggcaagggacggtggctccaagcttgatacaagccaagaaagcgccggataatttacggtgaaggctataggcttcatcgggtggtggactgagtctatgtttcaacatggttgctcctaaattggagatactagaagcaatgttgttggttcggaaagcatagccaccaggttctgcaaaaggtagacccactatgaaaccggcttggacatgagcgtctagcattacatctgattcatctccggttaagaacccgagtctcctagacatttcaatcactccttcactgtctttttctgcacatgccatcacctgaaaaagaattccataaaatgttcaattttcagaattctttactatgtgaaagcgaaaaagaggaatcggtaagattgttttaccattcgtagatagtcatcgacgaatttcttggggtaatcacgagctgctccgaaatcgataagatttattgtctttgtggcttcattgtataagaagttaccccagtttggatccgtctgcataaagcggaagacaaagagctccttcaaagtgagttctagcatcttcctcccaacataatctcgtgttttctgatctaacaacgctactttatcaatggggatccctgtgagaatatgttaatagcaaagcttagttcatcatatcattataacatatatcggaacagaataagcagatttctagttaccagatataagttcagtggttagaatctttttg

SEQ ID NO: 72626 - DNA, 1478 bp, Arabidopsis thaliana landsberg
gcgtaaaccccacgtgagagtgatatccaaagacatttgagtttaacgctctgtttaagcgcgtgcggcagaacaaagtggataaacatggggaaactgtctaaccctaaagaaaaaaagagaaagatttctaattttttttaatagctaaccaaaagagatggagaatgctaaaatacgctagatatgaaatagtagcttaacctacgccgtattttagtcgttcctctcttttaaacctacgttcctcgtcaccgtaatcgctctcgctctctctcttcttcgtcgcttcatctttctctctctctttgtaacttcgaaaccgatcaaatccatggctaactcttccgctggctccgccgcagaccaccgcaacaaacacctctccgtcaatccaccgcaccagatcttcaaaggtattttaatcgcttcttttttcttcttcctcttctctcccgatgatttaggattgtgttttgagtctctctcattacagagactcgaacacaatcctaatttttcagtgtgattgtagctcatctctttcccggtgcttaatcggagattgaattagcgttaacagaatttatattataagtctctaattagggtttttggtgtctttagatcgttttcgataacattaccagttttcagctcttggggttttgattttggtactgaatttgttatttttaatatttggtattgttaaagcattgatttttaatggttccatgagctatgtgtgttatcaatttgtttgttgtttagtgttgttgtagatccattagatgtgtattgtttaaatctttgatgtgagacgtattggtacttcattgtatcccttgtagagacctaaagctgattcttttactgtgtatttgctaaaggattagagtgacattttggccttgtgtgtgcagatatccaaggttctgacaatgcgattcctctttcaccacagtggcttctctccaaaccaggggagaacaagactgggatgggaactggggtatgtttctattgtttgtgtatgcgtgcagtttgtttttgatttcttaacatgtgagctggtttaatgttttacaggatcctaatcagtatggaaaccattcggatgttgtgagaacaacagggaatggggaggagacactggataatctgaagaaaaaagatgttttccggccatccttgcttgatgcagaaagtggtcgtcgtgatcgttggcgtgatgaggaaagggacaccttgtcctcagtccgaaatgaccgctggcggaatggcgacaaagactctggtgataataagaaggttgaccggtgggataatgtggctcctaaatttggggaacaacgacgtggtccgaatgaccggtggactgattcaggaaacaaggatgctgcgccagagcagaggcgtgagagcaagtggaactctcgctggggtcctgatgacaaggaagctgagattccgcg

SEQ ID NO: 72627 - DNA, 531 bp, Arabidopsis thaliana landsberg
gcagctgcagcgagtagtctatcgtattattttctatatcttgcatatcctgaaacagcaggtttaatgtctaagcaaaaatggaaactttttgatacagtttaaaagtcaaattccataactaaaatagtccatcttccatagaaagccctaaatctcatctaaatgataaaattagctaccaattcaaaagtttctaaatatgttcttcactcctaaaaaaggtttcaaatagaacattttccggcgaattaagtaaatcagaaactcgatcgaacaacgagtacgcaattacaaagcataaaccctactaaaatctcgacgattccgcaacaaaacccaacttcgtatgaacatcaaattacgataaattttcgaagttcgcgtaagttgtgttaccttcccggctcgatcgagttcgtcgatttgtgttgtagccatgacatcttctttctgcttcacatcagccttatgtgaatgcgatgttaatctccttaacttctgaatcgaagctttcatcgtagaataatg

SEQ ID NO: 72628 - DNA, 546 bp, Arabidopsis thaliana landsberg
  unsure (1)..(546): unsure at all n locations
gatcggcacggctccggcggacgctagaacaaccactaccatcttcaccgcctcgtgcgtacaaagggaacctgtctctcattctagtctcctgcaccacaacaacaagacaaatcagaaattcagtgagaaagtgaagtaaaagagagtttttttatttgtgggttaagtgaatagatgatgaattcacctgcaaaggagcaactttccctttcttctccgaaaagtctgagtagaataccactggatttctcatccatggcggcttttgaggtctcttgtaagatcccaaatatcgaacaggaacaatcgcccggattagccacatcaacttgttgccgacgaatctccggcgacctgagagaatgaggagacaaaggaaaatgtcccgctgaggcaattgatcgatcggggagtcgccgcggtggtggtcggagacggaaccgagtcagtggctaagggtntaacgtaataggctcggcccaataaactaataacggcccattagaagactaaatctctatttagttaaataacaattaactc

SEQ ID NO: 72629 - DNA, 543 bp, Arabidopsis thaliana landsberg
gaacaattgaacccaataaatagatatctgacattttgcattattcttttgcttggaatctatggtactcttgacatggacaggcaatcactaacatttctaactttcttctcttaaggagattagacattacataagatagagaatggggataatattacttgtcttttctgagcttgaaggcaattctagtttctccaagttcaaagccaggccaatccttaagatgttcataaatgccgtatgagtacactccagaagagccacggagcattataaacctgaaagaaagagcaactagtcaatgtctttctctacttttgtttctcgccaaaggaaatatattatgtaagatagaccttttatcgatattcaagggaatgtacttgccctcaagggatggatcccatgttcttagaaatgagatctcaacctgttcttcggtctcgactatgaccctgaaagtcactccactgatgctgcatatatgatatcaaacaaaccaacgattactacacatcatataccatccaacaattagtc

SEQ ID NO: 72630 - DNA, 257 bp, Arabidopsis thaliana landsberg
ggggcccacaaaattacctgggctattaataatccaaaagtgatgattagagtctttagagatccaaggatcgatcaaatcttaattctatggagtttctaataagaaagaagatgcatgaaaccatatattgaatgctgatgttgcataatcacattatactgtctcaatctttccgtctatataacgaatctttctttcggccataaattatagaccacttaagtggcaaagaacctccaccggctacaatttat

SEQ ID NO: 72631 - DNA, 502 bp, Arabidopsis thaliana landsberg
acacatgtgaacttagcttttataaattctaattaatgttaccttacaaaaatacatggtaatgcaatcatggataacacaggaaaaagctacttattaagttagtaaagacatcatatttgttggatgacacatataaacagtcgctaagtattagctaaaattatacaattcatttatacaacaaggataatgtaatacttttatgtaaattatattataccacacatgggctaaggcaccatttgttattaccaaaggcttattaacaactagtgcaaatggtttggttgacacaaaacaccagcactacaaatcggaaagattggtcaaacattaaaaacacaactgaaaattttgttttccaagatgtagcattcaacccaattttgggaaaactttatgtgccggccaaaaggatccagaattttaggttagaaccccgaagattttccaggatccaacaccccaaaaaaggctttattgtttggttcaaggccaa

SEQ ID NO: 72632 - DNA, 540 bp, Arabidopsis thaliana landsberg
  unsure (1)..(540): unsure at all n locations
tttacatatagcctctagagtttaaaacaaataaaaattgttgtaaaaacaattcatgaatatggcatactttggttcaaatatatttgatacatgtgaagctagcataatttttactgaaattcttcctatttcgtttttttttgccacatgattatctttcagtactccaacaaatatgacaactctttttcttttcttcactaattgacatttggaacaaatacaattttgctgtacctatcacatctttagaaacataactctgaataagtcacaaacttatgaagcaaaatattttgacaaacttttttcttttttccttttctttttcctctaacctttatgcatgtcaactagcagataactttnnnnnnnnnnnnnnnnnnnnnnnnnnnnnnnnnnnnnnnnnnnnnnttcttctctatacagacatggaacanattcaatttttatgtgacttatcagcacatctttagaaacacaacagcggataagtcatgactcatgaacatcaataagtattgtgtcagattttca

SEQ ID NO: 72633 - DNA, 546 bp, Arabidopsis thaliana landsberg
cgcctctcggctcctgggctcggtggtgctcgccgtcaccggcggcgaggcgctctacgccgacatgggtcacttcggccgccgcgcgatccgcgtcgcgtggctgtgtctcgtgttccccgcgctcgtgctctgctacgcgggccagtgcgcggtgctcctcggtcacgccgacgcggactcgcagcccttcttcagcatggtgccgcggggcgcggacacgctcgccctcgtggccctcgcggccccggccaccgtcatcgcctagcaggcgctgatctcgggcgtattctcgctcacgcaccaggccgtgcggctcgggtacttcccgcgcgtgcgggtcgtccagacctcggacgaggccgaggggcagatctacgttcccgccctcaaccgactcttgatgctcggctgcctcctgctggtcctggtctttcgctcctctacgaacctcgcggccgcgttcggactcgcggtgagcggcaccatggccatcacctcggtgaccttcttcgtggaggcccgccacacctggggctggacgcg

SEQ ID NO: 72634 - DNA, 237 bp, Arabidopsis thaliana landsberg
tacacactgatcaagtaattcatattcgcccattgcttgcatgtacagcacgttcaggaagatttttagctttctctgtcatgtaaaaaccgccatgcgggccggtggctgaacgaataattttattatcctttgtgagcgactgcaatattatcgctgcaaatgatcggggggaaccaatggcttaggtaactacttatattgcaattccttgtgtttcagcccctttataaacta

SEQ ID NO: 72635 - DNA, 361 bp, Arabidopsis thaliana landsberg
attggctctcgaggtacaggttgtaaccctcgatgatctcctgctcccgttttctttatgccatcgtcccggtccgttcttcccggccccttaatgtaagctcagcttacattacggggaacgggaaagtaatagtattgcggaatattatgcgctccgtgcggtgcgctgacgggaccaagcccatcctctgtcggatgcttcgcgcgcgccggggatccggtggattgtctcatcgacgagccgatccatgaggatgtcttcggggctgcccgaccagtccttggtcttacacgcctggtactcgaacgagtgcgctgcggtgaacatgacaagcggtttgagcatggtggagcgacac

SEQ ID NO: 72636 - DNA, 234 bp, Arabidopsis thaliana landsberg
ttttatgtggggtgaaagagaggccccttgactagaactaacggaagaagagccccagacagcgggcgatgccaaggtttttgacccagagctcatacttcacgaagttggggtccgagagctggatacacgtcctgagggttttcctggagtaagagaaaatgtgctaacaggagtacctgatcggcgaccagactctggactaggagggccagctaaacacagaataaccct

SEQ ID NO: 72637 - DNA, 643 bp, Arabidopsis thaliana landsberg
ttcttctcttaaggatgttgtatatatgtcgaagccatttttttaaccgttacaggctgttaatatcttagcgtttggtaagtacgtaggttactgattactttgatgaatactatcagtcgaaatgtatttgtataattaaaaaaaaaatgtatttgtataatttcatttataataatattcaagaaaatttaggaaagttcaaaaaaatatatacgcaatatatagatgagtttcaaaaagagttacaaaaagtattacactaaaattcgtaaaatatattcatgtttagcaagtaaattgaattaataataaatagtgacatctctaatatcttcttcgtcaacaaaacaatctctttaattgaaataatttccgttttatcttttgatttggtgacagcagtttaaagacctatgctacacgttttatatttttttgcaacaatatcttacgaacgagttaaattatatgatttttttaaggtaaaagagagagcccaccaaaaaaaataaaattaaaacggtaaaatggacaaaggaactaccgggttaaaagagagataacccaacgctcggataaatccccgggattattgcaaaaaaaaaaaaaaccaggagaccagcttttgaaaaaaaaaaac

SEQ ID NO: 72638 - DNA, 570 bp, Arabidopsis thaliana landsberg
caccgtctgcaccacttcccaggtgcccttgagccccggctcgatgacgaacacgtcgccgtccttcaggtgcaccggctgctcgccctcgggggtgatgatgcagtagccgtcgaggaagtggcagtactcccacttgtcgtagttcacctcgaacttgccgggggtgcagatccaggtgcccatgatcttgctgccgtccgccgaggtgtaggcattgaggttgacggtgtgcggatcgccgccgatgcgcttgcacttggtggcatccagcacgggggtggggcaggtttcgcgcagcacggtgatgaaatcggacatgacagctccaggtcggtgggatgtggcccgccaccataggggcaacggctacgccggaattgcctggattcgacggcgatgtgcctggaagcgctgctgcggctgggcagtgcttctccactatggcacccggaagtttgctgtgccctgaattagctcacttatagtgactaaatgccttgattcataaaccagcgtgtcattgcgaaagggttattatttggctattttggtcaccttgagggagca

SEQ ID NO: 72639 - DNA, 320 bp, Arabidopsis thaliana landsberg
tgataaaatgttgaaaacctggactaatgtttgttgggctaccaaacggtggcatcgttgggagggggagattcatgaaaacagtattgtagaaatatgcgcacaataagcggagcacttccagtccgacgagatgactaggccagacccggggaccagtttacggcaagttgccctacgaagcccctatgtaacgatccgattgatgaacatgcacattgagtatagtattcgtacggtcgtgcacttgtcgacaaacataatctctttcgatagcttatgtggatattccttctgggggacgggaaaggctatgattg

SEQ ID NO: 72640 - DNA, 581 bp, Arabidopsis thaliana landsberg
ataaaacatttttcctgatataaagtttgtaacactgttttttaattgttaaaaaataattttaaaaacaatgaaacgtgatgggtggttctaataaagaaaagaaatgaatgctctctgcttcgtcagcgagctgactctctcttattatatatgtccccgcaaaaatctcatctttttccttcttccttccttcctatatgtgccaacaacaaaccaaaaccgttcctttctttttccatttttcttgttctttttgttttggttttggagttgtgtttcacctgttgttggttctttagttcgtcttctgggttaaacaaagaagatcggctctgtttttatttttattttgaaacaagaagaagaaagcaagctacgatgatgtttcttgctgacgccaatagataaagacacgacttttacaaagcttaggacctgcattctcaccgtaattagctcttcttctcaatttctccaaataaatatgcgtgtttttaatgtgtgtgttgcaggttatcataaatgtcgaatctttctgcaagaacaggacgagaccatcaacgttatgacaacaactt

SEQ ID NO: 72641 - DNA, 289 bp, Arabidopsis thaliana landsberg
tacgctaaatcgtttgtttgtggcttataattgcaactatgtgcatttagagtaccaattactaatgtcaatgacggtgcatgtaaaccataactacgagcctgatggccaaaacaatatgcacgaactattgtgaagaatcacgatgcactgttctcatgaatgtgtgttagccaggcgcgctatcatatgctgaaagccgcatcacctgcggcgcgacctggcgaatatataccaacatcatatccacgtggagatggccaatgcgccgaatgcatccattgggcgg

SEQ ID NO: 72642 - DNA, 545 bp, Arabidopsis thaliana landsberg
tacctcttcgcttgctcttttatttttacccttggatactctcaaactcttctcacattcacattcacattcctcctctctctcatttcatttcatcttcaccaaactctcatggacttcgattccgcagtgagtttttatttctctcctaatctaatctttctttacttcttaattttgacacaaaccctgtgatttcattcattttatgaaattggacatgttattcttgaaatattgcaaacaaaccctttttttcttgttttctttaggacaaaccagagagtgtggaggagacagtgatgatggaatacgacgaagaaaccaatcaattcgacgtggaattttgtccggttgagcatcctattgaaccggaggaagaagatccgcccggtttaatgtcccgtacccatattatcttcttctcatccaccgtaggtgaaataattaccccaaatcaataagtttctcatattgacccatttaatcacagctttttaaattggggaagaaacccaagggagaaaatccaaaacccggggtgg

SEQ ID NO: 72643 - DNA, 530 bp, Arabidopsis thaliana landsberg
ccgccttacccgtggaatatacgatcaacccagaagccgttaggtatgcaacgagcttggtaaatgagaacatccagagcgacttgaccaactctgatcgctcgaccgacacaccgatgtaaaccgcggccagcactactccccagatcttaattgcgacttggttctcctgcacccattcgaagtcagaattctcctgcccgccaagctgaatcaaagcaaaggcgacgatggccaggatacccaacgcccacgtagtggtttctatcctgctatcacgatcatccctccgttctcgcgaccatttcctaagatcagcagcaatgttggacaaatgataatttatcgacttcctaccgtttgacgaaagatccgattcagtaccacttagctggcggtgaatcttatccagcaattccttgttctgctcagacatcccttgcataccctctccagtttatttaacccagccgagcaagtttacccagttgcatttcaaaagcagaagaagaagcagatctattttcata

SEQ ID NO: 72644 - DNA, 359 bp, Arabidopsis thaliana landsberg
aagcagaggaagtggcgacccggattctactttaagctgatatgaatatggccagtgaattatgaccgcagcaacattacaaagctgctaaacagaaacctgtcaatgacaaactggagaagacaaaaacatctgtggtatcaaagaaagggcttatgcctaatataagtgcaatctccaacagaaagaacaaacaagtggaatgggggtctccttcatatctgcctggagagaaaccctttagaagattacttctctatggaaaatagaactattcgattgaggtgaacaatccagaaagcagcgtgctatctgttggaaaagaagggctgtggggagagatcagaagcagttgcagc

SEQ ID NO: 72645 - DNA, 316 bp, Arabidopsis thaliana landsberg
caacagatgatacctaaactggggagggggagttgaaaaatcgtgagatagacacacataagcaggttaagaggacatgagacgaactaccaaggaagtaataactcctaaagaggctaaagcaaggcctcattgagaatcagtcgagttatcgattgtgacataaatacccttatgcctacgcccctaccgtgctaccagaggaacatgtgcttctcaaagatcttttacactctgaccaaagcccaagctcattcgatacataagacctgcactgacgaaaagaaggggactagctcatggatgaggggccata

SEQ ID NO: 72646 - DNA, 351 bp, Arabidopsis thaliana landsberg
gaacaccctctagactcgccctcgtgtgatcttcgatatcttttgccagtttcattgagagcatatcaaatgagggtgacggcgattacctttctcaattgtttactccctatgaccttgtgtcattcctctattgctactccacatcttgtggactatgatggcggtctgctttcgatactgactgtggaatgtaaatgcatcctcagttttattattcgctcacacacttaatatgtgcacacaaccgctgtgcgtttatgtgaggaaactgaccatttgtggcattattcctccaggattactacacacaagctgcacgaaaatctgaatgcgcgattgaaactctct

SEQ ID NO: 72647 - DNA, 554 bp, Arabidopsis thaliana landsberg
  unsure (1)..(554): unsure at all n locations
ctttactttttttgttttattcttcttttttcctaagcatcaatagagttatagggatgcctcaattttttttattttaaagtataaattgttgttaaaaacaaggaaatagaataaagtataaagtatatatttattaataactccaagaaattaaactgtttcctttatatttatatagatgtaattaatttgtggtaaaacaattttaccgtcgagtgtctgtgactccgtcttcttcttcttcttctccctctcacatcgtcgtcactttctttttggctattcttctctctgtcatcgctgtctctgacttcattgtcttcctccttcttcctttttgcttttccgtcgtttttctccgccggatttttctctctccaccaccactacctacctnctcctttgtctcgctggaaattgtttccgagctcaaaattaagttcctgaagatcgggttctagtccttttccatctcggagaagcgtctttagatctgggcaagcactgccatcttcaaattttttaccttttttctccttctctatctctct

SEQ ID NO: 72648 - DNA, 547 bp, Arabidopsis thaliana landsberg
gggcagatgcccagccgctcccctaccgcggccagcacctccacgtctttgatttcgacgccttcgccgaaggccctggcgaacacgcgctgcgcaaacgcgcgcgccttggcatcgccatacgcgccctgcacccagaggaaggcgcgcggcggattgagccacagcttgggaaagtccggcgggatggcgaacggcacgccgcgcagccgcgcgccgcgcgccaggtccttcagcgcatatgcgaacttgatcggcacgaagggcgtgagcttgacacccgtcgcctcggtgagcccggccagcagcacgggatgccagcgcaccgtgcggccgtggcgggcggccaggtcctcgatctgggtggcggccaggtacgaatagggcgaggtgaaatcgaagtagaagtcgatggcgcggtccatggcggtcctcacaggcagaaatcgtcgtttgtgtcgggcaggcgccgcaggatctcggcggtctcgggcgcaaacaggtacagcacggccagcgccacggccagacagtcagttcatgaacg

SEQ ID NO: 72649 - DNA, 377 bp, Arabidopsis thaliana landsberg
tcgcgcgcacgcatgcctgtggcatgccaaccgacgatgcgtgcgccacccgcgggaatatcgcctctctagccggatcttagtatcgacggggttgaccgacactgctttgacttcgaccagcaggtcgtggtcgcgaagttccggcgtcggcatatcgatgtcttgcagggcttgcgggttgttgatggggtggttctgatagaaaccaatggccctcatggaaagactccttcggagactgggcgatgaggaaaatctagaggattactgactttctagaactcgagggcttcatgctatccatgtttgaattgcagatataattggtgaaaacagaaacactttccttgatttgcaaaaaatgattctgcttc

SEQ ID NO: 72650 - DNA, 538 bp, Arabidopsis thaliana landsberg
tgccatgcagcctgcaattcctccagggtctgcctgttcttttcgtctgtggccatttccagcatcaggctgatgttgcggttcagctcatctttgaagatcacggcatttttcaggctcatgtccagcagcgcttttttatcgcccagcttggggatggtcagcgccatcgtttccaccggcaattctatggtgaagggggcgatcagctccgttgccacgctgttgaatttttcacgcaggtgcgcataggccagcgcgaggatatcctcgtccgtctcgtcttctatctttttttcgatctgtgtggtgttggcgtagatgatggtgccgttctgcagcatcataaagttcacaaaggcattcttttcatcgctgaggatcgagaccacatctatattgttcaggcgcgggtttaccaccgtcgatttttgctggtagcgctgcagcgctaccatcttgtgcttgacgatctcggctctttcaaattccatgttcgccgccagcgtgcccatctccgctttcagccctttgagca

SEQ ID NO: 72651 - DNA, 417 bp, Arabidopsis thaliana landsberg
cctatcacgtaaagttaaaaagtaactttttcttcttttcactttcccatgaagttacttgttcggagtactatttatcatcatttttgatataatgacgagataatcattacacctagaagaagtgtcaatgagctggagttatataatttcgcattattcgacctaaaattaggcctcgatattgtaaatattatggcggtgttgagcaatgagtgcttaataatttgcacacaaaaatgccatgattagttattacaatttctcctttttttcttaataaaataatgtaatttaaggttttgggaattgatgggaccgaggactgacatggaaacgttcacaggtatgagaatgtgtacatactaaattggtcttaaactgggaataggggtgctgtgcacgatggtccatgcg

SEQ ID NO: 72652 - DNA, 373 bp, Arabidopsis thaliana landsberg
tcgggggatctgaccaactgttacaaagattcactcattttattttgatcacaaaacggcttcctagatgggtcggggtgttttaaagacacaatcgtagatccaaatgcttgtgaggatgagataacttccacctctacgggattgcatggccacattatgagatcagtttgctggagtgcttcctacttatctttgctacaaccattggctcgagcttcataaggatcgacgactggaacattactggagagtacaggacgccttacatcacctcatttcacattttgattagctgttggagcagttgaacgtcacaaactatgagtggcctgtctttcagaaccacttggggcggactgtccttggggtt

SEQ ID NO: 72653 - DNA, 489 bp, Arabidopsis thaliana landsberg
ggaagttcacagcaaaaacctgtataatgaattacattacaaatgtcacaaccctaattttttttaatatttaattgaaatggtgagagccttaattatataagtttgataggttcatgactcccacttcaatcaatagtaacataacgtaatttatattgattattatatacaaatcatagtgatatttcagctaacttgtttaatttcatgaaactgtacgtatccttctcctaaattaattagttattttaattcaaacagaaattaagggtgataaacatttctattttttttgtagttctagaatgtaagaaaaagagaagattaggtattttacctggtaattttcattggggagcaagattctatgaacatgataaggattatcgtcaagaatattaatggaggcatggtgaagcgaaatagatggagaaataatggttgatatccgatgtgtaggctggcttatgttgaatgcctgatgcc

SEQ ID NO: 72654 - DNA, 2106 bp, Arabidopsis thaliana landsberg
cttttgccaatataaaccaaacgcaaactgattttagcgttttgtcctcaactgttatatctcgagagattagataggtttcataatgtaggcccaataagaccttattaattttaaattcaaaattttaaaatatttttttctctttcgtttactcagccactgtgaccgttgtttgcttagcccataaatcgatttttgtgtttattgggcctacagattttctttctttagactgtgttgtataacaaaatgaagaagactcagaaactcgaaagcaagcttcggtttggctgaagtggaaggaggaattaagaagatatggaggaagaaagacaaacatatcaaattatactctacgactttaaagatcaacaatccatgtcattgtgtccaatctacagaagatactagaaattagaaaagaattacaacagctttgaccaagtgacttgttaccattcaccagccaattactctcaagccagaattttatttaaccaaaaaatatttcggatgtaaattcagaaaaccggaaacttaacaacgatgacctaaagccaaatttcttaggaacttgaaaaactaaaaaaaattaggtaattactaacttcactaaaataaaatatataaaaatgtttttttgtgggtgagagagaaaaggagagaactaaatacaggcgtccttcaaaatacaaccctccctgtgcttttgcatcctcgcaaaaacaaacaattaaatctctattgaggataatcataacaacaaacagctcctaaaagaaatcaaaccggaaatctttacccagatgaaccgaacctggccggattaaccagaacctaaccatgcagctcaagagtttgtgagcctccttttcccttttcttcactgtacattttctggtttctcagagccagtcaccattgccggaccagagatgtctagacgacgacggtccaccgtgttcgctcatgcttcctctcagtctaaagaaatttcttctactacgcatgggtcttaacggacctgatctgtttggtagaataagacctcctactcttggaatgctagaggcagagtgaggccggttctccatgtcctctagtggtcctgagctataatccattgttatgaacgacgaagcttgaccataccttaaccgaggtgtcaaattccaccaactgctatccgaaggagccagatcgcctttgaagtcagcagagtctggtactgatgagtccttttggctgcaataatcaccacaggtctcatctgcatcgttgtatataagttttagtgcctgcacaacttcacccatgaatggtctgtgtgagacctcttggtggacgcacatggaggcaatcgcagccactttcgccatgtcatcaaagttgtaggttccagccaatgcagggtccaccagttgctccaggccctctctgttggctagtaagggtctcgcccatgtcacaaggttttcctctcccgaaggttgagacatgtctactggtcttctaccggttagaagctctagtagaactacaccataactatagacatcgcttttaacaaggagatgccccgtcattgcatactcaggagccacgtacctgaaattatttccagggtagtcactgtaagtccagagtgtctgtattcatcatatttgagttggaaagaaattttacccaaaggtccccatgactcgagttgaaatatgttgacttccttcggttgcttctcttgccagtccaaagtctgagacttttggggtaaagtcatcttctaggagaacattgctagccttgaaatcacggtggattactcggggatttgaatcttcatggagataagccagtcctctcgctgctccaagtgcaatcttcaaccgcgcatcccaatcaagcgttccttctgttttgtcaacaaccggaaagccaggttttaggtggtgatgcaacgagaagtgatggatataattgggatatattgttattaaaagtgcagagaaaagaatatgtcaccgtgtaagtgggactcgacactcccattgtggacgagctcataaatcaagcaacgtgtacgaccttcaatgcatattccaa

SEQ ID NO: 72655 - DNA, 1646 bp, Arabidopsis thaliana landsberg
gatctgctgacattctcttggccaattttatcctctacagttggcattatacttttaaacccaagagaggaggatggagtatgcatactattagaaacattctattttttcgaaacttttcactgctatgaatattcgacatgtgtagaaagaatctatagatgacttatcagcttgctttatcatttgcagctcggttatttccgatgagtttgccatttacccgatcaaaggcgcatcaaatgcatttctttcatccttatcttaatccatcagttgctcctacaccttcaccaggtcagtaagggaatcctatttgtcacctaaacatagtgtcattatgtttctgtctaggagtattcattgttcattgtctttccctttttagctttttcccccaacccaagtcgcattccaccactaaggcacaagggtcatcaccgtcatcgtcgctggcatttaagacgcaatgccactgcagtgtcaccttcgtcacatggtagttcttttgcttcttgttggttatcctgcgtcctattatagtggcaacgataatgttttatatgaatactttttcttcagacttcagttgataaatcaagcgtagtaactactttttcctgtgtatttccggctttccttttgatagactgtcagcagacatgtgtggagcctctcacttcaactccctttggttcaccttgtggttgtgtcttccccatgaaagttcagcttctactaagtgtcgcacctttttctattttccccgtgaccaacgagttagaaattgaggttgctgctggaacatacttggaacaaagccaagtgaaaataatgggtgccagtgccgacagtgaaaatcaagggaaaacagtggtggatattaaccttgttccacttggggaaaagttcgacaacactacagcaacacttatttatcagagattccggcacaagaaagtacctctaaatgagactgtttttggtgattatgaggttacgcacataagttatccaggtaaactgatttcattcagatgcaagtttctactttttttttgttttatttcaaagtttgaacttcttaaccttgcttcaggaattccttcttcttcgccaaatggagatgttactggagatgctccaggaggccttccaattccgatcaatgcaacaacttttgccaacaaaagccagggaataggttttagaacgattgcaattattgcgttgtcaggttttgtcctcattctggttttggttggagctatatctataatcgtgaaatggaagaaaattgggaagtcatctaatgctgttggtccggctttggctccatcgattaacaaaaggcctggtaattttcaccctctgacttcttaacgcttctatagctttaaaagaacctgtttctgaaaaatttattcgccttgcaggtgctggatctatgttttccagtagcgccagaagctcaggctcagattctttgatgtcttccatggctacatgtgctttatcagttaagaccttcacactctccgagcttgagaaggctactgatagattcagtgccaagagggttttgggcgagggcggatttggtcgtgtttatcaggggagtatggaagatggaactgaggttgcag

SEQ ID NO: 72656 - DNA, 367 bp, Arabidopsis thaliana landsberg
accaaataattacgatcctacaggaggggagcttgccttggtgacagcacctagcagcgatatctctgcatccactgagagaaaactggtaagcattattctctttgttatacataatgctatatgcttaaaaacagtagatcacagaaatcaacgccagttagtagttgccggctaataatttggctggaaatggaaactttcctgttcaatctttaaatctttgagactaggaaccttgttaatagaaaattggtgagttcataatgaaagagtcatcacaagcattgttttaccgaaattgttacattaagactaggaacctcgctattaatctagttatggaagttggaagtgtaacccggag

SEQ ID NO: 72657 - DNA, 469 bp, Arabidopsis thaliana landsberg
ttggcaaccagtatcccacaccgaacgaccttaatttgagcacgagtatcccgacgggcaaaggttggaggaaaatctcatgggcgccgaattagccgacctgctcggataggaaattgaaaaactcccgcccctgtacaagctgctgatcaccctttaccatcatcaggagctgagctattcggagattgcgcagatcgtggcattgcctgagggtactgttaaaagttacctgttcagggctcggaaaatgttgagagagcgaatacaaatgatttacaacaagggcttatgaaaacagcagatcatttaacagacattgaaattcaggaatatgcgctagatgcaagaagctccggcactgccgctgcaacacacatcgcccaatgcccgtattgctcggagcgggtcgcattctatcaaaaaatggtcggcggcatgtcggcaaagcctgcagaagcatttgatt

SEQ ID NO: 72658 - DNA, 208 bp, Arabidopsis thaliana landsberg
gctggactatcttctggaagactccagatgtgccggcagccttttgagtcaatctccacaaaaacacagataagaagtttatcagaagaaagactctgtccaatagttgagcaagtcaaaagcttcaaactgttctactggaaggaactagaaggaaccacaaaacaagggaggtaatggatgcttaacgtgtgaagataattggagt

SEQ ID NO: 72659 - DNA, 815 bp, Arabidopsis thaliana landsberg
ggcatcgaatctcgattcgcttcagaaacttctcctcaagaaagcagtcttcgttgaatatagacactttctctagagcttctctcgtctccgagcaagcccgaacaatcaaggttaatcctttttcctgtgataaaatttgaaattatagagcttaattgtctgaattttgagcttcttttctttgactttgatgattgcttctgtgatttgtggattcgatctagttgatcacgatcgcactttttagtttgctttagtactactatagctcagtgtaatagtgtgattctggaattgcatttgacggtgaatttgggaacttgtagttgatcataaattttgaatcttcgattttgtgatctgttaatggtacaaatgatcaccaaatccttgaagactggacttgaggtttcactatgaaaactcccaagtgcaattatgtgtattaagtagaaattcttcatgttgtaagtaaaaaaggactgtgttacatgtttgagataagggatagtttcagattgtctcttaactctgttcaatggtttgttttaggttcttgagcaaagagtacaaacactagaaagagaactagatgctgccattacagctgctgctcatgctcggtctgagaaacgccaagctgagtcctctcaaaaggctgctgaatcacgtgcccaagaggtcacaaaagagcttgaaaacaccacaagtatgcacttgataatcacttcttgagttgatgcctggtggaaccattctctcccgcacgtttatatgcgttccagtttcatattcactctcactcactgact

SEQ ID NO: 72660 - DNA, 541 bp, Arabidopsis thaliana landsberg
gctcgcgcgcgcccgcggatcgccgaacagctgctcgtgccgcgcgttcgcctgggcctggttgtcgacccgcaccgggggtcgcgtcgcctccgccagcagccggcggacgggcacgtcccgccagccgagccgcgcgtgctcgacgacgataccgtcgtcccggtccacccagccgccgacggacacccccaggcccgcagccgaacgcccctcagcgtgctgagcgaggaagccgggaaaacgctccgccgcgcgcgcgatcacgtcccgcgggccgctgccgcgatgcggcagccgctccagcgcgatgacacggccgcgcaggtccaggagcgcaagcgcggagtacttgatggtgatgtgcagcccgcaggccacgacgctggccgtgtcgatctccagcgggacgtgggggcgccccgcggccctgggcgccgggccggccgattgcgcggactcgcggagcagtcccgcggtgatcagctccgcggacagccgggtcacgggcgccgggctgagccccacgtgccgggcgatc

SEQ ID NO: 72661 - DNA, 356 bp, Arabidopsis thaliana landsberg
  unsure (1)..(356): unsure at all n locations
gaaccaaaaccncnccccctgttagaagaaccaaaaccaaaaatcaaacagacataggcttcaccancaaagccccgaagagcaagagggaccgggggcagcatancggagcgaaaaacgagcagacggcacgagaaagacggaacacaaaaccagaaccccaacgagagcccgcagagaaaaggagcaccaccccggaaaaagaagcaaaaccaaaaacggacaagaaccccggggacaccatcaaagctacgagaaacaagaagaagcgcggccagaggcagaggaggccaaaacgacgagaaggcacgggcacgatccagcaagaaaaccagcaacgcacgaagaacccggaa

SEQ ID NO: 72662 - DNA, 559 bp, Arabidopsis thaliana landsberg
ctaaactatatgcatgattacttaactagcaaggattagctaaagtacgcatcttatactatagaaaatattaatacataccttttatgaagtactagaatcgatgataaagagttcattcttgatgtcatagtagaataatgtccttatctactaaacaattgaaagtaaacaattaaggaaaataattaattggttcaggatttgcaaatcaaatcttattgagaatcctataatatacattggttttatcttccatttagaaattatatagattactaggtttgatctatattttgttaacaagtctcaacacaacatcatcatcgatgctactttgattttcaatcataaaaaaaatctgcaaatcttcttttagattctaattctggcccaaaaccaccaaagaggtcgcgtgttactgaaacactaacccctcaaagtcaaattattcgatctaccgtaactaataacaatggttatgttcctcttaactctgtttttgatagattgtttaaagatataagtaatatcctttcaaggagatatgaaaagagag

SEQ ID NO: 72663 - DNA, 575 bp, Arabidopsis thaliana landsberg
agattcgtagtggggttagtccggataataaagcatgtgcagcacttgttgttgggttatgttatgcatctgaaagttgatttggcttatgagatggtggcggaggagatcaaaagtgcacgagttaagcttagtacagtggtgtataatgcgttgattagtgggttttgtaaagcgggtagaatagaaaaggcagaagctttaaaatcatatatgagtaagattgggtgtgagccggatcttgttacgtacaatgtgttgttgaattattattatgataacaatatgttgaagagagcggaaggggtgatggctgagatggtaagaagcgggatacagcttgatgcttatagttataaccagttgcttaagcggcattgcagggttagtcatcctgataagtgctataacttcatggtaaaggagatggagcctacaggtttttgtgatgtcgtttcgtacagtactctgatcgaaacattctgtagggcgtcaaacacgaggaaggcttacaggctctttgaggagatgagacagacagggatggtcatgaatgtggtcacatacacgagtct

SEQ ID NO: 72664 - DNA, 263 bp, Arabidopsis thaliana landsberg
cgcggtcagcagcacccgcttgccgccgaaccgctcgaccagccaggcggaggcggggatggccatggccaggcagaccggatagatgaccacgacgccgtccagcgcggccgtcgtcagatggaactgacgggcgatcgagggcagcgccacggtcgtgatggcgccgtccacgatcgcgatgaacgtgaccctgacgcacatggcggggacgacgaagcgttggctcaggacggcgcgcatacgggtgcgcggggtctcgc

SEQ ID NO: 72665 - DNA, 605 bp, Arabidopsis thaliana landsberg
  unsure (1)..(605): unsure at all n locations
gctctttcatgattatacagtgtaggtttcaacattaactaacctttattggttatggtttgtaagttgacgggaggctgtcccaagcttttaacagaaaacatgtagtcaacaaatagtgaatagacattgagtcacgccatgcttgttagagtatgtcaatcccttgaaatagtcgagcacttttgaacaaaatcgaccattgatcagaatatacctatcacttttgcattttgtcgaagacttttaagcttttgttttgatatttaatactttgtgaagtgaaaaaaggattaataatactaaatttttattatggggccggaagaagcattccattgggcttcacaaaattttaattcaatcatattagagacttataaatgggctttatggggttattatttgggctttatggggttattatttgggctttcttcagaaacgtggcccacttgtgatgatacttttggataaaaacttaaaaatatcatattttaaattgttgaccatgaatatttacgttatttttgagtttcacaaaataattccaatttgatgaaatatgttacttactatttctctccactgattattntatataa

SEQ ID NO: 72666 - DNA, 403 bp, Arabidopsis thaliana landsberg
  unsure (1)..(403): unsure at all n locations
tcctccgcctcctcatcatagtctatctgggaggtctttcattattccttgagaagacacccggatgaggctacgtattacagctgaatgtccaggaataactagatagtgacaatagaaaactcaaccctgccaacaccagatctttcaatccaaatggggatcctaagattcttgcttatttcatcgctggacaatggataaaacccatatattttggatgagcactgaacaaagccataggattaactgaacaccctattccaggaggaatttaactacacattgcaggacgtttctnnnnnnnnnnnnnnnnnnnnnnngaatggatctgacaacgttgagtttcttggcaatcatttgaagcttggagtgtttatcgatgctatacagaacaaactta

SEQ ID NO: 72667 - DNA, 563 bp, Arabidopsis thaliana landsberg
  unsure (1)..(563): unsure at all n locations
cggagacggacctgcgcaaggcgcggatcgaaaccggcgcggatagcgtgatggcttctagacgcagcggccttctaaactccgggtttgggcctatattcattgatatggcgacccgtcgagagagtcgcccgaggagacaaccatgaccgaagcctacatctacgaccatgtccgcacccccaggggacgcggcaagaaggatggttcgctccacgaagtgccgccggtgcggcttgccgcgcatacgctggaatggctgcgcgacaggaacggcatcnnnnnnnnnnnnnnnnnnnnnnnnnnnnnnnnnnnnntcgatccggtgatggaagcgggttcggtgattccgcgcgccgccgcattcgaggccggttactccaaccgcgcgccgggcatgcagatatcgcgtttctgcgcctcggggctcgatgccgtcaacctcgctgccgccaaggtggcacagggggccgacgnnnnnnnnnnnnnnnnnngcgtcgagagcatgagccgggtcggcatgggcatgtcaggcggcgcctggccggtcgatccttacgtcg

SEQ ID NO: 72668 - DNA, 547 bp, Arabidopsis thaliana landsberg
  unsure (1)..(547): unsure at all n locations
aagagccgaacactagaacnnnnnnnnnnnnnnnnnnnnnnnnnnngtggtagtgttttgactgcaccatagaaagagtctcaaacactcgaaaatctctctttcttattcatacacagttgtatttgtgaaaatgagaatgagagattagggcttttgaatctttcctaatcttctcaatggttctctgtttactacccaacaaatacgaaagattatgaacacttttttttctcccattttatcaataaaagtttttttttttttttgctttgaacttgcacaaacgcctagattgtataacgtttgataatacataatgggtcgtttaaaattataaataggcctattatgggcttagaagtagatttagtaaacaaccgacaaaacagaagttataggtttaaatttaagacattaaattaaattagaagattgttataggtttgcggaaaacaagatcagatgggactgaccataggaacgttgngccgtatacgaactcttcttctgagcccataatgggcctttctcagacattaattta

SEQ ID NO: 72669 - DNA, 565 bp, Arabidopsis thaliana landsberg
  unsure (1)..(565): unsure at all n locations
gtgttacaatcctgttacagaaaaaatattgtattgatacaatgccagctctttttataattatacgtaacaatatagtttctgcaagctctttttgcgtgcgcaatgccgcgggtaatcggctcatgatctcatcaaatgtagccatgatctcttcacccggtggcagcagttgccagatatctttccatgcagttacgggtatccatgttatcaggcgttgcctgcgggcagaagccattccagaaaaacgcaccagttgcagcgcctgctgtggcgatgatgacagtaactgcaggaataatacctgcggtcttgtattttccatcatctccctcccccaccatggcaggtagccgtgactgatgatatgcatcagcaggtcatatacagatctttctgtttccgcatctgcgatctctgccttcgcaacaggtttgatctgtatagcgggatccggcgttgccctttcnnnnnnnnnnnnnnnnnnnnnnnnnnnnnnngagctgatgatgccctgcctgaattcgaacgtatgccctcatgcaaggtcgctaaccatgat

SEQ ID NO: 72670 - DNA, 533 bp, Arabidopsis thaliana landsberg
  unsure (1)..(533): unsure at all n locations
taagtcatacggcatactatcagtgttgcttcattcgtattatgatacagagtacctgtttaccgggcaggagcatgtgtttaatcctccacctaaagtaaaatcgggcgtggtgcgcatccgcaggaatagcaggacaaccctggaatgcgatgaatcattgtataaggacattatcaaaacgggctttaaccagcgccgtaaaacgctcaggaacagtttacgcaaatttaatttgcccgacgaccttctgaaccagaccgaatttgctaaattgcgccccgaagaactgaatgttcaggactttataaatttaaccctctgggtacaacaacacaaataatccaatgtagccaataccaacagcaatgtcagaacaactcacaaaaagcctgaaggccgatgttaaaacatacctcgccgggggagaaactgacaagcttaaattgctgttgaacgatctttatgcagaggatatagccgatctnttttacagccttaccactgaagaaatgcaggaggtaatggacctg

SEQ ID NO: 72671 - DNA, 462 bp, Arabidopsis thaliana landsberg
  unsure (1)..(462): unsure at all n locations
cacctctgtctgtgtgaccgtttgggtctctctctcactcactcattttttgcattatggactcgccactgacacatcggcgaacattgcaacagactgcgttaaaaaagcaaggcgctgttgtaactaagatgtcccactttttcttcgatcaaattcaaaggcaaactgcttcttctggggttgcgggtcctcttactctatttgtgcctgaacccacttctaccgcttctttctctggcttctctcctgactcttctaatagctcttctttttccnnnnnnnnnnnnnnnnnnnnnnnnnaggacatgacttatccactctaatgtagcaagatggtgtgctcagccataatccgacgtttatctgtcacatagtatatgctgagacgggaaaccgcttcaactgggcacattggccagaacgtgaactactatcacagctctataaagacctgttggc

SEQ ID NO: 72672 - DNA, 217 bp, Arabidopsis thaliana landsberg
aaaatgcaactcactggatacaacgcatgcttatccttaaaattaacaggatgcctttccctgtcttcacgtctctgctcagcctcgtaacacctaaaaagaagaatgacattttagattcagaggaacttaatcagtaacaaggacacatagcccatccaataaatgtatctctcgggatttctacatcatcttatgtgcaatacaacaaagaagg

SEQ ID NO: 72673 - DNA, 199 bp, Arabidopsis thaliana landsberg
agtacagaaaaacaacgtaaaaatctttatgagatatacaatgtatacataaaaaaatctatgctacgtataaatatacacactaaatatcttcattaaatgatatattacataaaatataatatttgtgatatataattgaatatataataatataatacaatctataatatacttaaaatatatagaatagttaata

SEQ ID NO: 72674 - DNA, 115 bp, Arabidopsis thaliana landsberg
atggaaatcatcgcctgcatcaaacaaaaacatagaggcctctgaagacatcaccaaattacacagttcctaccttgttatagatataaaatttctaggtcatcgattacaatga

SEQ ID NO: 72675 - DNA, 437 bp, Arabidopsis thaliana landsberg
gagaggcactcttgtacaacaagagaccgcattttttttttgaagccgacaaaacaggtaggctcggggccatatacactaccgctttttcaagggctcagcattataacatgccatgatcctatgcaatgttacaccaaccatgtgcaagtttataaacactggtcccataacatgaatgattcaaaccaatcacgacgcagattcttaatcacaccgacatgataccacggaacaaaaagataacttaatcactagcgtaactggacttcgaaaactccactgggaacagaagcgacacacgtatggaaccatcaaatgaaactgagaccatgcagccgaaagcgaatgacaataagcactacttaggctcttgcatgagccatgcgtgaaccaactaaaatgattagctgacccaatacacataaacctttgac

SEQ ID NO: 72676 - DNA, 550 bp, Arabidopsis thaliana landsberg
  unsure (1)..(550): unsure at all n locations
ctaagagagatgagagatttcacgaaatatatcgacccagattaatcatatggagaagtttgtatgagcttgtgaatactaccgacgcattacctgatcataaatcataataacacaacggactaatacaacgagaatatataaggtcacaaacatataaaggtcattattaaaactaattgggagaactgtctctacaaatatatgaccaaataaccctaacatggactatataatacagaccacctagagaaatactccggacacggaaccggcaaattgcgacagctgcggggccctgaccggcgcagactttgaatggaggatcactccgagagcctgggagacaagccttatgacgaataggctggcgatacaaaccttacgaccgaacctgaggggaanggaagaagggatgacagaggggtggggtcggtaaatgacgtacgtagctttgacttgaacagatcgagtgcgtgacaaagatggctgacgctaatggagaagataccgttgaaggaagtaagggagcggtgcatggtgactcttt

SEQ ID NO: 72677 - DNA, 533 bp, Arabidopsis thaliana landsberg
ttgctcgtctcctgccgcttgccggcgagtgcgggcccgatgcgcgcccatttgcgacacagaagccgacgcgaaacgccggacgcgctgtccaaggctggcgcatatacccgacgaccagccgcaagcgctcgcccaggtgctgaacgcatttttcgccgagccctaacgatcttgggcatcggtttgtcacgtctacccgttctcaacgcgtctgtcgccgtgagttgcatagggtggcgcccctgcaatcgaattattggggtgtgtcgatgtttcggcgatggcggcacacgaggcttgacgcaccaatgacaatgggccagcgctcaattcgggaagcgctcaatgtgcgtctcgcccttgcggccgtagtaggcgacatgtcgaccggcgatccacaccgtgtagctcgcacagcctgctgcctgcgagagatgcttgaattcgggatacaatcaccttgccctgctgagcacccagaatggccgaacggactgccgcactgtcaaagacttctgcattgccgtggt

SEQ ID NO: 72678 - DNA, 740 bp, Arabidopsis thaliana landsberg
agcacgcgccgccgccctgcgcgatgctgatggtgaccggcgggctcagattgtcattcacaatttgtaagggcaccgcgcatccctgccgcgctgtggccggaaccaggaagttgaattgatcgaccccaacaaggcctggcgctcgtccaacccaaaaagaagatccttcattacctccggcggcgaaatcaaacagcggggacgagccgccagacgatgtcgcgagcggactggtgggcgtaaacgccccgtccggcggcgcattataaacgaaaccgtttccagttccatagattgagataaaactaccgggtgcggcgctgttggcgggtgaattggcagatacgctgccatcggcggcaacgttgagtaccgctccccgcccgcagccggtggagtcccgtgtcaagatgccgggggcctccgccgtccccaatggatagggggcgctctgcccggccgcggtggttactacaaccccggcggcgttgctcgccccaggagtagcatcggtcccggaaggaacctggaaattaatctggttgggggagacaaaaaggagaggggccgcgacgccattcacgctgacggacgttccgagaagctgccgcggaagtaccggcgccgccgagagcgtacccgtcgccaggttcacgccgaaaatggaagcgagagagccgtccgctagcgcgggccctccccccgtttgtggggcgggattcctggatagatccgcg

SEQ ID NO: 72679 - DNA, 521 bp, Arabidopsis thaliana landsberg
catgcataatatatatagagtgatcaaattaatcatagaccactttgaatcgacttgtgtattgttagagattttgtgacgtgtttgtagaccggttaagtcgggttcgtagaccgataatttttagagaagcgcaggccctgttaaactaataccaatttctatgaaatatctgtggtgcaaccgccaaataaaataaaaatgatacgattcattacctaaatgaatccaacccaaccccttttctgaaactattggctatgtatggaccgaatcaagcggcactacatttttaatatatcaaaaaccaaatcgctggtttggtccggctatacattttaacattccctgagtaatcagagtttgtactgattagcttggatggggacagtcgcagtgtaccgtgtacgagagacgtaggtgaccagaatttgttcaggttctgccgcatttcaggaataaccctaattctcttttgtactaaatcacatatagagcttattattatcccattcttggat

SEQ ID NO: 72680 - DNA, 644 bp, Arabidopsis thaliana landsberg
gtcagttgatagtactctcttattgttgttattacagcaagaaactctctcttttgcttcatttactttatctgttcccggtaatcccagcctcagctctgtttccttgaggttaacaaactcatccatttcttcaagaattgcaggagaagataaaaagaaaagcttttggttattatccttgaaagagaggagagatatagagaagctgctgatgatgaagatgagaggcttcgaggaagctgagtgttttatacaagttaaaggagaataaagatagatactggtagagagagaagaaactgttttctgaattaaggacaaaggaaaaaaagctaagcttgtcggtagcagtaacagcaactttgaggcaaaagtgtgtcccatcttcttggggacatttgtggggacactttctttttctcccatctgtccaaacccaaaaacaaaatattttcatctttctttcttgtgatagacggtccagatcaaatcttcgaatcccccaccacatgtggtatgccatatgggcatatcacctctctctatctcccattaataacttatcacaaccaaggaaatttcggatccgtaagctcataatctttttttaaccagaacaacaaccgaatacatattttact

SEQ ID NO: 72681 - DNA, 504 bp, Arabidopsis thaliana landsberg
gagagatcggtggtcgaagaaacttgaccatttcggtttatgccttagagacatatataatgtgggccaagtgatattttggaacaactcctgcattccccactagatgatccactgcccaaattagaaacataaacataattagaaaaattaaaatcaccaacactattttagtgtactcatattatcctccataatatttgaattgtcctacctaattatgttgcgattgatttagacaccaatttctatgtgtgagtgtacaaatgaaaaaaaaaaaaaatacctactttagcctaggtcatagttggaactgcaaaaaagcacaaaaaaaatacattatttgataaattgtcatgcaaacaaaccacatatagaacgtactttagtaattatacttattgacttacatcgcccaaaaagaaaaaccgcggcccgtgataaacgcttgaagccttggagtttgtaaacattggctactaagggcatgactttatgggagcc

SEQ ID NO: 72682 - DNA, 653 bp, Arabidopsis thaliana landsberg
  unsure (1)..(653): unsure at all n locations
tattttgattggtaatattgaggtccaaatagctataaaatacaaaatagtttatgaaatataacttttttattattttatctaatttcctattaaagataggattttttttgtatggcaccgggtcttgccgatgagtgagccgggcctgaatttgattagatataaaattaatgtgtttgataccaatcttgtagtcttgatttggatatttttagttcgacataaaccaataacaaaatttgtttatgtgatgcaatctaatgaaatttagatgaattcatttgcaacaacattcaaaaattttgaatctaagattaatgatctcaactatcacaaaatttccatcaatatacaaggatatcatgttaatttgtaaacaatatagctttttcatttacaattcttgtactaaagtaaacaatgctaccttactactcctcatacaatacgaatataggtgggttacatgtataatttaaattttgtattcattaatacttttttattgttgatttttatgctcaatctatattcaagtatccagatatgaggatgaatatctctcgcatacaattatgcagctacaagtaacataagaggatgctcacctcttgctntataccaaaagaaagggacaaaaccttttttaa

SEQ ID NO: 72683 - DNA, 134 bp, Arabidopsis thaliana landsberg
aacgttcagggatgccgcctcaaagtggcttcttctacatactccggcttgcttttggtttctgtgtgggggaacatgccattgggtccgcgggtactcccgtgcggttatatatcttttttaatgggtgacga

SEQ ID NO: 72684 - DNA, 427 bp, Arabidopsis thaliana landsberg
ctgcgccctccactcttcggtgatctgctcggcgcttttgaagaactcagtgtgaacttcgatgtgcaggaccaccggcaccactttccgaccggcagatgtggcgcagcacctcccaggcccatttgccgtccaggcttcgaggtacgctggtagtgggcggactatctccgctgtccttgtacagtgtcgacatgcgcagctccttgcgcacctcccggcggtaccgctgcccgtagacgtgcatcagccggctgagggcaaaggcctgtccgccctcgtgccagaggcctctccttggagcgcagaaagttcaaaaagagggcgatcgattgcggcattgcaagttttgccaccgcctacttgagtagtggtgggccgggcagggcaaccagcagagcacaaaaaaactgatggtgaccgtgat

SEQ ID NO: 72685 - DNA, 416 bp, Arabidopsis thaliana landsberg
gaagtttggagagtcggaatacctgcctgcttcgccgctgctctaatttgttgcttagttttcttttcagtataactcttcttagcttgacgaagcaatgtttgctgctgttgcataagaatcttattctgttgattctgtgcttgtgtggcaacagtaccggatgctaatgcatctttggccgcgatttcattattggcagcagttagtaatcctgtatcggcaggcttttgataagccatgacgtcaggagtagcatcgagccaggaaggatcaacaggatttccgttagcgtcaagcataccattagccattttggcttgcttcatacgcttaaggtaagcctgcacatcttcagcactcttacctaaaaccgggccagccattacttaccttcctttctctttacgcgagcc

SEQ ID NO: 72686 - DNA, 740 bp, Arabidopsis thaliana landsberg
ctgccgttgcgccgttgcgattccgggatcgataccatatgcttgaccaggtcgcagtcggtcttcaccgtgatcagggcttttccttgcggcagccagtcaagcgccttgcgcaggttttcgccgaccacgccggtgattttgtcggcattggcgacgatgtcgtccaaggtaccgtattgcgtcaaccatttgactgcagttttcggaccgactttttcaacgcctggtacgttgtcgaccgtgtcgccgatcagggtgaggtaatcgatgatgcgttccggcggcacgccgaattttgcgatgacaccggcgcggtccagcttttcattgctcatcgtattgatcagcatgacatggtcgttgacgagttgcgccagatccttgtcgccggtcgagatcacggtgtccatgccatgcgtgaccgcttgcaccgccagcgtgccgatcacatcgtccgcctcaacgccatcgaccatcaggatcggccagcccattgcgcgcaccgcttgatggatcggctcgatctgcttggccaggtcttccggcatcgacgcgcgggttgccttgtattctgcatacatgtcatcgcggaaagttttgcctttttgcgtcaaacacgcatgcgatgtatgctgcaggataatcattacgcaatttgcgcatcatgctgatcatgacgtgcaatgcaccggtaggcgcgccctccgcattacgcaagtccggggatgcgtgaaatg

SEQ ID NO: 72687 - DNA, 679 bp, Arabidopsis thaliana landsberg
taccggaatcgatgcattggccagaggaaaaaaaagtcgcggcagttggtcaaacattgactggctccaacatctttgacccaaaagttaccattttacataacattacaaacttccgaataaaaagtcattttatttggaaaatcaaagagccattattgacttgccaaatgggcacacttttaactaacctctccatcatgtgtgtacgcaaatttatacttcaaactaatttttgtaactaatctatgtctttgcattgcaatgctcataagaaaataatactagtaaaagataaagacacaaaatcatatttatattaatatcaagatcaacacatctgcacttgttcccacactttaacctaatttaaagattccttaaaacagagaatccttaagaagggtcctagagagcagctagccagaggttgtattctccttcaattttacccgaataaacaaacaaaaaaaagagtaaatcaagggattaagaaagtcttactacactacttaatcccccttaattggtggctataattgccttttcctatataataatggggtaaaaacttaagtgtgaccactaagccacaatcagcaacgggaacctttacggcaattcagtgcaccagaagtagacgtcaatggtccaactagagaagacggtttagccccaa

SEQ ID NO: 72688 - DNA, 297 bp, Arabidopsis thaliana landsberg
  unsure (1)..(297): unsure at all n locations
attttatatatcgcgtatatacaaaaaagaagganatatctactacttgcatatgtacattggattaaaaatgaacaccatcaaacaaatagattcgaatttgttagttctgtggagaaaatatacgttgttacagtgacggaaaaaaatgtcgctacagtgacaacaataaaaagacaaatctattatttacatgcatatttgtttttgttttaaagaatactatggaatgtatatgttggcttttgtagtttaaaagacttttatatatgttgtctatcgtgttaccaatgtata

SEQ ID NO: 72689 - DNA, 301 bp, Arabidopsis thaliana landsberg
  unsure (1)..(301): unsure at all n locations
aacactacatgnaatttatattgtacaatagtattaatgtgtggttttcattatagacctaatattttgtttgataaattttaggccaacttcgcatatatatatttaattttttaagaaatcaatatgaaattagcatatagttttccattaaaaagcgcatacaagaaatctccaaataaactaaaaaataatcccgctgccggtatttaaactcggaatgagcaaggataaaacagatcattagagcttaaatagcctttgtgctacagcgaattctttgatactacgtgaatttata

SEQ ID NO: 72690 - DNA, 608 bp, Arabidopsis thaliana landsberg
  unsure (1)..(608): unsure at all n locations
cagcgatagctgcgctcgatacggtcggcatagtcggcgatggcggcgatcttgcccggatcctgcattgccgttcgggtcgcgctgaagacgaagagacccgaattgacgtcctctccgttggacagcacccgcgcgcccagcgagctgcggatgcgcgcgccgtagatgccccaggtcgcccaggcatccaggtcgcccgcggcgaaggcggctcccgcatcgaccggattgaggaaggccagcttcacgtcgctttcgctcagcccggccttgcgcaattcgccgacgaccaggaaatgcgcgacgctgccgcgcgtcgtcggtgagatcgtcttgcccttcagctccgcgacggactgcgcggnnnnnnnnnnnnnnnnnnngaggcgcgtgcccttgccaccattgctccaggccgccacgaccgcgatcttcgagccgccggcgatggcgctgacggtcggcgagtcgttggccgcgccgatgtcgatcgcctcggccttcagcgcctcatggagatgaacggccgccggataggccgaccattcgatcttgtagggcacatccgcgaggagcccgggccgctgcagcttgctgcgatgctg

SEQ ID NO: 72691 - DNA, 4317 bp, Arabidopsis thaliana landsberg
catcttgcatgattcattagttctctctcccatatgagaagtaatcatagagtcctcttccaaacgtgtggcaagttgaataaatagtgcaatgattcggttcatgtctttcgagccccctctattcctccccctggatacataagagagtcagaagaaaaattacaacactagtagtacaggaaatgaaaaattaaattttaccttttttacaaaagattaccttctacttaacaactaggagtcaatgaaagcaatcattcaacggcaaggcataacaattagaaataagcaatcttacagcctaacacactgagggcaagaaaccgagagagcacatggcaaaaaaacgaatattgactagtttcctaatgataaccaataacccagaaagaacatccgcaatcattcagcatattgcttatccataatttgcaagaaaaaatatttgagtgttattggcataatcatgtactaaaagaagccactcagacagaggaaaaagaaatcatacttaattgcttccctgcacatccggctgatatcctccttgacagatctcaaaccatgactaacgtagtaaccatttttcattttttcctcgatctgagaaacctgataccaacaatacattaggatcaatttttaacaggtgataaagaaaagatagcagacacaagtaccagaaagcaccttcaatgcaaagaagtcaaaagtattctgcttcattatgcctcgaagacttgaagcaaggaattcctccactcgcttatacccatgttctgactttttaattgcccatcgcctgatacgagcatccctggatagtatggcagatgatctccttgcatcgtacaattttgagcgtttgtataagcttctccggaataactgattggctgagtctcgcttttctactcgatcaaagtaatccttaaggttaccaaaatcatctgtatcgccccctaaacccttagacttagcaacatctgtagtctgtttcagactccttatcctggaatgtaattcacctgatcgagtattcaggcatctgagccaacttacgtttttatagttcactgtcaaatctccaaactgggagcagcctgtgatgtctacagaagatatacggggatgtaaacgaagaatttcctcaagcatgctggcagtcacgtttgtacaaccaaccagaattatagagtctatcttctccttgttgtaagtgttctgcaagagaatgtcatgtcaaataatgaaaatactaatatacctcaaattatgtaaacggaaagcatagagtattcaccataatactcctgagcctagaatctgtgcagctgggacccaaagaagataagtcaacttgtcttgaaatatctttgtatgaattaatagtggccttccaatgtctacaagtcatggaagcaaatgcaagtgattttacatcatatctcaacatatgaaacacccttgctaatgcatggccatccaacagaccccagtaaatccccacggtgccagcagatctatttccttcgatattgaaggtaaagtccccacataaatcctcaaatgtcaactcatccttctgaaacatttgggtatcttccatttcagaatcttctccactttcaccagccatcaagcgagctcttttcgtatagcaagaatccaattctgatgtttatgaaccaaagcaaaaccgaggagtgaaaaatgttaaaaaaaattaagatgcacaaattgaacataggttaacctagaaggactgaagaaaagaaggagacaaccacccaagttcagaaaccaataagttaaaggaaactgagccaacaagaaagtactagttaataggagggacaggatcacgtttaaattctggtagttatggatacctgatgattggtacatgtacttttcactctctttcttaggctgtcttgcatggatccaagagtctacaacatcgtttatggcagcagaaaaatcccgactcttgaatgttttcataaccaattgatgaagtttcccacggaaataaccaagaaactgagggtgcacaccatggaacgagtttagacttgtgtccatttcagaacacttgaaatcttgagtctctgagacaacaaggccttgacaagctgaaggcagagctggggttttcccccgaagcttggcaatggtttcaggagattttgtgatagaagtaacagggacccagattttatcagatttcctgaagacactactgtggctcttaatgaaacctttctccaccaatttctggagctccgaaaatgacagaggtccttgttcttgtccagccccatccgtgtagaaccaatcacctatatgcaattgcaaatcatcgactgtacacagacgatccctaggagtgtttacagatgtgtcggttttccaaagtccctgtgaatcttgaccagtggaagctgttgattgggaatgactttctactgattccctcttggaatcactagatgcaggggatggacgagcaggccttgaagggcacctctccttactacgaacttttgctcgaggatcatgaactggtggaacttggtcattaacaaccaaagagttcagcctaactacagacagcaaactagcttttactcccctcgcctgatttctctcatctacaacagaaaaagcccacagaggaagttcaagcctagagctactgagaggataatacaaatcatccttgtgatgccaccgaggatcctcatgaccaggtttctgcatcaggcataacgggaaaccatcattcagaacaattttctttttgtaatatctatcttgagaagcttcatcttgtcttatccaatccccgcctttgcaagaccaacgacctgaaaaccagctgcctatctcatcactctcggaaccataaacatcgtctgacttaaattcttcgatcgcccttttcatggggtcggaacatcccaacaactcctcaaccatcagatcccattgtttcgcctctggatagtgacgccaggtgatacctgcaaatcccagagtagaacttctaaatacagttgtgcaaaaaatgcagctatgcaagacgctatgaagtattcaaagttgatgtcgtctaaatgaatcttcatgctcatgcacaaaccatcatatggcaagtaggttattacatctttaacaaacatcaaacacttccctatactttcgtgccaaatgcccagatttgcacgacttcaaacactagaaacgatctaatatagatataaacatatataacaagtagatataaacatttgtttggttctgctttctgcttcggggagaatttggtattgttggggcgaaaactaccagaaaggaatagaaacagataggtaaaatcatgtcatgctacaaaagtgcaaatggtgccaacgaaacataccttcagatgtcacacatcttctggtctcctcaaactcaacattaaccttcagagcttctgcaaagtgatgaaaataagcttatcttaaggcatagaagtgtcgggataaaatcagctaaatatgtttaaaaaaaatgctctcgatatgttctatcattttgggctggaaaagcatcaattttgtggccggaaagcaaacatatgtacatcttttacctccaagtgtttcaaattctctgccaggagtgatagtacgaccatccaagagattttcgaccctcatatcaatctggaaatcttcacgattctctacaaaaatttctttaccatctggtagggtccgtacgaacactaattcaggcaaggaatctccagctccttgctcaatacaaactgcttcagtagtatctgcaatgtcttctaataaattaccaggagcttcaggaggatttacgagctgtgtcactgcatctgacacgactgatggaaaattcatgttgaccgcaggagatgttgcattttcaatagtgacccacctattattatctgaatgctttatcatatgatcggagaacagaatgccttgctccataagagctttgagatcggataaccttgcaggcccatgttctgtgccatagtaatcaagataaaaccacttccccaaggatgaatcagacgccataggctcgtgaggtggtgtgtcacaaatgtccatatctacctccattgatggcaactcttctgttggggcttcaccaacttgcacaggctcttttcccgttgcacacggaactggaatcttggatgaatcacagacggaatttttctcaaccagcagactattgttgtacaaaatgttgttaccttgcaattctttgcttgac

SEQ ID NO: 72692 - DNA, 609 bp, Arabidopsis thaliana landsberg
  unsure (1)..(609): unsure at all n locations
nnnnnnnnnnnnnnnnnnnnnnnnnnnnnnnnnnnnnnnnnnnnnnnnnnnnnnnnnnnnnnnnnnnnnnnnnnnnnnnnnnnnnnnnnnnnnnnnnnnnnnnnnnnnnnnnnnnnnnnnnnnnnnnnnnnnnnnnnnnnnnnnnnnnnnnnnnnnnnnnnnnnnnnnnnnnnnnnnnnnnnnnnnnnnnnnnnnnnnnnnnnnnnnnnnnnnnnnnnnnnnnnnnnnnnnnnnnnnnnnnnnnnnnnnnnnnnnnnnnnnnnnnnnnnnnnnnnnnnnnnnnnntaaaaaaaaggatttttcgccccccggtgtaaatgggcccccctccaaaccaaaagggaccaatgtgggggggcctatttccccccaaaaaacaaaaaaaaaaagggatttttttataatcaaccccccccctggggcccactctcctaaaaatggggggggcttctcccgccgccgctttttttatatttttatacaaaaaaaaaaaaaagcgggggcgtataaaaatttttttttttcctcaaaagaggggggggggggggggagcccccccccccattttattgtgggggggtggggggggcccccccccctttctttttt

SEQ ID NO: 72693 - DNA, 286 bp, Arabidopsis thaliana landsberg
cacggattcaggacacggtgattttcctaactgcccaaagtgaacgcatgtccccgcaattttgcgggcgtggcccatattggcgccggaggattaacagggcatgaaacccatcggcggaaagtagagtcataccaacccgccttgaggttgacccatgaagaatgggtcaacggcgggtcggtatgagtcttggtttggcgcgccgccgccggccaacccggcgcgcgataccaacacaccgaaaggctggaagagtcaggctttcggtgtgttggtatcagtt

SEQ ID NO: 72694 - DNA, 3956 bp, Arabidopsis thaliana landsberg
  unsure (1)..(3956): unsure at all n locations
gaaacactaccaggcttttatcaccaaaaatatcctttgtcagctgcaacttgttaaattgtttccacagtttcattatttggccttaagaaaagttatggcttggtttgtaactaactgtttcagcacaatctgttaatgcaacatgataccttgccttcgttctttttctttgaacttttggtttaggggagcatgttaaacctttattgctccctttatccatacctttttttcttctcaaattttgttgtttttccctttgttgcaggagtacgacattttgaatgacaattccaagaatccaagggatcgagtggctcgtcagaaaaagaatctccgacgacgtctaggtcaatagcttgtctcgttttctattaatcaatttccatggggaaagtattatcagttgtccaatttcatgaaatgtgatatacgtaaccaggatagattataggtataaattttgagaaatcagtatatgcgtaaacccattcttctaagtctattacatcacgactattggttctctgattctctgtaaagttgactctgtatgctccaaatattaatgttttacttgattgatgcatctattgaacatacttctgaaaatctgtgaaacaggtttggacatgtgcgagcagttcatggatgtcaatgaaatgattagagatgaggatcttattgagcagaagtccaatgttcctgccaatggggttgggaacagattatacgcaaactgttctccacatcatatccagcaattcgtttcaagaatggttccccgcgtcaattctaggaggccaagcgcaagggaattgaatttactgaaacgaaaagcaaaaataagctctaaagatcaagctaaaggtagctgcgaagtagcagatgttgagatgtcatcgtctcatgttgcctcaacctcaaaaagaatattgtccgactcattggactcgagcaaggtatttggataatgtatactcataatgacggataaccaacttacataatatgagttgctgaacgttagtacaaccaacttgaagtctcattagttcattgatatgctattcgtggattcaactttgacttatgctgctttctcttaggtgtataatctcttacgattgtatagtccagacataggcacaaacttcacttgaaaatagaataacagttgtcatattttgttttagcaataaatctcaagctgcgtgaggaaatttccttattagaattctaggcacttcttgattttggcagaccatatttcatactgtcttttcacttctgtatatgctacttgaaacttcgtaggcggacattggtaatgaggatgatatcgagcctgatggggatggaaaatggcctttccatagttttgttgagcaacttattcttgacatgtttgaccctggtaaggttcatgtacttgtgccgtatacattttacttttttccacttattgagttctagtaaagttgactaataatctgataatgtgttcagcatgggagatccgccatggaagtgtaatggctctcagagaaatattaatgcttcatggtggttctgctggagtgtcaacagaagagtttagttcagataatgggtttgagttgaaagacgtcttgaataaagtaacacgagaaagagaaatcgacttgaatatgcaggtttcagaaaatgagctggagccacttcggaaaagacctaagattgaagatccatcaaaatcttttattgataacactgttttagaagttattgggggtgactatgatattaatgttaaagatgaagatgctgagtttttgctgccaccagtgaaggtcaatggtcaaactgactgtagttctacgaaactggaacctcaatcttctatggatgactcgacatctcactctgaaataaaccatatggcagaggttaacaatcattttgaagataagagttttattgaggagccagttatacctaagcaacaggaagaaaatctcgaagtgttggatttggtcaaacaagctaggcattcttggataaaaaattttgaatttctccaggattgcaccattcgcttcttatgtgtgctttcacttgaccggtaagactttggttctttatcctaggttttcttttccatttttagctgtttctgcttcatggtagcacgattgtttagaaaggttctgatactggctgagatttggttgatcctttcttagttaatgattagctttccctcgattgcagatttggggattatatttctgatcaggtagttgctcctgtgcgggaagcttgtgcccaagcacttggtgctactttcaaatacatgaatccctcgttgatttatgagacattaaatatcttgcttcagatgcaggtaatatatagagagagagattgacttttttaacctactcaaaactaagaaacttgttgcagtctctaataattataaactgttggtaatctttatcatttatatttgttcagcgccggcctgaatgggaaattcgtcatggaagtcttttaggcatcaagtacttggttgctgtgcgacaggtaatattccagcacataagagctgattaaacatgtttggaaaactgaaaaaggacactttcactgtcttgttttgccgttttcttatgtcttgagaacttatgcttttctatcatgatatgtagtagtttttgattttctgaggctctatttagcttatttgacttcttgatatgttcttggtttgtagagatgcatttccagtgttagcttttctttcttattctccccgttttttgcaggaaatgctccaagatttgcttggctatattcttccggcgtgtaaagcagggttggaggattctgacgatgatgtgcgagcagttgccgctgatgctcttataccggcagcagctgctattgtctctttgagaggacagacattactttccattgtcatgctactgtgggatatcttacttgagttggatgacttaagtccatcaacaagcaggtaaacaagtgtaaaattacatgctaaccttttcattatccaaaatccttcttttcttggtatttggagttttctgtacgagatcaattttgacctagtgaaatatttcttgcagtattatgaannnnnnnnnnnnnnnnnnnnntcaagatgacatgaccctagtgatgcatgaggaattatcactgggggaggaacaaaatattgaactcaatgaaatgggtcatatcgagagtattggagaaagaagagatgtaaaggaaatcccttatgcattatcaggtttggcccctaggttgtggccattcacgaggcatgacataacatcagttcgattttctgctattcgaactctggtaggtttctgttgtttattctacaaaagaatctctctcagtacttgcttcctatgtttgtagccgcttacatgtatcttgtgccttgagtttctatgccctcagaatttaacagatgcaaaccccgtttgtttacctcagaatacactttacttatgtttcttcatatgtttatagtgtgctttcctaaattttcccctggcaggaacgacttcttgaagctggatgcagaaaaaacatttctgggcagtctaaaagttctttttggccatcttctattttaggggacaccctgagaatcgtctttcaaaatcttttgcttgaatcaactgaggagattctggagtgttcggagagagtgtggagactattggttcaggtacttagtaataaaattttgcttttctttgaaacacctaaattatttctatgcctttttctccttcttctgcatccttagaaattaaaggatcttcgttcttggtttccagtttgcattcttacttgggcctagattatctctcatttctcttcttttttagtgcccagtggatgatctagaaggcacgggttaa

SEQ ID NO: 72695 - DNA, 295 bp, Arabidopsis thaliana landsberg
cccgtcaattcttctggtaaggtagcacaacatacgcttaagtggcaatgtaaaaactgtatagcagggacacatttgttccacacatcgacaattagcagccacataacatatggacacttcgaatctggtttgcattttacctgagtaaatgcttgatatcctttcagtatctctaatacgattgcctctccttgtgaccttcaagaacaattattttaaacaaagtcctcagtgtttgcctcttcacaatcaatgtatagtctgacaaaagggttgttataccttgataata

SEQ ID NO: 72696 - DNA, 582 bp, Arabidopsis thaliana landsberg
ggcggcggtatcaagctgagttatcgctttagccggaaatggggagtcaacactttaatattgttcgataaaaagctttacgacgcgaggccaaacgactataatccgccggataataactggagaaattataatgtaagatcccttgaagccaattgcaccgtgactgacattcctctaaatgtggaatataccttatgggatcgtcctacgcaccgcctgtttgtggaagcagggctttcctccttctggatgaatgaagaagaatatacctaccactacaaaacttccaccgggcaatggaaccagtggagtaaggagatgtataataaaaatcatcatctcttttccattattaatttctcacccggctatgaatataattggcagcacttatcgatacagatagcaccttatataaaaatacctgttagcggcattggatacggcaaggtgaaactttagagcgccgacatacattttaccttacagtatgggttgaaataatatctaaaccgtttcctcaaacttcataaaccggagaactcctggggcctgcttaacggtaatatcctataagcg

SEQ ID NO: 72697 - DNA, 542 bp, Arabidopsis thaliana landsberg
  unsure (1)..(542): unsure at all n locations
accgacaggcactatcatttttaacgtcatatccttattattcttacctgccggttgtcctaccttggtttgtcccgggcgtgggatgtcttctccatccccgctactatgtgtccctcacctcgtacggatgctgatgctaatgccattgcctcccccaatggccgccagagtgcctatgctggcggggagctaagcccctctgacagcgaggatgcgggcttaggtgnnnnacattactcctctggcggcattggtgcagctggggctgggattgccgaccttgacgatgctgacgacgctgacgaagctgacgatgtgatcggagtcagcatgggatatgatcagactcggctcaagtctcgtacaacgcctgcggaggagaagacgcgcatcatagagcgcaatggtggatatagcggggatgaagggctctttgcggcggacataacagaggaaccggaatcgctggcggatgatggtgatcaggataaggatgaaaattggagggctccggctgcgaaaaatgggacagcagaaac

SEQ ID NO: 72698 - DNA, 602 bp, Arabidopsis thaliana landsberg
  unsure (1)..(602): unsure at all n locations
acgtctctgtgaaatgctcaagctgattagggtttatcaactttttctcaactttcttgttatctccttcgttgtcctgtctgtcttctcaggtgactaatcactcactctatcgttatccacttgattgttttgtttcctgtttgctttttgatttgagatctatttttgggttcagattgttgtcgacagctaaattctttgatgtatttggatcaaagnnnccgtttttatttgatttgttccgtcttcttcgtgatcgtgtttgtgtctgtctctctcctagatttgggttttggggatttgggtatgcgttgttgtgatcagaagggacctttatcgtttagtgatctctttgatacagagagacactaaaaatggtgaaaaaatgacaaaacttcttattggatgagggaagaaacgttctaacgtgttccatcttctatcattttcttcttagatattttaagattgactgttttctgaacatttcatgctttaggaagtgttaagttgaaacctttttctcttagctctccaattgctaagtgttttttctggtgtctttcttaattatcttttgggattctcatgggatttga

SEQ ID NO: 72699 - DNA, 299 bp, Arabidopsis thaliana landsberg
gatcctccaccattctacacttcttcttctgcttctccttcttcttcttatccttcttttagctgtagaatctatctaacgctttcgctgccacctctctttatagaggctttgactgtatttcttagtatttttagtcttgtgatgtttttgaccactcctatgcacgtgtccgaatttttcgctcgacctctttgggcctcttccctagctgtgatgcatgatctaatgcataccatctctatacgcttgatacctttttcgactcacatctatgatcattttaactaacgtgggtc

SEQ ID NO: 72700 - DNA, 413 bp, Arabidopsis thaliana landsberg
tgaatcctccttaacggagtttgtttgttgagtttaaaaaatcgaatttctttttgactgcaggttggatgctcgggatcctcatcggatgttgctttcggatcacacaggtgcaattccttcaaaagttcagcttccgttttggaggaaaacgcattcgcattaaaatccgtactgattgtgttatccaccttttcattatccgccgaggtgtgccttttttcaatggtaatttcaccatccgcttcatcgtcacaggcaaaagccaggaatactacaggaagaagaaacacgaatttaaatctcatggcgatgtttactaattaatgaaagattttggaagaagttacaaatgcttcttgaaaaacggatcggatcaacaccctgttcaattccctttttttttaaaccat

SEQ ID NO: 72701 - DNA, 529 bp, Arabidopsis thaliana landsberg
gctctcctcgctgtccatgatggtgcgcttgacccgcttgcgctgagggaagttcacctcctcgtttccttcggtgtcagactgagcgaccgcgttgctcgcgccaccctccgcggccgggctggggcggcggtcctggcgagcgaccgcaccctcgtcgtcctcggcgtcttcggtgtcgcgtgcggccttgcgcttgagcttcttctcggccttggcctccctggcggccgcgcgtttctcctccttgtgtcgccgccgctccttcttgtctttcttgcgctgcttgcggtccgcgtccttgcccttcctctttcccttatccttggacccggagccggacgccgccttgtccctttttttgggccgggctcccttcttgttggtcttaaccttcttacccttgtgctctttctcgggctcctcaccctcgtcttactactctttcttctcctgtccaacatcggccagacgatcgatcaaactcacgctcgatccacacaacttgcacctgaacgagagcactcac

SEQ ID NO: 72702 - DNA, 261 bp, Arabidopsis thaliana landsberg
  unsure (1)..(261): unsure at all n locations
gccgttgcgacgaatccaaagngtacagcgttaactgagtcatcgaactgagatttccacggctcttctcgccggagattcatcggagctccgataggtggccattgatggttgaggttcgtctttaagtgctcaaggtctctcatttatgtgtgagaaagtaaagaagcttcaatgttcttcgtttttgaggtgatacagagaagagagagagatgagggaagaagatgaagaaggagaagaaagagaggaagcaagtgg

SEQ ID NO: 72703 - DNA, 289 bp, Arabidopsis thaliana landsberg
gatggatgcggtgctagagacattgtcagaaagacattgatatcttgacctttcgcgaaaagaaactaaaattactatctataccaacagaaagaccaccaaggaaatccatataccgtgaactattgcacacacaaaaaagctactcataaggagctttctctaccgatcaacaatgtatgaaatgaaaagatcaattatatctataatagcttacaaagttggaaggcaaattataaaaatagatccgaatgtgatagcatacaatatgtgaaaggaaatgcttatt

SEQ ID NO: 72704 - DNA, 240 bp, Arabidopsis thaliana landsberg
gcctactcagcttatggaacaagctactctcgagattgaaagccgagacatacaagggggtcaattacccatgatgggactgatactcctttattagatactttggactggaggctgtctctagaaggcgctgagacgcgtccattcctcgcgataccagcaaaaaatgcatgatgaatctacgtctatggctgatataggtgaattacttagctctgaacttcctgatgcactccaatt

SEQ ID NO: 72705 - DNA, 347 bp, Arabidopsis thaliana landsberg
tgaccctgagggcaacttctatctaataacaggagaattcaaactctactgtttgtatcatacaaatctaaagatatggacaggaaagaattatacaaagtgccagattgtattatcctgaacattatacctttgaattatggctcgccagaactatatggatctactagaggatcgcataacgacttctgttagtatatttacatggcattatagggcaatcaggagggactgactcggggacgtgcgaggatgcgcatcacctatgcatctatgacaagtggtgaaagctatcttactcgattgacgaagggtcccgcgtgcatgctgcatatggtgccgtcata

SEQ ID NO: 72706 - DNA, 301 bp, Arabidopsis thaliana landsberg
gatacgaattcattaaatataccgcataaatgttttttttgatataagtccaatagttaatcaaatacacgataaaactactctcttttttttattcaaatgtcatgaaatagttaattttccagtgtagtacagaaaaattcttctttgattgtttaaacgatgaaaaggaaacccaaagcaaaaacaaaaagctacctgtttatttctcagtcgaatttaagttcacaagaactcgagcccatgaacaaagatgccaagtcttctctgataatatgatgatcacaaatctctcctgaaa

SEQ ID NO: 72707 - DNA, 221 bp, Arabidopsis thaliana landsberg
gacatataagcttcctatcgtaacaagtaatggaataaagatgtcatgcaatatgagccaaacaacaaagtacagtggacaacaaacatgaatgatatcaaattaacctttgtaaaaaaaatctaacacaaaattatcaaatattcataattattttcaattaaaccataagattagaaataccacaatcatcgttattgtgtctactatcatattaatag

SEQ ID NO: 72708 - DNA, 136 bp, Arabidopsis thaliana landsberg
aaaacatgtttaggtctctggtaatacgattgcaagaaaccagaacatcccaattgtgattccgaaactagaacccaaatgggcccattaatcccattatttttgaccatcaaccaccatgatagccctaagaatt

SEQ ID NO: 72709 - DNA, 161 bp, Arabidopsis thaliana landsberg
ggtcaatatagcttattctggtgtttatcagtggtggtatacaatcggtttacgtactaatgaagatctttataccctggagccttctttttttctaattaatttcctttttctgccccctaaatccctttaaattagggggggtttggttttaccacccc

SEQ ID NO: 72710 - DNA, 640 bp, Arabidopsis thaliana landsberg
caaatatcattttcttggacacttttttctcctttactttgatgtagattacacaaagaaataataactgattgtcaattgtaccctcaagtttttcacaggcaaattgtactacttttaatcgtcgtgccgacgtgctctctaatttctctacgtacactacacaagtcaaaagtcaaacgacaaagggctaattccgtaattgtcgtctaaaccaccatgatttcacacatgttaattttaatttattttaatttatttttgccgactccatagaaataaaatctgcgacactctaagatcatgccacgtgggtatcaattatagaagaactaataataaaatgagtagcgtcgcagaggataattcctttacctgtgacatagcaaccatcttcgtggctatctgtcggaaccctcctgctaatccttcagattctttatttcgtcagtccatagtcaaattattacaccttcttttgtctctatcttctcttcttctttgtctatcgtactggtttagcaactcctgtctgtctcgagctccgatccttatctctcttccgaaccaaacttgatctcatgtttgtcttgatagattgacttactctacttcaattcgcaacagtcgttatgcaatc

SEQ ID NO: 72711 - DNA, 367 bp, Arabidopsis thaliana landsberg
aagtgcaacaaaaaagaagcatggtcaacatactggagttggcaataccccaatcacggatgttgaactcttgtttgtgttgttccatatgcgtaaatatgtatgacaacatcacatcaccatcgatctaagaaaaatatgtatgaggttgagttaatgcttgggaaggttatcagaaacctgataatttctggttccagccaaggagttcatcagttttgcgccaggtgccaacctcctcacaaaactaccttcattcagtattgcccacaaatatggtgataggagaagtgaccatactcatcagcaggctcttcaggagccccaggcataactgcgatactcaatttgacccattaccaaaacg

SEQ ID NO: 72712 - DNA, 528 bp, Arabidopsis thaliana landsberg
  unsure (1)..(528): unsure at all n locations
gttggacacgacgcttacagattgttttttgtctgggaagtaaatgcccatatctgtttctcgacattttgaagtctctctaacaaagcaattagaggaattaagaacttgattgtgtaactttttttttaatcttaaattaagataatactatttcattacaactattattttcttgcacatgttgcaagaacgtgagagtgtacgcagacanaagnnncaaacgaaaataaaattataatgattatatacaatctcggctatcaattgattaatagagaaaattgactaaccactctgaattggctcaaaatgtagttattaattcaaaccgagtttcacttcatttatattattttcattttttaactttaaaatatatatatttaataaaccaaatatgatctaaactaaatctaaaaggctccatccaaagtagatttgattttactatatatttaaaacatgtatggtaggaaaatttaaccgaaaccaaattaaacacattgtaggatgaagaaaatcacc

SEQ ID NO: 72713 - DNA, 101 bp, Arabidopsis thaliana landsberg
ggtttatcctacaaaccacgtgaaaaatatctataaataaaattcttattaatgtttggcatggatttgaaataataaaaatcgccagttttgaaaaaccc

SEQ ID NO: 72714 - DNA, 236 bp, Arabidopsis thaliana landsberg
aatctcgatgcctggcagactctcctgcgtgcaatgtagtcacacgacaccttcctaatttttctatattcttaacaatctactcaaccttgtgcgtagtattcacaaacacaatcggtgccttctcatcaccgagatcgtccatcagtttctttaacctagagaacctgtctgattctgtgggcataatcgctaggagagtgcacaactttgagggtgccaactacacgactcgc

SEQ ID NO: 72715 - DNA, 642 bp, Arabidopsis thaliana landsberg
actaatgaagcaattaacaatagaaaactaatactataatgtttatattcccatccgtgcgtttccattcactttaagaaatgatcatattcgcaaccaacaatttgaagcaaacggtcctctactttttattgctcgttttctctttaccgaattttaaaatcacgttaattatctgtataactacctttttgcgttgaagtatttacaacttgagtaaaatgtagattcgtatcaggatacaaacacacaataatactattcagagttcttagtaaattagtttccttttgcagcgatttatttccgtcaagtgtatactagacatcagtaattaacttaagttcaaatttcccaagtatagatataacagaagatcaaatatcgactcgaaactgagttatatataattaacacgtgaaaataaatagaaaaacaagaaaatatctcgcacgtttcccaaagccctaaaacaataacgttcgatggattggaaaaatctctgctggtacattcacgagccaacacgtttgcctgccacgttccacacacaagctagaaagtaacggcatcgccaaatctaacgagacttatcaaggaacaatttatcaacatcatatttttttttggtttcacaccccc

SEQ ID NO: 72716 - DNA, 636 bp, Arabidopsis thaliana landsberg
tttttttattagctatagtgcacttgggttgatatgtgaattaagtaaattatctaataggtataaaaaaaaattatgttggttgttgttcctttataaagctttttgtgattattatgttatacaaaagtagacctctctaacaaaattaaagtaacacactatatatagggaagcttatagcttttaatacacaccccaagttgtttaagaaaaagatatgtcaaataaaaataagatgtatggaaaataaaatgtgctaagaaggaatctaggtagcaataggtctttggtcatttatttttgtacctagacttttgatttgttatctcaaagtgaaccaaagtgatgattaaaacaaagtgtccaatattgaaatgcacagagatggccaaatgagtaagtttacatggcttctttgcatttttctgtcccttcgctaaaattcaaaaggttggtgctggttaacatcttattggatctgtacttttctaatttggttacatggtcccttttcattttcattccatggtaattcaaagaaaacaagatgaagcaaatgaagtcaaaattattgtatgtatttgaccagtatataggattatggtcctaaactcttaatcatgagatgaacat

SEQ ID NO: 72717 - DNA, 520 bp, Arabidopsis thaliana landsberg
aaaagacatcttttcactcctagggaacacatttatattttgtaactgaaacgcacatatctatttttatgaaatatactatataatactgaattttgtatttgtttaggaggactctaattctttttctcaaccaggtttctgaactcaatcgtgaggaacaatatatcttcaagtttttgtttccttcacgtaatattccatcgatggctgtgctcatggcatgtgagcaatcaaaaggtcggggctgttttgaataacaaacagagagactgcaatgaattgattggatcaatgttatccacttctattttatgttaataagcttcagatctatcattgattggtttttatacattgcctacggaaaactattttatggtcttataaattgagaatgggggtgatggtcaagtataacgtgtatggtgggtcattattagctgttaatccaaccacatgggtttatttcaaacatggtttgtctatctatacacacatatttttcagaattttaatg

SEQ ID NO: 72718 - DNA, 477 bp, Arabidopsis thaliana landsberg
ataacaaaaagaaccgtattataccacgccatgttctattagcggtgaggaacgacgaggagctagggacactactcagaaggcgtaaccattgcacacggcggtgttttaccaaacataaacccaatactcctcccaaagaagtctgagaaagcagcttcaactacaaaaacacccaaatcaccatcaaaggcaaccaaatcccctaagaaatcttagttcttctttcttcattcctctgtataacctactgtttctatctctctgtacgtttctctgtaaagacagaacagaatatctctttgttgttgtgagaaagcttagtttctctgatcgtcgttgtgaaataaaaaatgcaacgtttcatatagattgtgcacaatcaaaaagtattcatatgaacaatgtattattattcgactatcatcatatgagatcgaagatttgatcaaaagacagaacaatgatctataattc

SEQ ID NO: 72719 - DNA, 626 bp, Arabidopsis thaliana landsberg
gatcccgttcggaaaatcccagagaacatgcagcgccaccgtcgggctggctcccgtcagacggtttacctttccggcatcggcaaacttctccgcgatgccggtcgccgcgccgctctgaataaactttccgaagcgtgtgcccgtattggcgaacccccaggagggaatctcgatgcggaaacggtccagggcctcccacaccttctgctgttgtgactgtgtcttctcattctgtgccatggctttcgttccctttccgaaaataagtctctattgaaacaaaaatttgtgcaagtcatctttcctctgaaccgtgcacaaaatcctctcttcgcaaaatacggagcttgtgcgcttttaccgttgtgcatccctcctggaactacgagcagctgacgcttccatcgctcgcacgtatcctccctgcagccacttacaatactcacagtcgagcgattcacaacagcgggagatctcctgatgaagcaatcccttcgcctgcccttgttgctgctgctcttctgctgactcacagcgggcatgccccacgcggagcctgaggccactccgccgacgataacgcgaagatcctctactatttcacaacagctgggatacgctct

SEQ ID NO: 72720 - DNA, 764 bp, Arabidopsis thaliana landsberg
ttttgcctttgggggtaccgttcagtccgaacggggttgcggggtgtggtacggtttccataattcaatggctttccccaaaggatttccccaatgaacaacttccgcatcgaacacaacagcatgggcgaactgcaggtgccggccgacgcgctgtatggcgcgcagacccagcgcgcgatcgacaatttcccgatttccggcttgcacctgccgcgcccgttcatccgcgcgctggggctgatcaaggctgccgcggccgaggtcaacctggccatgggccatctgaagaaagggcaggccgcggcgatccgcaaggcggcgctggcggtggcggatggccactacgacgcgcagttcccgatcgacatcttccagaccggttcgggcaccagcaccaacatgaatgcgaacgaggtgatcgcgcatctggcggtggcgggtggcgccaaggtgcatccgaacgatcacgtcaactacgggcagagctcgaacgacgtgatcccgaccgcgatccacgtcagcgccacgctcaccgccagtgatcagttgctgccggcgctgaagcatctgaagaaggccatcgacaggcgtgcgcgtgaactgaagaacacgccgaagaccggccgcacccatttgatggatgcgatgccgatcaccttcggccaggagttgtcgggctggtcggcgcagatcggttccgccatcgcgcgcatcgaggatgcgttgaagcgcatgcgccggctgccacagggcggtacgga

SEQ ID NO: 72721 - DNA, 525 bp, Arabidopsis thaliana landsberg
  unsure (1)..(525): unsure at all n locations
tacgcctcggacgagaacggctcgccgtccttgagnnnnnnnnnnnnnnnnnnnnnnnnnnnnnnnnnnnnnngggcgaggccagtgatcagcacgcgcgtcgtcgcacgcgggccttcggcgatcgtatagatgacggttgtcgcgtcacccttgcgctcgacgcgcgagcggacgtcgacttccatgaacccgcggcgcaggtattcaccgcgcacgcgctggccgtcgatgacgacgagatacggatcgggcgacgagcccagcttttggactcgtcgtagagcaagaccgtttctcaggtccttcgttttgatggagtggttgccttcgaacttgatcgcatcgagaaactcctcgccgggatggtgaacgactttgtgtccacaacccgcagcgaggagcccgatgacgagaagtccgtgcgcaaccgcccttacgtgcggtttgatcacggcgactacctcgatggatggatcttgtctcggtccctcgacgccttgttcctcagcgaggacaccagcg

SEQ ID NO: 72722 - DNA, 582 bp, Arabidopsis thaliana landsberg
  unsure (1)..(582): unsure at all n locations
caaacccagaaactgtccaccgcggtattatcatgatgaggatttattagttatatgcttcatgtcactcattttatccggcatgggatggccaagattctcatcaacctataaagaaaatatataaaagtcatgtaataaattcatcatccaaatgtagaaaaccaagaaacacacaagtgatgaagaagaagatgttctcacactggcagatttgaatccagcaaaagtatcaggaaaaccgggtgttgtttccatcccaaaaggtcccatttcaagtcaaggtccaagtttttacactgcaaagaaccaagtatatgtcacaataattgaacagaaccggacaatgttgcccataaaccaatctaacttacatgctacattcacgaaactagatctcatttctctctatatatgcatgttatcccaatccattagattcatccatgttttttaagcactaataaacaaattcacaacatgaaacatgttctctccaaattaaaaaacattaatttgcctanatctagtgaagatatataaatangttatataagatctacttaagaacagaggacagac

SEQ ID NO: 72723 - DNA, 575 bp, Arabidopsis thaliana landsberg
cgcggtgctcgccgagaccaagcactcccaattcgtcgtcgacgaggtgcgtggcgcggtcacgttcagcgttaaacagcgcagccggctggcgctgtggtcgcgccggctgctgggcgaggcgatcacccaggcccagtacgtgctggccgatcacgacgaactggtcgatctggtgatgtccggcgcggccgggctgacccatctggccgggttcttcgaccgggttcagcacacccacgacgagcggatgcgcgagctgggattggcctgaagcctggtttgtcggctgcttcaaggttttcgctttgaaccgagtagtccgaagtgagggttttctggggtgcggcagaccatcccgctgatcagcgagatccggtggcgcccggtgttgccgaacgacggccgcgcgtgcttgagtccgtgcgaccggtgtcctttcaccggcgcaaccggggcactcttcgctaacctcccgcgccgtgagccctacctcgacgaaacccggtatcagcgtcccgccgcgccgggcggtcagcgagcggcggcagcgccgacgcgccgcggagcgggtt

SEQ ID NO: 72724 - DNA, 757 bp, Arabidopsis thaliana landsberg
atcctcttcttcttgactcatgttcacaacttcccactcaagactactcacttctgttccttgttttcaccaagagtcaggggtctcattatatatagagaaaagtttaaaaaaaaacttggaaaaattagaaaacgaaggtgtttaagttttcagcttacctccttcagaagaagaagtcacgatggagttggtcttggtttgcttagtcctgcgatggttatccatgtcagacagcacggtattacaaagaagaagaagaaagaaactaagagagagtggtcgtattttgaaggttgcacacgaaccatcatttctatttatagcaactaaccaaatcaagtaaccaacggtccaacgggtttggtcggtttctatgttaatttactcaattggttttgttctcattaattaaattaattaattgttattgcaagttgcaagtttgcaaccaataaaaaccacaagtacccgtgacttcatttactccgttgtgatggcttggactggaacataagttgtataaatattgatacatgccgttaattaagatcattaataatcaacaacaattgttttcaaagcttttctgattgctattccagttcattcaatcagaaattatactccctttgttcataatagattgaaattttggatatattaagacaaaatcatttttaattattttaacattactttttgtatcaaacatttttcaatgcctaaaaaaaacttacaaaactattgtcctcgt

SEQ ID NO: 72725 - DNA, 363 bp, Arabidopsis thaliana landsberg
ttggtgcagctaaaccaaatgaaatactcaccccttccttgttttgtcctcctagttgttcacaaggtagcacgttttaccactgaagcattatatcatcaattttaaattaaaatatagtatttcatgattatgaaagaaacaaaatgcaaaaagacagtttagttttacatacagcatcaagatcccatatctctattgttggcgtcccatccgaaccaacagctaggaaattgcctaccaataagaaactcaaagatattcagtaacatttttatagcaagaatgaaagagcctagttggtttaattcataagacttttagtgacacattttcactaacctctttctcctcctttaagtg

SEQ ID NO: 72726 - DNA, 381 bp, Arabidopsis thaliana landsberg
tggcaacgaaaacgcgatatataactgcttgtatcataagggaatcgaataaccatcgcatacggcttggatcgataaatagtgccaattatatcaatatgtaagtctgacatttacctacctatagaattgagagagcggaggcctgacaccatgcactattgatgttccacatgaaaaacaaactcatataaaaatgcatacaaaacccactacaccggtcatgcaatagcttcaccgaacgcacatatgggacagtctagaatatgtttggcggcgtgaaataacgttactatatcttgacacgcgtaccgtgaccgtgttctatgcgatgcaccaaacgatacaaccgagccgtaccatcacggcatgggggacact

SEQ ID NO: 72727 - DNA, 539 bp, Arabidopsis thaliana landsberg
  unsure (1)..(539): unsure at all n locations
cgccttgttcaccgcgccgcgcccggattaccgggaaggccccgcgctagcggccgttgaggccttccacggtcgcccgcagtccggtgacgagccgttcgacgagccgcgcgccctccgccgccgaagctcccgccgggtccccgagaaccccgttcggggacaccgcccggacgccgcgcgacatcaggtccggcatgatctcgcgcaggggccgggcgtcaccggccgcggctgcctccagccgcacctgcgacggggccagggccagcatgaccgacgtctcgaaccgtcccgcgtgcgggtccgccggcacgcccggggccgcgtcgggcaggcttgcgtgccatacgcgacattcccgcccctcaggacgcagcgcctgaatcgcggaccggatcgcggggacgttcncgccgtgcccgttgaccagcagcatcgcgggccagtgccggctggcgtgccgccccagctcgaccagcacggcggtcagggcgtcggtcccgatcgacagcgtgcccgggaggtccgcgtgctcg

SEQ ID NO: 72728 - DNA, 382 bp, Arabidopsis thaliana landsberg
gggggggttcaaagtcaggatcccactcgacgctcttttcttgctcaaacaggttgacctgcaccgggggggtttgagtttaggtagggtcgagcctcgcaactgtcaacatacgcccaatcattccattcatacgctgcatatcgatctccatacgatccaaagccctgatttctccagcgtggcggtgcatcagatccaatggcaccatcatgcactccaacggaaaactaaatccgagagagaccctagtcaagaggaggcgctgtctggcgaaaacactctctgtttgatctgacactcgattgaaggactagaacagatgtacagacccggcccgacacaaatcaagcgcaggctcttgactgacactcagatgcac

SEQ ID NO: 72729 - DNA, 538 bp, Arabidopsis thaliana landsberg
aagaccctctgccggacccggtgcagagccagcccgcgggcggccagcgcggtgtgcagagcgagggagaacggtcctgtgcgcagcgcttcctgcaagtggacttcgcttgcagcacggtcggccgcggttctgccgtcggagcgggccacctgcttcctcctgccttcgtccccggccggtgcgcggtgtggattttcactgccgtcttcgagccggtgccggggcggcaggccagggaggacgcagtgtaggccacggtgttcacaaacgcaggcgcctgtgttcacatcgccgtcgcctcgacggaactcggacgttgaccgtggaccgtcatgaccggatgctcttcggcaggcgtccggacgcttgctccccggcaggaacgtgcgggcactcccccaccctccgcccctctgagggagaaccggtctcatgtcatcccactcacagcgctcgggcctgtcccggtggcggcgcggactgaccgcatcgtgcctcctagtggccggcgtgctgtcggcgaccgccgtatcgg

SEQ ID NO: 72730 - DNA, 512 bp, Arabidopsis thaliana landsberg
cgggtgctataatatagaatatgatggccgatgcattcattatttaactccctcccttattttggaggggggggggttcatttttttggtgagctgcctcctgtcgaacacgctgtgctcaaagttctgtgccatgcggatcgcactcgtggggcaggcctccacgcagagattgcacatggtgcataattccaggtggtatacgaatgtatccagcgctttcttttttttgccttccggcgatatatcaaatttggtaatgatcttgatcgtgccgttggggcaggccagttcacaggcagtacagcccgtgcaggcgtgttcattgttggcgtcatgcggcatcaccacttccccgcggaaacgctctgccagcttcaggctgctgcggatatcggggtattgctgcgtgacgatctctttcggatgaaagaaataatacccggtcttcttcatccctttcaaaagcgataccacgcctttgctaacatcctgtatgtattcttttatcg

SEQ ID NO: 72731 - DNA, 644 bp, Arabidopsis thaliana landsberg
  unsure (1)..(644): unsure at all n locations
atcgatgnnnnnnnnnnnnnnnnnnnnnnnnnnnnnnnnnnnnnnnnnnnnnnnnnnnnnnnnnnnnnnnnnnnnnnnnnnnnnnnnnnnnnnnnnnnnnnnnnnnnnnnnnnnnnnnnnnnnnnnnnnnnnnnnnnnnnnnnnnnnnnnnnnnnnnnnnnnnnnnnnnnnnnnnnnnnnnnnnnnnnnnnnnnnnnnnnnnnnnnnnnnnnnnnnnnnnnnnnnnnnnnnnnnnnnnnnnnnnnnnnnnnnnnnnnnnnnnnnnnnnnnnncggcataatgccaaaccgtgaatactcccctgaagccacagagcatgaacacctaggtaagtgaagacccatatcttgagannnnnnnnnnnnnnnnnnnnnnnnnnnnnnnnnnnnnnnnnnnnnnnnnnnnnnnnnnnnnnnnnnnnnnnnnnnnnnnnnnnnnnnnnnnnnnnnnnnnnnnnnnnnnnnnnnnnnnnnnnnnnnnnnnnnnnnnnnnnnnnnnnnnnnnnnnnnnnnnnnnnnnnnnnnnnnnnnnnnnnnnnnnnnnnnnnnnnnnnnnnnnnnnnnnnnnnnnnnnnnnnnnnnnnnnnnnnnnnnnnnnnnnnnnnnnnnnnnnnnnnnnnnnnnnnnnnnnnnnnnnnnnnnnnn

SEQ ID NO: 72732 - DNA, 251 bp, Arabidopsis thaliana landsberg
gccgtcgattctctaccgttactcgatgagcacataccatcaaacactctcttaccgattcaatgtgccataactatgtcctataaggcacaaaaaaaaggcttgcacaggcaaggacatagctctgtaagggccaaatgaccaacgaaaaggtcagactactgagctctatagatctctgaccttgctctgcagatcctgaaccacgctttgactagagttgctggtcaacgtatctgacctagccaaag

SEQ ID NO: 72733 - DNA, 444 bp, Arabidopsis thaliana landsberg
aaacatacctgctaacttcgagagtgatgttaaggacgttgaaatttatcggatcacgttgtagattttgcctttcggtgattgaaatgagaaagatacatatcgtcaaaaaggaaagttgtgacacgatgagtccactctttttaactttctttccattttcggaatcatcatctcctccttctttctctatcgtcttttgttccgtcaacggcataaataaagtgtatggaggaagataccttggaaacacaattatattttacttattaattagtccaaagaagtttttatggaaaaacagagaataatgctttgtgaatatgatgaagggacattctccagtctccactacattgaagggacattttttttttactgaatctaaaaccatggacatatattctgattcactctatcaaatcttgtctaccacattctctt

SEQ ID NO: 72734 - DNA, 282 bp, Arabidopsis thaliana landsberg
cttgggtttagggttcttcaactcgttcgcctactcttcttagaaaactaatagctcatgctatcatctatgggatttggaagcagagaaacaatcttctacacaaccaacaagtcattccctcctccatggttttcagagaagttgatcgcttagtgcgtaactcaatcacggctaggagaaaccgtagaaagtttgcaagcttgatgcagctttggcttcaatgaggatttctttttttttcatttgtcttttatgccatcttgttttttatttcttttt

SEQ ID NO: 72735 - DNA, 387 bp, Arabidopsis thaliana landsberg
  unsure (1)..(387): unsure at all n locations
ctaagncgtcgacagtggatgatttatctgcaacattttttacaaaatacccaacgacttcagaatcgatgtcaaattacgcagaataatactagagagaaacgaattgggcggcatacgcgtttcctggaggttatcgaggagaagatctatagcttctccgtcatcgtcgtcgggaaattgatcggcgaaaacgagaatctcgtctaaggcatcgaatttgaggttgtaccctctgtttttgaatttcttctgtatcttcttcctcttctgactggtgctgctcattctcgctacttctctctttttgctctctctgaatctgcgaaacttttttcttctctctttaatttctttttgggcggcaaaactctgaaaaatcccaaa

SEQ ID NO: 72736 - DNA, 359 bp, Arabidopsis thaliana landsberg
ttcacgtgaggtctcgatcccattactatatagtttatactttattaactctcaactaggtcttagtgttagtggttattacttcttatatgtctgacggtttctatgattccacttagactatcactcacttttatataaatcttatgatgttataggaaaattgtatacgatgcagaatttcgtaatttgtcccactattgctacatttcatttcaagttacaaatttaggttgtgatgtaagctctttattttggttaaagaatcactgttttcagatctctcataacttaggaaataaatacaggacttttgctacacatataggttgtgatgtataattgagaagaaaaaaaaa

SEQ ID NO: 72737 - DNA, 392 bp, Arabidopsis thaliana landsberg
ctctacgtatgaagtggtccatccttgtaagttgttttcttaaaactcttgtgtgagactaggatggatgataataatggttagtttctttatgaagacatttggttttgtagctttcttattttggtgtagttaatatgaatgaaccaaactcttcttaggactcatttgcgaatatgtatccaaaattgctgacttttcgaattgggcagatttcacttcatatgcagaacaagataaactttctgatcatgtgatgataaatattgtttagccaacgcatcacacatttctttgagtagtttctacttatggttaagtttcagcatcaatagtcaatagccaacaatatttggacagtcttctttaaatactccaacaactagtttgcc

SEQ ID NO: 72738 - DNA, 1174 bp, Arabidopsis thaliana landsberg
ctctagtgcaggatcatacccagctgataacttctctgtttcccgttcaggtatcaggctcagatcatgaggctcataattgacctgctttctttcagttccatcagtttgatggcacgaagagatctctgaaccaatgtctatctcatttctcttatttcttccagcttcatctcggcctgaagacatcccagtaacaatataagaatcatcatccatgtttctcttatccagaccattccttggattatcaaatccattcatgttgagaggatcagaagaattctcaaaaccattttctctcgggtgaaccataaaagagtcactagatcccctgattctacgagtcacacttccattccgaatatcagctgtatccctttcttgatattttcctgattcacgttcatcatgtgccaaaggatcatactttcctgtaccttgcctcttcttccctctaatctccttttccatcatatgttcaatggaacgttcatctctgtcagcatcttgcaataaaaaagtctggaaggcctgccaatccccagtgtcagcctctgttccttttgttgccctctctttaccattgtaacattctcctcttgccacttcttcatgattgtcatcagcatcagattctgttccagaattatcttgcttctttgaattaatgtaatttatattccgaatcaccaccttccctgatttccttcttctacttgatttttcattatctctttcctgatcttctgattcggagtcctcgctacaagatgaatgatgtttccgagcctttctttggccagaaccacgtctagaatcatcggtagacggatagggagatggatatggactagctcctggatagcctgggtagtaaggcatgccctgcatcgtatatccttgaaatactggaaaggtgcccggtggggagtgaactggccagggtgcatacatcggctgcggatgctgcccttgcacatattcttgatttccatttggtttattgtctgtaggagacttcgcatctggatacaataagtttcttgaaatgaatatcaattgtgccaaaagcaatgccaaacaatgcaagaaaagatattaaactctcagctactatgactcataaggatcatcttaccactattttcaggtgtcccaggcatattagcag

SEQ ID NO: 72739 - DNA, 252 bp, Arabidopsis thaliana landsberg
cttattaagtaataatatatctatatgatattacacgtgggcctttcaaaacttggccatgacacttaaaccattaatattactattaaacccttaccctgaaatcgtgttaataaacatacaataccggttcttaatccggtcggttgaaccacgttatagtctgctgggttaaatttattaccaaccactaaaaccttaccaaaaaacctaatatgatctcaatcggactgtcaatcgcgactctcaatc

SEQ ID NO: 72740 - DNA, 317 bp, Arabidopsis thaliana landsberg
  unsure (1)..(317): unsure at all n locations
cgacttcgatctcgtgtttctgaaccgcaaacgcaatgctgaactgttagcggatcacaacgaactctacgggcgccaggaggaaacggtggtttcaaaacccggctatgagttggaccacgcgttctccggcagcgaggccattgagcgaaccgaaannnnnnnnnnnnnnnnnnnnnnnnnnnnnnnnnnnnnnnnnnnnnnnnnnnnnnnnnnnnnnnnnnnnnnnnnnnnnnnnnnnngtctttgggcgatggatccgcgctttcaaagggggacctgccccgccttttggagttttcctgggaaaaaccggc

SEQ ID NO: 72741 - DNA, 692 bp, Arabidopsis thaliana landsberg
  unsure (1)..(692): unsure at all n locations
tatcctatactctgatcccatcacatgaggaacatggattaagacacaaaaaagttttcattttttaagagtgtaattgatgggcaaatcatatacacaattagctaaattaacatctccacctaccaaaacactgttccatcattagaactaaaactggtaaaaacaaaaagaaacccacacgcatcgcattacttgaattgataaattcactacaatcaaatcacagttttagacactgaggcaatattgcagaatcggaaaggtttttgattcccaatacgaaccctaattcaaatctcaacgcaactaaaaccatttcctcaatcgtactaattaaggaaagtctcataacattacccatttttcatatttctgccacgataaaagccgacaactaaatagatcagatcgaaacggtgtatcgaaatgattatgaacatacctggaatctgagatatcagatcaaataccaatctctttctcgtcaatcaatttcgaggggacangaattttggaagaaagtgaatcaatagatagacactcttttaggatgtcngcgatgatgaaattcgattcaccgagacgccgtacggatgtaaatcactacgtcgagaaatcaaatcaaatgtcaaattcaaataaaattgggagagaacaaaaaaacatggcttgaatgattgatgacccct

SEQ ID NO: 72742 - DNA, 369 bp, Arabidopsis thaliana landsberg
gggtgtgagcgcaatgcgcttttgccgatagtgcgtatgttccagccgcagaaacagtcttcgctcagcagggcgtccgctactcgtgcagccttttccggcgtggcaatgccgctccatagcgcatgaccggcattggaggaagcgaccgcgcattgttgcttgtggccggcgagcgcaagcgcatagctgccgatctcctcgcaccagaatcgttcgttgaaatgctgctgcaaggctgccgcagattgttccagttcatctgcataagccgcatcgcccaacagcgtggcaaggcgtgcggcatggcgttaggcgtgataaacatagccctgaacctcacaaatggcgatgggtgcttcggcgagc

SEQ ID NO: 72743 - DNA, 580 bp, Arabidopsis thaliana landsberg
gagatgcttgaacttctggaaactcctccacctgtaattttttttacagccttcgacgagtacgcgatggggggggtcgaagcacacgctatcgactatttactaaaacccttcagcaaagatcgtttcgacaaggcgatgacgaagtggttgagtcagcgtaaacagggtgagcctgtgaaaagtgtttcgataccggaaagtatcagtcagccggaagagaagagtcgcattgtagtgcgcgagggtggaaacatccggatcattccggtgcacgaggtgttgtatctcgaagcgtacgatgattacgtaaagatccacacggcgaaagaaatgtttctgaagaagaagacgatgaacttttatgagaatagtcttgacgcatcacaatttgtgcgtgtacaccgctcgtatattctgcagctcgcgcaattgacccggatcgaaccgcttgaaaaagaaacgtacgttgcattattgaagaacaacaccagaattccactcagcaaaaccgggtacacataattgaaagcggtgctagggctgtagaaaaacattcgtacttcaccggttaaattca

SEQ ID NO: 72744 - DNA, 399 bp, Arabidopsis thaliana landsberg
taccattttcgctgaaaaattgcacccgaggatgatcgagcacctgggggaaccattggatatcgagcgggtggcagaccatgtagctatgagtccaagaaactgcacccgggtatttcatgagcaaacaggcacgtcacccgcgaaatatgttgaaaagcttcgggtagaagcggagcgcaaatatttggaagatactcttctttcactcgaacagatcgccaaagaatgcgggctcggcggcctggtctccatgagaagaacttttttacgtcacctgatggctagtccttccgagcatcgcagggcattcagaacctgcctgtcagatgtgacgacttaatatttcattcagatctaaagcatagtaattatgaaaattgcaattaatggattcgg

SEQ ID NO: 72745 - DNA, 308 bp, Arabidopsis thaliana landsberg
aatcctcttgaagttttgggtaatgattcaatgtgaagcaaatgttgcctatacatgagaataaatggcttgattaggtaaatgttagttggagttttaggtaaatgagaagccttttagggacagaaagaggagttggttgttgtatagtgtaaagatttgcttacaatataagctcttgttttccacctgggaccatcatggttgcctcaggtcttgggcttaaaccaaggacctcagggcggctaatccgaaccatttccaagaacgagctcattacgctgtaccgtcctgagctaaaatgtgtg

SEQ ID NO: 72746 - DNA, 462 bp, Arabidopsis thaliana landsberg
  unsure (1)..(462): unsure at all n locations
caactgctcgtcgaagttggctacgaccaagtgtaccggccacgcgttttcgttttggcaccgccttcgtgcgctggcgggccgacagggcgccgcggcaatgcacgatggagcagctcgaacacgaactgcgcccggcggcgctggcggagtttctggctgcctagacagtcagcggccgaacctcagggcggcccttattgatgcttgcgccagcgcaggtcgtaggccgtgcgccaggtctcgccgccgtcctcggtggtccgggccaattcctgcacggtgccgtccggctgggcgatcaggctccagtgctccaggcgctcgccctgcggacgcgggtaggtggnnnnnnnnnnnnnnnnnnncggctcgaccagcgaacccttgtagtaggtcgtgtcgccggaattcgacgtccagaaatactgccacatgtcgtgatcgcggttgtagttgaaa

SEQ ID NO: 72747 - DNA, 524 bp, Arabidopsis thaliana landsberg
gaactcgtgatcctgccggacatcgagaagcgtctggaagccttcgttcttgtcggccatggcatcatcatcttcccgggcggtgccggcacggccgaggagttcctctacctgctgggcatcctcatgcacccggacaaccaggagctgccgttcccggtggtactcaccggcccgcgcagtgccgagccgtacctgcagcagttgcacgcgttcgtcggcgccaccctgggtgaggcggcgcatcgcttgtacgagatcatcatcgatgacccggcggaagttgcccggcacatggtcgaagggctcaaggcggtgaagcagttccgccgcgagcgcaacgatgccttccacttcaactggctgctgaagatcgaggagagcttccagcgcccgttcgacccgacccaccaggccatggccgacctcgacctgcgccgcgagctgccggcccacgaactggccgccaacctgcgccgggcgttttccggcattgtcgcccgcaacgtgaaggacaagggcat

SEQ ID NO: 72748 - DNA, 587 bp, Arabidopsis thaliana landsberg
  unsure (1)..(587): unsure at all n locations
aacaagtgaactaaacacagaagaagaagaagaagacgagacttctaattctgaaacagagagagacagagagctgggaatgggttcttgtacacaatcttcttcgcatggaagattttctgtttctcgtcactctgatatccaaaaatgtctggatctgattttgatttcgcggcgtttcgagttcaatgctaaaacatcgaagcggtttcgaatctctgagaatcgaaggaaaacgaagcgtgtaggttagggaacttaagattacgttgaagagaagcaagtttctcttaaatcgcattcgttgttggtttttggtaaagcgatggagtcacgaatggatcagtacgagcttatggaacagatcgggagaggagcgtttggtgctgctattttagttcatcataaagctgagagaaagaagtaaaattggtttctccatttataaactctnttctttgaagatccttaagttttttatttttgtgtattggtgtgtatttttaggtatgttttgaagaagatcagattagctagaccaacggaacgttgccggagatctgctcatcaagaggtaaaattcgaat

SEQ ID NO: 72749 - DNA, 584 bp, Arabidopsis thaliana landsberg
  unsure (1)..(584): unsure at all n locations
gcccagaaaatgggcgaggcctcttcatccaccagttcgaatatggtgaaagtcccgccaatgtcaggggctggggggtaacgtcccatctgcatcctacccttttagcccataaatggaacgcgccgcctccgcggagatgatgccgtcctccacatcttccctgacttgctcgcgcagccgctggtgcggatcgccgtagccgccaccgccagcgtattccagagtgatcttgtcgcctttcttgaccatcactcggcccttaccgggcaacggtttgtcaccattcaacgtgagccgcgactttgccccatgctgccctccaaagagacccgccggagggtagtcgaggcggtcgaactgcagcgtgacctcgaaagggttgtccgccaccgattgcannnnnnnnnnnnnnnnnnnnncgccgcgctgcttgcccgctccaccgctggcctggcgaagctcgcggcgccagaaaataaaaggcgaaatgcttttcagcacctccaccgacccaccacccgaattggtggggaaacccgtggcggaaagaccgccgagttcgcgcgcgcgcccatgccacc

SEQ ID NO: 72750 - DNA, 470 bp, Arabidopsis thaliana landsberg
atgtatgttttgttctcttgagtttttggtctagactgtgaagaacttgttgggtttgttcttagtcagggtttagctgaggtatagagatcaattattggatagaatctgactttgggcaactcttaaatacagtgagattgacactagactgatcgaggatgcttctatgttttaaaagctaataattctgcggaagaaaaaaatttagtgaacaagatattcttttgcgttattgacatttttttttgtgttactcttaagacattggttgggttccttacataggttgcactgtttgttacgggcccagagtttgaactttcatattcatcgacctcatgccttatccacagtgcctaaatatccttgttaaaacataattatcatcatacaggagatagaagcgttatccctgagtggggtagtacgttccaggtgcgttaacccaataatggtatcaagaatac

SEQ ID NO: 72751 - DNA, 555 bp, Arabidopsis thaliana landsberg
atatatagtagtaacaactagtggagaccaaaagaggtcgattatgtcgagacaaaaaagaatgtgaaaaagtgtaaaatagaaatgaaaaaagattggcagatgaaagggagtatcaaattattgtgggaattgaagtcgcttctatcggataactacacgactaggtattgcttatgcaataagctatctatcacggcacatgagtagcccaagatgttttacttcaagcaggctaagcgatttatacgctacattaaatggaccacaagcttggggttgtatttcaaatccagaaatgaattgggctggaagcatggaagatattagaagcacaatggctatgtgtttcatgcttggaaaatttgttctctttgcaaccacggaagcaatcgatcattgcatattgacatgaaatgtggatatcaaacatgcacgctcttcttgtacatatataatagctcacatactctcattgtcaaatgtctttcaaggatttgtgtaagccatagtatgtataccctcttcatcagcaatttacttataagtttttaa

SEQ ID NO: 72752 - DNA, 592 bp, Arabidopsis thaliana landsberg
cacggcagtgcagccgcaacgattcaaaaagtctgaactactgcgtcagatcatttcgctgttgcggccggcgaggagtccgtatcgtggcggactcggactcccctccgaaatggcgccgcctgtctccccccccggacatccccggcggcgcacctaacggcggaccgcaaggttcgccgtttttattgcgtgctttccggcaacggcgtctccagagcgcaacacggcgtttgcgccgcgttcgagccgcgcagcagcttacggcgactttccctaagctcggaagatcttcatcacgagtctgctcatgccgatcgaaacgctggcgccaccatcaaaatccctgctgctcatggagagccggatcggcttcgagctggcacgttttgcccttgcgatgccacgactgcggcgagaattgccacgcggcagtggtcaagccctgatcattgtgccgggcttcggcaccaccgacgcggggaccgcgccgctttggcaccttctgggccagctcggctactcgccgcacggttggcagctcggccgcaatttgggcatgcgcagcggcgtgcgcgacgcgctcaatgca

SEQ ID NO: 72753 - DNA, 609 bp, Arabidopsis thaliana landsberg
atagtatttgtcagaactttcatatcagtctgatattttgctttcttcattttcttattatatatatatgggctgggcaatgtgtcataggactgaccgactgagtttgaggtttgcatatattagttcatagagttttcagatttctgtggccaattgctcatttccatctgtgaacagttggactttagaatatctgaaaagaaataatttgttttagaacttttatgaagatgaaacttttgatctactagcattttttctattatagtagtcatgattgttgtatttgaatataatcatataatgactgtacctttttgttttaggactttcatggtgattaaaccttttgatcgctttccaagtattgttttctatgtaacggtcacaaattttgtatttgacaacataatcatctttgcttgaacaggcgaagcgtttcacaatgtgatcagtgagttgaaggagcttcctgatgtcaacatttttaatcttaccctaatactcaaggttcaaagataataatgatcttgtgatttctctgctcgtgggtagcttatagctccgttgtgttgataattgcacttaccagccttaactgtaata

SEQ ID NO: 72754 - DNA, 511 bp, Arabidopsis thaliana landsberg
  unsure (1)..(511): unsure at all n locations
tgttggccatgcctttgccgcgactggctgcaatttcaaggcttagtcctaatccatccccgccaaggcccattgaaacannnnnnnnnnnnnnnnnnnnnnnnnnnnnnnnnnnnnnnnnnnnnnnatcggcgctggcaagtaggttgatattcttagccgcgtctaacattaggttttgatcggcggaaattcgactgcctttcacagcaagatcgccttccgttgccttaatcgtcacagcgccgcccgacttcaccagactgccctgatgggtaacagaggagtgcgaactggagctcttcatactggagctaccaatgccgatactgaccttgatgccagaattggcggctgccttttccaggcttccagatttaatggcatccgatcgtagctgctccctgttcgtataatagtgctccattggcataggattgcagcgcataaagtgttttgttgccttcactgtcgctttccgaaatcccctttgtggtctcgatcacgttct

SEQ ID NO: 72755 - DNA, 562 bp, Arabidopsis thaliana landsberg
tagactaagtttttttcataaaaactaattttaagtgttttatcctaggaatatatttttacgactttttcaatctatatttcttaatatcatatattaaataaggttatgacatataaaaaaactcatatgaccactataattaaatttttaaatttgattatttttggttgatgtgtctttttcatggtatcatattaatacctaaaaatttaatattttagttgactaaagacaagtgatattaaacataatggtttaattcatattataagaaatcatataaataactgttattcagtttttcttattgtattttgtttattttttcatatatataaataacattataatcattttttcgttaaatcaaaatccgcccaaacataataatgtcgtgccatttatcttgttttttaaaactactcgcgactgtattttggttatcttattgtataaaatatatttttttcaaacaagtaaccaaaagaaattattggcttggcttttatctctgtttctcaaggttttaaaactgctcgtgaaataagaaaacatgtgc

SEQ ID NO: 72756 - DNA, 416 bp, Arabidopsis thaliana landsberg
acgccgtatcgtcaaaacgcgattcggcgatttcgttttacgggcgcggcgctagtacaggcggttcaggggatccacgtcgttcccgcggagctcgcggcgcgcctctccgatcccgagccggggagacatcaccgcgccgaggtactcccgcggcgcggacggctcgcctccgacgtagcacgcgggtgccgtggtcgcgtccatccggccctcgccgctgtcgttgcagctgtggaggaggccgaggacgtgaccgagctcgtgcagggcgacgctctcgagatcgaggaccggcttgtagggcgcgttgaagtcgtcgaagttcagcagcacgctcgcgccggcgatgcgaccctgctgcacgatccagtccgtctggcccttcgcgtccggggacaggaggcgccccatcg

SEQ ID NO: 72757 - DNA, 320 bp, Arabidopsis thaliana landsberg
ctcccattgctcgacgcaaattctcttcttctattcttgttcatgttctgttcatttggataaaacgcaggggaagacgcggctggtgatggtccagtaatgtccttcaatgattcttgcaagactcgttccatttccagttcatcggcttctcgtaaactttccaatctcgcactttcaatggctttggaatcttgatccgcaacactcttcagcgacaattccaatgcctcttgtaaattatatccagatgctctcgcttcgtccgctcctaatcttgattttgctaatgccaatttcaactgagcttttttcgtctt

SEQ ID NO: 72758 - DNA, 568 bp, Arabidopsis thaliana landsberg
cagttctcagttagttaatgtaatttgattaattctaccaaaaatcaatactccctttattcttagtttatccaattttttagattttttacacatagtaaaaaccaaagaagttgattataaatacatcattttttgtgataaacaattttttataactctaaaaccattagtattcattatcagtaactaataaaatgcataaaatattttaaaaattatatcttcttgaaacttttttaaaaaaaaaacttggattaattaggaacacatggagtattgtataccgaattttcatcctaatcaatgaatattatactattttgtaagttttttcaaaacgtgattcacattcttgaacaatgattagatttttgctatacataaaaaacgtgtcaaaataaagaagaacaatcctaaacaccatttatatgctaaaatcagttctagtgatttatgatgatttttgtatttttgtcaaaagttttgagatgaatttgctatgcaaaaactctattgaacttaatttttctcattcagtcatttatatgagttttttttttttata

SEQ ID NO: 72759 - DNA, 510 bp, Arabidopsis thaliana landsberg
taaccgctcactggaatttcatatgaagttatgtgtctttgttttgtttctgagaaattttgatagaagttgaattttttagggtttaatatatttggcacaagagagacttttgagcttccgttctctgtttctggaaatcactttgacgttttgtctctttccaaagttggaaagagttaacaattactcaagctgcatcatctttgatgtggttggatctcttcaagtgatatttttaattaatctttggttcatgtattcaaaattgttatgtatagaagaaacttatttacacttttgttgctgttaatgcttttttatttagactgagaatccagtgaagcagaaggaacggcttatgaacttcagaaacaggttggtgttttgtagtttgaggtgtgtatttccttcttgttttgttacctcaatttagttctgcattggcagatacttgaactacgagaagaagtggaaatgcaacgcaagagaagtctggaagtggaaact

SEQ ID NO: 72760 - DNA, 589 bp, Arabidopsis thaliana landsberg
ctaagaattatatttaattgcatgtgtatataaagtttaattgcacacatgactctacctagctagctagctatgcgcatatagtaaaaagaaaaaaaaaaaaagtctatgaattgataaataggtttttgaaatttgaattagattgtatatatgacccaacaaaaaataatgtcatagaacatatgatgaaattcgctatacaaattcttttacccaatgtatagtctagttttgcaccatacgtaaatgtttattctttaacgtaaaacctatatatagatttttgcgtttaatttgaactttataagccatacaatacgtaactacattcgtcaagataagttgtttttgttaattatcaacaaccattatttaaaatatgaaaaaatggttaagggttagatatattttattttttgttaaagcaagggttagatatataatatattacaaataacttcaacttcattaaaatacgtcacatgccatgatttgtctaccaaatacaattaattaacttaccgactttctcgacgaaatataaaaaagttatcgaaattatcatctgtgtacacctttaattcca

SEQ ID NO: 72761 - DNA, 174 bp, Arabidopsis thaliana landsberg
atgcacaatgcactgggctatggatgtgtgggggatggctaagcaggtgcgcgtagtgttgtggattatcgacaacttgcttatattttacgtaaatagaataccatcctttatgtaacatctcgtatgatgattatgcgtgctcggatagctactgtagcagcatggcattga

SEQ ID NO: 72762 - DNA, 530 bp, Arabidopsis thaliana landsberg
gcatacagcgaatgccaaggaattgcacccatcagataggattttgccaaatttcttgaacgtcgcggtggtggtcgcgcgaatccatcgaccatatttttgaccaatggcgcaagtgaggccgtgaagtttgtgatgaatgtaagaagaagttatttgacctgttggtatttatttgtgtgcgctcataatataatatgtgttcagttgttgatccgcaacaaacatcaaggctttaacgacggattcttggtcccaatcccacaatatccactttactcagcactcacaactgtgctgaacggaaacttggtaccatattaccttgatgagcaaaatggctgggctttgtcgacaaatgaccttgccgattcacttaaatcagcgaatgccaaaggaattgcagtgcggggattggtggtgatcaacccaggaaacccaacggggcaagcattgtccaaagagaacatgatggaaattgcacagttttgttctgacgaaagattggtgctttgtgcggatgaagtgta

SEQ ID NO: 72763 - DNA, 447 bp, Arabidopsis thaliana landsberg
ggcctttccttcgcgcacctgcagttccagaatttccatccgtttgatttcatcgcgcacggacgccgcctcttcaaactgcagctcggccgagagttttttcattttgtttctgagcttcagaatctcgtcctggattttattgggtttctcggaaaacttcttcagttgctcggcggtgcggtctttggttccctgcagcttgtaggcgctgagcgagccgtcgaacatgtcgccgatgccctcacggatttttttacggatcgtctgcggggtgattccgtgggccgtgttgtactccatctgcagatggcgccggcgcgcggtttcgtccatggccttttgcatggactgcgtgatccggtcggcgtacaaaatcaccctgccttcggcgttacgggccgcgcggccgatggtctgaatcagcgagcgttccgagcgcaaaag

SEQ ID NO: 72764 - DNA, 482 bp, Arabidopsis thaliana landsberg
  unsure (1)..(482): unsure at all n locations
cgccgcggcgaacgtcgccaggctctctgccctgaacactttggacgctggccgatagacccgggcgacggcctggtcgcgcagcccgtgcatattgtcgggatcgatctcgcggccgaggtagtcctgcaacccggcccgcgccgcgaaaacctcagccacaaggcacccgtccgcgcagatgcgggcggagctgtcgaaagcgagcgtgtcggtgagctggaccatggcggcgggagatacggccggcatgaaggggtcgttaccgccgtcagatgaacggcccgaaaccgttcctgatcggggtgaaggcccttggaccgagtcttcgggccaggccggctgttagccgctcactttcaggcaagcgatcccagctgaggtcagccgcgcgcagatcgaatgcgcagcgggcccggacgcgcgcaggcggaagaccctggcggagcggacggtcgcggnnnnnnnnnnnnnnnnnnnnn

SEQ ID NO: 72765 - DNA, 608 bp, Arabidopsis thaliana landsberg
atccacttgatggaggcaagtataaaaatcaagcgccatggtttcttattttagttcttctaggaccacacaaatgcgttggtggagtagcaaacaaagataacaaatatggactaacaaaaactcattttcttgttctaatatggactctactatctttacagttggatcatgcaattttcaaaagataaattttcttttgataagaaaaataaaacttgtgttttaataaatttattttacaaataagatataatatagcttttagatagtttttaaataattttagttttcttcaacttttgtgactttagaaggtgagattttagtttatataatatctctctccataaattttatcgctgcaataaaagattttctatatggtaactacttgggtgtaatcaattaaaaatcgtaagaaaaaggcaataaactttgacatatagaaaaagccgccaatcaatgaagaaataaaacgatacatatgaaccttaaaccaaagtgatatatatgtaaaaatttcaattataaaacgtttatagccacatattttataattaaaactgggttcttacatatatttatttaatattatctatatatca

SEQ ID NO: 72766 - DNA, 533 bp, Arabidopsis thaliana landsberg
  unsure (1)..(533): unsure at all n locations
cctctcgntttttctcgttttctttctccagaattttttgatagatagtagacaaaaaaacttaatgggaagatcatcgtcatcatcatcgttcaatatcttcatcaccacgatatctgtctctttccttttctctcactcttctcattaatttgtttcttgattattttacatgggtgtcgtaattttcccggtactaatattgtttttaatttcgcttcccaccgttacgcgaatagttattgcgacgagatttaggttttttatgaatcttatttgtttccctttttttttttgaatttattctgtagatttactccactgtaaccagctgcgtttttgtttccgcctctcaattccaggtaatctttgattctcccctaattttgttgctgaagagatttggaatttgaaacaagatattgagttttctgaattgtggtttcagtgaaaccaaaggatctagacaatggagaagaagaagtatccaattggaccagagcattatactctctacgagtttattggacaag

SEQ ID NO: 72767 - DNA, 446 bp, Arabidopsis thaliana landsberg
caacggcgtaaagtctgagctcgtcacgatcgacggcatgggctgcccgcaggaaaccctgaatgcctttctccttgccaccgatcagggcatccgctacgtgacccagggcaatagctcggcggtcgccgccgcgctggaagacgcggtcgggaaatacaaccgccgccaccccgatgcgccggtcctgtatttcaaccattccgccatcgacaatgacctgacgaacagcaaatgcaatttctggcatttccgcttcgatcccagcgtcgatatgaaggccgccgccattgtgggcgagttgttgaaggacaagaagatcaagtcggtctacctgctggaccagaactatgcgctggggcagcaggtctccgacgccgcatagcggattcttgcggaacacgacaacagcatcaaggtcttcggtgacaaccttcatccgatgg

SEQ ID NO: 72768 - DNA, 352 bp, Arabidopsis thaliana landsberg
agtggaagggattgatggaaagttgctggacgtctgagctcacagagagaccatcctttactgaaatatcacagaagctcaggacaatggctgctgctatgaatttgaaataacttaataaatagactcaaaaaaggaagaataaagatgatgatgaagaaaaagaagatggtgatggtgtttacttggagattaaaggcttctatttactttgctttttttataaaaaagtattagttagcctattttgggttaccacttggtttgcgttgggaacgcgaaaactagcgttttgtgggaaaaaaaaaaagggggcccccctttttttagggagatatagttttatgattaa

SEQ ID NO: 72769 - DNA, 529 bp, Arabidopsis thaliana landsberg
  unsure (1)..(529): unsure at all n locations
atcgttgactcgacgcgcgacccgatcgacctaatcgatcgaatatccggcctcggcagctgctctttcacaacggaataccgggaaatcaccggcgatgccacggcgtttgtcggcctcggcagccgacgcgctcgcgatgtcgtcggtgacggtgaggaaccgcgcgtcgatgccctcggcgcgcagttcgccggtcgcgagaccgaagttcatgacgtcacccgcatagttgccggtcaacagtagaacgcccgaatccccatgggcagcacgcgccaccgaaaccgcctggctcgcggacggcgaggtgaacacgttaccgaccacggccccgtcggcgaatcccggtccgaccacaccgcagaacgcgngatagtgcccggagccgccgtcgacgaccacagccaccttgcgngcggtntnngggggggcgcgcaccacgccaccgggaacgccgacgacgtatcgggagtggggcgtctaggaagccggctagcatgtcctcggggaagaagcgggatcgttg

SEQ ID NO: 72770 - DNA, 340 bp, Arabidopsis thaliana landsberg
ctcctgggaagacctcgagtggcactccctctttttttttttttttttttggggcaaacactttaagactatatcttttataccccgagggcccaaacgggatgtgagaccccttgcgaaaacccccaaagaggccccccccccaagagaaacgacactggggcacttccccatggactttgtcggaacccaaaattgaccccttaaaacattttttcgcgcattatggatatgggcgctatttcacggccccaaattcactcttaaaagctgggttttaaaaaatttcaaacgctaaaaatcccgaaaacaagaaaggggatttccatacagggggggg

SEQ ID NO: 72771 - DNA, 550 bp, Arabidopsis thaliana landsberg
tcttcatggccgcggcttgattatatatttgtttaatcctgatttagttgatttgtaatgggtttatcttcatacttgttgtaaacttttcaattgctgaataatgttaagtaaagtatgatttttttcgtaagagtgatttattaacaaaaagctctgtttaagtacaagagtttcttcaattagtttctctaagcatcaatctcggaagtacaagagttaaatatcttaagacgatgacccaatcgaaaaggttgcgtctttaagcaacttctctgagtgctgttttaagagttttgggagttgaacatcttcctcagttgcattcttttgtaattagggaacaatgctgtgtcgctatcaatacaatatcgtcttacttgagttacttgtttctgttgagagcttgttttatttctgtccttgatgatgatttgttcgaattattttaggggggagcttgtgaaggagatcctaacggagggaaccaaacttgttcaggaaatagcccaataaaatttcaactttcctttctactgaacaaatgatg

SEQ ID NO: 72772 - DNA, 547 bp, Arabidopsis thaliana landsberg
  unsure (1)..(547): unsure at all n locations
aggcggtgagctgggcactacagaaccgcgcgcacgggttattcggggccagcaggtcaggccgaggcgcacggttcgcccagatacgggggttgcccgcggcccccattgtagcccgccaggcacgatgtccgcggtgttctgaaggtccgtgccagaatcctggtgggcgacggacaccggaccgtggcccggccgacccggccggcgggcccgccgcgacgctcccccgactggcctcgcgggcgagccaggcgaccggccgggcctgcccggcgttactgtcagtannnnnnnnnnnnnnnnnnnnnnnnnnnnnnnnnnnnnnnnnnnnnnnnnnnnnnnnnnnnnnnnnnnnnnnnnnnnnacataaaccgcaatgcggcgagatccgcgcgtaaacctcacgtaatgaccccgtgacgcggccccgctgagattgtcgcgccacctcgccgggcacacgggagtganctgcgttataaaaccgaatccgtataaggctttccagcgtgcttcatcatccttacgatgttctcactctgga

SEQ ID NO: 72773 - DNA, 596 bp, Arabidopsis thaliana landsberg
  unsure (1)..(596): unsure at all n locations
atactaataccagaccccgataggaaatatcgaggtttcctttctggtcataaccaatatcggtatagcgcgagtcatgcctttcctgatgaatgtccacggtttgccccagaacagctgtttcaatttgtggttccagacccgatgtgggaattgcggcctgcacctggctgctgagtttattcatgctgttttcattaaaaggaagagtcgtattatatatgtactcaacactggagatcaatccgcccgtaggcgtattgtcgttggccacttttacctggctggtcattttcagtttacccgccatgtcgttgagcacaatgctgtatccctgactgcgtgccttcttggcttcgtaataggtgtatataccaggaacgatgatcggcaccaaatgtgtttgctccggattcatatccgtttggtcagaatagatcgggaagtccttgggtgtataaaactcataaatggtagccggtgcggctgcatnnnnnnnnnnnnnnnnnnnnnnnnnnttcgctgncgcatggtccttacccaatgagtaaacggttactttttctgtaacccatcgatgcgcccgggtaataaaa

SEQ ID NO: 72774 - DNA, 455 bp, Arabidopsis thaliana landsberg
acaaaaccatgcccgcttaccttgctttttttattttctactgaaacgatccttggacgtggctgcgctaatgtgacacagataaatggaaataaagcttcgaatgcagcaaagatacaccaaacagagtacatcggagctactcataaactaatctttaacaacccgaacaatgaagcgctttgatcggagctgaccaccggaagcgccgccgaagcatacgtggctctcgaaccgcctgattattagtagacagctggaatccggcttgatgccaaaaagctagtcattcactcgccaaacatacataattgttaataccaagatagctaagaagaaggagcttcatctaagtactcacagacactctcttgacatgtaggagcgaaacgcactatgactgtgaacatctatagacacctctttctcttaagacacacgatcgcatcaatatt

SEQ ID NO: 72775 - DNA, 4441 bp, Arabidopsis thaliana landsberg
acattcctaaaattctttcccccagggtggcgaatctgcttaccctttaccacgacatctttatactttttaagttcacccaaagctgaacttagcagctttgatttttgcagttaagaatacttcctactggcactccttccttaggtagaagtgtggcttctgtctttgacatactgggtttcttatacagaacatggcgggtaatgagaacactcaaaatcgagcagctcagactagagaaggaaggaagcagctctttgcagttttgcaaagtgctaggggatcttcaggtgaatcttgaacactaatgttattcaaacataacaattgatactcttcttaagctgtatggatgtgtctcttgagagtaaccaatcctctgttaatagtatgggttgtgggttcgaccagagtcgttcgtatcaatatccggctttctaacatgtgagatgattaacagcttctgttctaaaggaaaagctttcgtctatgggttcctctggaattttagccgagcatcaacttcaagctctgctacaggagcacaaggggtaggtggatatttctcatgcaatcactgttggaaaatttcgcaaaaaaaagttactagcatgtgctgtgaattccgtaccaaatgactcaaatttcatctgcttcatagttcactctgttacttttctacagccagagtcagctaacaatttcagatatcgcacggaaggcgttcttgtatagtgtatgactgctttaccttcttgcttagacattatgtttgttttattatttggaactattttgagcttagtccatgaattaatccgtacagcattttatggagggtcatgccaaaactgctccaatatcaaggttaccccttattacggtcgtggatacaaaggatcaacttaaagacattcctgtttgccaggcatgtaactgttgtttagtgtttcttttctgtagtatctgatttatgcctgactgattggattatctgacagccatttcatttggagctgaatttcttcaataagccaaatagagttcttcattatcctgtgaggtccttttatatcgagggccttaacctcatggctcacaatctctgttctggaacagacaacatctacaagaagctgtacacatcggtataatctgatatcatgtgatttcgttttagtttttggtttccttttacttacagaacttttctgtttcagatccctggaaatgttgaatatcattcgaaacacattgtttacagtcgtaaaaggcacctctttctggttgtctttgagttcagtggtgctacaaatgaagttgtgctttactgggaaaatacaggttcccagctgcataatagcaaaggaagcactgctaaaggtttgtctaatcattggattcccttgctattctttagagaacttcctatcctgcctcataacttttagttttgaaaacattaaacggtatcatactgcatccagtcatttaaatataccaggggtacaatgtatgctataaaacagtagttactaacaatcaaggaagctgaacgtttcaacgaatgatctgtttacttgatagagatgcaagcttagaattatttaagccgttcatcctttttgttttcctatgtttccaaaggcgtaaacgaacaagagaagagtaacctcaaagctatacttttttggtatgcaggttgtgatgctgcctttatcggcccaaatgacgatcaatttgcaattcttgacgaggataagacaggactgtctatgtatatcctcccaaaacttaccacaatggaagagaatgagaagaatttgttatctgaagaaaaccaaaagaaagaggcggatccttctggaattcagggtccacaacaattcatgtttgagacagaagtcgatcgtgttttttccacaccgataggtgatgttgcatcagataatctcattcttgaagttacagataatctcattcttgaagttacagataatctcattcttgaagttacttatcaattggagcatgccattgctaactgatgcctctttaaattacagagtccactctgatgtttgcttgtaatggaacccaaattgggctggcaaagttgtttcaaggctaccgtctctcagcttcagatggtcattatatttcaacacaaggtgagggacgaaagtcaatcaagttgaagaaacatgaaatagctcttcaggtatgcaacatctattataacttcgtactgtttattagtagtttggtgggaaattttccaaccaaataaacttttgatatctagtatttgattctatgaccagctcagtaaatgcagtcgttttattccttaccctttaatgtggtttacatctggccggttctctttgaaattaaaacgatcatgttcagaaaattgactcgtcatgttggtgttagcgttctattgctgtcaaaaattggttgaatcgacaattgatattcctgaaattttggtcaatcaacttttgtattacgtagagattcttagaatatgttttagatttctaaagtagttttttccatcaattgtataaagaactaattgttgtctcaaaatgtacaggttcaatggcaagaaacaccccggggatatgtcgcagggatattaacaacccaaagggtgctgatggtgtctgcggattttgatatattggcaagcagttcaacgaaatatgatagaggcttaccatcaatatcctgattaaactatctttcttccctttcaatcatgtgcattatatgctaacactttttagatgcatgctcattgactattgaaaatccttaacttatgcgtactttagatctcttctatgggttgggcctgccttactcttttctacaacaactgctgtatgtttacttggctgggatgggaaagtgaggactattctttccataagtacaccatacgcaggtaagtagatcttgattctctatatgcttaaggtgattttactgtatttcattctctgaaatttatcctcttcaacgcagccctagttggtgccttgaatgaccgcctattgcttgctcatcccactgatataagtccgaagcagaaaaaggggatcgaaatcaagagctgccttgttgggctacttgaaccgcttttaattggattttctacaatgcaacaaacatttgaacagaaagtagacctttctgaaatattgtatcaaataacaacaaggttaccccctttccttttttctttgcttacacgttgttacatatttaatgtcaaatactttggaataggtgtgcaggatacatcaatgagtttctttgtctctttccctagctatctttattgactgcattccatgctaactatattagcttctttttttatatatataatggctgcaggtttgatagcttgcgaattactccaagatctcttgatattcttgctagaagcgctccagtatgtggagatcttgctgtatcactagctcaagcaggccctcaattcaaccaggtgagtcgagttcagtagatcttatgaccagaactctcccccagaagatgtgttctcttactaaacggttttgaaaaaattaggtattacgttgtgcatatgcgataaaggcgcttcggttctccacggcattgtcagttttaaaggacgagttcttgcgttctagagactatccaaaatgtcctccaacttctcttttgttccagaggttccggcagcttggatatgcctgtatcaagtaagtaaactttctttgcaggacatatgtagcatctgaatatctaaaaaatatagttagttattgttggatggcctattcaaagctacaatatgtgtgggagttttagcgtatcttgaactggaccttgaaaagttaatctcaagtatttttaccgcctccccagtcactatctatagttagttggaactccgatataacacttcttgatccttgtacctaaattacatccctatgctagtttctcatggcaatatttttggcaagcttcagtcatctaactactttgtacattttgtactgtagatatggtcaattcgatagcgcaaaggaaacttttgaagtaataggcgactatgagagcatgctagatctttttatatgccacctcaaccctagtgctatgcgtcgtcttgcccagaaattggaagaagaaagtggagatcccgagttgagacgatattgtgaaaggattttacgagtacggtctacaggatggacccagggaatttttgctaattttgcagctgagagtatggttccaaaaggaccagaatggggtggtggcaactgggaaatcaagactccaaccgacatgaagagcatacctaagtgggagcttgctggggaagtaatgccatacatgaagaatgaagatggaaccatcccctcaa

SEQ ID NO: 72776 - DNA, 518 bp, Arabidopsis thaliana landsberg
  unsure (1)..(518): unsure at all n locations
tcctgttcgagtccgggcccttcgaggtcgagcgcgccgatgatgagcggcttatcatcaatgaacgcggcgcgcgcttcctgaccgggacgccggagatgttcgatctggagcagcgcatcgcggccatggatgcggcaggtatcgacgcccaggtcctgtcgctgtcaccaccgcaggtctatttcaaggaaggtcaggaggccgttgacctggcgatcctcacgaacgaccacctggcggaaatggtccagcaacacccgacgcgctttaaggcgctcgccagtgtaccgctgaccgccgacatcgattcggccatcaacgagctggtgcgctgcctcgatcagctgggtatgcccggcttcctgattggcggcaatatcgacggcgcgccgatcgatgatccgcgcttcgatccgctcttcgaggaggccaaccggcgcggngccgtcatgtgcatccacccgatgctgccagccggtgcggaacgtatgacccagtacgcgctggcacccctg

SEQ ID NO: 72777 - DNA, 249 bp, Arabidopsis thaliana landsberg
  unsure (1)..(249): unsure at all n locations
taactttttatttttatccgtntgataagttatgttggtatctatttgctatgttttctattgctgccaaaagctggaaagagaacaacaacagatgctgtggtggagcagtccgttaaggagagagaggaaaaagaaaaaagaattcaggtattaaaaatctttttttaattgtggctctttaatttctgctttctgtgagtttcttaatcacatatttaaaattttattgttatttctgtattatta

SEQ ID NO: 72778 - DNA, 280 bp, Arabidopsis thaliana landsberg
aaaatagccaaagatgtgtgcaacttcgtaattacataaaaatgtggagcatttccgaataagtccaaatatgtggagcaattcataaaatacccgaagatgtggagcactttcgtcaataacaaaagatgtgagggcaatttcataattagacagaaattatctaactaagccgtaactaataactcaagagatgaggcatgaatggatcatatgctatacgattatattggacagaaaatgaaaattttaaaatggaggttttttattgcaatttttg

SEQ ID NO: 72779 - DNA, 518 bp, Arabidopsis thaliana landsberg
cctggtacagcaacagcgtcgcggcggtgtcgaaatactgtttgttgttctggaaggacggatcacgggttacgagcgctgacgctgatggtatgcggccggccgttgtcgagcaggccggcgaagggcgtgacgtccatcctgtacggtgcgaagttgagcgtctgcacgccgggaatgggccgccacaggtacgggtcgatgccacccgtgaacacccagcccgagatcggcacgatgccggcgggcttgccgtcgatggccacctcggcctcgcggaacgccgtgccgccgcagcccgtgaggtcgacgtactggtcggggccgcaagagtaccagaactcgtcgccggactgcggctgtgcggggatctcgatgtaggcgcgatcgacattggtgggcaaggtgaaggtgctggacagcggcgcgcccgtcgtggcgacgtcggcgtggccgggacttgttgcgtcggtcgtcagcgatagcacctggtcgggtacgcgtggccgcaggaatgc

SEQ ID NO: 72780 - DNA, 595 bp, Arabidopsis thaliana landsberg
  unsure (1)..(595): unsure at all n locations
cagacgacacaatcaactaactctaatttcacaaaatgactctttaagtttattaagcatcagcatatcgattggctttgcgaaaacatctgtgttgatttgtggccacttttggtaatgcctctgaatccatagaaggcatctacatatatcctgaaaatttatatgtagatatagaactttcagtatgcaatgtagctcaagagaatatgaaaacagagaaatgatacatatatacttacctctcctccaaaaggtaaaatcttttcagtatttggcaatgagaccccatcctgcaaaccaaatcaaatgaacatatataaaacagttataataacaaaatgataatttctcgcattctgataatacctcgacacaaactactgtacttgtctgcgctcctatattcacaatacaagctgttgtcaaaccattcccaaaaacggccgatagaccttcttggtggacaactgctgagntaaagtatagcctttccaacactatagttagcatttcctttatttctgaaaatatcatgaagccaaaatcagatacgagttcacatcgacaagaattattagattgactgtgaaaa

SEQ ID NO: 72781 - DNA, 555 bp, Arabidopsis thaliana landsberg
tccaagggcaacgcgcgggcctttaagtccgtgcccatgatcccgcagcaaattgcgctcgtccaagcgagcttcgccaaggtggtgccgatcgccggcaccgccgccgacctgttctacgaccggctgttcgaaatagccccggacctgcgccgaatgttccccagcgacatggcgcttcagaagaagaagctcatggtcatgctcggcaccgtggtgaacgggctgtcgcgcctcgacgcgctgctgccggtcgatcacgcgctgggcgagcggcatgccagctacggcatcgagcccgaggatttcgcgccggtcggagcggcgctgctctggaccctggaacagggactgggggacgatgtcacgcccgaagtcgcggacgcctgggcggatgtctacgaaattccggcgcgcgccatgatcgccgcgatgatccacaagcggtggaaagcagcggcgtcaccgtcttgatgccgcacgggcaaccaaagggtccaggaggtctgctctactacaggcggatcgtggtgcgctctcgtgatgggggatgag

SEQ ID NO: 72782 - DNA, 105 bp, Arabidopsis thaliana landsberg
gagataacttatctctctttatatctcaagagtatatcaatcgatatgcaccgagaggttcctcatgaaaacctcttccgcagtgattccctgcttacaagcaaa

SEQ ID NO: 72783 - DNA, 726 bp, Arabidopsis thaliana landsberg
cttacagtattctaatatttacgaatttagttaggttcttacgtgagaccatgacccaaggcacaagccacattttttgtagaaagaagaaacaaacagccaaataagtttttttaaaaccaataatacaaaattgactcttcttttgtactacttctcatattttcaacaaacaaagatgggctcattaaacagtaaccaaaaaatgataaataatgaattgataggctcaacatccaaaagtaaacttcatatggtgtggtgctttaaataaataaataaaaattcacaattagtttcattaatccataaagaaatttgacttaaaccaaatcatgtattggctcaagagatgccattcccttacatcaatgtttttgcctacctgtctagctcttgccaccacatttctacttctacaccttttgtctatatatacacaccaagaaaaaagaagagaatatatatacatatctatagtgtgtgtatgggccattctcatcttattatcttattttgggaacagtctaatattctaacatctaccattccttcttactataattttcaaaataaataagtatagttttcgctgcaaaataaatgtcatttttaccacatgatacacttttttgtttgttaaagatctatgatatacacgtatggatatgtttaaatataaccttcggtttgaaaaaaaaccgaaaccaacttttttttggttga

SEQ ID NO: 72784 - DNA, 318 bp, Arabidopsis thaliana landsberg
caaaaacgatgagctttatcttaacttggttctggaatacgtttcggaattggtgcaccgcgttatcaaacactggaacaaggttaaccaacgaatgcctgtcgtatatgtcaagctttacacttatcaaggacattaatatccacaaagggtgcatacaaatcaacatttctcattagaaaacttggctagactcttgtatgcagggcagatttttaggaccttatactacattcaccgacgcattggcgagtgtaattgagacatacaacctcagaactagtgggtgaatccacacactcattaaatgaaactatg

SEQ ID NO: 72785 - DNA, 530 bp, Arabidopsis thaliana landsberg
tttgtttgataaaggtatctataaacacttgtaaatgttttttaacttaactttagcattgaaaagtgaacaaggaattattttttcatgatctcatacttaaacagacgagtggcgagagcataatacacgtgaaaatgataataaaacataagtatgataaagtgataagtaacggaaatgaaaatctagtataagttaactggactactagatgacggtttatgtacgtttaccgatatacgtatgtgttttgtctacactttcgtatcgtatgttttgtgtaacttgtacaagtcatacgcacacgtgtcttccttccacttgatagtctctctgttgataattagttgttttatgcgtatgtttaaatttaaaaatgggattatattattttttattttggttactactatatattgatttcaaatgcaacgccgtagatagtattagtcaaacaaacaattaaattaaagtaaacgttttgatttagtcatacgacattgccaaaaacattaaaaaaaatttgg

SEQ ID NO: 72786 - DNA, 749 bp, Arabidopsis thaliana landsberg
tgtgcggtcaaatgcatcttggcgagcatcgcaccgacagcggcgcaatgcacgggggcaggggccatttgatggccgccttccagcttggtcaccagcgcggcaggtttgccgttcagtgtatgcagtatctcgccacgatcattggcaatcggtgccggcacaagtacgcctcggtcggccaggtggcgcatcaattgcaggtaaaacggcaactgctcaaacgtcaggttctcgaacagcgtcagcacgaattcgcctgcttcggtcgtcacaaagaagttgctgttttcaatgccggatgaaatgcccttgatggcgagtgctttaccaagcgggaattgcggcatccattgatcaaggtcatgcaaactgaccggagtaaatactgccatgatgagtgagatttaaaggcgaaaaacggtcagtaaaaaagtgtatttacaccacttgctgtgtcacatatccggcgcatcgcacgcaggttatttcttcgctggtttggatgctgcaggtgccggtgggggcggcgcaacgtctactgcggattcatccggtttctatttcttgccgaattcataaacctgccattgtgccgggcgcgactgcggggtttttccatccccgggcaatgcgttgcctggtgccggtttcacgtaatacgtgttcttgcccttggtgactttgacttccttcacctggccgtcaggcgcgcgcctttcggtaatggtttgcttgcccttttgctc

SEQ ID NO: 72787 - DNA, 563 bp, Arabidopsis thaliana landsberg
gacctcctactaatttttatagaatgcaaagagtttatcattttgataactacgctttccacggtggattcggcggtgttgcttgacaagtaaagtactagacctttgtgttgatattctccaagaagatcgcttagcctgtaagattacagacgtctggcaaacctgggatatgcttcgaaatgagtggaaaaacaccatcgaagaggtccgacgatacgtttttgccacagatacaacgcaaactaccaattctaagcttccttggaagaataaaacaactattcctaagctttgtcacattcgtgataacctttacgccaattacacttctgttctctttccgcaaagaaaatggttaatttgggaagctgatgatgcttcttcggcagaaagccagaaaagagacgccattatcaattatatggcttgggctatcgaacaaccttcatttaagaaggaaattgataaggttattctagattatatcgactttggtaactggtttgctactggtgattgggctgatgaacgtatcgtacagcctgatggacgtactcaag

SEQ ID NO: 72788 - DNA, 311 bp, Arabidopsis thaliana landsberg
cacccatctgcagacatctgatgcatctgcagtggctttattgtccgtgtgtcagtgtccttgctgcagggggggttttcaggtgcattcaatttatcatagatcaccaacagtagcagtagcattcggcaattaccctacgtctcgtgtgcccgctaagcaccttttccgttcaaaattgctgctgcctttttctcctcttgttgtcctacatgctcaaaacgcacaccctgcagtttcattttgcgacacactacattacaatttcgttttcactttttaaatcgacagcggaagcggatatgttctac

SEQ ID NO: 72789 - DNA, 563 bp, Arabidopsis thaliana landsberg
  unsure (1)..(563): unsure at all n locations
gctatattccttctgccggcgcaagccggatatggctttaaattgccgtcgtaataaaccattcggaccggggggcggtacccggcgcctccacccaagcccagagaatgattagcgaattctgggtttcggcgggggcgaaataggatcgacgagggcgtaaagggcgttgcttttgctcggcatggtaccaccgatatcgggccatctgtgtagttgcgaatgacaactatgctccggttgctcaggccgcgtaagcggtttgaaaaaccacacttaaagtcctgacgggttaagctccgtcaggcggggttcggaggcacctggcaacagaagcctccacttaacttccccatttacttgaagttttcgcggttnnnnnnnnnnnnnnnnnnnnnnnnnnnnnnnnnnnnnnnnnnnnnnnnnnnnnnnnnnnnnnnnnnnnnnnnnnnnnnnnnnnnnnnnnnnnnnnnnnnnnnnnnnnnnnnnnnnnnnnnnnnnnnnnnnngtgcgctccgtcttgaaagacgctgcggcacatggacttnccggcgagcatcatt

SEQ ID NO: 72790 - DNA, 465 bp, Arabidopsis thaliana landsberg
caagacccggtaggcactcgcgtactctttttactccgttttaaggctacaatatactaacgggtctcggggcttcagaccaattgaaacgccaccaacggacgacacacaaacaagacataacctcgtccctcccattcccgaaccccgaccatttcagtctatcttcttttgctggcgtctaacgaaccaccttacactctgatattatacacgattgacatgttttatacgaccttacagtctatgatggcgctagggcgtagcccgctcttccttgtatgaaggcattggatgggaactgattggaataaccttggactggatattgtcgctttctgatgtacgaaaaaatatggcttgtttgttgctgaccagactccaccttctctggttatgctacctataaatttaatctagtggtttgatgagtgatataatgcttaatcgttctatttattgacc

SEQ ID NO: 72791 - DNA, 510 bp, Arabidopsis thaliana landsberg
  unsure (1)..(510): unsure at all n locations
ctatttccgcaccagccagcctgagacgatgatgatgacggttcccgcgatcgtatagggatcgatcggggctgcgaagagcagcaagccgtacaggcagccccagatgatctggctgtattggaacggggctacgaccgatgcctcgccgacgcggaaagcccggacaaggagagcatggccggtaagnnnnnnnnnnnnnnnnnnnnnnnnnnnnnnnnnnnnnnnnaaatccatcggcaaaaggcccgtgctgccgagtgccttcacgagggtcaagggtcccatgacaacgaacaaggtcgccaccagagcttggtggttttccgcacccttggcacgtcacagcagcagaagggaaagcgcgaagaagattgtcgaggcgaaggctgtggcgtgaccgatgccaagtttggccgcgccgggcctgagcgccaccgtaaccccgatgaaaccaaacacgacaccgagccaggcgagtcgcgacagtcgctcgccgagcaagagaaa

SEQ ID NO: 72792 - DNA, 555 bp, Arabidopsis thaliana landsberg
  unsure (1)..(555): unsure at all n locations
ccggccgaaaggcgggataagcggatgtcatagttttgatcgttggtttgatctgtatctccatttgaggagaaatacatagtaccagatttcgtaaatgacatataatactcattcttttttgtattgatagccgggccggcatttaccggcgtttgtgaccaaccttctttttgacgctctaaataccagatatcaaaatctttcttttctccttttctattttgtggctgatcagatataaaatacagccgtttctcatcgggtgacaggatcggatcattgtattcgtaagcatcgctagcgatcactgtttgaggtgttgtccaggcattagcaacaaaccgggtccaccggatctggggtttatcattaataattactgcataatagaactcggtactatcttttgaaaacgtagacccgtattcataatgactttttgaagaaattaaattaggggcaaataaagtgggtaccgctccgggaagcttctgatttaaatataaagagctttcttgtatagcttgtccgagaagtgcattcngggaagcg

SEQ ID NO: 72793 - DNA, 749 bp, Arabidopsis thaliana landsberg
tgaaagtcatgtcctgtccttttgggtgacgtttgtcattttcgagcacatgaacagaattataagcttagttcgctataagacagaattcagattaatttactacgtactattaattattttgcaaaaaaaaaaaacgatttgcagaaattccttaaatttaatttggaaatttattgccagaggagattttaatgttttaaacatttgaagacgtcagttgtttttcaaaaaaaaaaaacctaaaacgaataaatctaatggtattgtcgaatgaatgacccattttgaaactaaaaatgttgagtgaatatttcaactctgtccacatcatacattacagatcatgtggtcaattacagatgttagttataattgtatatcactggcttaaatttttagtatatgatattaatcagaattatttgatttcagtattatctaatgaaaagtaggtcgttttccaattattcagcataaaatacgctaattttgtcttgaatcactagaaacaaatcaagacttttgtctctggacaaatcttgtctcccaacgttctcccctaattatgttttatcatcacgttaatttgttagaaaacaaaatccaaaagatttcataatatataaacagaagatgttaaattagtaatcggtcttctgttttattataatagaagggaagctttcttattaattacctaaattacaaaaaaaaaacattggattaaaaaacaattaaaaacttta

SEQ ID NO: 72794 - DNA, 614 bp, Arabidopsis thaliana landsberg
  unsure (1)..(614): unsure at all n locations
tttgtctctcttctttttctggttttcgagttttctttattattatgcattcaatatatcatatcaaaaaaaggcgtttacaggagtatactagtagtaaaaagtaatagcttttataatttcagaagaaaaaactctgaaagatgtcgaccggaggaccccaaaaattagaagcacaaggaggaaaagaaggcaaagaatgggatgatggagccgaacacgatggtgtgacgaagatatacgtagcagctggtggtcttggaattgaacaaatcagattcgattatgtaaagaacggacaaccaaaggaaggatcttttcatggtgtgaagggtagaagtactatttctacgggatggtgncttttttttctttctctctctntaatgctactataccaagttaatgtgtattctagctaagagtagtaaaaatatatgtttaactgaaagaaccgaatctatagtttaatcgagaccaaagccatattagtgaaatatggtttcactagaaatagatccactataatgaaagctgatatttagggagttcgtaccgctaatcgctatcntaaccacttaccgtagttaagaatactttgtttttttttaacg

SEQ ID NO: 72795 - DNA, 545 bp, Arabidopsis thaliana landsberg
  unsure (1)..(545): unsure at all n locations
acgaccctggcacttcccttccgacgcctcactagacgagctcatcgtttgatgttacgacctctggcccgcgttcgactggaacctgtgcaagctgatggtggagacacggtcacggcggccaggggtgaaagcgctcctcaagccccgcgatgacggcgacctcgagctgtcgctgctcgacggcaacacgctcaagctgctggcgcagaagcgcagcgacatcgagggcctccacgccgcggcagcagcggcatctgcccagcaggcccgtcgcgccgccgtcctagaccgcgcgcgagcccgcgccagcggncgncaccaccaacaacaaccgcgccagcgcgaccagcagcgggcgcaagaggacgcgcagtacaccttcctcacggtgcgcccgctcgcgcacctgccgcggnccgagcgcagccgcgcgatgctggagcggctcaaggcggnacccgcgatcccggcggcgatgcgcaagcacaagttcagcgtgggcctgctgacggagatggagctcctcgcgaacacggagcaca

SEQ ID NO: 72796 - DNA, 561 bp, Arabidopsis thaliana landsberg
  unsure (1)..(561): unsure at all n locations
ttctccaagcttagcatgttaattgaatacttttctcggaagtttcgactaatcataattatactccaattttgggcaactcataattaattcatgggaaattgacagtggtggtagcagaatattaagaaaaaacttgtggtacaccgggaaacgcaaatcgagaaagatccgagaactcttcaaagatccggctaaggtcgtcgtgcgcggccgtgggagtttccgccccttggaatatgtgcccagcataaagctcccacagggaaagccttggtgacagtgaatttggaaatggaaacaagtcgcggaagcttaaaatgtcatacccttcgctgaaaaagaccttttctcgcgattcgtaggttgttgtcgtatttcggactcgcccgctgttgcgtgaggttcggagtctgttgattgcgtntagtaccaccgttgcccctggaagtcttgcttgaagctgctccaagcacgacacaagcatgtcaagctcttctgaacagtagttatccgattccagtgagctcttcagcgcgttgtaaagaagcagcggtattg

SEQ ID NO: 72797 - DNA, 599 bp, Arabidopsis thaliana landsberg
cgcggaaaggcccgtctcaccagtccgtctctgcgaagggcgcttttccccccattatgacgtcaccatcggcgttgaattcggctcgcgcatcgaccccgtcgggcctccccactcgaaaccttcctcctccgccgttacagaccccgacgctgccgccgagtccgccgatggcctgcctgaacctccccgggacgactccgccacccctcagaagcacatgaagctgagcctctgggatacggccggccaggagacgtacaagtccgtcacgcggtcctacttccgcggcgccagtggtgccctcctcgtctttgacctgtcccgcaagcagaccttccagcacgtcaccgactggctcaacgacctccggcagatcgctgagcccgacattgtggtcatactcgtcggcaacaaggccgacctcacgcagcaggacgacaaccgccgcgaggtgacacgcgaggaggctgatgagtgggccaagctgaacggcgtcatggagtacgtcgagacaagcgcaaagagcggcgccaacgtcgaaaggcccttatgcgcgtagcccgagagatatacaacaacatacaggctggcaagta

SEQ ID NO: 72798 - DNA, 531 bp, Arabidopsis thaliana landsberg
tggcgcctttaaacccatacgtagcatcccctaccgccgataataatcatgaagaagcagaacctatcagctcaaactctttacgatcagtttgaagcgtgatttaacacataataattgaactcagcttactgtaacgttttaacccactgaccaggaaccaattgccagattatgcaagaaccaccagtcgctaagagcttatcataattgcattatttaaatccaataagtatgtgtacagaccacctgctaccgcagcttcttcacattaaacctgcgcctttttaactttccggtttgtaaatatcgaaaagctttttccgcttgatctttatgtattgctacgtaggcatgaaaatccataatatcaattttgcctatcgcatcactcggcaaacccgcgtcttttgtcaaagcgcctagaatgtcaccggggcgaactttatcttttctgccggcgtctaaacacaatgtcaccatgcttggagaaaagacttttttgccttgatgtgtcaactcaccaacttt

SEQ ID NO: 72799 - DNA, 530 bp, Arabidopsis thaliana landsberg
  unsure (1)..(530): unsure at all n locations
atacgaacgatcttatggttagggctatcgcctggaagaaacgattgttgtcgcttaccgctgcctgatacatcaaatcggtgtttgtgagaatattatagtactccgaccagcttgccgccgaccagccatactggttgattttcatcgcgccctcgttcgtccccatctggatgtactgcatcgcccccgaaaggtccgaaccttctgcgccgagcgcatagtaagccttagccgagtgcgtgagcacgtagctcatgatgtagttcgccgacacttcttccgggctgttgggattttggttgacttcactcaaatcctcgcagctcatcaggagaagccccattaccgccgccaggctatatatcactttggaaattttcataatcacaatcgtttagaaatctacattcagcttcaaacctaccgagccggngcatggcattacattatagtattcgacacccctgatccatgccgagccagnctgcccgaatgcgcgctcaggatcgatactcacacccgcagct

SEQ ID NO: 72800 - DNA, 307 bp, Arabidopsis thaliana landsberg
  unsure (1)..(307): unsure at all n locations
atattttaataagnncataaaataactttttttaaaatggtgttaaagttaattctaagggatttggggggtttacgtcaatcttggcatacctaccaaatgtaaatgcatcatattgttaaaaaaagcaaaatatgtcttaaaatgttataaagttatgcgcttgaagcaactataataaatcaaaaaagtatatagtataatttaacaaagtcttcgaaactaaaggccggcgtgagactttttgtggcgtctataatatataagaggggagagagaaagaaaaaaaaagaaagagtaaaagaat

SEQ ID NO: 72801 - DNA, 207 bp, Arabidopsis thaliana landsberg
  unsure (1)..(207): unsure at all n locations
caaatacttcagcttgtagcattaccatattctcaatagcattgtttgtttatttttctactcgcatgtacanttcccataagtgatgggtgtttttccaataatccaacgtttgttgttcagcaatattggacaatgccagcaacttagaatggtatctgttaaaacgagtcatcaatctcctaatgagaattggatgtatgcatg

SEQ ID NO: 72802 - DNA, 342 bp, Arabidopsis thaliana landsberg
aaaaagccacattcgagtctataaccaaaaaaaaaattaattaagaaactagcacttcaaaaaaatagaagatttattctttatatttactctaataaatacaagtttagccttcgtgaaattcacgctccttttatctcttttctttgttttagtttatttacttctctttttctctacaaaacttatagatcaccaactcaacaaaaatcaaaactatcaaaagaatagatggaatcaacaaaacctgactcactctattatttaacaacatcattagccacaaactcaaccattagcgtaacaaccttcgttcctaactccgacaaatttttattctct

SEQ ID NO: 72803 - DNA, 526 bp, Arabidopsis thaliana landsberg
actcacctaaggtaaggtacttcggttcggttcagttatttcggttttatttttttgtcccaagctaaggtaaggtatggatggcgttataaaatttgtctaagctaaactatacatggcatgacgagattcttccaaaaataatggatgatatttaaccaaacatatatatatactcctatttagtgtttcttatttttaaaataattaaattaaagtgagtttaagtttgcaactaatagctatacgcatgtcaatttatcacatgctcaaggatcaaagcaacgtaaaaaactattctatactatcatttactttcatgttacatatatatactgaatttttgaatttttcagtaaactcttagtaaaatgtcatcactagctactagctagaattaatagaatataaatctaacacatagataaatggagaaaacaatttttattccactcattcttcagatatagtaatctagatcaatacatgttttagagccggaattcatatttaagaacttatttgt

SEQ ID NO: 72804 - DNA, 553 bp, Arabidopsis thaliana landsberg
actcatcatttctgatattctctatatgcttatttgccgacaacagggatcacaacagatctacaacttctcacatccgtcctttcctcttacgacaccaagctagagtggaccaacttgtgcatggtgtatatggggaaatggtacacgattgctttcttttgaactcccttattcttcagtcacttttaactaacgctttaaaacaaaacaaaaaactgcaggtgaaggtcgttaggtcacaccaaggagaaatacggtttgtccgagcaatgattgccaaaatcttgggatcaggtttgtttcggaactctaattttctatctttagtgtaatactttgctatcagggcattgaactgactattttatttgcacttgctgctgttgctccaacagtcaacgaggatgcaccacgactaggagaaatagcaaatggtagccccgtttcataaacacactcggattcagaatccgattccaatcacgaagactaatgaaccaaagtgttatcgtagctattgcagcttctacagtcttgtaggtcaaatctc

SEQ ID NO: 72805 - DNA, 530 bp, Arabidopsis thaliana landsberg
  unsure (1)..(530): unsure at all n locations
ctgtctttaagtaatgattgtaattcttatatatgcatacatatttacataattgtagtcgtagacagaataaggaagtagccgatatttttcaccaaagatcatacgcatatcatatcatatgatatgagaataaaaaccaaaagaataaagaagtgaattgagaaggaagtaataatgaagcataaatatatgtttgtttctaaaattgggttgaagattgagaaataagcattttcctttataaaacatatacagatagttttatgcttttttgctgaaaaaatggaaattgcctctttcttttaagtttgcttcttacaagaaggaagcaaatgcttaccattttaggttgaacagagaaactttggaacatttgaaagctaaatttgtctgcgaaacgaatcaaagcctcatgaagttcctttagcaacagtaaaacataatctgtttgatatcagccataagttcaaatcattntaatttttgttaatagaagcttttacatgagacataagtatttatttaca

SEQ ID NO: 72806 - DNA, 590 bp, Arabidopsis thaliana landsberg
actcctaagccacgtgtgtcccacacaaagtaagaagaatgtttatattatctattgctcttgcaaagtcaaatgtatcttcaaaaagtcatgttgctagttttcttttattcccctcacgtcatcacggttcctcctcctattacaaatatacacacccaaaaagtccactaacatgaaatgctaaagttaattttagaaatccattgctttcacgtgaaaaaaaaaactattacagaaataacatgtatttatacagtttactaatagtcatcaactcatcatatatggtataaatatttgtcgaaaaacagctctcatgatatgtgtaggcttatattcgacagcccattaagacacaaaatgggccttttaaaaggaatgtcagttgtcaatatctgattcgtacaacgtggagtagctgtggccttgtccggttgtctctctctgcctcttcgctccaggttcaccgtacaataataacaaagaccgacgcttttgtaaaaagtgaaacctaaattgataaccaaataatttgatcaatttggtacaacttttgttttgactgatgttcaaattttcttttcttc

SEQ ID NO: 72807 - DNA, 408 bp, Arabidopsis thaliana landsberg
gaaccactgagccatctttccagcccaatacttttcttcttggaatattactgatcccttttttgttcttcccgagacaatcactccatgtgtcctgtttccatgacacaaaattcttactctctttcccgaccgaaaaccacaacttccctaatctatattatgctgagtctccaagagggaagactctaaaatttattaatccccggctcctgtactatgctcatatctcaccaacttactgaatgaattgagaggggaagcatacttatagggaaagggagggagggagagtttgaacattgaaagtttattctcttaccaacagaaaagtactataaagggccatttcattatttccttttggaagtatcgttcttaacataaatccactgtgggagtttttct

SEQ ID NO: 72808 - DNA, 560 bp, Arabidopsis thaliana landsberg
cagacaactcatgaagagcgacgaatgacattggagactttattgcatgacgaagagagatttcaagattctgtccatgatgtaccttctctgcatgaggtgaacagaatgattgccagaagcgaggaggaagttgagttatttgatcagatggatgaagaatttgactggacggaggagatgactaatcatgagcaggtgcctaagtggcttcgagctagtaccagagaggtgaatgctactgttgctgatttgtctaagaaaccgtcaaagaacatgttgtctagcagtaacctgattgtacaacctggtggacctggaggtgagagaaaaaggggccggcccaagagcaaaaagattaactacaaggaaattgaagatgacattgcaggttactctgaggaaagctttgaggaaaggaacattgattctgggaatgaagaagagggagatattcgacaatttgatgatgatgaacttactggcgctcttggagatcatcacaccaacaagggagaatttgatggagagaaccccggctgtggttttgattatcctcc

SEQ ID NO: 72809 - DNA, 491 bp, Arabidopsis thaliana landsberg
  unsure (1)..(491): unsure at all n locations
aacgttcttctttaccatggcattatcaaagacgatgcagttgatgtaagccttgggttttgtagagttgcttcctgtcgggtagattcctgttaaagcattttgcagtactgaaccagaaggcgccggagcatcgagtccgggcactgcagcaatgttcccagacaacgcagtggctatcgacgtcaaagtgttgtcattgttgtagactgtatttgtctggtaacgcgtatacacatgcgcctggatcttgtctcctttttttactttcagcgcgatggtcgggccgatcactnnnnnnnnnnnnnnnnnnnnnnnnnnnncgtactttggagttcccatcaaaggctgctcctgtggaacattcagattggactgctgcgcnnnnnnnnnnnnnnnnnnnnnnnnnnnnnnnnnnnnggttgttgtgccagcaagagataattccatcgaggcgacgaaatcatagaccttgtcagtcaccaacgcac

SEQ ID NO: 72810 - DNA, 569 bp, Arabidopsis thaliana landsberg
  unsure (1)..(569): unsure at all n locations
aaatgttccaacggtacataagatcatatgaaatcccttttggtggaaaaaaaaaacgaaccaggggaatcaaaccgccattttcaaacgtttctagagtctttccagatcataagtctgttaaaagagtctaaaaaaaactgagcaaaagcttggatcatatgtacagaggaaaaatcctaagattattaagaagaaagcaaaccaaaatccaaactaaatcgaacacaaagcaataattctaatggagagggagaattcagcaaatgcagctatctagtgtagaggccattgcagtagccgttattatatcttacatcagccaagccattgggagatttcttggaagttccattgatgaaaatgtttgttggaccgttactaatcgaatgttgatgagcagaagctggattcaggactgtgtctaactcgccacacgatgctgcaatgagccctgcaataagaagagtgtgtaaaagattgtttaaaagacttgagttgagttcagataactgaacttaagaaaaggcttcacacctaanaacagaggagaagctttcccgggtctg

SEQ ID NO: 72811 - DNA, 403 bp, Arabidopsis thaliana landsberg
  unsure (1)..(403): unsure at all n locations
cctggctgatggaagagtttcggggcttcaaaatttttgctgtttcggccgctcaaaaatactatgtgtaaaatggaaaacgcgatcgatataatctatatatatcnnnnnnnnnnnnnnnnnnnnnnnnnnnnnnnnnnnnnnnnnnnnnnnnnnnnnnnnnnnnnnnnnnnnnnnnnnnnnnnnnnnnnnnnnnnnnnnnnnnnnnnnnnnnnnnnnnnnnnnnnnnnnnnnnnnnnnnnnnnnnnnnnnnnnnnnnnnnnnnnnnnnnnnnnnnnnnnnnnnnnnnnnnnnnnnnnnnnnnnnnnnnnnnnnnnnnnnnnnnnnnnnnnnnnnnnnnnnnnnnnnnnnnnnnnnnnnnnnnnnnnnnnnnnnnnnnnnnnnnnnnnnnnnnnnnnnnnnn

SEQ ID NO: 72812 - DNA, 571 bp, Arabidopsis thaliana landsberg
tgtaaatgatgatacccgataataatgcatatgccattattcacgtaacaagattgacattttttgcaacaagattgaagaatatagtttgcaaaatcgagttatatcgacaattatggaattatgcattaatgatcgattgacctttcatataaactcacggatgcttttctgataagaatccaaaagtcaatgaataattggtgtagtggatacatacacaatgaattagtcttcactctctacctatcaagtgtaattaatgaccatgtggttgtgaacttgaatgtttttaccaactatatataaatatatacattatacttgtggttatacaataatgtgatttggcttcataaagaatttgtcaacattatctttaatttcaatagtgcaaactgcaagtttactattttaaatttgtcaaattatcctttactcatgtcaattagggtatagttcaaaattttcggttggtttggattatagagtttctaagctatgacaacatgtttggtcctttactcatgtcaattagggttactaattaatagaatgtctctaaagaaaa

SEQ ID NO: 72813 - DNA, 603 bp, Arabidopsis thaliana landsberg
ttatgccttcagagtaataactctttccttgagttttccctcacaatctctatcctattatgcatgttatggattttgcggatttgcttttgtttacctatttttcatcatgaaaattttcaacaagatcaatttgggagtcggtgtcttggtggctactgctaaatgttcacaagtcatcagtcaaatccgattcttctcttgggcccttgctggtgttgtcactcttgtttctggctttttcttcattggtaccgtttggggtttcagtgttggtgaaattaaagtcgttcccactcaaagtaattcattttttctactgaattttaacctttttttctagatattgatggaggacttagcaagattattacttatgataatagaatgagagttcttgttctgttcaatttcttcatgttacaatggtggctgaatgttatcctcttggtttctgattgtgtcatctcttactccatctccatctggttctttgaaaaaagaaaggaaactgtcattgtaacatttcaatcgttttaactcatctaacctctttcaaccagcttcctgttgaaaagatcataaaggatgtgctgaaatacc

SEQ ID NO: 72814 - DNA, 601 bp, Arabidopsis thaliana landsberg
ataactcttgcgaggatatttatatgctctgtcgctcaaacaacaacgccacgccaccgcacaagaccagacgaagagagaagagaggaggatttgctacgtgcaagataattgaaagagagtgaactgcgagagatatctgaggaaggagcaaacccaacacatcaccaagaaactcagcaaccatgtcccgccatcatccgtacgtttattccctcccctcccttcaacccactctgcgaacccaaactaacaccccaccagcgacctcgtaatgtgccgcaagcagcccggcatctccctcggccgactctgcgacaaatgcgacggcaaatgtcctgtgtgcgactcctacgtgcgccccacaacactcgtgcgcatctgcgacgagtgcagcttcggcaactaccagaacaagtgcgttgtgtgtggtggagagggaattagtgatgctttctactgctttgaatgcacgaggctggagagagacagggatgggtgtccgaagattataaatctggggagtagtaggacggacttgttctttcagaagaagcagcagagggtgtttgggacgagggggtgattgggggggagggtg

SEQ ID NO: 72815 - DNA, 598 bp, Arabidopsis thaliana landsberg
ataccaactctgtttctgccattccgagagttaatattaattttcatttttaatttattagctagtaaacatatatatacgaatgaggataacctgtagaatgaggattaagatcgagaacgacgaggttatctttaccgcaacattccaaacgtagccaaagctctattaccatacccctcaatgtacatatccagcttataagactcctatccagtatccaccatccaacgaaacacactctcagattcttccacattatgaatacatgtcaaccaactaatttctcacctcaaccatcatttcaaaaccaaatcttcaagcaaaccccatggatttaaaaacccttttcaagtgcgtcaaacaaaccacaagcttttagatttgtcgagaaagtgaagtcgttgggcccatttcttcggatcccttaagttcaccattaagtactcattagagcccatttcttggggcccattaagagattaagtccgcgcgcatagcttttggaggatgccgctcttttgtaagaagcaacacgttgttgagtctctaacctttctttgaaatcttgacctttcccttcctctccgctaaattc

SEQ ID NO: 72816 - DNA, 488 bp, Arabidopsis thaliana landsberg
  unsure (1)..(488): unsure at all n locations
ataagaatacgtgtaagaancatataaaggtttttcattgtaaggaatggctccctcacaggggaagcatttgtttgagtctaaatttcgcgtaccgcgtatactagtaatagtatacttttagcatcaagcatattgagtttagtaatatagtagtagttttctaatctccgtaactttgttctaatgtcaacaaacggccaaaaagtatcgacgaacggttcaattaatagtagcatgcgcaagccagcgagacttgtcctggaaaatgggatggtctttcacgggcaagggtttggtgcgcttgactttccccgtagtttcggagagggtgtttttacaaccagcatcaccgggtatcaggaaatccttaccgatcctttctatgcagggcagatcgtcacaatgacaaacccgctcatcggcaactacggtacaacccatgaagacttggagagcggtaaaccgttcgttgggggcttcgttgg

SEQ ID NO: 72817 - DNA, 111 bp, Arabidopsis thaliana landsberg
ccagagtggaatcacactgaaggcttttctatacccgaaagggggcccaccacgccggggaccggagcagcgcaagaaaagcccaaagccaaccccagggaacagagaagc

SEQ ID NO: 72818 - DNA, 396 bp, Arabidopsis thaliana landsberg
cttaggaatatacgtttatctgtttatattttaacaaaaattatcattccgttatcttatgatttctttgtaagtgcaagtggtctttgaagtttttgattgaattttgttggcttttagtaagaaatgatttgttactgaattcattttgtaatcaatcctaagttaatcaaaaattataaacaagaaaacccaaataagagtaatatttaggtttaaagacaaaaataactgaatatattccacaaaagaaggacaaacaaagaaagaacaataaaaaaaaccacacaaactataattggtttacaggaaaagtaacagagatatttacaaatcaatgggaacctaataattactctgttaatcgttaatcctccataatgtctttaattttcc

SEQ ID NO: 72819 - DNA, 393 bp, Arabidopsis thaliana landsberg
cgcgacccaaagcagcccgaacaacgcgtagcctagcgcggttctccccgggcgtaagttggcgatgcgtttgggcaggttttttaacggcatgatgagtccgtgctttgacttcattatgcgcagatttggtgcattcgacaattcagaatgcataacgcctgcttggaaacgcaagcgctggaaatcggcagtcaggctagggcagcagactgccgggaaggcttgtcgaatctattggtagcgcagggcttcgatcgggttgagctgggctgccttgcgtgccggatagaagccgaagaagatgccgacggctgcggcgacactgaacgccagcaggatggagttgccgtagatgaggatggtcgcctgggtcagcatgccgaccaggat

SEQ ID NO: 72820 - DNA, 465 bp, Arabidopsis thaliana landsberg
taaagctgctttggcaagtagtgaaaccgaacacaaagcagaaactaaaattttagccattcctcgtaaagctgctggacagtcttgggaggatcctactctttcagaatggccagaaagtaagctctgctcgtctttttcttcttctttcccttgattttgctgattgttgttttagtttacgggatggtatcatagttgttcataggtaggattttagatgttttcttctctgttgttaaaatagatttcttatatctttctaacatttggcagatgactatcgtctgttctgtggtgatcttgggaacgaagtgaatgatgatgttctttccaaagcatttgctagattccccaccttcaatatggccaaggtaactgtgtatatctctcctccttttcggctttagtgattattcatatctggcttcctatgaacatatatttgagaacattagtcatgtg

SEQ ID NO: 72821 - DNA, 595 bp, Arabidopsis thaliana landsberg
  unsure (1)..(595): unsure at all n locations
ttcttaatgttttctatttttacatcaactaatttacatcacatgtgtaaacttcatttttcaatattaactcttttaagctctaattatatcaactaactaattcatgaaatcaaagtgatatacgaacgatttgtatcacaagtctaatcattctattttccatgaaaaatacaactggaatatttattcaacgccgtttaatagtcacgaatgccttctgctgggtcctagtttttccacacaccagcgtcatctctttagagaactttgtcatgaatcatattatttttttgtttatctatttaagcaattcaaatataacgtgaatgatatactcatatataaacaaattgggtaaaacggtaatacttatatatttttaacttgccaataaacattagcctttttgttagatttactctacgtttacgtagtatattcaaactacataactggagcaactaacatttataaatataaagaaagtgtactatataaacaaacctcattaaaacacatattcacacatacgttttctctaagggctctaagaaaaacatnnnnnnnnnnnnnnnnnnnnnnnnnnttggac

SEQ ID NO: 72822 - DNA, 570 bp, Arabidopsis thaliana landsberg
catacgcacggttacaggcgtaccgggctcctggtatatttttttggggcgtttaatgccattgtatttaccatggcatgcggtgcccaggtctacaaactgtaccagctggaagttgcgcaggaaggcattgttgataggcctgttgagtaaagtagagaataccgggaaacggaattcgctgttgagcacaaaagcattgttgccattggccacattctggttatagccgcgcatattcaccgccagtgactggaacgcataggtctggtcctgcgccggtgggttatggttgaatttgggattgatccatccatccacaccacccaggtaatagatcagcttattctggccccaggagaaatcagcggcagccctgcccgcccagataaagttgcggtatatcttatggtaatacctgccatcaaaaccgaagttataagtgagcttgccgccgggagtgctgggcaggttcatatccaggtataccttgtagcgcagccctacccatatattttgcgtgggattaatcgtattatcatgtacatattcaaacctggaaaggatata

SEQ ID NO: 72823 - DNA, 476 bp, Arabidopsis thaliana landsberg
ccttcggcctgatccggccgcgctcggcacgctccagttgcaccaggtctatagttttccatcgtccgcaacgttcgggacagattggacttggccctgccggtcatttgcgccagctcgtccagcgagcccggctgcttctcggcaatcgtctgcagcaactcgcgattgccggccgacaggaccttggcgaaggattccgtcgaggtaaaccagacttttggttcgccagccgagacgcgtcgctcgccgcgcgcgacagccatggttcgcgccttcatttcctcgtagctggcgatgccgaccttaagcgtggtcacggaattgctcctctttcgcgtagcaccgaatccacggtttcccaaaagtcggccagcagggtggccgcatcactatactcgtaggcgcggacattccgcaggcgatgacggtggtcctgcggttcgccgcgcttctgctgcgccacaggatgggca

SEQ ID NO: 72824 - DNA, 2033 bp, Arabidopsis thaliana landsberg
tgtgattccgaaaccctggctctgaagagcctaagcaagagaaagggagcgagtgtgcggtgactagtggtggagatgacgaggaagcgccgtcgtcggcgcagatggctttacttagggttttcgaaagaatagtgtttggcgatgacgctgctacggttgatggtgatgaattggataaaggtgagagtgaaggtttgtgtaggatgattgttagaggtaatcaagtagattacttgatgagtaaaggagggaagatgattcagaagattagagaagatagtggagctattgttaggatctcatctactgatcagattcctccttgtgctttccctggagatgttgtgattcaggtatacacagcttcttgtgtctttgtggctattcaatttatagagcttttttggctgatttagtaatgtttttgtatgaagatgaatggaaagttttcgagtgtgaagaaggcgcttttgttggttacaaactgtcttcaagaaagtggtgcacctccaacatgggacgagtgtccgtttccgcagcctggttatccgcctgagtatcattctatggagtatcatcctcaatgggatcatcctcctcctaatccaatgcctgaagatgttggaccctttaatagaccggttgttgaagaggaggttgcgttcaggttgttatgcccggctgataaagttggaagcttgattgggaaaggtggagctgtggtgcgagctctgcaaaacgaaagcggtgcgtcaatcaaggtttcggatccaactcatgattcagaggagcggattattgtgatatcggcacgagaggtatgttgatttgctccatggatttggtttatgtatatcattggatactttgtctcattggtttacattgttgtagaacttggagagaaggcactctcttgcccaagatggtgtgatgcgtgtgcataatcgaattgttgagattggatttgaacctagtgctgctgttgttgcccggcttcttgtacattctccacacatcggacgtctattgggtaaagggggtcatttgataagtgaaatgaggagagcaactggtgctagcatccgcgtctttgcgaaagatcaagctacaaagtatgaatcacaacatgatgagattgttcaggtaaattttatataacatccgcggcctcgataagtttttcaactctgtagttttcttgttatttgacacctttttgctggattggcaggtcattggtaatttgaaaactgttcaagatgctttgttccaaatattatgtaggcttcgggaagcaatgtttcctggaagacttccttttcaaggaatgggtggtccacctccgccgttcatgggtccgtatccagaaccgcctcctccatttggaccgagacaatatccagcttctccagatcgttaccattctccagtaggaccattccatggtatttcatcaatttccgacccatgatcaccagttgatacatgcatcaatctcagtttcttaataatgtctacttgttacatatgatacagagaggcattgtcatggtcctggatttgataggccacctggtcctggatttgacaggccaccttccccaatgtcttggaccccgcaggtatgtgaactcaatgatctttattccttcgttagctgtcatgtccttttatttctttctaattcaacatttctcaatcgccagccgggaatcgatggccatcccggtggtatggttcctcctgatgtgaaccatggatttgctttgagaaatgagcccattggcaggtatcaatttcccggcgctgtctttgttcactttaaaactaaatgactttgaaatgccagaaactgtacgaaggaattttatccactaatttcacattattgccttttggttatggtgttggcagcgagaatccagtaatgacaagtgcaaatgtggagattgtgattcctcaagcatacttaggtcatgtctatggtgagaactgcagtaacctgaattacatcaaacaggtatgtt

SEQ ID NO: 72825 - DNA, 721 bp, Arabidopsis thaliana landsberg
ttaggatgacggacccctagaatccactccatatcatctctatttatgggagctagggttatcacaaaatgtgttcattttattcttcgaaatatacacatgtacagtatttccaaaagaaaatacactatagttgatagttcataaaaattaaagaaatacttaattgatttaatattcgtattgttgagttttccttctaaatactacaagtagtgaattttacttgataacattgattaatgtaagaaattaggtatcgatgcacatatgaaacaagtcgtatgtcacacttaaaactatcgttaatttgaaaaagataagacatgtcggcggtgctaaacaactgtttaagcaaagtatacactgaacttggataacttagatatagtttacattgaagttgacaaatttacacatttataaataagttactggtttgtatgtgtttataaatatgtcgtagagcaatcgaatagtcaaatatgatttgttatcctatacattattaaaaatatactttcgggggaatagggcgattggtgggtagcatatgatgttactaatcattcagatgaaccatttgcattatttctttgtttatttagtatccaacgttttaagagaagaagcgcacatgtttttttttgcaccatatactgactactggttgtggtaaacttggtaattaatacagtgcgtaccatataatattataata

SEQ ID NO: 72826 - DNA, 2245 bp, Arabidopsis thaliana landsberg
tacgtcgcctccgccgtctcctgcgtcgaaggatactgtggttgatgaagccggagagactagccactctttccctaagcttggaagtttctacgagtttttctctctcgctcatctcactcctcctcttcaatgtatgctcgtatttgtctctcccttaaaccctagattcgatgtcctgctttgatcgattttgtcccaacttacagtaattagggttttatagatattcggctcgcgactaagcgggaaactgaagatatagccaaggaagatcatcttctctccattgatgtaagcctatgatgatgaatcacacatatttctatttattgcgcaattggcttttggtgatatcgtttaatgttttttttatcaggtgaagctttgtaatgggaagctcgttcatattgaaggttgcagaaaaggattttacagcattgggaaacaaagaataatatgtcacaatcttgttgatttgcttagacaaatcagtagagccttcgataatgtaagtcatatgttcttatttgttactggattttgtgttgaacgtgattgttaatcttattcttttatcatgcttaggcttacagtgatcttctgaaagcattttcggagcgcaataaggtatatttctctatctgaatgaggatttagtggatgtatgaattgggtgcagttaatgagtatttcatttagatgcagtttggaaatcttcctatgggtttagagctaacacatggctcatcccgcctactgcggctcagtcaccagcagcgtttccgcctctccctgttgaggatgagagatggggaggggatggtggtggtcaagggagagatggcagctacgacttggttccatggtccaacgaattcgcctttatcgcatctatgccttgcaaaacagcagaggagagacaagtcagagacagaaaagtgtttcttcttcacaacctctttgttgatgtcgcgactttcagagccatcaaggctgttcagaaagtaatggctgagccagtactggctgaagaagactccgaagttctctattccgagacagttggagacttgactgttacggttacaagggatacttcaaatgcaagtagtaaagtggatacaaaaatcgatggaattcaagccactggtttggataaaaagaagctgatggaacggaaccttctcaagggacttacagctgatgaaaatactgctgctcatgtcagtgttttttaaaccttccccactttttccatgtttaattttttgtttcctcatctgtattgttttaactgtggttttacaatgggtgcaggacgttgctactttaggaactataagtcttaagtactgtggttacattgctgttgtgaaattagagaaggagagtgaggagttaagcccaccttctcaaattgttgacctccttgaacagcctgaaggtggtgctaatgctctaaatatcaataggtgataatttcttacttaatgaaaagacattcatcttttgtctctttagcgtatttgttaattactgtgtaactttcttttgatgttgttttacagtttgagattccttctccataaatcctctcctgagcagaacaagaaaacacctcagcaacacgatgatgaacttacatcttcacgggaatttgtaagtaaaatgctggaagaaagcattgctaagcttgagggagaggagatagacagggatagtatcatgagatgggagcttggagcttgttggatacagcatttacaagaccaaaagaatacagaaaaggacaaaaaacaaaccggtgaaaagtctaagaatgaattgaaggttgaagggcttgggaaaccgcttaagtccctcaatagcagcaaaaagaaaacagatgtgagcagccctaagacgccgcagactgcattatcgtctcaagtcgatgcggtttcttcagaggctgatactgctgcatctttgcaatccgatgctgagaagaatgctcaagaaaatgtgctcatcttgaagaatttgttgtctgatgcagcctctactcgcctaaaagagtcagatactggacttcatcacaaggttttacactacaacttcaatttgttgctctatgtttatttacttaattgtgtgctaactaagaatatttgctccagtctttgcaagaacttgtcgacttggcacagaattattatactgaagttgctattccgaaactggtaaatgagtctaaattttg

SEQ ID NO: 72827 - DNA, 661 bp, Arabidopsis thaliana landsberg
  unsure (1)..(661): unsure at all n locations
gtctttattttaaggcttacatgtcaactgatcgccatgactgaatattatcttcggatacctccaagatatcaaataatataatatttgaataatattaatatcataattctgatttttttgtatataaagcaaaaggatacaaatgtatatgcttttcatattttcatctatgtgatgtatattattgatttttcttaccaagataccaccgtattaatttttatatcttattatttattactggtatcgtaagaccaatctctttaacacatcgccaaaaaaaatgtataagagctacattatcagttggcttggattttccttttttctgccttcatcactttgcgcgttaattccttctataatcgtcctcaaatatttttaaattgctatgtgctgaatattttaaattttcataaactttaaagcaacctaataattttctatttctttcaatatatttattgtttttcctatttaccaatttaaataaaatataattttaatacataatatacattaaaaattgaacctcttgctctttcagaagaaaaaaacaaaaagcaaaaaccctagaattaaatagtactgtcaagttggagtgggtacaggcacgatcgagcaaaacgaaatgtcccatgcatgnncctttaattgc

SEQ ID NO: 72828 - DNA, 633 bp, Arabidopsis thaliana landsberg
tttcatgaaacacttaaactcataaaatcataaaatacatggaatcgcatataagaatataattatttgcaaaaaaaagaaaaaaacaaaaagtagaatcatcagttacaatataataaaagtattaacatataaactcgtaatgtaaactataatctccatcattttctgtcccatactgttcctattcgaagcttcaaactagtaactattatttaacatttatgggaaaaaatttatagatttaataaaaaaaaaaacaggctaggctcgtagagtcgtagactactaatgttgaattaaataactggtagaaatgattgacaacaaaatttacaagtagaaatgatgacgaaaatggttgacagaaaaaaatgatgacgaaaatgatatttgatggcgacatggctatataatatttatcaataataaaatattaatattatatttaattagtatgaatatagtaatcgtataagataaggtggacccaaatattataactatttaaattttggatctgaatttataatattcttatttaggaaaactgcaaactattttggcggtggttggggactcatttgcccacaccttttatttctagtactattttatttgtgtatcaaacga

SEQ ID NO: 72829 - DNA, 303 bp, Arabidopsis thaliana landsberg
  unsure (1)..(303): unsure at all n locations
ggactaatgggcacacatttattatctgtccaacgcatccaagccatgggggcgacgtgggaagtataaccgactgacgcccaaatatcattggaataaaagagagaagactatgggaatgaaaggacgctaaatagtggaaaattcaaatcgcggccgaccggaaacgtcttggattatgacaagaaaggagaactaaacttgcatgaaaaggaaaaaagatgtagaggatnnnnnnnnnnnnnnnnnnnnnnnnnnnnnnnnnnnnnnnnnnnnnnnnnnactggagtacagctggctaaa

SEQ ID NO: 72830 - DNA, 547 bp, Arabidopsis thaliana landsberg
cttaacagaacctaacggttcgaatttcaaaattcaaaattttcactctccgtcatcttcgttttttaccatttgtgttatccctaattgttacagttttaagatttagccctagttttactgtgttcacacttgcgccgtataaatgctcttactttaattgtcattttcagccataatcttggaattacattgtgggatctttctagattatgtgtgagaacatagaagattaagatagtttctgaatttggatagattagtgattttgtgaaacaattgtttatatgcacgatgatgatgactcaaaggatctctccttctaataagcgtcggagagtctcttttgttagagattttcctcaatttagtgttaaagatgaaagtgacattggtggtgatgatgttgctaccataaaagagaacttggatggtaaagaagatggtcactgtgttggtgtagcttatcgcgatcaccataggcctaacgaggaatcgcatgattcgattatgaataaggctggcttttatgtagctgatggtcatc

SEQ ID NO: 72831 - DNA, 505 bp, Arabidopsis thaliana landsberg
gatgcactgaacgaaatctacctggaaattaacaatttaagaaacgatttggtttctgaaggggacgtgtagttggtaaaaaactacatgttaggcacctttcttcgcagtgttgacgggccttttgctctggcagagcgttttaaaggattaatggagtataatctgggttacgattatttcgataaatatgttgcaaccattcagaacatttctgcatctgaactaagagatctggcaaataaacacctggatcccgacagtatgattgaattggtagccggaaaaaagtaacagaacaataataaaatgaaagtgagacaaaataacatgaaccccaaacacttctctctccttgggaggacgctggggagaagtattctcattttgtttctgttctttcttcctttttttgtcacctcaccttcaggaaagccgggtgggtctttgtttgcctctcatttgatgggtggtgaaatcacctgggaatgccagggcaacggac

SEQ ID NO: 72832 - DNA, 156 bp, Arabidopsis thaliana landsberg
  unsure (1)..(156): unsure at all n locations
aaaagcnaagagacaaacaaagacgaaagcaaaaggaggcacagccccagcncaaccangaaacgaacacaagaaaggagagcaccagggaaagggcagaagagaaagacnacccnccagaggaggaagcaaccnacnacgaggaaagaagaaaag

SEQ ID NO: 72833 - DNA, 566 bp, Arabidopsis thaliana landsberg
  unsure (1)..(566): unsure at all n locations
aggggaaattgattctaaacgtatctaacctcgngtannctancatttgtcggtgaaggaatgggcgaaagctgatattattaacgactcaaagaccggccctttcaactcttactctctcagtttgttagtcatcttccattttcaggtaagatagctgttctgtattcatagattttgctgccttcagccttctgcagttactgcatcattagaaaccatagtaagatgttctatgttgattgttgcagacttgtgtgcctgcaatcttgccgcctctaagagtgatatatccgaagagtgcggatgatgatctgacagggacgctcaatgaaaaggttttgaagccaaaccacacaaaatatatgcgtttttggggtaaagggacaaatgctttagcgggatggtgtcttgtaggtgtacggtaaactgcagaggaaagcatatcgcaagttaccgctgctaatattgggagattaaatcatagagagcaaaatcagtcaatccaagctcgcttttggagctgctggtctctttttttgaaagggtgatgatttttaaacatc

SEQ ID NO: 72834 - DNA, 541 bp, Arabidopsis thaliana landsberg
cgaagcggccctgcgcgccggcgcccgcgtcggccgggccgcggaactggccggtttcatctcggacgtgcagttgcgccgggcctggagccgactgggcagcggcggggacacaccatcccgcgcgcgtcgtgcacgcggcgataccccgcctggatcttccgccggatgagggaatgccccacgtccagcacaccaccgcccggtcgccctcctaacgcatgaagtgccggctcgcacgcggcgcagcatccgccccggggccttcgcgtcgatgatggatcgccgcgggaaacgaccgctcgccgacgcgctcaggctggcctgaagcgcgaagtcacggcctcgactcggaactgcacagtcgatccttgccgcctgaggccggagttgagcggcgcgcggcttctcgcgcgtccgcttggacgaaaagttagactgtttggatcggcgcccacatttgcctctgagcgaaccgcgttgtgatgcttaaaaacaaagaccacgccgaaaccacttgccgcaagatatgcgagcgccg

SEQ ID NO: 72835 - DNA, 352 bp, Arabidopsis thaliana landsberg
atcaaaatctctattatttttttgttggtcgagatacaaacctaaaaccgaaaatctatcatctatttcttttctaatacgtgatgcagttcttttctccatacagagataatcaatcaccgatgcatgtaagagtcgcgattaacgtatttgtgtgagttcatcgtctcagaatttccaaaactttgttctttggtcataagtaattctatagagcaaacataataatacaaccaagggaaatctaactctaagtcgaagaagaaagcaagagttgagcagtcttgtgctcattttcgacgaatggatgatcatccgcgatacaatcattttcacaagtttgatggttact

SEQ ID NO: 72836 - DNA, 493 bp, Arabidopsis thaliana landsberg
agaccgtttattattctatgagttaatgtcaaaggaacatctccaaaagtgatcgtaagtaagacttttgcagattcttcatcaaaatcagtgaagtaataacaactcattataaaaggcttgattatgaatccttttctggttttctgaaagtacagctgtaaagctccaacaactattgaaggcagcagttctttcaaatattagttatcattcacagaattgtgacttataactaaaacttttagactaacattttaaaaacttatctaaaaattttgcgtatttccttgggacaattgagaactcctttcacaatcttatatatatgaaattttccttgattaaacgggggaatctaaatgcattaatcattatagatgttggcttataaatttaattttgagattgaaatgggggcatatcatgttttagtgtattcatttttttaaaggaaagacaccaaaaaaaaaatttttgatttttttggccc

SEQ ID NO: 72837 - DNA, 663 bp, Arabidopsis thaliana landsberg
tactcagcattctaacgcttattctagaaattgtgtttagaaagatcatatagacctaaatgatgcaaccgccatgatccgaaactctgaatatgcttacttcattcggatctgtgaagcaggaatcaagacggtggagtggaacggagagcattacttgctacctcttgcgaatatatgggccaatctgatcagccgcgatccaccgaaccttcctggccaccattttcctattgtctcttagaataaagaagaaacatacactacactcataactcacccggcaagctattctcaccgcagagcattttcgaccaaaacaaatatacacctatacttatttgtttataatgtttgatttgttttggtcgttgtattgtaatttacatcgaatgggtttgggtttcattaattgagaatattcccaggttttacggaggatttatttttgtatcgaacgaagcaataagtcagcataatgatttcatttatttttacaatgtcacagtaaaatcttccaacgtaatggtgttctgaggttgcagagattcacatggagttgaaacaaggaatatgcacgcgtcaagtggcatctaaatcagaacactctttaattttctatgcagggattgaccatgcgctaaacttaaatggtatcaagat

SEQ ID NO: 72838 - DNA, 494 bp, Arabidopsis thaliana landsberg
accgcttctgtccttataaacctctaaagatagactgaaaccaattccaaaaaagcaacaccaaacaaaaccacatgagctaacaactcgcaacattcttgaccaacaattatcatcaaaccattagaaaaacctttgtacttaccctccaattctgaagactaaagaaaagtgaagtaaactcttttggtcctgcaatttggagttcttaaatcagtatatactcaaaaaccaggctagcagggagaataattaaaaatttgactttttttaatactttcaacttgaattaataataatacaacttgaggatttggcaccaacgatcatcaaagtcaaaccaaacaatatgcagaggaaaattcaacaagataattccaaaaactcaaacctagattgttgaagcaagacaatcttctagttctagaaagcgcaaaaaaggaaagacctagaacaatcaatttgagatcagtttgaaagaaagaagaaactga

SEQ ID NO: 72839 - DNA, 409 bp, Arabidopsis thaliana landsberg
gtggacaggttttgaaccgatgcattctaacgcaggttgctgttacggctcataacgagtgaatggcacaacgaggtcgtcaaaaaagccttcatcgtaagccattggccaacgcatggtggctgctgacaccctgttctaaacatgctatttacggccaatgacaaaggaacagtgccatcacttctcaatgttgacccacgctcatctatgtacgtggctcaccgtaggctggggaagtggcgccaggggcttggggcgaattttcatcagggctttcaatttgcccttggtgtcttgggcgcggatggcctcaagcaaaattttgcgcaaaccttcactgacggcaatcgtggcctcgtgggatgtgtctacaccaccggccatgcccacttcgatctggcccagt

SEQ ID NO: 72840 - DNA, 558 bp, Arabidopsis thaliana landsberg
  unsure (1)..(558): unsure at all n locations
aggcaccaagctggtctagcaggtcagtgacttgcttcctctttttagcttttaaattataccacttccctggaggagtataagctgctgttccgaaccccttcaaaaagtagagtaaaattgacaacattgtgaattgtaaacgtccaactgtccaagttttctctgctaggtaggtagctaaaaccaaaagttcatataatttaaaagttaagaatgtggatatatcccagagaatactaaataatatgaagttagccttgcatctacctaagagcgagcattcgagaatttgttcacactatttctttcatctgatgtgagccaaatttctgctggctcctgtgtcttggggttcttgccagtgggaagaggctatatctgtgataatatcccaacattcagggcttttgggattttaagggcatttaattgttgaaaccatatttgacaatcgaaactgtgtttctgcaggatatgattctggggaaaagaagcngattcctgcctggtgtgacaggattctatatcgcgataataagaaacatttgggagctg

SEQ ID NO: 72841 - DNA, 559 bp, Arabidopsis thaliana landsberg
atccgcgaggcgatcctgagcgcttggcttagtggcgtcatggcaccttttgacgtggttctactggtggtgatgctccgcatcgcaaccaccttgggcgacctgatcaacttcgcctgggggagcgcgttcgttttttgccggacgtccgaccaagttgggacgtagagcgaaatgaagcatcgggacctgtgcgcaaatgagcgactcaccagccattgagccgaagtcggcgggcggccaaaatggcctgccgccacaccgaagagagaatggcgccatttgcgcctgacccgtactttggcatctccaagtaccaaggaagtacccatgaaactcatcatccaaatcccttgcctcaacgagtccgagacgctcgcaatcgcgctagccgatctaccgcgtgaggtcgcaggtttcgacacggtcgagtggctgatcatcgacgatggctcgaccgacaacaccgccgaagtggcgagggcaaacggcgtcgatcatgtcgtgcgccatcccgtgaatcgaggcctggcagtagggtttatgagtggattaaatg

SEQ ID NO: 72842 - DNA, 581 bp, Arabidopsis thaliana landsberg
cggtacatggatctgattgtttcgggttatcggaaaataatatggagatatcatttggtttatagtagatcaccatggttactttcttggtaagttactgtgaagttttgaacatcaaaggggaaacacagtttgcttgattctgaagaaacctcttcgattttgaaaaatgatgctttctttcatcttttgttgttttcgtgtaaatttgtgtgcagtgaggaaaataatcagagtggcttaagagtttttgtttttgttttccttgtatgggctttaatgcttttggtgagcggaacaattgtaatatctccgacagagtctgttgaaattttttgacaattatttttcaatttcagattccataactagaacaactatatttcactgtttattccggtaaaatagttgaattgagaagtaaatgatagtatgaaaatatgaaatagatcttgatttggttaaactagtaactcaactgaaactttgtgaaaactagaatacgaatatgaacctaattcagcagtgttccaaaacaattcatatttctagtattatctaatctatgtctaaaaccataa

SEQ ID NO: 72843 - DNA, 549 bp, Arabidopsis thaliana landsberg
  unsure (1)..(549): unsure at all n locations
cgcccggccccgctcccctggcccacatagccgatcttgcgatgcatttcggccggatcggccacgatatcgcgggcggggtcattggcgctgcccgaactgcccggcaggagcgtagtcagcatgcgcaccgaggtggacttgccggcgccattggggcccagaaaagccaccagctcgccctcggccacgtcgaggctgaggccgcgcacggcttgcaccgggccggtcttggtcttgaaagtgcgggtcaaatctctggcatggatcatcggcaactcccttttgctggtgttcaggcacactgatccggccctgctgacatgacgcggcagcaggcggactttcgacagcgggctcgacttttgcgccccgaagcgctacaactccgtacgccgcacaaggtttagcataatctcgtacggtgtaaagagttatttggaggccagatggccgaggatattgccggacgcggcgacccgctcaaaaccctgcaactgatgtggnggcgggtggatgcgccccggcgcggtccgagatcgcgggttt

SEQ ID NO: 72844 - DNA, 450 bp, Arabidopsis thaliana landsberg
gaaaagcggtggctacggcgccttgccggctactgcttttggttccggcgccaagtcattatctcggtcgtgggagggctgttgacggcgggggcgaccctcgccatcccgctcctgcagcgttccatcatcgacaacgtgatactcaccgaccgtgagtccatctggcccctggcaatcgggctgctgatcgccgcggccgcgaactacggcggcacttacagccggcgctaccgcggcggccagctggcgctcgacgtgcagcacgaactgcgcaccgagctgttcgactccctgaccaggctggacgggagcaggcaggacgagatccacaccggccagctggtcggtcggtcgatctccgacatcaacatggtgcagcagctggtgcagtggctgcccctcaccctcagcagcgtgctcctgttcgacttctcgatggtcatcatg

SEQ ID NO: 72845 - DNA, 486 bp, Arabidopsis thaliana landsberg
tcctgaaaaatgcaacatagtatcaagatgttaagactgcagtcaagttcaatgggaaacataagcctgatcttcagtggtggggagattcgggatggtaagaagagattaagctgaagataccttatttagcagagacagagaatctatacgcattatagggaagtgcatgcatgagtagccatcagaaaaataaacaagtcaacttgctaaaagctagagtgagtctgaaggcccataaataaacatgtggctttaacattctgatatgcagaatgtcttggaaacctaaggatttcttgaaaggcttacttaataaaataaaagcaatagctaccttagataaacatgtatagcagagtagatcttactatgaattggtgagaacaaagctgtatactggtggtgacccacccccccccatttaccagcattagggtgataatgatgggaacaccaacaacctgaacaccactagcagcaaca

SEQ ID NO: 72846 - DNA, 560 bp, Arabidopsis thaliana landsberg
  unsure (1)..(560): unsure at all n locations
ggattggnnnnnnnnnnnnnnnnnnnnnnnnnngaaatcctctttccgattgaggatggaaacttaagggagcgtgttatagaaatattannnnnnnnnnnnnnnnnnnnnnngaaggcaaaaattttgcagccagatggatcttataagtcaacagtgtccagaaaagccggtctgtcacatcgaagtcaatttgagtttatcgcgagggcctcgggaaaaaaagaggcaaagagcggccaaagtgttccagcggtcaaaatgaaactgcgtccccgtccgttgccccgctgaaacctcacgcagcatcctactgggttttaggcagcgttgatcctgggttcagccggggcaatcagaggtccaaagttgcccagcaaggctgtttcgagttcaaccaggtgttgcgcgggcaaggcaatgcgcaggatcggacccggttccaggcgcaacaacatgggtgtaagcgggatttgatcctgcaacgataactcccgattgagctgcacatccagcacttcatgagagtaggtgctcccatacttttggagaaatgattg

SEQ ID NO: 72847 - DNA, 283 bp, Arabidopsis thaliana landsberg
aaggaatcatcattgcatattaaaattatatttgtttgacagttctttaatgtcggtttagcaaatagtacgcctaaaaatatttattgccatttcttgtgcaatttatgctgtcacatgtcaatgcaaaaaattaacgccttttagatcaatattgatttagatgagtacaactatttttgtaaaattttgttagggtttgtagtttatacgtattttggcattgtactaaatattgtagctcattttatttatttattttgtaattcatattttcgcagat

SEQ ID NO: 72848 - DNA, 389 bp, Arabidopsis thaliana landsberg
ctgagttttctttgtttaggattcgagaagaatgacaagacagtggggatttttgatccttttaacatttgtctaacgatatccccgtgttttgtttaaaggtttattttttagcgttttgctatattttctctagattgtctttttggaacattcgctattttggtattagtttggaaacttgatcatgaaaatagtataactcttgtaatgcgtccatctttctagatcctttccgccatgcattcatatttttacgtaacttacttcgataaaaattcgataaacaaaatgcattagttttgtgtgtggcatgcataaatttcattggtaagcaacgttagtacagtctgggacatagccattctaggtttttattctcaaggcat

SEQ ID NO: 72849 - DNA, 288 bp, Arabidopsis thaliana landsberg
ccatcaatcatgcggtcaccttagacaactttgtcatgcaccaataatatgttataaatgataatacaactctaaataattcattaacaacttgacactacactgttgataattcatcgcatcatacatcattattagtactttttagctggggttgacttaaaacgatgcatttcaaagggatcttgatcatttaagaatttctaatttaacttttactatttggtaactctaatgtcaaaatttactccataacattcctttataatttagtatcaaggttacatt

SEQ ID NO: 72850 - DNA, 605 bp, Arabidopsis thaliana landsberg
cggaaatcgtcatcacgtattgcacccagtgccaatttctgttgtgtgccgcctggctggcccaggaactggtcaggacctttaccgacgaccttggccgcgtggcactggagcctggcaccggcggtatcttccgcatcacctgcaatggcgtgcaggtctgggagcgcaaggccgatggtggcttccccgaggccaaggtactgaagcagcgggttcgcgaccagatcgacccgcagcgtggcctgggccacaacgaccgctgaatcaggcgccctcggccagtgatggctgcctgggcggttgttcggcggccaggcggctggacagtacgatggcgaagatgatcagtgcgccgcccagcagcatgcgcagggtcggggtttcggcgaacaccgcccaggccacggcgatgccatagaccggctccatgccgaacaccacggcggcggtgcgcgccttgatcaccgacaggctggcgacgaacaggctgtgtgccacgccggtgcagaagatgccgagcagggcgatccacagccagtccatggtggttacgccagccatgccctgtgccgcgaacgcagtaggcacaggcccaccaccag

SEQ ID NO: 72851 - DNA, 554 bp, Arabidopsis thaliana landsberg
  unsure (1)..(554): unsure at all n locations
atcgaaacaacgacaagaatcaattttagaattcaaaattttacccttttgaacttctgcttcagagtaagtatgagctccatcgtaatatccatacttgaaatcttcctattaacaatcaatcactaaccaatcagaaacaactttcagcagaattatgaattgaaattatatctatcaaaccatttcaatgctattagtctcgaattgaccaatagggtcctcgttgatgtctggttcgatctgtgacaatccagccgctgagaccagcttcgctaacttcaatctccggccggatttgccgcattttacgacattgacgatctgatcagaaaccctagctccgaatttggaatcagtgacctttggaatcgatttgggtgagagaatcgtgaccgttgccattttttcactcactttatctttttcttgctctgtctcagagttttggagccatagaaagaaaaaacggnttttttttttttttgtgtgttcgttagcgaaagagatagtagtttactggttactgtctgtcatattaccaaagtgactga

SEQ ID NO: 72852 - DNA, 384 bp, Arabidopsis thaliana landsberg
aaagtactttgcgaggaaaaacaaacatggtagtattgcgttatcgaactaatccccggtggggcgtgtgggcatttagtccatgaaaaaacatcgctacttgcttcgttagcatcatcctaaccgttcaattcattgagccacagcgctaatcctattctaccgtccaggcgcattcccacaatgattatgaacgggcacgcccgtttgaggatgcctatgaacagcagtcttgtgcggtggaagccgatatttttctggacaacgaatctctttttgtagcccataacctggaagatatccagcccaaccggacttttagcgcattatacctgctttccatgcttcaaaaagtagaacaaaacagcggacgcatttataccc

SEQ ID NO: 72853 - DNA, 412 bp, Arabidopsis thaliana landsberg
  unsure (1)..(412): unsure at all n locations
tgagaaactgcttgatttacttgacttcaggtttttgtgtttaacagggcatggaaagttgatgtggggtgcggtgctttaattttgaagttctcgctgcttgatatccatagtcgtcttgtgtccttgttggatcagtaaatgcggttaagattgtatcatcctacttgagaaacacagagatgtgaattgcgtttgctgtccatttctttagagggtgggcctcctaggcggattcttcttttatacaagacaacattgtgatacattacgcaagctgtgagtagaactattgatctggagctcactacattatcaagcnnnnnnnnnnnnnnnnnnnnnnnnnnagatgcaggctttcaagacagatatattgttcaggagataattaatgaaatggccgagaacagac

SEQ ID NO: 72854 - DNA, 413 bp, Arabidopsis thaliana landsberg
aatatctcaactccacattataattctggatacatttttgcttatcactgtcaaaactaaagggactattttatcgggcggatctgtaaaaacaaactcgattcatataaaatagaagtagcataggataaaccactacgctaaaaacaaaagaatcaggatatgatcgactcatcatgcacatgaacgagcataggcagggatgggcagaggccaaaacatttggggatctggatctagtgatttaagaagacaacagaaggatcgatacccacaccaaatactaattggatccgttaagatgttcctaagaactcaacattagcgttactctaccaaccataaggagactgatacgcaactggttcactaaccattcagattagggatgtactaatataggcgaaaactga

SEQ ID NO: 72855 - DNA, 131 bp, Arabidopsis thaliana landsberg
ttagaactcgtgtcttccctttgcactggtcttgagtggtactgtttcaaattctgccgtaaacagcgcttttgtcatatgacatccgacaatttatacagtatccctactaatgtggcccattatcctga

SEQ ID NO: 72856 - DNA, 586 bp, Arabidopsis thaliana landsberg
  unsure (1)..(586): unsure at all n locations
aaccatgtaattagcatcctaataataaataatcatctttatttatcaaatgtttttattatatgaccaatccaaataacacatttttatcctacttctttttaacatagtcttaaaattcaagtcaatttatatatgttggtattaaatgaccaaaccaaacaactaattttaacaaattatcaataattgttttcaccaaaaaggtgagactttttatttttagaggttggagtttgcatgatcatgttcttcattttttctatataatttggtttataatgagttttgtttgaaattgtagatgctcaatctagctaggaaatcaacattctttcgacaagcagccaagaatatcactcttgctgtgaacgaggttagttcctcaactactcgtaggccataaaagacttagatgggtaatggatgacatatatgtttgtacgaattttgctttaaccttttaaaaaaatctatttgattaaattttcaatgtaatatcatcgntcttttactttattttattttggctcaagatcctactcanatgatgagaaactccctctcacaagggcatacctcaata

SEQ ID NO: 72857 - DNA, 434 bp, Arabidopsis thaliana landsberg
  unsure (1)..(434): unsure at all n locations
gcaccatgaaataagcgttgtctggtgctttttagcatttctttaatccgctagcgtagaggcatcgcgtggagtgtgcctttcttgaacaaggatctccagcatgcccaccgccctgtcgccgcagcagcccgtcggccattccgttcccaactggaccgcccggccgcgcccgccgcgcgaacccattgccggccactattgccgcctggaaccgctggacgcggcgcgccatggcgccgagctgcatgccgccttcagccaggcccccgacggcagcgactggacctacacctacgcggggccgttcacggacgaggccagctacctggcctacgcgcgcaccgngcaggcgaccgaagacccgcagcatttcgccatcatcgacctggccagcgggcgcgccctgtgcaccctggccgccatgcgcatcg

SEQ ID NO: 72858 - DNA, 274 bp, Arabidopsis thaliana landsberg
ctctatctctaagggagcacaatgcttttctttagttggtaatgggtcaccattcttatttattggttccatggtaaaataatgaatcaacttatcctaaagctgagaaaaatttatagaaaatcaaaaatcttataattattgcggtcattaatttaacgaaagaaacaaaaatcgtgtggttagtctaaatctttagggtttcaaattcctgactgaagaaaaattaaaggtcgaccgtaaatatgtacgggatgctagataatgggctttc

SEQ ID NO: 72859 - DNA, 545 bp, Arabidopsis thaliana landsberg
aggccttagttcaaagattgaaatttccaatgcgttgatattttccttctcgaagaatggacagatagaaaaagctgacgctattatttgaaagatctctgaggaagaatcttatctcatggaatgcgataatctcagggttttaccataacgggtttccttttgaaggtttggaaaggttctcgtgcttgctagagtcagaggtccgaatcctacctgatgcttatactctcagtacccttttgagcatttgcgtaagcacttcatctttgatgctcggaagccaaactcacgcttacgtccttagacacggccaattcaaggagacattgataggtaatgccctcataaacatgtactctcaatgcgggactatacaaaactctcttgaagtgttcaatcagatgtctgaaaaagatgttgtgtcatggaattctctgatctctgcatactcgagacacggtgaaggagagaacgcggttaatacctacaagacaatgcaagatgaaggaaaggtcattcccgatgcagccacattctcagcg

SEQ ID NO: 72860 - DNA, 572 bp, Arabidopsis thaliana landsberg
cagcggcgaattcgtgggtccagaaattccgggtcggcgcttttgttttggcgtccgcggcccaccgggttggcgggggaagctgtctcttaggtggtgtgtggggctccacgacccacggtcactcacggtatctactcgtgaaggacgttgctggatgtctcggccaagtggaacggcctgcacacagcggacttgggcacgcgccaggcccgaggtctcgatcagcaccgtggtcatatcttcctcgcgccgctccagcaatctgttccatcactcgggaagaacatcctcctgtaccgtgcagcacaggcagccgttggccagttcgtagagctggccagtgggctcgccgttgtcatcggaggcaatgccgcaaccctgcaggatctcgccgtcgatgcccagcttcccgaattcgttgacgatcaccgcgatgcggcggtcgttggcgttgtcgaagatgtggcgcatcaaggtggtcttgccgctgccgataaagccggtgacgatggtggcggggatcttgcgaggttgcatgctgaaatccagtggatgagctggggcgggtt

SEQ ID NO: 72861 - DNA, 288 bp, Arabidopsis thaliana landsberg
atagaaaaacgtggaagatagatgatatgtgtttggcatgagtcacatgaaatgttcatttttgttgggctgtgatgtaataaaagtatttttagcttgtttgatcactaaactccaacatagtaatttgtcatttcttacaataagtacatcttttacatatggcaattctaaccatcactctctctaacctctccccacctcatatgaccatcttctcactcttttatctctctttcattattattatatcaaattgcttttagaccgattctctatacatattcg

SEQ ID NO: 72862 - DNA, 243 bp, Arabidopsis thaliana landsberg
ttgatattactaactggggattcatgaatctggtggaagactttttgtctacatgaaaaaaacacaaatctgtttctcctcctttgttggttcctcaggtaagccccttttaaatcctcctacgtgttcgtttctcccaacagaaataagttgttcgataaaaataaaaaccactttgctgcattgcagtggttttgctccagaacatggcgtgtgggtctgttatgagtcttgttttgggta

SEQ ID NO: 72863 - DNA, 601 bp, Arabidopsis thaliana landsberg
  unsure (1)..(601): unsure at all n locations
ttcttgccgaagcgacgccgcatattttccgctcggagatgggcggcgtcgcgacgctcgcgtgcctgtttcatcgcggcctgcccggccataagggcgcgatcgacctcgataagctggtagagacgctttctcctcccgggattggtccgaggcggctcggcaccgccctcgtttgtatggagacgacccacaatgccgctggcggcgccgtgctcccgatcgagcatatgcggagcgtacaaaatctatgcgcggagcaaggcgttcctttgcatctcgacggcgcgcgcctgttcaatgcggcgatcgccctcggcatcaccgcagataaaatcgccgcttgcgccgataccgtcaccttctgcgtatcgaaaggattgagcgcaccggtcggatcggtgctcaccggctccagggaattcatccatcgcgcgcgcggctatcgtcgcatgctcggcggcaacatgcgacaatccggcctgctcgccgcctgcggtattgttgcgctggaannnnnnnnnnnnnnnnnnnnnnnnnnnnnnnnnnnnnnnnnnnnncttgcccagggcctgcaagcgatcgatcgcgagctagtgga

SEQ ID NO: 72864 - DNA, 592 bp, Arabidopsis thaliana landsberg
  unsure (1)..(592): unsure at all n locations
ttgatgatttcgtaatacataaaacagaagaaaagtattaactataacaaatcgcctttgcaaaattgtgtgaatgtatgtaattttaagacaatcatagtgtgcacagtccttgatcatgcattatctgagcatagtccgtaacagagaagattccctgagctagaaaagcaaaatagaccatatctatttataagtcaagataaagtgttgtattttgtatagacatatcttagttgaaaagttattcttcgtaaaagttatttttctttctatttttggtcattttgttgtaacgaagtttttattttgactttccaccgcatattacctcttccgaaatacaagctctttaaacatcatagagattacgtttttttggaatataaaagcataagaaaatgaaaacaaaagagttaggagagaaaaagggggaaaaaaaaaaaaaaccgagatggaggaattccaatctcctagaatacgattttacaaatcgtatgaaggagataggaacctccaactggttaatcctgcagatttaaaaccggtcagagggatatatgttgntagagaatcgagggcgcatcgatct

SEQ ID NO: 72865 - DNA, 484 bp, Arabidopsis thaliana landsberg
tttgccacgcgctcggaggagatctgcgacacgtgcaccagattatccttgcccggcatgatcgtgacgaacgggccagggtccatcagcttggcgaccttgccttcgtagatgcggcccggctcgacgtcggagacgatctgctcgatgcgcttcttcgcctcgtcggccgccaggcggttgaccgaggcgatgatgacggtgccgtcgtcgctgatgtcgatggtggtgccggtttcctcggcgatcgagcggatggtcgcgccacccttgccgaccacttcgcggatcttgtccggatggatcttgatggtgagcaggcgcggcgcgtactcgctcatttccgagcgggccgtgctgatcaccttggccatctcgccgaggatgtgcagacgaccacgcttggcctgctccagcgccaccttcatgatctcctcggtgatgccgtcgatcttgatgtccatctgcagcgcggagatgccat

SEQ ID NO: 72866 - DNA, 292 bp, Arabidopsis thaliana landsberg
ctacaaaaagaccatccatcactcattttatatcttacaccccaggcacagaactaagggcattgtaactttacatgccgatcgcgaccaaaccatcattctaccctacacgcaccatctctcctaagcgctaccacactatatacaaaactcatacgatgcggccctcaacatggcactctgccacctatgaaattattctgggacaaacttcacactccatatggactgatcctatgccttacatgctgcaatcattaaaacgcgatagcttaactcaaagctctacctg

SEQ ID NO: 72867 - DNA, 434 bp, Arabidopsis thaliana landsberg
atgaccgccaaggcgctgttgaagaagaattcgcatttgacgcgggacgagatcaagcagggggtggggggcaacctgtgccgctgcggcacgcacatgctcatcgtacgagcgatcgatcgcgccgccagcgcaggagcgacggcttgaacacgcgacgtcgcgacatcatcgaatttaccgaactttccgaccttggcgccagccgtggcgcattcctgaagacttccggcggcctggtgctgggcttaagactgatggggccggccgacgcgctggcagcggtgcgcgacaagctgccgctggataccagcaccgtcgcgatgcaaggcaacagggcgtttgcggcggtcgatccgaccaagctggatgcatggatcgccatacatccagacaacaccggctcgctgttgaccgggaaggtggaacagggc

SEQ ID NO: 72868 - DNA, 405 bp, Arabidopsis thaliana landsberg
ctggggggcccccccggggggggctgggtggttgttttgctctatgggttttcagcaggccgttctttggggccgtggccttgccgggggcaaccggcctgctggtgagctggttcggcataatgggcctgttcgacctgccgaccgcctggttctggaagaacatcgtgcagcgcgccctgctcagcgtgttccccggcaccggcagcctcttcggtgcgaacggcggcgacatggtccgccacgtcaccggcaacggcacggacgtcctggacctggcaaacacctggcacttgatggcctcgcccaacttgtgggtcggcgtggtgatcggtgcggccctgctggctggcgcgacctggttccgccgctggcgcgacgacagctgagccgtccgccggatgg

SEQ ID NO: 72869 - DNA, 536 bp, Arabidopsis thaliana landsberg
ccccttcaatcgctgattggcggctatatcgacggtacgcacctcgtcgccaacgggcttggccctgtcgtcctgctgctgatgcgcgtgtgggtcgcgctggcgttctggcatgccggagtggtcaagttcgaggacccttatggcacgaaattcctgttcgacacgatgtatcaggtgccactgctatcgcccgataccgcagccttcctcggcacctggatcgagctgatcacgccatggttgctgggcctgggccttgccgcacggccaaccgcggtgtttctgttcgtctacaacatcatcgcggtgatttcgtatccgagcctgtggccacacggcatctgggcgggcctgttcgacggcaatttcaacgatcacaagatctgggccatgatgttgctggcggtggtcgcgtggggaccgggaaagctgccgctcgatcatgggctggccagacttttggcgaacgcgggtcgccagcggccgggaaaggtcatgaccctacgacaccccgcctttgccaagctttaaaa

SEQ ID NO: 72870 - DNA, 491 bp, Arabidopsis thaliana landsberg
  unsure (1)..(491): unsure at all n locations
gctggtcgcaaccatcgtcgtgctgccgctcggtgtcgtcgatgcatgggacggatctgctgagcggtccggcccgcnggatgggcgcggggatcgccgtgctctcctcggtgctgccctattcgctggaattgatcgcgttgcgccggttgccgccgaaggtcttcggcatcctgctctccctggagccggccgtcgcagcgggagccggcctggtcatcctcggccagcacctgtcggcggtcaaactgctcgggatgcttttcgtcgtgggcgccagcgccctggtcctcggcgccgcacgcagcaccgaggaccaaccaccgacacgcgacgcatgacgcaannnnnnnnnnnnnnnnnnnggtcgtcgagcttgccgacgcggcaccgcagactgtcagcgacgccgtcgagcaccgaactcccgtgacacgtcacggatcccggacacattgtgtatgccggattcgtcgcgtggcttctcctcg

SEQ ID NO: 72871 - DNA, 187 bp, Arabidopsis thaliana landsberg
tgttgactactccgatgctgaagaagagtttgtgaagtcgatgtatagggaggtttcttttttgaccattctcgcacaattcatatgtcgaatgaaaacccaattattatcatctgaatatattcattaggatcaatcacagcaatagatggtggctttgccaaatagacccccacttctgggttca

SEQ ID NO: 72872 - DNA, 531 bp, Arabidopsis thaliana landsberg
caccagaagtgccggtcgccaaagaaggggacaatcattgttgtttttccacattttagggctatggggggtgggcgtgcgcctccgtggatgacacacgtcttgactgtcgggaagagccggtcatgaggcgtgttgtcgagcataaagatgttgtcagggacatcatcgccaccaagtccgccccaacctttggagaccagggcgcgaatacccgccatttcaacggccttgaagatcatatgggtgaattagtcaggatcgaccaccacgattaagccaaaaccaatgtagatgggagtttcgccagcatccaggaagtcttcgagttctttgggaggcttgaaagtggaagccaggtcgagacaaacgaagctggaaatgtctatttcgctaccccagtctgccggctttggtaccaatcctggcgaccacaagtatgtaaacgggacgtagagttgatatgtagcaccggggcccagaaggttaagacaggatccagggccagcgtcttgccacgaaactcgttga

SEQ ID NO: 72873 - DNA, 246 bp, Arabidopsis thaliana landsberg
taagatggacctcattcttgtaccccctccctaccgcatagctctagcatgcatatacatagcaagtgtccacagagagaatgatatcactgcatgggttgaagatcttcatgaggacatgaacttggtcagtcattcttttaaaagttattcaatcattagttaaagcgaatagctatgaacttttggcgtgaatttcgcggattcttttaatgactttgaaaagcttttccatgggggcaatgg

SEQ ID NO: 72874 - DNA, 356 bp, Arabidopsis thaliana landsberg
gaacacttatattattgatatccacgtggattcgatcattcttctatgccatgctctgcggaaccctactctctatcttatttaacgaccaagagatctttataaatcgatcgctaagtcgcgaactactctagattcttaaagacacttgttcaagagaggggttggatgcttggaatcggccatatattactatgcaagggcgtactcacaggacaatatatatatctcaaatcatagaaatatgacgaaaacataaaagacctgacgaagtaatatatatctgatagactcataaataagagcctatgaatgctgacaacagttttcttaaagtacgtatgggcactatataa

SEQ ID NO: 72875 - DNA, 541 bp, Arabidopsis thaliana landsberg
  unsure (1)..(541): unsure at all n locations
aaccgccgcatctttattcttataatcctcactaataatttccccctttacatgcattaacacaaataatagaggaagaggatataatagttttttcactttagacttataatatgtttaatttgataacaatggtgttgttattatcatgtctccatatctcgtgaaaggttaagagggcctaaaacttccgctcctgaacatatatgtacacatatatacctgcccttgtgtgtgtattaagagtttaatactatatatcttagctaattaggatttaattaagtgtagttagtacatgactaatgcacctatttggtcatcaaaccatcattatgatcaacctaactctgtccctgcctatatatagctaagttcgggatttcgacgctgcatataaaacttaacatctattggaaataaattcatgttatcttacaataactaagcctctttcttntcctttaagtgcttaccttagaccacacaatacataaattatcatggttaaaaactatatgatacttcgaatcgaaatata

SEQ ID NO: 72876 - DNA, 393 bp, Arabidopsis thaliana landsberg
aatccgcatagatatagccacaaattacatctaataaagactcttcgattttataaacaatggacaaacaagagagatgggaaatatatagaccaaacctttctaccccttttggcataaaactgcagacattactgactatttatccttcaaactcatactcatgagccttcactttctaaggtgatgcataaatcaacaaacaagagctcttacattgtaaccaacgtttactaaaacaacgcagatgaattgaaaacccctcgcaataaaagagagattgctaaatttcaacggatcaggatcttactcctatctagatgctataaatggacactaagatctgtcatatcttttacaccagtaaatccctcgtgtaagagtttctgtatt

SEQ ID NO: 72877 - DNA, 399 bp, Arabidopsis thaliana landsberg
cagtgctcggaggccccggcccgtccagaccgatgccgataggcggaaggccccggcaccggtttggttattgcagctcacgccacgggtggaagccgccgtcgacggggaggattgtgctagcggtcctgaccggggcgtgacgcggtctgggcgaggacggacgcgaccgggatgtcgtacgcctgccaccacggatgtgccacggcgaagcccagttgctcgttggtcgcgatcatgtactggttgacggcggggttgccggtctcgatcgttcgcaagccgggctcggtgaccgctagccagtccagcatcgccgtcttcatcagcatgcccagccggagaccccggtggggtcgggccaccggggtgtactactggaagccccactccggggac

SEQ ID NO: 72878 - DNA, 7641 bp, Arabidopsis thaliana landsberg
  unsure (1)..(7641): unsure at all n locations
cttctgccattgcggaaaattaccttgacacgagggaaccttcagtttcataaatgatatccgtgatgatccaattatcaggataaggtttgccacttggggcaaagtaataaccaacctatgacagacagcttcatacatttagtacctttaacgcttaatagcataagatgcaagggagaagataaatcataattcaaaaagatattgcaaaccaaatggggaatataataacaaagtcaacgcataatgtgatattgagaatgcatcatacctctgtctttagatgagcaccatatatgcaaaatacattttttataggtggtctctcccaaggagtcagaggattaaaaacagggtcatcatgatacaacctgaaaagtatagttagcatgttatatataattcacaaagatttgctagaaaaacaaaattgacgctattagtcaaaacaaactagagaatgagagaatcaatcaactaaaatacccccttttgcattcataactgtaaacgaaaaagacattccataatataaggagagaactgataatcaataataaggtttctgattatacttgtttcttatagtaagaaagacaaagcatatgaacaattgatatagagatttaaacaaaacaatttgacgtacaagaagccagcaagtgatgatcgatgagcaatatttcttatcacaaagaaaggtacgtacttctttaactggtgtaacatcctcttgctatctgggtcatagtcttctattgctttgaaaagagtcccatctgctagttcacgggctgtgaaagacaaaagggtgggaaggccacattccatgctggtcatgttgactagagctgtttctgtaactgatggatacacatcaaaggaacgaaatatgagagtgaacattcttggtgaaacttttgttagtgttacagttgcatatacagagtctaaccgctagtggaaggaatttcaatgttaataatatttgtcggccagccagaatattttgattgatattcctcttcatcacagtggtatacgcgcttatctttctttgcagcacccccagaaaaatgcgtccagaatgtgttatcacccttgcaattctttgaaaatggcataagccacaatgacgacgcaaaagaattggacaacaaccgagcagttccctgaagccttgccaacaaaaaacatgagaagcgcatgtcaatatgtcacatgatttcaataaacaaatcatagcctattaaaataaaaagatttcagtcaaagtttcttctcaacttaaagtctaccataataatctgaaaactaaatcagtgtacatgtggtttggttgtattagctaaggccgctgacaggtatactacccacaatatgttctttgataactagcacttcaagatctacagataccatatcgcgtacagcagttcaattaacaaaagtaatactttcaaaaggaaaatccagtgagttataagacctggttgatatcaactacttaaaactaaagagaagtcagaggtcacctcagaaacaggaaggccaaacgttacaccagagagagtagatttgattgcctcaacagaaccaagaagaggagctcctaaatcaacaacaaatcaggtatcgagctcaatccagtaagtcacaacataactcccccaattagagaaaaaataaaatggtaacttaaggatagtaggccggtaccaacagcgaaataagcatggatatgctgatcaagccacttcaaataatgttttggtgcaatttctagcctcagccattccagaaagtttttgaagacattattacccattgaatgggcaaatactatagaagggccgccacggagttttaaagcagtttcaaaggtcaacctgcaaaaaggaagacgaccagagctcttagcttatcttacataaaaagagaagataaaagacattagcctgataaggactaacttgagcttgtgaaagtaaaggtcacgctcttccaatttggttggtgacaatctccaatcgtatggaacagcgacaattgcatttgcttctataccaaactcaacacaccacttaagccactctttccagacagtagaaagaggacctgaaaattgaccaaattaatgaacttagccatattatatcacaacaagatgatatcaaattgaagaaaactcaaaagaaagaaaaatccgaaactacctgttatgtaacctggatccaattctgtgatggctgaaagaccactgtcaggccgtgacttacactcgggatggtctgtttgattataaggatctagcaccatacacttaaaccagcagttgacagcagaaagaagctgtaaaccatccatcacgtcgatcagtaagcaacaaccaaaagaatcacaatgcacaagtaaaatgacctaacattttctaactactattgagcactctgaaaaacttgcagatctagttgaataaaaagcgcagactaattacacattcattgcgctacatttagcgaaccaaaagcgatgggaaacactcgccgagtcagctgttttatatgactctaaactcagattcagaagcgtcactgttgactaatgaacgaatcaataagagagacgagacatgcttcattgctatatttcgcttggaattcatcaacaagtgactcgaccgacagaataaggagcgaaggaaatgaagatcacggaccttagtggtgtctagccatacgaggtcgagcggattgaagtccaacggagtgtatggacagtcaaggatcgaccacgctcgtagctgcgtcgacgcaaatcccggaatgattatacccgatagcttcgagtagtcgccgtgaaactcggtctcatcctccaccgcagttcggccaccgcaaatcaagaaaaaaacggcgatgacggtgaaggaagccgttactgatttcgaattcgctcccatcgctcggtgtctctaactacttttcatcgccagagtttaggaggaaaagtaagagagaggagagagagagagtgtgtgcgttgttggggaccttgaaggtgagagttgaaaagtttttggaagcgtcctaactttccaaatatacccttacaagaaccttcgaagtcatcgagaaggttactactctctatcacgtcgtaacaaacaaatgggcttttaattgggcctttgaaattgaaagttgaataatttcaaaattttcgtaacaaacaagcgggcgtttattcacattttctcccgcttaatcaaatcataaaatccccgcctatcttcccgccatttgatatctatcgtacacgtgtctctaaattctcaaagtaaataccaatcgcacggagacgaagcaaggaagtgcatcttctccttctcttctcggtttcaagagctttcgtcatttagatctgggttttgtacatcaccaatggcggaatttactaacatgctaatgaatccatgggttcttcatctccagaagctcgagctcgagctcaagtgccctctatggtttgtttcacccacagcttccctttccttgattatattgtagagtaatcgagtttttgtttagtgttcttggaatcgtaacaagagatttacgtaatttgcagcttaaaattgcttaatcgaccggtgttgcttccttgcgaccacgtcttctgcgagtgagattatctaactactctgttattctttaacaattcattacaaatttgaattcatatagattcttatctttctggaaattatttgtacagttcatgtgtacacaaatcgtcgcaagttgaatcgggatgtcctgtctgcaaatctaaacatcccaaaaagggtaagtccagtgatatcatttgaagattagtgttcaagacagtatgtgaaattgtgaattactctcatgtgcagctaggagagatcttcgattcatggagagtgttataagcatatacaagagcttgaatgcagctgttagtgttcatctcccacaattacagattccaaatgattgcaactacaagaacgatgcattgaacaattccaacagccctaaacatggcgaatctgaagattctgagatgactgacaaggatgtgagcaagcgcagtggtggtactgattcttctagtcgtgatggttctcctcttccgacctcagaagaaagtgatccaagacctaagcatcaggattggactgaaaagcagttgagtgatcatctcctattatatgagtttgaatcagagtatgatgctgccaatcacgtaagagcatattactgatcattttgatttatcagtgcgcaatattgaaagatgtttataaattcctcttttttttcttcttgctgcagactccggaaagttatacagaacaagctgcaaaaaatgtgagggacatcactgcttctgagcagcctagcaatgctgcaaggaagcggatatgtggtgattcctttatccaggaaagcagtccgaatcctaagactcaggatccgactttgctgcggttgatggagagcctccggtcagatgatcccactgattatgttaaagcacagaaccatcaggtgcattctcgtcttacttcataagttgactattttagtttatcagttatgagtattcttaatcacacatttacatgttaatagatggtgtacttcagtttttgggtaatctatagttttgttctgtgcttgagatcaaacaacttaagatgtgtagtgatcttttgtgtccagcagttacccaaaagtcatacagaacaagattcaaaaaggaagcgtgacatcaccgcttctgatgcaatggaaaatcatctgaaggtccccaagagggagaataatctgatgcaaaaatctgctgatattgactgcaatggtaaatgctctgcaaactctgatgatcagctaagtgagaaaatctcaaaggcattagaacaaacatcatccaacataaccatttgtggtttctgccaatccgctagggtatctgaggtaaaacctttaaaagtctttgccatatcctctgctctagaaactgagcttctctgtttgtgaagtattttactcaactggctggatcaatatttgttaggccactggagaaatgctgcattactctaggggaagaccggtggatggagatgacatcttccgctccaatgttatccatgtccatagcgcatgtatcgaatggtatagaaaatgaaacccaaaaaacttctacatttgctcatctttgtttctgcaagtccatgtggatatagtttggctagtgttataacgcttttggcttttgcatgataaaaatactaaaagtagttgaataaatgttcagggcaccgcaagtttactatgaaggtgacacagtgaagaacctgaaagcagaactggcaagggggatgaaaatcaagtgcactaaatgtagtctgaaaggtgctgccttaggctgctttgtcaagtcttgccgtcgaagctatcatgttccatgtgcaagagagatttctagatgccgttgggattatgtatgttttgccacattctctacattctcattcacataagagttacttaccaatgttctagttataatgtgagattgttttcttggtctttacaggaagattttcttctactttgtccggctcattcttctgtcaaattcccgaacgagaagtctggacatcgcgtttccagagccgagcccttaccaaaaatgtataattctgtttcagcatataatttaatacttacagtatgacattattattcttatgatagcaactaataaatctcattaccttgctccctcagaaatcctgctgagctatgttctttggaacaaacaccagcttttacaaaagagcttgttctctgtggatcagcactctctaaaagtgataaggtcagtactaagttaatcttctttccacaaggttcaaacaagaaacaagtgtttgtggatttaccactcttggttcaaagttggtagagctttttcatataaaaagactaattttctcattgcattgctattccctagaaactgatggaaagtttagccgttcgatttaacgcgaccatatcaaggtactggaacccaagtgttacacatgtgattgcttctacagatgaaaaaggagcttgcacaagaactttgaaggttcttatgggtattctcaatggaaaatggattatcaatgcagcttgtaagttagattgctcactcaagagtttgtcataatctttacttttcaccattaaggaatcttcatctttacatgaatcaaccttgaattgtttctagggatgaaagcaagcctaaaagcttctcaacctgttgatgaagaaccatcangaaaaanttgatactcaaggatgtcaagatggaccaaaaaccgcaagactcagagcagaaactaatgtaagtataaaaacacaccaaaaacaagtttgaaagtgctttgcttcttttagatatctcactctctattttttcttttggcaaacagaaaccaaagctctttgagggcttgaagttctatttctttggagatttctataaaggatacaaggaagaccttcagaatctagtcaaagtcgctggtggtacaatcttgaacacagaggatgagcttggtgcagaaagcagcaacaatgtcaatgaccaaagatcatcatcgattgtggtttacaacattgatcctccacatggatgtgccttaggtgaagaagtcacaatcatttggcaacgagctaatgacgcagaagctttagcaagccaaactgggtctcgtctcgttggtcacacatgggtcttggagtccattgctggttacaagttacatcctgtgattggctaatttaagaggaagagacaaaagacatttcaatttccctacacatatgtaacatagtttaattttactatttttgatttcgtaagataacaaaacagattcgtgtttgaacgcatataaaattccaacttttactttcgaaaaacaaagctttgtaacttaaagtttggaaatcttaccgattaatgacagaattaatgtttttaatgaaaaataaattgtaacgaaaaatggtgtgccaacgcaccaataccaaaaggctttgacagggcattggtgggtcaaaattgtaacggtcacttactttatcctccttaataaagctacacaattaataaattaaagaggcaaaaaataatgctaaacaaaccctaaattcccaatttccgaagtgatcactttttccccgctctcttcgtagtgatcgtgcccaccacaccagaccccgctcctcaatttcgatgtcgacctattaatgcttgatcaaatatctggaaaccacacgcatgaagtttctcttcttctctcgctagaccttgagaattttcgggactatgggttgcttttcgggttgcttcggtggacggaagaatcgccggcgtcagagacgcagagattccgatgaagctagagataacgtaagtttccttaaaaaaattcttacgtttagtttgtgagagtttttatctgaaattcctcgcttctttcagtttctttttagtgatgaatttgcttgaattacgctacattctagatagatcatc

SEQ ID NO: 72879 - DNA, 300 bp, Arabidopsis thaliana landsberg
  unsure (1)..(300): unsure at all n locations
gagcgagcttgtcttcctcgacggctacaacgcatatttatctttccagtctggcaaaaatttcgtacggggtgggtttactgtgttgccggacctccaattgcgccgatatccttccacgttgcttgaccgcgccaggaagctatcgggaattcatcgcggtggcgcnnnnnnnnnnnnnnnnnnnnnnnnnnnnnnnnnnnnnnnnnnnnnnnnnnnnnnnnnnnnnnnnnnnnnnnnnnnnnnnnnnnnnnnnnnnnnnnnnnnnnnnnnnnnnnnnnnnnnnnnnnnnnnnnnnnn

SEQ ID NO: 72880 - DNA, 469 bp, Arabidopsis thaliana landsberg
ggtcgttgagcaccgcatgcataaacgtaacggtatttttgatccaaatacaaaggattgatgctgcggatatgcatcgctctcccatgcttctctgcctccacggctgtctctagtttcccgtatttgctcccgtccaatggtatcctgaatctcccgatcctaacataagattacattaatccagctataatcaaaactgaaaaatgtaggtgatgagtattgagtagtaacccttatatacattacctagcatcgggtaaaacgtcgtgaccatgggaagaacgtagggtatcgagacggagcatatcgagtatccgagtatcggcgttgtgttcacaacaatctgcaatgatgaccgtcgcttttccatcgccatttttatcttcttcatacgcgtttatgaagtgaaacgttacgtatgctggaacctccacgctagccacctttaaccatatataacgttatg

SEQ ID NO: 72881 - DNA, 317 bp, Arabidopsis thaliana landsberg
agaggaacggacgtggcagatatgggaaatcgtatcagagtctcagtgggcggatcgactttaggacgaatgtataacgtgtttggcgaacgccgggatagtttaggcacagtgaatacttgcacaacatgtattatacataaatactggccgtgatatatggaagaagatacaaagtaagcgataattgaaacaggaattaaagtagtagatgtttgggcccttaatcgactagggggaaaaatgggactattcagtggagctggcgtggggaaaacaggcctaattaatggaatagagcagctacattgctaagg

SEQ ID NO: 72882 - DNA, 231 bp, Arabidopsis thaliana landsberg
  unsure (1)..(231): unsure at all n locations
cgctggtgaacctgcccacaatgttctttggtgcctcgaatcccccgggggggctctttcgctgcctgctactgctccggaagggctgcctcctgtagaacgtcgctcctgccaccctacgagccacgggagctgcccggcgattacaccgcggaatctggcnnnnnnnnnnnnnnnnnnnnnncgtttaccgagggacgcccagaaagccctgcgatggcggtgccactc

SEQ ID NO: 72883 - DNA, 215 bp, Arabidopsis thaliana landsberg
gagatctcatgttcctcttgctctatatggacgacatgcttctcacaggcaacaatagtgaactgttggacacactgcttgtctctctgaataaagagtccgcatgaaagacatgggaatgctgcattactttctcggaattcaggctcattttcactgagaagggttgttcttgcatcaagagaaatatgctatggatctccttgttgcagcag

SEQ ID NO: 72884 - DNA, 439 bp, Arabidopsis thaliana landsberg
gctttatgttctccgacatgattaatattgtatatttagaattttttgcaaagtaaactcgaccctgggtcttgggcatatagctcaaatccttcctctgatttttttattatctatttggtttgaggtctattaattatagatatgtgagtaaatgatttatatattgtttatgtgtttaaagcctgcttatgttaatgaaatttttttataaaaaaatgctacatggaaatatatatattgcccgtatcataacaatgtcaattgtgatttaccaaaaaaatatgttcattactatgaaaacttatactatgaatcttacaaattagaaaaattgtaactattacgtgtgaattttaaaagattaatcaactgaaaaatatgtcgcctacgaccttgttaactaaattatcgtataagtcttagtcagtcattgctc

SEQ ID NO: 72885 - DNA, 571 bp, Arabidopsis thaliana landsberg
  unsure (1)..(571): unsure at all n locations
cagatggacggactgaacgccgcccgagcctgccgcagccattgtgatgcgccccacccgcttaacacttgttcgcgatagcgaaacactataatcgtcatctaaccacgcgccaaggatggattgcacgccaaaaacgcggctaacggcatttttcgccgaggcgggcccgcgaccattgactcctcgcgaaccggcccattagattggacaaaacgttgttccgcactcgcgaacaacgacggggcgggaaacggaaggccgtcgcaccaggcacggccggctcgaggtaaaatacgcatggcgacagatacagctcctgataccgatctcgaaaaacgcgtcgatgctcttctcgtcggcgccatcgacccgcatgttcacagcggcccgtccatcgccaagcgcgcgctggatcacgtcgaactggcgcggcagtactccaaagccggcttcgccgcggtggtcaccaaggaccacgactacagcggcgtcatgaccgccaagctgatcgccgacaatttccccgannnnnnnnnnnnnnnnnnnnnnnncatcgcgctcacaacgt

SEQ ID NO: 72886 - DNA, 504 bp, Arabidopsis thaliana landsberg
  unsure (1)..(504): unsure at all n locations
gcccaccttgctcgggcggttccctgcacctaaatgagtccagttcgtgccaatccagcacaattttttgaccaaacttcttctggatggcaaacgcaagtggcaaggcctcaaaccggttggaaataccgacaaattcatcaatgtatacagtgggcatggggcaaggagacctgtctgagcaatgttttgactgataatacgtcgaagtttacttgcatccgctgcccagtcagttgagggtggcctcgaaataggtgattcgctttgcaaaagatcctggtcatcaaattgcgccaccancgcgatgtcttgctgagtacggcgctttattccgcgctgaagcagcattacccagcctgccagctggacgtgttgatctacaaggaaaccacgccgctgctggaaggcaaccccgacattgacggcgtgctcacgattgancggaagatgaaaggcctgcaacgtctgcgtcacgaattgggcttggtgctcaaagtgcgc

SEQ ID NO: 72887 - DNA, 602 bp, Arabidopsis thaliana landsberg
  unsure (1)..(602): unsure at all n locations
atgcgaaaaggtggtaacagtatcatgtgcatatcatcatatcagacagtctcttacacttcaatcaagtgcaagtgatgtatgacgttaagtttacacccaaaactatgtttggttatagttaaatcttattaattcttacaagtttgtgtaactaacttgtcacaaggagaattatttcgtgatataacgattccaacgtctataagttttcctaaaaattggtttggttggcaaaaattaattggtgtttggtattgtttcgaatccgaaacaacattttgactcaatccttctaatcactaaacattaattgaaatcagccaactaaatttgccatacttatatgcataaactttgttagatggtttctactgcaccgaccgtatactgcaatatcagaactataataannnnnnnnnnnnnnnnnnnnnnnnnnnnnnnnnnnnnnnnnnnnnnnnnnnnnnggaaagcaaaatataatggaattcagacaaaataagattttgctacatangtgatagatgtcacgggttctacanatatatatgcttgaaccgtacaatgaanaaacgtctatatgattttcatatttctggctc

SEQ ID NO: 72888 - DNA, 419 bp, Arabidopsis thaliana landsberg
ctaggttcgaagtaaccgaagatcttcagatgtttgggggacttatgaaagccactggctatatctggaactcaggagtggcccgaaggagctcaaaccgaggaagaaaacgactggtcagcaacattgacagagctccggtttgctcctctttggcacagccaatgaataacagtagtgtacaaatggtgggactggaagataggagccttacagggtggggaaatgcaaccaaaaaaccaaggcgacatggggccccggcgggtcctcccaaaccggttttaaaaaaaagtttttgaaaaaacccccctttctctttggggggtttttttggggaaaaaaaacacccctgttctttggcaaaaaagagtttcttgtcttgttttttttttttaaccccccgctgggggggggggggg

SEQ ID NO: 72889 - DNA, 573 bp, Arabidopsis thaliana landsberg
  unsure (1)..(573): unsure at all n locations
cagtttttctaattggcacttccaatcagtgattataacacggatttaaagtcagtactggatcaaagcattcggatcctccaggccatgattgatatctgcgcaaacagtggatggctctcaagctcactgacgtgtatgcgccttttgcaaatggtcatgcaggtagtgtcctgaagattactactcttagcttgttcaaattatttcacttttgcaaattaagaggaacgctttacttaatccaattctctttttaattctagggcatgtggtctgatcaagattcgtcattatggatgatcccatgcatgaatgaccttcttctaggatctctgaccgcaagagggattcacacgctacatcagctattaaatcttccaagggaaactctacaaagtgtaaccgaaaacttccctgcatcaagattatctcaggtgctctcaaattggtcacaactatttcttttgcatttaatactttcactcatggagtctcaactattctctgctgcactcttcgatcttaattaggatctncaacgattcccacggatccaaatgaatgtgagac

SEQ ID NO: 72890 - DNA, 428 bp, Arabidopsis thaliana landsberg
  unsure (1)..(428): unsure at all n locations
taatttgtgagccgggctttctctatgataaattattctcaagttggatcaatcttaaaggcttatttaatataatctgtaaacttggtcatttcagtaaaaatattttgtaagttgggtgtaatagcgggatgactttctacgagttgaccggagttaacgaaggtgttttccatataagcttcttgaaaaacaataggagataagatagttgtcggagttagatgcactctccccactaagcacaacttatgcatgtaaatttgttcaagagccggattggacaggtttctcaaaaccgatattacggggagaacgatatcgnatatctactcttagtttttccccactatttcgtcatctcttgccacttagtatttttaagtccgaccaaacatagattacagtgtaaagaaagcgattcttgc

SEQ ID NO: 72891 - DNA, 457 bp, Arabidopsis thaliana landsberg
cgttcgagggcgtcgaggtgaccggaccagtagagcgggtgacgagcgatccacgcgtttatctgtttcagaccgtcaggtccgcagtgcgtagatgcggcgctgtgcgtgggggcgcactttcacgagcccgacctgacgtagcaccttgaggtgttgggacacggtcggttgggtgaggtccggcagcgtcgcgaccaattcgtctgccgtgcggacaccgacgatgagcgcgtcgagcaatgcccggcgactcggttcggcgatggcttcaaatacgtccaccagtgcagtttgcacgcagtgctctttagatggcaatacgtattaaatgtggcttgcgaccctacctactagaatgtgggttgatggccatggtgagcacccttggtgccgtggacgctattctgcagtgggcgcgcaccctgatcgtgtttggcggatacaacggtttcag

SEQ ID NO: 72892 - DNA, 506 bp, Arabidopsis thaliana landsberg
taggccaaacatccaaaggttaatttgtctggaaacaaaacagagactgcttaaacggcggtctctgtttgaatcacccttaagcctgaaaaaaatgaagtcaagttctacttagttttggttgtattttgtagcgcagcgtttttgccggtatctctattcgttagtgctttgagctcattaatttccttccttagctcagcaatctccgccgtttgatttttcaattcccggactgattctattaaatggggaatcagtcccacgtaattcaccgttttaaatcctttctcgttttgttggacgagttcggggaagtacttttcaacttcctgggctatcacacccgtttgcagttctggtcctctattggggtcgacccaacgataatgataaccacgtaaccgggcgatggcatcaatgctgcctttcaatggagtaatatcccgtttcagtcgttcatcggaactgaaaatttgaagtaccccaaggggtgtggaagcgtt

SEQ ID NO: 72893 - DNA, 568 bp, Arabidopsis thaliana landsberg
aaaggccgacatcagcgagccggacatgcatggcatcgcgatccgcgtccgaatagacggcaacggtacgcaagccgatgcgctttgccgtgcgaatgatgcggacggcgatttcgccccgattggcgatgagaagcgtacgaaacatgccttgtcctacattcggtaaacaggtcgcgccgactgatcgcgcggctcatcagcggaaagcgaaagacaaagcccgagcacgtcgcgcgtttgcgccggctcaatgattccatcgtcccagagccgcgcggtcgcgtaatacgggtcgctctgctcttcgaactgcgcgcgcgtgcgacgatccagttcggcgatagcggcttcatcgccgctgcccttcaggctttgccggcgcaactcagtgacaaccgtagcagccacatcgggactcatggtggcgatgcgcgagttcggccaggtgaaaaggaaacgcggccggaagccccgtgcgcacatgccgtaattgcctgcgccgtacgacccaccgatcagcactgtgtatttctgcacgcgcgcattggacaccgcatagaccagc

SEQ ID NO: 72894 - DNA, 244 bp, Arabidopsis thaliana landsberg
  unsure (1)..(244): unsure at all n locations
gattgcttggtgtcctgtccctctggggacctaacgcgtcgttgtcacttttaataggcacgtttttacttcaacctaatgggcaatcttcctgggggcnnnnnnnnnnnnnnnnnnnnnnnnnnnnnctaatatttctctggacgtgggttcagggacccgattctagatacttcgcataacctttaccggtgtgtactagctattaaatgctcgaacaaccacattacttcgattaataacg

SEQ ID NO: 72895 - DNA, 511 bp, Arabidopsis thaliana landsberg
  unsure (1)..(511): unsure at all n locations
gcaaggtgaactctaagaagtaagtgacgtgtcttggcaacaaaatttagactttacgttacgcgtaaaagctataactatttgtttgtttgttttcaaattaaccaattttctttttgaagttaaagtacaaaatctcctttgtgagttcaaaaaacacaacaccgtggagaagagaaaagagccggccctataccgttttatcaaaccttggggtttaataataataattaagttcatcagtcatcacaagtggaatttgtgcgtgtgtgtgtgtggcattagtttattcttggtctaattattgtaacannnnnnnnnnnnnnnnnnnnnnnnnnnnnatcctaactcttgggtgggaaatttcctcgtgtgaatgacttgactaaaaatattgaccaacttcgattattttattttctgataagannnnnnnnnnnnnnnnnnnnnnnnnnnnnnnccacttcgatggaaaattcttgcttcttcaacttctatttcttttacacta

SEQ ID NO: 72896 - DNA, 357 bp, Arabidopsis thaliana landsberg
atttttttccgactcttcttcacaagacctcatactaagaccatcatcatagcttaaaaaagatttgggtcttcaaataaaaaaaatgaataaaagaaaatgaaaataataatttaatacaaaatgggaaagacatgtgtctctaaaaagacattaaagacattgtctttagtgagaagcctctatgtaacaactcttgattaattttaatattttaagcaaataaaatgtgaaaatttacttaaaagtaaatatttgtagacactctctttagtattaccgataagaatgctctaagtagattaatttggttttgacttaaagaatttagtcacctttaccactttccaccaaaaa

SEQ ID NO: 72897 - DNA, 316 bp, Arabidopsis thaliana landsberg
tcatccagaaatatttgattcgcatgtaaattttacatggggaagaatgattattatgcgcaaatgtttgaggcgaattgaaaaaaaaaaataatgattggggcagtctattccacaccaatggaatacatttgcatttgaaatttatgatatacacatgcatgtatgatgcataccttaagtccttatctattattggtttgggtattcaccatacccacatatagagaatctataaatggacccccaaagatcttctaagcccacaattatcatcatatatacatacaactacaaatctacaatcatcctcctc

SEQ ID NO: 72898 - DNA, 481 bp, Arabidopsis thaliana landsberg
tgattgaagagagcactaagttaatacacttctgaatgagattttttgtgtaatcgaattaacattttttggttggtgcttaggagggataactagcatcgacaacggttactagccagtaccgacttaagaaacgctatgttcaagaacgaattaacagtacgcatgctcaaacatattttgtactgatgcaaggagacaaccgacttaaatgattgaatcggtggagaaaatggttgagtgttgaagtgaagaatccaacatgttatagaagggatggagaaaacacacaacaaagcaggtggttcactgaagttggttgagaaactattaactttggttataaatcatgtcttaaatttcaatttgggttgaccaccacggtcataaatcatcttgagaggcaccgatttgttaaagctgctgcttgaaggataacctttattctgtggtgatagtaaatttagtagtgatggttgtc

SEQ ID NO: 72899 - DNA, 554 bp, Arabidopsis thaliana landsberg
cgcgttactcctcatcttggttcgtttatcaacggcacgtcatgaagggtcgatggaacctacgaaaacaagttccaagatcggactggtatttgcttgtctcttagctttcactattgtgttcctttcatcaatctccgtaaacgtggaaggctattgtacccagcagaaagagtttctgcccagttggacgaaagctactgtgggattggatgctagctgctgctgcatttgccatcataagcagtatcgcgggcattgacgtaaatcgttatttcttcccgagtttcctcttgtcttatcgaatgttttctgattcttaatgatttcttctataattcctgccgtatgggagagtgtccgtcactgatggccttagctggaaaggcagatgatacatttgaacaaccaccttactccgcgacagtatgaccaatggagcagagaaaacctcttcttgccacttctgttctattctgtttatggatggtagctcatcattatctcttcacttacacccccactgacaggacgaatgacttctttctgtcatt

SEQ ID NO: 72900 - DNA, 491 bp, Arabidopsis thaliana landsberg
  unsure (1)..(491): unsure at all n locations
taccacaatgagatcatctgtattgacattcggacgcaaaatggggaatggcgggtatcaaggtatctccttcatattcactcccttcgaannnnnnnnnnnnnnnnnnnnnnnnnnnnnnnnnnnnnnnnnnnnnnaatacaatctggggttgctgatgcttcccgtctttactaaaacccatccggcgcaaatcgtcttcctgctccgcctagaagtatagggtggctacatcataaaatacaacagacaacgccttagtgaataatcccaatgtgtgacggaggctgatagcttttacctgatctatctggtcttgatgcagcttgtccaagtagcgataaacacggcaaacactcatctcagtgcctttatacttaaacaggtcagtccaccgtcttcaatttgctgactggataaaccagtcgcgtaatcaccagatcccggtataattcttccccaacagcgttaaagcctattcgatcaaatat

SEQ ID NO: 72901 - DNA, 412 bp, Arabidopsis thaliana landsberg
cattcaggttagcgtttgccccgctggttttatatatcagctgtgaatgcaattagcttagggtgggtaagcctcttttcttcaggaaaacttaccggcaaaggactttaacatcatggatgaagcaaagggagctcaaacacctataatcaaaccatttactgcctatgtgacaaaccactttttaaccatccggttgagttgggctggtaaaggaactaccaggattcccactagaggggcttatggtcctatcatatcggctatttccatagcttcaggtagcttttttattcttgcatcatccaggtggatgtgtgcatctgattttgtatgcattttgaactcttttctcatcacagaatttattgttaatacttatatcttcaatgcacagattccaagccgtgcg

SEQ ID NO: 72902 - DNA, 493 bp, Arabidopsis thaliana landsberg
aaagtacgatgagacaaacaaccataaatagaagatgatattatcatagcttacctgtggtaatctgggtgagcgatcaaatgctttctgaagtaagaatctgaactccagaatcttatcccaaagagcctttacatagagcacaaagaaagaattgtcaaaaattcgctctagatcaacttcattaacataaaataggaatatacaactgcaactgatttctagttagactacttcgcaaaccgcagaacaaggtcataccttctgattcttcaccgcttgacctttaacagcatcttcacccttatcacgcttcaagttcttcaatatatccctataccaggaacacgcatattacacaaagaacattcttttgcctctcaatcgttcatttaaaattaaatgatgcaaccgaattaagacagtatctgacaaaaacttttggcaaaagtctgttcttttccttttaaacgtatatattttctactaatca

SEQ ID NO: 72903 - DNA, 363 bp, Arabidopsis thaliana landsberg
  unsure (1)..(363): unsure at all n locations
taatgcggaacacaaatcgcatatccgttttcgtaatagcagggcccattcctccttacgcgctgctttatccgnnnnnnnnnnnnnnnnnnnnnnnnntataacgaattatggtaaatctttgaattagtgttaattaatattgttggctaaaatctaactaaaatactacaacttgctatggtgatgtcaaaaactgcatttcatcctattaaaggatgccacgtgtatttatcttattaagtccattacaaaatgtgatctttttacctataatcatggatgataattttccaatatattagaatttttaaacatattttgaaaaattattaatcttaatctcaacccccattttattat

SEQ ID NO: 72904 - DNA, 479 bp, Arabidopsis thaliana landsberg
agacggcggccgtgatgccggacaggcgcccgtcctggtagtgatagccggcctggttgccatcagggtaggtgagagtggcgaggcggccaccgccgtcgtagctgtagcccagggcgtacgtcatgctgccgacggtgaactggcgctgggtgatgtcgccttgcgggtcataggtgtaggacgtggtgccggtggcatcgctgacgctgcacacccggccgatgccgttcgtgcagctgtcgtaggccatgtgccgggtctgcgtccccgtggcgatgctcgtgggccggtcgaggttgtcgtaggtgtaggtgatgagtgtgccgtcggcacggctgaaaccctgcaactgcccatacgacgcatagctgtacgtggtcgtccacgtatccggactgctctgttcccacaactggccgaaaccgtcgtatgtgtaggtcgtggtgttgtggcgagggttccgtgacgctggtgac

SEQ ID NO: 72905 - DNA, 500 bp, Arabidopsis thaliana landsberg
  unsure (1)..(500): unsure at all n locations
cgcggaccgtggtactgagccggcgtctgatgttacaggcnctttccgaccccaagtcaaccgtttgggggaaagggagctcgtcgctgctgcgcgctggcgctcacgcagcgccgggagcaccgcgggattgagcacacgtgatgagtgcatgccgcgcaggaccctgagggcctgtgtggcagatgcggtgccgagcatcgccatcgtgtcatcggcgccgccggagatatgcggcgagatgacgatgttctggaggtcatagagcgggtggccgtcgggcagcggctcaggatcggtgcagtcgacgcctgctccggcgatgcgcttctcctgcagcgcggcgagcagtgcgtccgcgtctaccgtaccgccccgtgaggtgttgatcagatacgccgtgggcttcatcaaggccagctccggggcggagatgattgcccgtgtacttggcgtcaacggacagttcaccgacacgaagtcgcactcggggagcatct

SEQ ID NO: 72906 - DNA, 735 bp, Arabidopsis thaliana landsberg
aatgccacacatgtctcaggtttctgagttctcacttgacaatatgcaaaagttccataaagaaaacgatttgcttactgagaggctacttgctatggaagaagaaacaaagatgcttaaagaagctttggctaagcgtaacagcgagcttcaagtgtcgagaaatctctgtgctaagacagctaataggctacaaaccttggaagctcaaatgatgagtaaaagtccaaccaagagaggttttgaaatgccagctgaaatcttttctcgtcaaaatgctagtaatcctcctagtatggcttcaatgtctgaggatggaaacgaagatgctagaagcgttgctggctctttgatgtctgaactctctcaatctaacaaggataaagccaacgcgaagatcaagaagaccgagagtgctaaccagttggagctgatggatgattttcttgaaatggaaaagctagcttgtctaccaaatggctcaaacgcaaatggttcgacggatcactcaagtgctgattccgatgctgagattccaccagcgactcaactgaagaaaagaatctccaatgtgcttcagtctctccctaaagatgctgcatttgagaagattttggcagagatacaatgtgcagttaaagatgcaggtgttaagctgccttctaagagtcatggagctaatttgaacggtcttacagaagaaaaggtgatagccatgtcaaatgagactacaga

SEQ ID NO: 72907 - DNA, 595 bp, Arabidopsis thaliana landsberg
  unsure (1)..(595): unsure at all n locations
ggccatattagttaccgattcaagtaattattagctttagaaatgttttatttatctacagaacccctttttgaagaagcgtacttttactattacatagaaataacttgaatgcaatgattatgatggttacaaagtcgttttggtcaaattgtcaagatggctttggtttttccctgatagataatagatgacgttttgctctgtgcttagtccggtatgccatttcaaaatgatttggttctacttatcttgtaccagttattggtgttaagctgtaacaaatagaatgaataatggtgatcacattctatattcgatctaccagaaaattcgaaactgccacaaacgtaaatttatatttttataatttcatttaaaataattaataacaataagttagagagtaatttacaggaaaaagttgaacatatatttatataacaatacgatgaataatgattaattnttctttttttgaatcgtcgatgaattatattcctccnnnnnnnnnnnnnnnnnnnnnnnnnnnnnnnnnnnnnnnnnnnnnnnnnnnnnnnnnnnnnnnnnnnnnnnnnnnnnnnnnnnnccttaa

SEQ ID NO: 72908 - DNA, 5753 bp, Arabidopsis thaliana landsberg
attttagtgtaggtacaacgtgtgaattggatgcactgctgtattcgtgttaagttagcatagtttttgtgagaagcacaacaaagtgtaaacaaaccttgcaacgaacatcgactttggtgccactgtagagatcaaccgtcgtgggtttaccagccatcagtttgtgcccaacggtcccagccacagagtatctgtaaaaaacggatccataaatgggatgaaaagagatacaatttcgtgttagatgctatgctaggaaaaaactgaattgctaataaaggggaaacacaataggtatagtacccgggtaatgcaacaagattcaagggagaaggagcccagtgcttgaacacttcaagtgaaaagccagcacaaagcataccaggtgtggcaaagagaacacatggcccaggagcatgtataagagatcgatcaaaatctttaactgcagaatgtgaaggtagtagttagaaagcaagcagttgtacagctaaggtagtggataagaacaaaaaatggacgcaaaggatgtattagaaccactagtttggatcttatttttcaagcacatcagagtttcggttccatttgatataaatttcatcttcaacgttctaaagttatttgcaaatggtagtacacataccattcttaaaatcaaatgggttatgcgtattgtgcttttctttaacgttctggcttgtccagctgatgagcattttgtaatacatatttgcttggatggtcaaacctgcaaacatacaaatttatcttcagggacagcaatcttcagaagatagagatcactattcatgaaataaagtcacaactttgttgagctgactaatctgctgaactgatttcatatgaggattggtggtgatttaacagacctgatgagaagtaaattggaacctttatattcatgcgctcccagtaatcatcaagcagcatgcagagttcctgaacaaggaaaggcaattgtcaatgagacataagagaagtaaagacaagtttaagtaactgacttcaaagctctgtaagaagacagacctgagcccttccaagagcaaatgaaggaatcagcgccttccctccgccagcaacacatttatgaacctggaagagttttctgagatatcagaaaattaccaaacgaaagcttaagcatttcctaaaggggtatattgatcaggaacaagccaaaagcgatgccgggaattataatcaaaaaccatttaaaaacaaatttagaaaccatgtgttaatagttacaagtagacatacagcttgaagaaactctctctcccggggatattttgagccgcgaatggtagttgcatatgtggacctaaaacggcatagttaaacatatatcaggttaacttgttctttctaagtttgttgaaaaaaataccaacgaacaagtttgtatttgttttccatactctgatatgagaagatccaactggagtctgtcaattttagctgctccaagatgtctatctgtcgtcatattgtaatctccagtgtacacaatcgctgcatctcccacctttgcataaaccatcactgctccaaggaccttattatcatttaaaaataagctttaagaaatacagaaactctgaacataacaaacttaagaaattctctaaaaccacaacgaatgtcttacatgtcctgcataataagcccggatttgaagatcttcatcaacttgaattgtttgctttaaatctattgcgatcactacatatagaaaaaaaacaagaggaagtcaagttatagacactgcatctgaattcgtgcacaaagacctcaaatgaactaaatcaaatattcaagtaccctttttcatgcagtttgcgatatgggtagtggtgaatagctcctcctcgcctcttctatccaccatcactcttcggtagtcctcaagcattaatggagacaaagcctttgtgggatactacaaaagagacaaatcaaagtaaacaacctttaccttcacaaaaaaaaaaacagtcagtcaaacatttcatcgaacaccttgaggacaatataactcaccgacatataaatcggaccattgtacccacaaacttccgtgaagtaaggaagcgctccaacatgatccatatggctattaacactcacaattaaaacccacaaaaactaaaaaagtgaattttaaaaaagggacaaattctgggtttgaagaatcaatacaagtgtgtgatgatgatacaagagatcgcgttgtcaaaatcaccggatttagatatgagagaaaaatctgggtaacgattgtgatcatcacagcccatatgcatcccacaatcgaacattatctttttaccattaatcgtcactaccacacagctctttccaatctcttgtccagcacctggatacaacacaaaaaagatagaatactcttatacagaaattgaaattgtgaaactttgaagaagcaaagagagaagaagaagaagaacaacaaaaactgttaccaagtacgagacaatcgatagccatagttactgaagaaataaacaacaatttgagtttcaaaactcgtcgatggtcaaaaatatcttactcgttcgaatcagaacacaaattcaagtgaccggagaaaattttgaagggggcgagagaagaaacagagttaggtcgacaaacgaatttgaatggcggcaaagtgttcagtgacatcggaaccgttcggagttattacacgtgtctgatccaaccgtcgatatttttgtggtgtgaaggccaataatagttcttctcacggcccattaaatttaaaagtttgaaacgacaacgtctcatgtcgtttttaatctgaggaagaaaaaagctcgtaactaatccctaaatcacgagagaagtgagagacactgagactttgtagttgaccggatcattctcacttcgccggccgacgttcttccttccgccgtcggtatctatatttacgatccacgatctctcttgctgtttctgtcttcatcggtgagtaatttcttactgatcttccaaatcctatcaattcaccatctctgagctctttcgttgatttgagttttgttcttactgcagtgacgaaaatggctgctcgtatcgggatcttctccgtcttcgtagctgtattgttatctatttctgcattttcctcagctcaggatctccagatcgtaaatgccgagcgaagggtaagattctccgatctatcttcttcttacaattcataaacttccttaatggatcccgtttctccgatttatggaaattcaagttaatgaagttgccgttgggctttgctgtttctccgatctatactcggtttgtagaattactgtgtgattggtcacttcatggttgatcatcatcgataggcttcatatgtatgtacattgatagatagtgtgacttttcatcagttatacgtttgatttgagtaattagaaagtctaatgatagaacctgtttgcaaaattttcttgcccgaaactgaaatgcttctcctttgtgtttgtttttgtctacagattgatttaagctcacatatcgtgaaggccttcttgactctcaaggtatttataagcaaatgtttataatagttattcctattgaatatacactggaaggttggaacttagaattggaaaattaaagcttttttggatatgttatatgaaactgcagctgtttttcttttagtcaaatttagtttattgtagtgatacttgttgtaaaggttggaactttagtggctttgattcgttgtgacagttaacttgatattatcgcttttctccttcatcatctttaagtttttctattaggaggtgacattttcttgtctggatttctttcttcaggttgaaaatattgggaaagatcctgctgcagaaatgcttcttgctttcccacctacccagatcaagaatttggctatggtacaagccctggcaattactggcaagaagaagaagaaaacttatttgccattagatgtaaaaccaactgaacaacctgatgcaccgaatgacactggatactaccgtgttacgtttattagccccttaggtccgggtgaaactgtttcacttgaggtgctttacatattgactcattccttggaacctttcccagtggagataacccagtcagaatctcaattggtttactatcatgatagtgcagtgatattgtcaccgtatcatgttaagcaacagacaacttttattaagactcctagtactagagtagagtcgttcactagcattgaacctgctaaccgggctggcaaagagatcaaatatggaccatatgaaaatcgtgcttcatactcttacacacctgtcatcattcacttcgagaataacagtccatttgctgttgttgaggagcttgtgcgtgaaattgagatttcacactggggtagccttcagattacagaaaattataggttgactcatgggggagcgaggcataagggtgttttctcaaggtatgtaatgggactaataacttctataatgtatgaggtgacatctgaaaatttatctctaggagttagatgttgcagaatttcgatttatgtgttttgagctaactgttaaggtgccattttccatttctgcaggcaacttttctctgttattgaaggaaaactgtctatttaattacctattttactgttacttgtgaaagaggtcaatggcgaggttgtgttcatatgtatgctgttatgctgaaaatgtttctctgaattctcaattttggcagggttgattatcaatctaaacgatcggtcagtggtgcatcctctttcaatgcgctccttgcagtactacctatcagagtgaactctgtctactacagggatgagataggaaacatctctacttcacatttgcgtacaggctttagaaaggtatgcttggattgcccacttctctttatctgtagccatttaggcagtgatatttcctccctgagaaactctgcttaggctctaattgtataactctaattggtttcttattctctaagttcttataaaaaaattgttggtatttgcagtcagaacttgaatttgaaccccgctacccattatttggagggtggagtgcaacttttatcatcggctatagagttccattggaagactatctctttgaagcatctgatggcagacgttacttgaactttacctttgggtgcccgctcgtcgaaactattgttaacaagttgactatcaaagtgggtttaattagcattttctactaatagtcatttccttgtctaggtaacatactacacttaacacaggatgatatcgtatccaagttgggcttcctgaaggatcaaaggacccttctgctgttttgccctttacagtcaatcaagagttgcaggtatttcatcagccacacatcatatacatgaatttcattttcacacgatggttagtaaaacaacatgtatctataatggtcttgtctcaggtcaaatactcataccttgacatagtgggaagaaccgtggttgtgttgcaaaaagataacgtagttcccactcacaacgtacccttccaggtaaaaaataaaaataccttcacacttacagctagctagcaatttccatagacttaactataatatcaccataatgagccaattcctttcttcttgttatgtgtagtagtattagaagaaccctaaaatcctgag

SEQ ID NO: 72909 - DNA, 549 bp, Arabidopsis thaliana landsberg
  unsure (1)..(549): unsure at all n locations
cgaccttcacacttggcgagggttgcttgggtcattctacgttttcttgtcttttccccgccggttgcaggcgcatgtaagccaggacgcgataaacatcctatacgaattgggcggcgcagtcgccggatcttggcnnnnnnnnnnnnnnnnnnnnnnnnnnnnngttgagttgacttcggttcatgcgcgccgcacggcaatatggcattgaaactgcgctggccggggaaggattaaattcgccatgaccgagtctccatcgcaacccagggccgaagcgcctcacaagaccgcgccttccttcgaacagagcctgccttttttctggcccgtctccgcagcgttaaatctggaggaagacgcgttccgcatcttcggcgacaatcttgatttccttgccgaagccgaaaagctcaatgatcccaaacctccgacatgggcgaccaacaacaagatacgcctcgacatggatacgatgcggctgctcgacttcagcgacaccgccgccagcgcggggacgcctgtgctgatcgatgcgccttatgc

SEQ ID NO: 72910 - DNA, 231 bp, Arabidopsis thaliana landsberg
aagctctgtggcatgcaaagaaccggctacacaaactactttaaagtttttctaatgggaaggcacatgcatgggaatgggatgagcaaaacggccgatggaatctctttggtcgttgaaacgctttttcctcccttatttttcttatatgtgttattattaattaaactttgatacaagaagacatgtagacaagtcaacactatgtgtccgacattgtgtcataatgtg

SEQ ID NO: 72911 - DNA, 392 bp, Arabidopsis thaliana landsberg
cgccgcatcacgccgcagctgtgcaaggcatcgccatcgatcctgattcgctcaatccgcccgagggtcccatcgggatcgaaggggcaggggggctgatggtgcccttgaaccgcgaggcacttttcattgacgccttcgcccgctggcagatcccattgattctctgcgcccgcaccgcgcttggcaccatcaatcacacattgctgtctgtcgccgccatccgtgcccacgcggtcccgttgctgggggtcgcctttatcggtgatgcaaatgaggaaagcgaaagcatcatcgccgagctgggtcaggtgaggcggctgggccgcctgccgctgctcgaaccactgacgcgcgacaggctggcgagcgcctttgcccggaatttccgc

SEQ ID NO: 72912 - DNA, 259 bp, Arabidopsis thaliana landsberg
gcgctatcatccaatcaccacatatgatctttattttttctatctatgcaaacactccatggggaggttttccttaccacacatacactatcctgtccaatcacgaattaacaaccaattgacgacacctattgacaagaaaaccatccaccacttcaatacaccttccttcacacaagactccacatacccaacatacaacgaccaaaacggaactgcgatatacacgcttatcttgcacaatccagttatatcatgc

SEQ ID NO: 72913 - DNA, 727 bp, Arabidopsis thaliana landsberg
gacggagaagattccgaccgagagaggtgaaaagaaagagagagccagctctcggagctcggtagttagttatgaaatttgcgtcgcctcttgtcggagggacttgaatgttaaaaagaaaaagtttgggggaagaaaacaaatatatgaaaccaattgtaaccgatggacccatacccgacaagacgggtccgggtataatagcggtttttttaagcccgttgcttttggatcattcttttgtttctatagattgataagaatgctcaaattattggcccaataattttagcggtgttctctgaatcactttgttccttttttctttcaacactaactagagtgtaaattatggctttgaatggaggaatgcaagtgttggatgcagcaaaattggagtagtaacactaataagtgacaattaggaggatgatcatctataagagtaattattataaactttggcttcatttttctatttccatttgtttgtgtactaccaaaaaatttacacaagtgggtaaaaaattcgttttgcaaaacactgctttcaagagacaagtatttaccatgactcttgtagatagagatcgagttccaattcctctaaccgataatttataaatctattatcttcacgtaggtaggataatggcggaagagtgaagattccatgagcaatttttgtacttcacacaccgacttgaatctaatgatacatgttagc

SEQ ID NO: 72914 - DNA, 366 bp, Arabidopsis thaliana landsberg
aacccacaccgttgttttttgtggacaaaaataaaagatattttattttaaatgattcgataccggattaggggatgagggataatactataactacaaattttggctgttgataaatttttatgttttaatcttttatatcataggtatacaacccaggctatacgtggatcttgcatcaatatattttggggaaaagcatatacgagggttaagagctattaaatcacttctaaaataaaaagtatattccaaacacatgctattagagatggtaaaagttaattgtgtgtgcgagtcagattaaatcaaacgaacccctcagaaatatatattatttagcatggggtgccaagtcctctgttc

SEQ ID NO: 72915 - DNA, 565 bp, Arabidopsis thaliana landsberg
  unsure (1)..(565): unsure at all n locations
gagggacatagccctgcattggatatttttttttgnttttatcttgccaccttactggctttagtagtaacaaggacattaacctcgcattttcctaatcttacgtgtaacatgagctcagagaagggtaattgcataacatatcatttttaaatactaagtaatagcataacatttgtcatgatattacaaattatataattttttgtaatgtttgggtaattatatagcaacggaaagggatgcttatgaaaaggaaggatagannnnnnnnnnnnnnnnnnnnnnnnnnnnnnnnnnnatcaaatgtgacctctttatgggtgagatcagtgccatggtacatgttagagagacccatctgaaagacccgagaggaagtccaagtcgcggccacaaataggtacatgatgagtaagtgcagggccaatcttgcatgataaaatataacaacttacgtaatatttatatatagcacatgttattttcctctatgattttagctttcaaaatgtcgtattttctgatacatgctagcttgaagtttttttttttctttttaaaa

SEQ ID NO: 72916 - DNA, 516 bp, Arabidopsis thaliana landsberg
  unsure (1)..(516): unsure at all n locations
tggatacggaaggtggctacgatggtgccggttttgttactttttttgactggctgaaactggaggcccgtgggctcaccaacctgagcaataccagcacctgttatcccgggtcggtgatccttgccgcttacaacggaacagcatattcatggacaccggcaaccggtctagacaatgattcagtagccgcgccaacagcatcacctgataccaccactacctacaccgtgagcatcgatcagaaatacggctgtcctgttacccgaaccgttactgtttatgtcagcaatatttcgctcaatgtaaccagtgatgttaccggcagcagctgcacaggtactgtcaccgttagcgctacaggcggcctgggagcttacagttatttgtggtcacccggnggcgagaccacgtcaaccatcagcggtttgtgcgcaggaacttacactgcaatggtgacagatagcctgggctgttatgataccatcagcacaacagtgcaaagcacattgaata

SEQ ID NO: 72917 - DNA, 537 bp, Arabidopsis thaliana landsberg
gaaaaccaaaataaaaatcatactcacctcacttaactaaattagtaagttttagcttgtctccatagataacccataatggtgtctcttctaggattaatggatctcgactcgaatcatcgttaacgcggtaactcaattttggggttttaaacagaatttgatactgattatcagatttatctaattttgaagatcttaaagagtttctgttgaaaatcgaagaacacaattagtttgatgtgtttgttgtttgatcctctctagttcatttcattctatttccacttcatttctattgtcttctaatataaccaagccacaatatggtaaaagaaagatacaagagtaaaactggcaatattacaaacacagaacttatagaccatatacttttagtgctttgatcatacacttaactcatgatcttcctcattgccactcacttcttctaacattttcatgagaccatttcttattatttcctctcactgttgttgttggtggcatcgagttgaaccgactgtcatgaatcgt

SEQ ID NO: 72918 - DNA, 548 bp, Arabidopsis thaliana landsberg
  unsure (1)..(548): unsure at all n locations
ctcagngtttgctgcatctaaaactttcatcttcttatttctcttagattgctcaacataaaggggcatgggcgttcttggagcctgttgacgttaaaggacttggactacatgattattacaaggtaaagattcaaactgttgctaatatactgtgggttaaatattccatgtttacatggaattttgctgaaatgagcgattttgaaaaatgttcatagcttctgttcattacttaacaggttatagagaagccaatggacttgggaacaattaaaaaaaaaatggagagttcggagtatagcaatgtcagggagatatatgccgatgttagactagttttcaagaacgcgatgagatacaatgaagaaaaagaagatgtttatgtgatggctgaatctcttctggagaaatttgaggagaaatggctcctgataatgcctaaacttgtggaggaggtacaccaaatgttcagcttccaagtattcgtctttgtaatatcagtgatgtgttaactgtgatgttatgaacaggaaaagaaacaagtt

SEQ ID NO: 72919 - DNA, 317 bp, Arabidopsis thaliana landsberg
agaatgtttggacaaatataatcattgaaagacatccaagaaaaattacatggtccatgactatgaaattatataactaatgcctttcagttttcacgtaagggacatatttatgaatatacaacttagtcagtttgtaaacttggatgcccttatctggataggggggtttggattaagcccaactaagttaagggccataaacgggggttaaatatatatggatagatataatttattttatggatatgaacacaccaaccgggtatatatatattacatgtgtatatacctatattatttattctaaaacatct

SEQ ID NO: 72920 - DNA, 153 bp, Arabidopsis thaliana landsberg
ttgtgtgcattgaagactggtctcacgattcttgtactcataaacacacatattatatgaatacgttatctgcacaactgcatttgcccgagacacacacccgactgtaagccacgcctaaagacccacattaatgctctacggatcaaacct

SEQ ID NO: 72921 - DNA, 547 bp, Arabidopsis thaliana landsberg
atctttataattaaatccgatgattttgttgtttttggttatactatgttagtaacaagtgtaaagacatttgagcacacgtgaggtaatgtattgagctcagaagggaaattgacaaaatcgtgttcccaccacctgaaaacaatattttttttttacattcaaattttctgttagtgtgtaattgaataattagatgacattaaaccaaattaaaaacaatagggaatttttaaaaacaatttgtccatttgtaccctgagttatcacctcgttcctaattgtttagtgaataggtgggtgacatatcgatattgactcacacaaaaaaagactagaatttgttcatctatcaataggcaaataactaaaacaaacaatgaccaaatcaaaacgtggaaaaacaaaaaaaaataatgggaaagatcaatttttcttaaattaagatgtagtataatgtcgtttatctcaaatcaagagaagaaaagttaattttcattatagaaagacaaatcaacatatgattattgaaataaaagtaggatta

SEQ ID NO: 72922 - DNA, 766 bp, Arabidopsis thaliana landsberg
acccatttctcgttttctccaaaccagagaaatcattaaaataagtccaaatgtttaaatctttcttttggtctgttggaaaactattgttggcactaaatgctcagccacaagagtttaaatggttcaagtttgtgttctaatttttgcatggcctttaaaacttctataacgtaaataaacaaaacaaaactataaataactataatggttcgttcatgttctttaaattcatattactccgaagaacattttagacttttgtaaaaaaaaatgaatcggctcatagcttttttgttaattattgctttgtcttttggattaaataaagcttgcgaagattgcacaatagtatttcgaaacaacctcagtcctggtattattctcaaagtcaactgcgaatcgaacaacaaaaaccgagtcacaggcacagtgaaattccaaagtgatacagttcgaattaatttccgcgaggctgcatttgaaagaacaacatggcattgcttagtgcaacaaggggggtattctcaacactttagagcgtacagaggaagtgctccaattcctcgatgtggtgagttacgtgtatatattgcaaaacgtgatgggatttatttatccgcaaatgctggtccagaaaaactcgatcaacgttggatgaaaaactaatgttttttcttttccttaatgctaattaatgtctatgaagctcaggttttcttgcattttggtgcttaattggaaattaggaatttatgtaaatgtg

SEQ ID NO: 72923 - DNA, 1304 bp, Arabidopsis thaliana landsberg
  unsure (1)..(1304): unsure at all n locations
tctaaccttcccatccgctacaaatccttcaatcaaaaccctgtagatctccctatcaatcaaaatctgtttccccttcatctccataaacaactcatagcctctttcaactctaccgtccttgcacaaacccacaacaagtgttccatacgccatcacatccggttttatctcatcccgtctcatctcatcccaaactcgtaaacttgcatccaagttcccttcagaaaccaaagtcttgatcatagccgtgtaagcaaaaacatcaggcttacacaaattctccctcattctctgcaaaatctcaagcatttcctcgatcctacctgctttacacaaccctttaaccaagatcataaaagtagtactctcctccaccaacccatcttccttaaaatcctcataaacagccaaagctaaatcaaagtaaccatttttaaccaaagcatccataatcctattatacaagaacaccctaggcttaaacccaaacttcttcatcttctcgtaaacgtaataaacccttaaacctcttctattatcagcgtgcattctaatcaaaatctcaaattgtttctccgacggtggtcttccctgagaatccataagctcaggtaactgatccgcagcacgaaaatgtccgtttcgattaaggcaataagcaaaagcattgtaagcagcgaaatcgtgtttatacccttttagtttaccagcccaatgaaagaacttagccgcgactgcagcatcgttacctagtttcaaaacctcggcgacgatacttggtgtgacgcggcggagtttgtttagctcggagaccactgagggaccccaatggttacggttcttacggaatgcgtcgaggacgaatctcgcgattggagatagacgctcggaggcggcggagatcaccgtggaatgtgacggcggagaaggaggagggagatgggtttctggatcccatttgcggagatcgaaaggtgttcggtgagcgagggagttggattgtggttggggtgagactctgggtatagattggcggttggagaagagaccaccgtatacagttgggcggttttgtgacggcttacggtgtccgtggaagaaattgggtttaagagatttatcagagagattcggaggttntggtgatttcatgttctgttcttcttcttgctctgntcttctcactcngttgntctaatcttaaatttccaatacgacgccgtttcaagttcaattcggtcagattttggttcaactcggtttatcggtttgctttgattcaactcgattttattttattt

SEQ ID NO: 72924 - DNA, 534 bp, Arabidopsis thaliana landsberg
  unsure (1)..(534): unsure at all n locations
ctaagactttacacaacttatcctcataaatttattctttatataaagggactctcttttttttcgtggggcttctctctatctctatctatctctctttgtctgcaaatggaagaacatattcaagatcgccgtgaaattgcgttcttacactcaggagaatttctccacggagattctgactcaaaggatcatcaaccgaacgagtctccggtggaacgtcatcacgannnnnnnnnnnnnnnnnnnnnnnnnnncgctgctaaaagtcagccgtttgatcttggtcatgtgagaacaacgacgatcgttggatcatctggttttaatgtaagtttttaaattatagatatgaatacaaatatatgtttggacgttataacttaattacataaaattcatggcataataggatggattaggtttggtaaattcatgtcatggaacatcaagcaatgatggcgatgacaaaaccaaaactcaagtaagtatttctaaattgttactctttctctttgatagaatttcagagta

SEQ ID NO: 72925 - DNA, 1525 bp, Arabidopsis thaliana landsberg
taaatgcttacattccagattttctgttgcggataacaaggcctacacaagttgttgcttcatcggtgccaacaaactaattctcatgcaataaaaaaattgagcaaaatcattagacaacaaggaaacactagagtgtaaccattttaagatggggctagtgaggtaacaacaactaacatcaacaagagctggattcacaacagcaaattctctttggaatatgtaaacatatctgtcttttgttgagctctctgaatcactttcatcgaaagaaacattcttttcctcaagattcttaaaggaatcagaagctaacgttatcacaggatgactcattacatcaacaagcaagctacttccctgttcaccaaatgatgtagccattcaaagtcaaacaaactgtgaaatagaccaatgattacttatcatgagataacataagaacatcatattgagcaaaatcaattccaggtttaaagatctagaaccacatcacttaacatataaagacaaatcctagttaagcaactagatagagattcgtgagagacgaagaaaaagaaatctacctgcgatgaagaagacaatgaaaaagagctactctcgtctagaaattgcactccaccaacgtagatcattatcgccggcgagatagttcaacggcggcgatgacaaattagaaacaatcgccgatgacttttcataagtcacgtaaataattacgttccgtttcagtttctagggtaaaacagcgtgacgtttttccataagacgagaatcttattttaaattgcgaatttacccctagtattttttccttctaataaactaaccccataagtttaagatgtataagaaatatacttgttgaaatcaaacacttcaggatatcaagttaaattattttcccaaaaaaaaaacaaagatatgatatccaaagtttcagagaagagcagaaattacaagtagacatagaatgtacatatacattcagtattcagacaagaacagagttatgatgaggttttagtaatgatggagcaatggttgagaatggatggtgtcaagattccggcgaccgtttttcctttttacctcagcctccttctagacctggtccgaggtccattgtttacatcttctgttcttctcctagacgatgaagctgaagtactcgaagtaaccacttcagtagggtttacagtttggcttctcgtcataatggaggagcttggaacagcaaactctctaggtgctgatgaagctgaagaaccgagcctgaacgaaatcgtttgagaagcattgttacttcggtttctctgataagaagctcgtacggctggtgaaggtcttctacggtttcttctcaaactagttgtgtcaacaaaactatcaacatcaaaagcatcatcatcaaagggtgctggtatgtctgaggtatcaactagaagacctgggaaagtagcatatggtggcaataacctcaaaggtccaaaaggcggatgataatgatgatgatgtt

SEQ ID NO: 72926 - DNA, 513 bp, Arabidopsis thaliana landsberg
gtgcgcaacggccggctgcggggctctggattcagcatgttgagtgacggcgcaacgtgcctgtgggtacccgtgtgagtcagggcaccctttcagcactcaattgaatcgaggcggagcgatgaattctagactgtgctgtcatgtatcgattgcccctggtgtgcactctgcaggttgccgtatgatgatcatcatggcattttaggcgctgtactgcgggtgctttcagcgtggcacgagtcgtgcggcattttactgcgcactgtaatgtcacgtactgccgctattgcctttcttctgcctattttttctgcttttccttcttcctcctaaatttcatatcttctattcttggttatggcagggctcattattctcccttggccgccagggttccctcctgtcgtcagtcagctccctggactacacgcagctgaccagcccccgggagcagctgggcccccggcagcaccccagtcatgccaacggcacggccggcggggctttatg

SEQ ID NO: 72927 - DNA, 250 bp, Arabidopsis thaliana landsberg
cgtgattaaatatacttgaaaacgtgtgagtaaagcgaaaacgacggccggagagagaagcaaagaagagaagaggaggaggaagaattaggaagaggggagaagaagaagaagttataagtcattacaatttgttattagagaatgaaaacataaatgaaaagagaagaaagaaagagagaatctttgcagaagagatcgggcaaaaaaaaattaaaagagaaaaagaaaaggaagagatgcttagctt

SEQ ID NO: 72928 - DNA, 492 bp, Arabidopsis thaliana landsberg
aacacctgcgccgaatgcctgtttcgcgttatttcgccaaccatgcagatagggcctgtgggcttatacttacgtccgccagctggctcaagtcggcggcgatagcgggcaggcgatcgtcgagtccacagagagagagacgctgacttcgggtagaaaccatataacggcgcacttggcttgtcaaacacatcgaagatcgctttcagatagccgtgggtcattagcatgcggctagccacgacgtcgatgatggtgagcttgcgcttgatcgcgatcgatttaaatggggtgcgcgaatgtcttgcgatggcagtgatctgcgtgccttgattgttggggtctttcgaattcagcacccagaccggaatatttttttgtactgcgggaagaatcgtggccgggtgcagcacctttgcaccaaagtaccccagctttgaagcttcttcgaagctgatcgtcttgactcgcagtgcgtcggaacagacccgc

SEQ ID NO: 72929 - DNA, 493 bp, Arabidopsis thaliana landsberg
cgaggaagccgggcgtcagctcgcggctcgtcgccgcgccgccgtcccagcttttcttttccacgacgaggacgttgaggccggggcgctggagatagcaggccgtgaccagcccgttatggccgccgccgacgatcagggcatcgtacttctgcattttgatgtctcccttgtttctaaaagctgcatcaaaagcaaaatgttgtccagatattctgaatgatcattcagcaagtatcttgcaatcgcctgattatgcgctagaatttcggccgatgaaaacgcgccggccgggcgcgtcgtgaacgcgggaaggccatggcggcatcgagcggggacagggcggcggcggagccggaatacgacgaggcggcgatccgcttcctcggcgtgctctggggcgagggctatctttcgccgggcgggccgcaggaggtcgaccgggtgctttccggcgtcgatctcgccggccggcacgttctcgatttcggct

SEQ ID NO: 72930 - DNA, 563 bp, Arabidopsis thaliana landsberg
acacggcaatgtgattaactaggttgttgttgtcttatttgtgggatttagaggtttcattttctgtgacgtattttcgagctagtttcatccgataccaaactgttccttagtattcaaatggcccatcaacggattcccatctatttcccaattcaatgtagatgtgacccatatatctccgtacttactaattaatactaactaactagaatcttaccgctgtctattagtatcatcattagtgtggatatgggataggttatccatatgctctcccattagtcaggcctgtattgttatatttctgcctaaggcctccgctggtccgatgttatgtaatcgtcccatccaaactgtggaaccgagcaaaactcaattccaccggtctccactgcacacaggctcatgtattcataaaagtcccctgtcttcaaccagccctgccgggctagctcaatcggtagagcgtgagactcttaatctcaaggttgcgggttcgacccccgcgttcggctattcctacaaataacctgagatcctttctttttagagtttttttc

SEQ ID NO: 72931 - DNA, 153 bp, Arabidopsis thaliana landsberg
gactgctgcgagaggacaggaggggtgcttccatatccctcagtgagacggggagcgttcgagacatgtgtacggagctcactgcaagtacgaacagggagaacctactacggtgcagtgccaattatccccttagggaacattctttcttct

SEQ ID NO: 72932 - DNA, 242 bp, Arabidopsis thaliana landsberg
gggctagatgacttcttaacggtataacattctgggtaatcggcttgaacgccaaaatcttgaaccgggagaagggtgtgggtgatctctgccaccttcagaccgcagaaatatgccgctttcccatagcctctgtcggcatattcttctgagcccatttgagccacacgtattcacgctcgacaggttagggtataatacttcgcctccccattcaactgccggcgcataatcggctaagg

SEQ ID NO: 72933 - DNA, 243 bp, Arabidopsis thaliana landsberg
agttggtctacttgtgaacacacttagactactgttggctacataggttcagctaccagctctgtgtatacctctcttatatttgtgtaaacatgtatgggtatgtttatggaaatttatgtatcatggtatttgcatctttccgctcgtgtgagtatctatgagtattggtagcatctgtttaacacgaacaataatagttacgtatgtgagtatatgcagtgagccttgggttcacaatgg

SEQ ID NO: 72934 - DNA, 164 bp, Arabidopsis thaliana landsberg
caatttcaaaatacataaccttttttactttggtttcatttttgttagcggctgcttcagttaagcgctatgttctgctgaattttcagtaactaaacacataaacatcttctcgtgaagctgattatgtgtatgttaattcactgcagggtgattctgaagtt

SEQ ID NO: 72935 - DNA, 512 bp, Arabidopsis thaliana landsberg
  unsure (1)..(512): unsure at all n locations
ctatggtggagcattnnnnnnnnnnnnnnnnnnnnnnnnnnnnnnnnnnncaaccaaaggaagcagatttagttgaaggtttcagcatacttatgccatgactcatcaccaaactcttggcttcatctcttcttccctatatatctcatatgccatttcatctttccaagacttgtgttttgcttttgtgtgatcctttagggtatcttctttctcagaaaaaaccttgacttttgtttgggtttacttttgtctactatgaactcttaacttatctagcaaaatgtttcatgttaaaacatgtaagagccaccagacaagagcttagatgtctctgttgtcaaactaactgagacaaggtaataacatctgtgaatggaattggtaggagccaatcatgtagatgtaagtgcgaattctaagtgctcacagctttgagaaacacagatggaaagagattctgtaagctcagagactatttaaacctgaacccaattgatcgagccggactg

SEQ ID NO: 72936 - DNA, 243 bp, Arabidopsis thaliana landsberg
tcgtaaggtcatgtggaaaattgtggattctggacaggatccttataaagctacagaggacaggccatcgtgtattgctcttcagtacaatgactaaacttcttgatatcttggaagagtatctacaatggagaaggcttgtatacagaagaattgatgggactaccagcctagaagatcgggaatcagctattgtggacttcaatgatcctgatacggattgctttatcttcttgcttagta

SEQ ID NO: 72937 - DNA, 509 bp, Arabidopsis thaliana landsberg
  unsure (1)..(509): unsure at all n locations
aggacagagggggggatatgaggaatggtgaggttatacggacgctttacccggcgcactcggagactggtaatcccgnnnnnnnnnnnnnnnnnnnnnnnnnnnnnnnnnnnnnnnnnnnnnnnnnnnnnnnnnnnnnnnnnnnnnnnntgtcgacccagccggctgcggcacccgggacggtgatggagagggggctgttcttggggatggggccgacgtcgccgtcctggaggccgagcttggagcggacgtggttgagcgtgtacttggcgcccgcgcggccggagccgttcatggccttgacttgtttgtttttggcgtcccagaagaggataaacatgtcgcctccgatgcccgtggagcagggctccgtgaggttgaggccggcggctataacggttagctgcgtgtagtgatggtatggacttttacgtaccgactgcaacagcggcatcctggatcttgttagtaaaaaggcaaagaaaatggctgaggaaaatggtgtc

SEQ ID NO: 72938 - DNA, 2954 bp, Arabidopsis thaliana landsberg
  unsure (1)..(2954): unsure at all n locations
ggtagttgaagtaacagacagacggtttggaagacacatacattttggaccaaccaagtgggtaagctgatcctctttttactacaagcatatttataattatttaaaaattatcattttaaccatgtttatattctttaaccaaatttgtttttcgaaaatatgtttatattcatgtatgtgtatataataaaaatgaaaatttacataaatcaaaaagtgagtgacggcgccttttccattccggaaaaaaatgttaaaatgttgagtaagcaagagggttaatgattcgtctctgatattgaacaaaatccaattaactcaaagtcatgttttttccataatttttgggtggtgaataccaaacacttacgaatcatttgctcacatgacattgacatagttacacatattaatttgttataaaaatcttttactacataatcacaatatctcaaattttgtgatggaatcacaattagagatcaccatttatctcaagctccaatattacaattgctttgcttccctaaaattgtagaatttaaaatttatgacaaaaatgcataaacccacgactttgcaattatacttactcacatgttctaagttctaacaactattaccattttaaaaactttctatcgcaatgttacaatacacctattcttttctgtcactttgttcacgtgtttagttttcagtttgttacaataacacaagttggtaaggatatgcttatcatcaatatctttaaacctgtgttaaagtcgctttccctaaaaacgaaatcaaacgcatgattcatcacaatcttgaactgaataaaaaggatgctaaataaaccaaaatgtacttaaacgatcaaacacaaagttgtatcaaaagtaaacacatcactgtcacaaattcaaaaagagaaaaattgatgcaatgaacataaacatcaaagtttattaagccaaacattatttgctaagattcttacatctgttcaaacagacaagatcaacacagtagacataagagtacttgcttagcctctgacttagagcggcgtcaagccaatcacacctgcgaaagaaccaacataactcgtgaggataccgaaacagatggtccgaatttgcgattaaacgttataatcaagtgtgttttcttcgaatgaaaccacaatttttggcgtttgaaacaatcgcagcctaagtcatagtgatagaaagtttaaacataccacatgccaatctcccgcctgcgtttccagtggtcagactaagctcatggccacctatatttgtcaaatcaaagagagtaatatcatatcataacttggcttaagagacatttataagctaggaaagagccatcctttttattaacaattcattagtgcaaccgtgccaattgatgtatcgagacttggaagtaaagtataatggtttaccctttccgaggtcatccttaagctcgtgaaccacaaaggctcttccaacaacagaattaggaccagtcagaggaatctacacaatcaagttcacagtaaacaaaagcttcttataagagaaaatatgagaagcaatatacttcttataggaaaaacatgcgatagcaccaacctgattgtccactattgttgtttctgccacgcctgttgttacaaaaacagtacttagttcaacaggtttttgattatcgaagacagccaaattgtatgggaacttgaatggaggatgtaaaataccatcngcattggcatttatgtttcccaggtcacccgcatgacggcactcatcttctggagctccgtgtgtcatgttgttagggttgaaatgtggtcctacaagaatataagacaagatatcgtcttagaatttggcaaatcatgacatcagtatcaaaagaatctgccacaggggttttgctattaacctgttgagatacatccattagttgtatcaccaaactcatgctgcaaaatcaaacagaggacataattacaccattatagctataagaagaacagatgattcattcttccgaggaggaacaagcttacgagatgaaatccatgaggccctggagtgagaccagtgatacgaacattcacagttgtaggacctgcttgccataaacacaaccatattcacttagaacaatctacatagtcaaaaattagcaagaaaccatatagggttactttgtaaactttcacagaaccattgaatcagcaagaatatgcaaaacactcttaaagctaatccctttctttatcagcttatcttaagttattcatagcagtgagaaccaaacactaacaaatgtaactcaacagattaaacagaaaaagtctgaaactttgaagaaaccgaaaatcagatatgaagcagattaaacagaaaaagtctgagactttgaagatattgaaagtcagatacgaagcagattgaacactgagagtgacctaatcatgcccatcaaatcaatcttcagaaacccagatgagaaattagagattttgagcaattgagagagacggacctgagtcatcttgggtcaaagtaacaactccttcgacatcagaagtacctttaagaactgcaacagccttcttcgccgcggaaacaactgtcaacgctttcgacggagctttaacggcgaaggaaacagattggagacggtggagattgttgttgttgagagagacgccgcggaaagaggaacggagagttgaaggattggaggaaggaggaatgagaagacgagaaggagatgagaatgcgaggattgtgttggtggcagccatggctgctgctatgtttgacgtttggaggaaatgagtaggcacaaatacttgtgtgagattgaaagatgaggtttttattggtgtcactggtttctcaaattcggcccacacatacacaatttttttttttttttttgagtgcttctgtacc

SEQ ID NO: 72939 - DNA, 310 bp, Arabidopsis thaliana landsberg
accgcaatcatatccgccctggtggcttgcgttgggagtaactatgtgcaggaggtgggcttttgcactgcgttgcctgataaggataccgtggtatttgatggtaacaagccggtagccctgtttacttcctgcggggaaaatatacaggcgaaggtctctgaggtagctgattcacgatgccctgttggggttaactgcatatgggccggtaagttgtcggggatgctggatatggatgaactgcatatgacgctcgaaaaagacaaggtaaaagatcctttttaccgcattaaccgttccagttttt

SEQ ID NO: 72940 - DNA, 242 bp, Arabidopsis thaliana landsberg
ctctttgattttatatattgaaggtgctgggagtacagctctccattatgcttcatgtggtggaaacacgcagtgttgccaggtatacatgcttaactagacaatcatgatgcttctgttatgtttcgtttaaagttcacatatgaattcatttggcatttgtttttctcagcttttgatcagtaagggtgcttgtttagctgccgtaaactccaacgggtattagatcactctatttctca

SEQ ID NO: 72941 - DNA, 164 bp, Arabidopsis thaliana landsberg
aaagaacatgataatagaagacataatgctttatcaacattgtattcaaataccgatatgtaagggcgtaggttttttcttttgtatataaactaattttatctttatcaatatatttaaaattcataaaaatatatgaatttaaaacttaagaaaaaatcact

SEQ ID NO: 72942 - DNA, 211 bp, Arabidopsis thaliana landsberg
aaaaaagaacaggaatccataaaagttgattatttttctccttgtctgaaagaaaccaagatcagaataggtgcggtagaatagactcgtaacccgtaagtgtagtttctttcttagctcatctattacctgatcacaaatgggatttaggctagactagtgatagaactctagcccatgaaggtttttttttttactctactgccagtgg

SEQ ID NO: 72943 - DNA, 175 bp, Arabidopsis thaliana landsberg
  unsure (1)..(175): unsure at all n locations
cggagccgctgtaactatcgaactgaccgngtcggttttcaccaactgagaggattggggcatacaccgggatttccaaatatctgtgacccgagattacagatgagatagactgtgacagataaaggggattttctgaagttggttttgaagcacaccatagagatgacaacca

SEQ ID NO: 72944 - DNA, 519 bp, Arabidopsis thaliana landsberg
  unsure (1)..(519): unsure at all n locations
ccgaggccggcgcttggaactcgggccgcgacgatttcggatcatcttgggctacaaacctcgtcacaaagagggtttcttcgcctccatgccggtctataactcgcacgatattcgctctgaaatctgcatggaaatggacaagatgggcatgaaagtggaacgtcaccactacgaagcggcctgttctcagtgcgaaatcaactacgaattcgacgaactcgtaaaagccgctgataaattacagtggttcaaatacatcgataagaacgcttctactcgccacaataaaacggcgacgttcatgccaaagcctatctttggtgataacgggtctggtcagcacgttcacatgtctttgtggaaaggcggcaagaacttgttcgcgggcaatcagaacgctggcttgtctgagatggccctgttctttgtgggcggtatctctgagcacgctccgtcgatttgctctttcacgaatccgctgaccaattcntacaagcgcttggtgccgggcttcga

SEQ ID NO: 72945 - DNA, 299 bp, Arabidopsis thaliana landsberg
agacacgtacgtagaaattctacggtagaatatggtagcaaccccaaattatatctccatcatagtaacgacagctaattatatgcacatattttttcgaagagaatcttatgggttcctttcacaacacaaagttttttatcctcatccgattcacaaatttggtcgaaattctatccgaacaattgtctgaactttctcgtaagtcttcatttttgtatgcaaaattcattattaaaaccagattattttattttttaaaaatcccctctaaatttcgatccaaatgtttgtgtgtg

SEQ ID NO: 72946 - DNA, 296 bp, Arabidopsis thaliana landsberg
tcttcttatctggccgtagggcgacgtataaggagtagtatactgggtcctggcgcaccagctgctgtgtgagcgtgtgtatcatggccctgcaccagccgtaattgccgtttccattcacctcccgcaggtgccacttgtagcatgcgaattcgaggtccatcaggcgcgacagctcgtcgtcctccaagagccatccaaacacttgcacattgacagagccatacttctcaaaggtctctcgaatgccaggacgaaagcgccgcagcacagcttcgacatcaacctccagctct

SEQ ID NO: 72947 - DNA, 222 bp, Arabidopsis thaliana landsberg
  unsure (1)..(222): unsure at all n locations
taagcggcaatgctatgaagactcgttgtcggtcgggggtcctaccaagcatgcttgagtgcggtattttaacaggccgcggcaagcccaggtctccctgtgggagctacgtctgttattcatccgaggggttttaccttctacgtctcttgttnnnnnnnnnnnnnnnnnnnnnnnnnnnnnngttacacgattcggtgccatgtctggtatagcatagct

SEQ ID NO: 72948 - DNA, 838 bp, Arabidopsis thaliana landsberg
ctgtttgcatcaacaaaattgctcgtcgaaattgaatgtgtggaaaccgcaggcaaagatatgtaataataagaaagcaatgaccatatatgcatcaaaaggaacttcttgactagaagcagaatacatattagcgtgacagatgggttgggaaaaaacaaaatacttagagataataaagacctcgtgcaaggaatggtatgcgtcttcataaaacttcagtgcttcaccccaatctctacgaaactctgcatatacagcgacctagcagtcatggcatgaatgagccttccttttcccagatactttggaacaaaatgattagacttagcagaggtaacgagaaaagcttactttaaaacagtagcgaacattcaaatcaagagaattggaactccttttctcaattcggcttttgattctccgtccttcttctctgtaataagaaagtgccaactctgcaaaagcagaagcgagtctgcaaacataccgtgttgagatgcattgaaggaaaagcctcttgttctaggtgcaaagtaaaagaggagagaaacatacctggagagagagagcgtgagttcagagtctatgctggaattgaagaagagcacgtacttagaatctaattctgcccgctttcgcaatgccaccagacgatcgtcgctaatgtcctctaaaaacaagtcgggaaggagtaagtcaccagtagttccgagaggaaaatgaaaagaataatcggataaaatgcgctaccgtggggagaagactggaccacgacaaccaccagtttgatgtttttgggacggattacggatctagcaagcaattgagatcgcag

SEQ ID NO: 72949 - DNA, 504 bp, Arabidopsis thaliana landsberg
  unsure (1)..(504): unsure at all n locations
gatcgcccagcataagccgatcgtcgccgcgattttcgtttgcgacgccgaggaggctggcgcggggtcggagcagcacaacctgaccgaaggtcggcggctggcggatcacctgcgggcggttgaacgtcgtgctgccgatacgcaacaaggggctgcgctatcgcaatcgtcgcgccagaatcgccgtgcgagagcctgagggatgcgccgtcggcgccctgttaggaacgctgcggtggatccgctgcacgattggtgaggtagagcccgagcaggatcagcgcaaatccgaccagannnnnnnnnnnnnnnnnnnnnnnnnnnnnnnnnnnnnnnnnnnnngtggaggttatgggcgatagatacagaaacggccccgcgcgtgcggcgccgagacgtgttgcgccaaagatccacaaaaggnnnnnnnnnnnnnnnnnnnccagcgccagatacagcatcgcaatgacggtgttgtgcgcagcttcgtcggtgagaaat

SEQ ID NO: 72950 - DNA, 302 bp, Arabidopsis thaliana landsberg
ctaagcttccacttttcatctcctatcgacgaaaccctaatttttcacactccagaaatcgaactttgacgacgatgttaatggctaattccgacgtaccttcatcgattttacctcgttcgtcgtcgatacttcccaactcgatcgaaaccctagatgagaacgagtcgattgaagcacaagttaataatgttcagtcattggctctttcgtccccaaatcgagatcgcggcgatgatgatgataataataataatcatgattcggtttcaattccgcctccgatctatgatgggtatagc

SEQ ID NO: 72951 - DNA, 300 bp, Arabidopsis thaliana landsberg
  unsure (1)..(300): unsure at all n locations
cacttttctatcaggctctatacactctttcttcatcctatcaaaaagtttgagaaccttattcaagctaccacctttcgaatagcaagatatcatgcttgaataagaccacatatgtttgactccaacatttcccatctccatccagaccctttcagcctcccggggctaccaatcacgttacaccatccattgagaacaatgttgaaacttttggcgtcaaacggatacttatcccttgttacanngaagaatcaaatgcccaagccatctggaaacaattctnntataacctacaaa

SEQ ID NO: 72952 - DNA, 293 bp, Arabidopsis thaliana landsberg
aaatttatgtgctttacataaatgtagtagtacatgagcccataaaaagttactgctcagtcgagttttcacttaccggtgaaaagaaatggataaataaaaatatacacgactacaaatagactctttaaatttgacacgtaaactctatttttcaggagtctttgaggcccactctgataataatatgtcaactaaactttcttttaacaaacaaaattaccgttgcataagacacatgtcgtcaattataatccaatatgaagaaagaaagaatataaaacgaaaacttt

SEQ ID NO: 72953 - DNA, 398 bp, Arabidopsis thaliana landsberg
  unsure (1)..(398): unsure at all n locations
aaccgcgtctacgaccgatactttttatgttttttaaactgcaatctattatgatgatcaacgaatgaggggaagcaccataacggctcggctaaatgttattactaaagtagcggccagcgaagctaggtttagattcatctaccactacagatcgcgccgaatggactgttggaacnnnnnnnnnnnnnnnnnnnnnnnnnnnnnnnnngcgagcaagaatcactacacacatatgccagacctctatgcgtacagaacctatctcatgctctgaccaaaagattaccccttagcgcgctctatgaatattttacctaactcatggatcgaatgaccaatgatgcggtgacatactgatactaaacgcacatgccgtctcaaatgacagagctact

SEQ ID NO: 72954 - DNA, 553 bp, Arabidopsis thaliana landsberg
aacagttttctccttgctgcgctcgtcgaaaggttatgattgggaaaaatcaggtttttgctttgagctttcgttttccgcaaaagaaagtaacaaagaaagctcgcggccgcgttctggtcccgccgccgcgcgggctatcctcacatcatgatcagcccggatgccgcaggtttaaaagccttttgtcatttcgagctctgcgagaaatctatattgtaactgcgcttgtcgaaaggacatgagggggcggaataaacagggtcttttctccttactttctttttccgcaaaagaaagtaacaaagaaagctcgcggctgcgttctgatcctgccgctgcgcgggctatgcacacatcaggatcagcccggatgccgcattttagaagctttgtcgttatgcgcgtagtgctacgctcgttgaaaaggcgacaggatgaattattctgcggtatcttactttagctttccttaaatttacattcttaaacatcagaatgctaatgaaatacaaattattgggccgctccggcctgaaagtttcggattatg

SEQ ID NO: 72955 - DNA, 341 bp, Arabidopsis thaliana landsberg
  unsure (1)..(341): unsure at all n locations
cggagccggtatgcattgatccgtcatggggtattaccatcatctattcacccaaacacagtattgaagtgtatctgttttttcccggacagggtaaaaggggaaggctttttcatcagtgtcctgcgcaaaaagacgggcggcgatacattcagctaccagcgcttcaaaacggcgcaaaacaaactggtgaaggaaagcgcggcctacctgnnnnnnnnnnnnnnnnnnagctatattgaaaacgagcgcggccgctacacggccatacatagcctgcacgaggcggattatcatttcctgaaggagtatgtgtacctgcgcagggtctggatcttact

SEQ ID NO: 72956 - DNA, 176 bp, Arabidopsis thaliana landsberg
tatctatccaaccataaggtaaataagccgctattccttcaattcgaaaaaaattatgcatcattctcataccggcggctgcttcgaatagatcatatacaaattctcgttctctgaaaatatagaaaaagggagtctgtgcaccaatatctgccataaaagggccgagccataac

SEQ ID NO: 72957 - DNA, 945 bp, Arabidopsis thaliana landsberg
agattaccgaattgggtttaattgttacattcgtttggctctctcgaggtgagtgatattgtatagaacttttttatgcttaggatcttaaattcgagttctttgatttacctgtcatgtgttattgattgatctcatttatattgtgtctgcttgatgtttaaagcttggtgtatgcaatttgattgggtttactggagattgatctgtgacctaatcaatgagtgataacattgctggttcatctgatttctcatctggtgtgtctgctcgattccctgaagaaagtttgaaactcaggcttggtttgtgcagtttgattgatttatctcattacttgactctggtgtacttgattctttgatgaaaccttgaagttaatgtttggtttgcgcaatatgattgggattaactgcatttgatctctgaccaaaatcagtgattaattacattgcttggttatctcattacttgagtttggtgttcctgcatgatcccctgagcttgaagttcatgcttggtttgtccaattgtgacctaaattgatgttttcttgtggtatcttttcgtaggttttgttactgattgagaaaacatgggaggtgacaatgataatgacaaagacaaagggtttcatgggtatcctcccgctggatacccaccccctggggcttatccacccgctggatacccacaacaaggttaccctccaccacccggtgcttacccgcctgcaggttatcctccgggtgcctacccacctgctcctggtggttatcctcccgcccctggttatggtggttatcctccagctcctggttatggaggttatcctcctgcacctggtcatggtggttaccctcctgctggctatcctgctcatcactcaggtactgtgtttcttttgctaatggtttttttctcccatgtagtttgccagttagt

SEQ ID NO: 72958 - DNA, 553 bp, Arabidopsis thaliana landsberg
taagcaggcgcagcgcgtcggtctcgatgatgcggtcgccgtcttcgacgcgcgtgcggaatgccggcaccggcaacgcgcgcgacagcacggtctgcgtcgggccgtcctcgaagcgttcgtcgtcggcgtattcgagccggatcagcgtcggcgtcaggaccgtgaagcgcgccgcgccgtcgcggacgatcgcgccgcgcgccgcgtcttcgggcggcgtcgacgatccgcaggccgccgccagcacgccgatcgcgatcagcagcagatgtcgttgccggcgcaaagcgcgtgccactcccctcatatcctgtcccctgccgtcgtcctggcgcgacggatattactgcgatcccgaatacggcaatctacggcgatcgtcgccgcaccgggaagggccgccgcgacgagcccgccgggggcaaaccggccatcaggccggcgcgcggccgcgcggcgcgtgtccggtccagcgtttgtacgcgcggcgcagttcgcgctagtcgctgtaaccgagttcgagcgcgacggcggagacgctgcaacgcgg

SEQ ID NO: 72959 - DNA, 112 bp, Arabidopsis thaliana landsberg
ccacagcaccctttccttgggggccacgcttcagcggaagccggaggatcggaagccagacgaacggggggcccatgagctgacagcccacacaggaccgccagcgtgacag

SEQ ID NO: 72960 - DNA, 507 bp, Arabidopsis thaliana landsberg
  unsure (1)..(507): unsure at all n locations
cacacaacccaaaaaacggcaacacgaaaacttcactagatcccatatcacgcaagaccagtccacagcagacatataacgacttccacgggaccagaccaaaacacaaaacaccaaccagactacaaaagcaactaccaaatcaaaacggagtcacaaacactccaaatttaggcacaccacacaaatagcagacgatacacacgtatgcatatttgtaacagacccggatgcacagagccacagcactgttttgcacatgcacccctgaaatcacagcgaacctgacagaaccgcaaaaacgaccgaaccgaaacaacgaaagaccagccgagaaaaacaaaaaaagcacaaatttccaagcacaaaccacgnaagatcccccacccgactcaaaccgacccacaagcaacctacaagccactagtacggacagcgcggcggaccaacccacaacccaacggccggagcatgctcacaaggaaccagagcatcatcacagcacag

SEQ ID NO: 72961 - DNA, 477 bp, Arabidopsis thaliana landsberg
  unsure (1)..(477): unsure at all n locations
aaggcctgtaagaaagtaaagcatcaaaatttctatgaatatgtgcaattctgttagcaagataaccaagatgatatgcatgctgagaaaaaaaacttgtgcagtggcattatatgaaagcaaaaacaaagaaaactggcttgcctcttagaggaagtaggttctgctatatggttaaatgaacttcctgcattatcacatacaacatgagcagaagaggaccatattcatagataatgagtttgacgaccttacctactccggaaatgttgtccttaaggctgtaaaaatcagcatccagatcttgcattcctttntccgttaacaagtgacacaaacaagaaaaaagcaaagtgaattacatgtcatggttctgagcgataaagcaataaatggttcataaactgactccaattatgactgctggaagtcataccaagcatatacttccctttttttggaccaaaaggtttgcat

SEQ ID NO: 72962 - DNA, 528 bp, Arabidopsis thaliana landsberg
  unsure (1)..(528): unsure at all n locations
gaccggtcgtggaacgagttcgcgaacctcatgttcgtcgataaccttttcggcatcggttatagctacgtggacacgggcagctacgtgcgcgagctggacgagatggccgcgcaattcgtcgtgttcctagagaagtggtacgccatgttcccggaatacgaacatgacgatgtaagaaacgccagagatccttggagacgcctacagactaaacggctgaccnnnnnnnnnnnnnnnnnnnnnnnnnnnnnnnnnnnnnnnnnnnnnnnnnnnnnnnnnnnnnnnnnnnnnnnnnnnnnnnncggaacaagctgccagcgaccaagcaccagtggaatttgaagggcctgctgatcggcaacggctggatctctcccccggaacaatacgacgcgtacctcgcgctggcctacgagaagggcctcatcaccaagggatccgaggtagccaatgcactcgaggtgcagcaccagatctgccagaaggagatctccacgggcaacgacggcatcgaccactcggtct

SEQ ID NO: 72963 - DNA, 552 bp, Arabidopsis thaliana landsberg
aacccaagaatacaacgaggtccttgttctcattattcatcatccggattttgcatctctcatcgccagtattcaaaacatccttgataaaattggtcctggattcaacattgtgatgtctccgtcgaccagatgaggtaatatctctcaacccctcgccgagatacgcccacagaataatacagagtagaatagggcagcacgtggttataaggctaaggctggaagccttcgatgaaattgaacgtaagtgactgcagacatgtgtttcaatccatgaggtagggtatgtaagctccatagattggcgattgactcaccgctgctgaaaaccactcaacctctgccatgttatgatcgatgtccataatgaagccgtgaattaagcgtcttttcaaaatatttgaggcagaaaagctggttgtaatgagactggattatgtcaaaagaatatttcggatgtttggtcttgactcctcaagccacgatatgctctgagatacaccgtacatatagcgaaattcctgtaatgaaccttttaagagacaccag

SEQ ID NO: 72964 - DNA, 454 bp, Arabidopsis thaliana landsberg
aatctaagcccacagaaaatctcgtccgtaggatggcgatgataatggccatgattaaaagcatgatgatgatcgcacatattgtgatggtccctgaagtcatgggctcttacaccacctttcaagtcttgtgggcaataaccgtcattgggagtgacctcgtccctctttttatggtgctcatctactctcattctttttacacacttatggatctgaaacttcaagacaaaatgacagaggaatgaattcataaaagccgacaaagaatgagagtcaccccacctgacattgcacttatccgatataataaatagtactgaaaagcataaactatatgttgagaaatatagcccaacacaaatctgatggacctcaaaggatcttgggcttacgtttgtactttgcttctatcaagaggcctaagcccattccaacactatcatgattgttc

SEQ ID NO: 72965 - DNA, 2318 bp, Arabidopsis thaliana landsberg
aaaagtttggatttggtaccggtctgtttcactatttttgttttaattattgtattcctcgtttggagcaccttagtttattagaacaattagaccccattgacgaaccaatatggtgtagaagtatctggaaagaaaaaaggaacgtcccacatttcaaacaaatcttgctaaccacgtattatctagctggaggaatgagaatgacacattgtccttgctctagatgtaaatccacataacataagtaggatcggttctattaaaacattaattggaaagcatttcaaactcgggatagtaagtgtggtggagacatgacgtattggtgacaaaaaaaattatagagagaagaaacaagcttcaaaccctccccaagacaacaaaaccatcattgtagggagcattaagagtatgcaacgcaaagaggcctttcatttccttgctctccacttctaagaatttattggtttcttgtatactaataaattaatggaaccctaaaaacaaggttatgagatttatcagtaaacctacgcttctgtcactaattcggtccaagtacattgctagaactctgtgacttatcttacaatgctatttcagaataatttcagactagatcttaattggttccgtatgtattactgatttccaaatcattaattattaatgggcctatctaagcctgtttaataaatgggccttgcgtcaaagtctccatcactgaaaccgccctttttaggttaatcaatactttataaccgaaactgaaattttttctagggtttcctcttccgcattcgtcgtcttcagctcctcctacacagtttcttctctgaatcgtaagttttgaattaatctgcaaattcgtttagattcttatcaattagtcactaatttttcaattgatgattcgatctcagtacttaggaagctaaaatgggtagatgtccgactagaaaagtgaagaagaggagattatctcacaaaacagctcgccgtgacaaattcgaagtcaaaggcgatgacttggtttacacagagttgcgtaaaccggagacggagattaagccgttacagcttgacgaggatttgcctggaatgggtcaattctactgcttacactgcgagtaagagagattctatgattactctattgacgattcttttggtttatgaaacttttttttagcaaatacattatctttgaattactctatatgacccatttgtttgttttaccttgatatgttttagtcgatacttctccaacgcatcagtgagaaatgatcatttcaagactaagaaacacaagaagcggtatgtggattcttctccttccttggccttggtttctattttgttttgtgttcttggaactgtgtttggttcttgtgctcgtttactttcttgcttgcaatgttaaagctatttctcttcacttctgtgtacctaaagatgttttagcatttgtaatttgattacctttgtatgattatacatgtctgttgcagtgttgctctgtactcaagacttattatatgtgttttgtccacttggattgcagtgtgaatatgatgatgggacaagcgccacactcgcaactcgatgcagatttagccgggggaatggggatgccggacaatggcccaaagctgatgtctaatttggtattcacagagttgcgtaaaccagagacggaggatttacctggaatgggtcaattcaactgcttactctgccagtaagattatatgtgcaaaaagacaatctttgaattactctagatttccatgtttgtgtgaacatttgtttgtatttgattgaccttgtctctctaccttgatatttttcagtcggaacttctccaatgcatcagtgatggattatcatttcaagactaagaaacacaaaaagcggtatgtggattcttcttccttggtcttggtttctatcttgttttgatcttggaactgtgtttggttcttgtgctcgtctactttgaattcatcttgctggcaatgttaaagctatttctcgtcactggcgtagctaaaaatgttttagcacttgtaacttgattacctctgtatgattatattattgatctatgcatgtctgttgctctgtactcagacttaatatctttctattgtccatttggatttttgtgtgattgcagtgtgaagaagatagagggaccagcgccacactcgcaactcgatgcagatttagctggtggaatgggaatgccagacaatggtccaaagctgatgtctgcctgagtttttacgggatcctctagagtcgacctg

SEQ ID NO: 72966 - DNA, 327 bp, Arabidopsis thaliana landsberg
atatcggacatggaagacgagacaaaggagagagagatgtatgatggtgtttaaatataggaagggaaggagatgatatggagggtatttacgtcatttcgtctttgtgaatcttcttctctcttgattcttcttcttattacactgaaattaacgtcgatacgtcatcgtatgggcagtgacgcagcacaaatacgtgggtctcacacggaagagatggaatcattctggagcgttagattctaacattgtgggaccaatcttgccatttgtggtctcttgtcttatccatcctcctttttaataattctcaaaaatcaaaatgtt

SEQ ID NO: 72967 - DNA, 201 bp, Arabidopsis thaliana landsberg
  unsure (1)..(201): unsure at all n locations
acgtcttcggccggtgtgcagcggncggcctcgatgncggctcgaccacgggcaatggaagcatccggcgcggcgaggcgggtttcccggtcctgcaccagccggatgccctcacgcagcacttcgctcttgctgccatagcggcccgcctccaccagcttctggatgtaggtttcgagcggtttgcctagttctgcactg

SEQ ID NO: 72968 - DNA, 483 bp, Arabidopsis thaliana landsberg
tattttgggtatatctaaaggtccaatttttttagtttgaaaaagtgtgattttgaaagatttataagaagtctttagcatgaaaatatgcccaaatatttttttagcttgtagaaagaccaatcttgaagagtgctaagatttgctagctttacaagggcacagttgttccttttagggtgaaaaagaccaacggttctgatttgtacatggactctgaattcattgagctgccatagcgtgttaaagttggaaacaaagctatacatacataacaaaatatgtcggtgacttcaatacgagtgccatatactagcacagcattgttgcaatttctcaatatttgctcttatgaattaaatatcttcgaccttgatgagctaatgtcttaaccaaacttcttctaccaatactctatattacattcataatagagaagcatatgtaccaacaatgtggctagcgggtaactgctggtgaata

SEQ ID NO: 72969 - DNA, 1307 bp, Arabidopsis thaliana landsberg
ttgccttttcactcctgttcatttcttcatctccttcttctccttcaatcaatttacccaatgcttcagtgctttctcctatacccaaacccaaaatagccaaacaacaattaattgactctcctttgtcgatgaatgttgatgaacagattagttatggttatgagaagagagctgttgtttcttaccttctatgagttcatgatcagtaattttaagagcttgttcttcctgtctcttatgtttcttcttcttctttactccacctgctttcacatccaaagccttcccttttagctttagcttcccaccaataacattgtcgtatgccgacatctcttggctgctagtcagaacaaagtaccacacaaaacatacattcaagttagaaagcttgagaattggtgatttctcgaaacactgataagcaaaactaccaaccgacttagcaaacggagagcacatatcatcagtatacatataatccaaattcattgaaaggttccaaaatctctaactctttctttctttcctttttgtatgacaagagatcctagaactaggacttgaacacgaatcaagcttatcaatcaaaaaagtaaagagccatcacataacccacataattagtaaacgaggcgtagtagatctatagtgtatgtataccctaataatcaaccgaaaatcgatagttgcaaagcatacacttcatgattaccatatagagaaaaaaaacagaaatctagaagcctaataattgacgcagaagcaatgaattgagctaaaactcgaaccctaatcaaatcaatcacctgaaatcgaaagagcagaacgcgagaaagaacaagagagaggatatttttttttacaattttaaagagaaagtaataggactattttgaatttttccatctaggaaagcccaatagggcccaatatggttttttcccctagtataaaacgacatcgtgtccttttatactgcgctcgcttttttctcccccactaacaaacagtaagggctttgaaaattggttttcctctcaaaatcgaagaatttgtgtaacgagcgagacccaggaattcgaattaaggcatttcaaattggttctcctcgtttccttcctctctacttcggaaaccctaattcccgtcgccggaactcttgactacgccttctgttagatttttttattcccccgttgttgaaattgagagtaaaatgttgagtaaagtctccccaagtggagagctcttgaaccggtggaggagaatcgaggaagacgaagaggagaatgacgattctg

SEQ ID NO: 72970 - DNA, 2299 bp, Arabidopsis thaliana landsberg
tttaacatttttcttgagttgctgattccttaatatttcttgcttcttaaaggcttgagttcttagaaggtcttgcttttgaagaggggatattagagccttatcccatttttgtcgatacagtgttgaatcacataagtggtgattcacctgaattttcgctggctgttaattgcctaaaagagctatttaaaacacttggtatggtaactattgtcgttttataaactagccagtttatcttgaagatatatattctgttagttgacacattcatatgatgaaaggttgtaagctctggcttagggctaccttgtccccaagtgtgatgcgtaacacattgctgggtcagtgtttccatacaaaatctgagaagatccacaaagccatttttgatcttttccagccactattacaggcaagcttgcattagtttctctcttacatatatgatttcgccaatgagattaacatgatttcattttacttacattgccatattatgcatatcctgttttgtccagtcccttgaggctttgcgagatggtgagcatgaaaagcaacgcaggcactttctctactttctccttcatcaggtcccagttagcagtaacttcagccttttagcaagaagaattggccacaaggtagttctagttcttcctcactaagacacatctgcagcatttttttatcttggaatgaagctcctttatcttcatatcttcacctagctttttaattttatcttcagattgctcttcttattgtcctcagaggatacaagatgaacccaccttgccctccctttgagtgtgctcacatgtggttagtacaactgggcctatctgttgttttgcatctgtttgttgcgtctgttacttacttgaggaattggcttttcttccatccttggttttgaatttctatcaaatacattttacatgacatgaatgatattaagtaagatggttctagtttcatatctaaatttttgtagttgttatcgtttctttctccctgcaacttgcatgttagctttacatggatgccagttattttgacagtcctatgtggagaatacatcaagttcactgggatctgcgtgcagcatgtcaagatagataactttcatgttttgaatgctgtgtttggtgtatgttttggcataaattttttggatgttagataaggacagtaagttttctcatagaattcatgaaagtcaactgatttgacaggggcccatctcttgtgtcatcgtataaagattcttcacttcatatttcattgcgacaacctgccattgatcttgtccaagctatcctggtatctgatgcaacagccttactagcttcgttgctacgtaataatactggtaaatttatgggctatgagattcaatatgacgacgatgacagtaatctccccttttcccatactactgaagatgtaagtgatcgttcctggagtgactttacccagcagagcaaaattactcttggggaatgtaaagagtggatgtgcattccgatgctgtggattactactcttacaaatacaaattttctaaaccttccagtatcgctatcccaagcagtcttttggtctcgatcacgtttttgtttagtggaatctgaaaagaatgatgaaatgacagttgatatagaaacttggctttcatcttctgctgttgaaatcaaaggcacgcttggatggaaggtagcaacaggatctgatgacggggggccaggaaaggagtccaaaaactcagtgacagtatcaaagatgtgtcttacattgatacgaacattaaagaggtacttttccatttgactgttgtggtagcctggtaggaaagctgctaagttttctattacgctttatgataatgaggcttttgggtttttgatttgtagattgaccacttgttatctggtacaaattggtgacgagtgtcgaaaacagtggacctgggtaccagagatgggcgaaacgttcatcctttctctttcagacccagatgacgtacgtaacgacctgtaatgattgcttggttccatcataagagatgcatacttgatagttattactctctgttctggtttaattgtgtataaagttgaccatgttgctagtgttgttttgttaacagaatgtaaggcagtttggaaagtctatgctggaacacgtttcaaataccagaggtctgtcttgtgggttgaagtttctctgcaatcaaaaatctcacctcctatttgtttcttccggagttagacatgttttcagcagaagccag

SEQ ID NO: 72971 - DNA, 305 bp, Arabidopsis thaliana landsberg
  unsure (1)..(305): unsure at all n locations
gccttacggtcgaaacaatgacaacgtcattcttcttgtaagcgcgcgacggaggatcgaaggtcttatgggtaaggtccatctattcgccaccttcgatgctggccgaaggtgcaggactaccgttcggcaatccttnnnnnnnnnnnnnnnnnnnnnnnnnnnnnnnnnnnnnnnnnnnnnnnnnnnnnnnnnnnnnnnnnnnnnnnnnntcgtggggcgtgcctttactgccgattgggtcgaagctgatcccggcatcggggcagatatgctccggcagcttccacatgaggaaacggtca

SEQ ID NO: 72972 - DNA, 300 bp, Arabidopsis thaliana landsberg
cattttatctttacccatgggtgtttcgcagcagagcttctatcactggtaccgagcaacgtcgagaccgatgaaccaagaacctaaagagacatcttcatttgcatatttgtgaagtagttgcctgaaaaatacatgaggaaattgtgtgaatcaacctgtttgggatttaaaaataggattaggatgattgtaaagaatctgagctgagagggtatactgaggattaagttgcttaattcttggagatggcttagataacacacatttgagagatggatttcgttgatgtcagagaga

SEQ ID NO: 72973 - DNA, 180 bp, Arabidopsis thaliana landsberg
cattaataagagcagattcgtagtgtcatcttataagattcagtattagtttgtagtgaaacggtatgtggtagtagattatatatttacgcatttaattaacttttagtcaaactgtccctttcttttagttggcagcagataccaaatcgccgtaacatccaattaatcataatatag

SEQ ID NO: 72974 - DNA, 1101 bp, Arabidopsis thaliana landsberg
  unsure (1)..(1101): unsure at all n locations
gttagttcagtcacgagactcacgactatcatccaattatttaaacaaaagttatcaaaaggcaaccggttcagtcaaaattagggttatttaatggttaacaaaaactatgcgtaagattccattggtacgcgtatgccctagctatctctgtctatataagaggaaatgggtgcattaatttctcacaatcctctaaacaccttcagtactctttcagtctcaaataaacgtacaaataaaattttaacgaagtaacgaccaagaaaatggcaattaagctaattgcactagtaatcacaatttgtgtagcatcatgggatagtgcacaaggaagatctttaagattttctacgactcctctaaatcgatatagctttcctcctcattttgattttggtgttgcttcttctgcttatcaggtttgtttgtaatgtactattgtttttccttcttttttttttaataattagtaatgtactaatgttactaattataacattgaatttcagaagtgtaactttaaattttattttatttgggctaaaggctttagttaaaaccatattgagttataacgtacgtatacaaaaatgcagtatgaaggtgcagtagaagaaggagggaggagtccgagtatatgggacaatttcacacatgcattcccaggtacacttttttattcatccacgttgttaattaactttttttttaattaatatatctatcaacagttttctataattgcacgtaacattttatatttttttttcagaaaggacaaacatggataatggagatgttgctgtagacttttatcatcgttataaggtttgtgcatggaattttatttaatatatattttggctttgtaagtgactatggtttagttgaaatgaaaaaaatacctacttatcagcatctttgctcatttaaacgtgacgtaactgtgatatattatcttaacaaatgggtgggacatatctgaataatcaaagctttaagtaatgtttctcttggtttctaatggcaaacacttatgttttgacaggacgacattcaactaatnaaggaaatgaatatggatagtttcagattttc

SEQ ID NO: 72975 - DNA, 567 bp, Arabidopsis thaliana landsberg
  unsure (1)..(567): unsure at all n locations
cctctttcctctctatgctctaagagaacagagcagtctctgttcataattgacattcgaaaactacgttgtattgaattcgtgacacgtgtcaaacaatgagtagttaatcaaagtgtcactcgcacgtgaagagagtagagtaggtgggtttagggtttaagtgttccagattcttgcaaattcagttgatccaacggctcatacttaacnnnnnnnnnnnnnnnnnnnnnnnnnnnnnnnnnnnnnnnnnnnnnnnnnnnnnnnnncaaacacactttgtatcgaataaattaaacaaaaatcataactttacaatcgcataaatcgactttcatcttcttcacaagaaaacctctctcagtcgctaaaacccttgaaccatctcttgatcgctagcttctaagtaagtgtatagttgaatcatttcgatcaaagtttaggtaaaaagttgtttgctttcagatacccttgttttgatttgtgtcgatgattacatagctttactttgatatgtgtctttagggtttattagattcattcaagctataaagttttgattttgat

SEQ ID NO: 72976 - DNA, 516 bp, Arabidopsis thaliana landsberg
ctggcgcatttcgcgctgttcttcgccgaaggcgttgcgcttttggcggcttactggctgctgcgccccgcgaggcggtcgatgcccggactcaacggctactgacggcgcctgcgtccgcccggcaggtcttcggcgaacagctcggtcaactggtcggtcatcgcgccgcccagctgttcggcatccacgatggtgacggccttggaataatagcgcgtcacgtcatggccgatgccgatggcggtcagttcgacgctggagcgggtttcgatctcctcgatcacccggcgcagatgatgttccaggtaattgccgggattcaccgacagggttgaatcgtccaccggcgcgccgtccgagatcaccatcaggatcttgcgctgttcgggccgcgcgatcagccggttgtgcgcccaggtcagcgcctcgccgtcgatattctccttcagcagcccttcgcgcatcatcaggcccagcttgcgcttggcgcgccgacacggcttgtcggcaggc

SEQ ID NO: 72977 - DNA, 327 bp, Arabidopsis thaliana landsberg
aaataaaacatgtaaaaatattaaaaattacagataatagtagaaatctaaaataaggaaatcataaattcaataggaaaaaaagagaatttacttcaaataaaaataagaaaatagttaatttcatcttaaaaaatcaacaattacctacaacaattctctctatacatctcgccagtgtatgaaacttgtcgtctcaacttcaacaaaacatacgctcttgagagtctcttaattgttttgatcgatggatgacgaatatatgagcctcgaggaggaggaagataattgttacccctctgaatttgatgatcatgatcagatgtg

SEQ ID NO: 72978 - DNA, 377 bp, Arabidopsis thaliana landsberg
cgctcttgagagaagcaacagatcacgatttatgacgataatgaagatggaagttgtataatgacggtgaaatgtgaggttgttttgtttgaccatcttctgtggatgctcgaatacggtgaccaagttcacatattagagtctctagatgactttgctcatctctatctctccccttgattaggtttcacttcttttttttctttctttctcgattacaagctttacttgctaatcgtttttcgtattaaacttgtctattcccctaaaatgtataatactcagcctaccgacaggcgacaggttagtgagttctgttggtgaataacaagacatctcaccaaagtgtgtttattcaatttcaatggttgtttaca

SEQ ID NO: 72979 - DNA, 506 bp, Arabidopsis thaliana landsberg
gtcttctgtgcattgcccaggacttgtccgtgcccttcgtcggccccagctacatgatcgccatcgtcttcgtcgtgatgatcgtggtgctcatcatccgcccggccggcctgttcggcacgccggaaaaagcgcgataagaagggaaacgcgacatggctgcctacctcatctccatctgcatcatcgggctgatctacgccctgctggccatcggcctgaacatcgaatacggcgagaccggcctgatcaacttcgggcacgtcgcctacttcgccatcggcgcctacgcctcggccctgctgagcatgcacggctaggcggtgccgctggccatcgtgctggccggcctgctggccgcgtttgccgccattcccatcgggttcgcggcgctgcggctcaaggacgactacttagccatcgacaccctgggcttcgacgacgccgtgcgcatcgtcattcacaggaagagtgtgtgaccatggcgtgcagggcatcgccgccat

SEQ ID NO: 72980 - DNA, 565 bp, Arabidopsis thaliana landsberg
  unsure (1)..(565): unsure at all n locations
agattttacaattttattgtctcatcctagtcttgaaaactgtatatactaatgggtccatattaattattgttgatctatatttcattttgtcgtttttttttgtgaaattagtgctactttaaataaaattgaggaacacaccaaaaaaaaaaaaaagttgaggacaaattagtactgaattatggctcaactatatagtttcgtcttccggtttaccaaaaaaaaaactatatacttccgaattttataaaagtaattctgaaaatgatatatcaagatgttagtcttcaaagcacaagaaataattagaacatcatagatacaataaattcaatgtaagaaacaaaaagtatccttataatatatacttaagctctaagataacataattttgaagttattattgaagaattttgtagcaaaaaaagaatgttactggtgagaaatgagaatngactcaattgagtcttttgattaagtgagaagaagaagattgaaagcagagatcattaatcaagatgaaaagaagaagaatgatggcagaggaagagaaagtcaaatg

SEQ ID NO: 72981 - DNA, 343 bp, Arabidopsis thaliana landsberg
aaacaaattgataggctgtttgtttatggttttgatacagagcaaatgggaatttaggaagatttcaggggccactgtaacaatatcacaccatgttgaagtagactcatattttttcttatagggtactggttttcacattaatggagctcaggatgttttccgatatgtgaatctgtgttcatcttctagttggaggactttgcctcatctgcttggaaattggcagtctattttttcctttctgcaataacatgctgctaaatttatatttatagctcaacattaaccgtgccatgccagatgcttgtgccaatccaagagtgctgactgacgagaaaag

SEQ ID NO: 72982 - DNA, 157 bp, Arabidopsis thaliana landsberg
gaatgggcataactatatttctaactctcagcatgaccaactatatatcggggatcggagagtgccttgttgcttatacaaccaatgtgggataagccgctgtcattcacatggcttttcgaaacccacaagcattggatgacggcctgaagctaat

SEQ ID NO: 72983 - DNA, 256 bp, Arabidopsis thaliana landsberg
gatttgctccaccaaaagtatccctctctgatgatacaccaccatgaaccaaaatttaccagtacaggatcatcttatatactagttagcgtgttttgtaagaatgtgcttcacctgaactatattcatcccaccttggagatgtttcaaccatttgcttaactagtgactttatcttctattcttgcatttacacttgcaacacaagattgagtgacagtggatattatcataatatcatcccttattgtttttt

SEQ ID NO: 72984 - DNA, 418 bp, Arabidopsis thaliana landsberg
  unsure (1)..(418): unsure at all n locations
ccagaaatggaagcagattatttatcagaccactcttgatangtatcccatgtcacaacttcaagtctacaggcaaatgcgttggtgtgttttaaaattcaaattatttactcctgcattaactgatatctcatgctcatgtttttgcatacacactagctaattgacaattgtttcttggggtcgacatttcgtttttgataatcatttaggtttttgtttggcttgatttagtttattactctttcatattgattcatgaacctaaccaaaaatttctttcacgttggctatattnnnnnnnnnnnnnnnnnnnnnnnnnnnnnnnnnnnnnncatagagcctagcattaaaccaaatattagtgaagatgacaacatcaaagaggaagacatcatacaggataacagttcatttg

SEQ ID NO: 72985 - DNA, 577 bp, Arabidopsis thaliana landsberg
ggcgacttaatttgacagcaattacgtgtcaaattgttatggtagcatttattgaccgttgcaattgttatttatatataaaaaggttattaaaagttcaataattaagtgtcattatgtaggacacttattggatgatatctcattatcttattgaaggtacggccaaactattaggtttgtatcggcgctcacatgtgaagtatttaatataccactcaaaagaaatatcaaatattaaagctttaaaggcaatgctaattaagttacgtaactatttatagtgtttacgaatatgaacttgagtatagtttgcttttgtatatttactgggattttggtacgaaacagaacaaatgtgaatcaatgaaataaactctctgtttcctataacccagttggaaaaaaaatgtagataccccaaaaaaaatgtaatatttttctattgatttttgttgtttccttcgccgacgtggtggttcgtaccattgatcatagaagaaataacggctgcaagagccgccgtgaaattcgggtcagctgtgagtgccgttattgtatcagccaccgcgtgtga

SEQ ID NO: 72986 - DNA, 507 bp, Arabidopsis thaliana landsberg
accatttacaacaatgttagttcttatcctattgatataatcagctgatgaaaagtacataacctcctttgggctttcttcataaatggtcatgtttgagcctaactattaatcttaaagaatttgcagaccaagtagtgtaaaagcattaaccatctaaatcccaaatggtgataactgatatccaaatgaagagtgcagaacgtgtggttaaagaaaacctacgaaaaagttattagtattcaacaaacacttggtaaggaacaatcaccgcaaaataagtacaagaaaatgattagagaacttcaaataaaaaaattagaacaattagaatgaccaaaatggttattaatcaaatacaccatgtagataataattctagttgaatggtgtaatacaacgcggtcactgaaaagaggacaagccatatgtctcaatccatggccatagactctagagaccagatgatgaagtttgaaaggagacgattgattgttgactggttga

SEQ ID NO: 72987 - DNA, 2163 bp, Arabidopsis thaliana landsberg
attttttttgactagtttgcaatatttaaaaatgtggacattttagggtttataaggttttggtaaaacaacaaaaaaggaagcagaagacatcggttgttgtcggcgccggaggaaatgagtggggcaggtgtaccggactttttctacagagaagctcaacgtcttggctatgttgctcgctctgctttcaaggtcaatattacattcatacccttctgagcttcgtctccttcttcttacattgactcttctctctgtctgtctctgcaactacagcttctacagattcaaaaacagtacaagctcatcaaaccaggctcctctgttcttgacctaggttgcgcgcctggtgcttggcttcaggtctttttttgagattccataagttacaagtttcgaattctgtgtaaagaggcctaaacttgaattttgttgctatgattcggtgcaggttgcttgccaaagcttaggcccacttagaagtggtggaattgtcgttggtatggatataaaggtcagaggaagcttcaaaaatgtaatctttttgctctaaactgtgtgaatccatgagctttttcaatttcagagcagaaggtgaaggttcctccacagtgtgattctcgagtgcaaaccattgctgctgatgttttaaactttcccagacaaaagattcgggagttatcacctcaggttctgaaactgtctctgtgactttattagacttggttctaagcatggttgatgtttttgttttctataaaactgttgtaacacaagttatggactgctttgtggtgcagcaattgggattttcagtcattctttcagatatgtgtcactcagtatctggaataaccactagagatgcagctctgtctgctgaattgggaatgcgagcacttgatttggctgttggtcaagctgccatctctcagtcacctaatgatgatgatggaggcccaaacgaaagtcgtcctggtgtacttaggcatggtggccatcttgtgatcaagcttctagaaagcgaggatgctcaaggtactactggaaagaactgtataacattgctatacaattgaaaaatgcttcttcttccttacattaacactttgtttgtcttttcgtttagattttgctcgaatttgcaagcctatcttcaacaaggcatcttggttgaggccaaaagctacaagaccatcatctcgagaaatttacttgatttgccagggatttcgataatttaagctttcatatacaatggaaatccgatggtaactcttttgtttttatagatgtattcagtattttcttggattgtgtagtttacaaaggaaaagaacaaatgaaataaatagaatgcaggttttgcgtgttacattccagcttctctgtctgtctctctgtgcagttgtgtatgtctccctgttattatcggatctgtgtcctccccaatgaccagagacctgtgtctttcactggtgtctgtaaacagaaaaattgtcattaatcaactgagcataaagagtcagaagatctgattctggtctgaaggaatttataaactcgaaaaaagaatacaaacctgcatttttactgaaggaaagacgttccaaaaccgcagggtctcatctcctgctccggtcactatagtctggccatcaggtgacgtagccaagtaaagtactctcatactgtggcccgtaagtgttgcaacctacatcagttgatgcgtcagttatacatattgaagatgagagaaagatcaagaaaatgagctttcaagtgtgaacaaaactatgtacctttgacatggatgggtacttccagagcatgatttggttttgagagtatccatgagtactcactatctcgttaacattcttgctccacgccagattgcagacctggctcccagtgtcgatgctgtttaactgatttccgtttgtcgtgttccagaatctaatgcatctgtctgcggttccacctcccgaagcaaggaggctgctctgatgaggagaccatgtaattgccttaaccgctgctgtatgctcagtcagcttcagaataggttgctgtgaatgattgtttcattccaataactgtttcccaaaaaagtacccaccagtgttaatatgataagcttcaaagaagttcaacttt

SEQ ID NO: 72988 - DNA, 378 bp, Arabidopsis thaliana landsberg
  unsure (1)..(378): unsure at all n locations
aactgataagaaaggattcttggggacnggacctgcttcggatgacctggaatgtacatacatgatcccaaatctttagaccttaaatacgatacataaaatattggatcataacaacttgaaataaacagaaacttgtattgaaaaaaattccctgatcaaaacgagagaggggagcttttgagacctgattacgaatgtgaggtaaagagcgggtcgacgattttagggagtcttgcaagattggtgtgaaaatcgcagctaatgaatgagagaaaccggaagatgattgaatgaacggagtgtgtttaaaaagtggacttcaaagtattgtgtgatactgaaaggacttatttgtgagttgacagagcagaaatg

SEQ ID NO: 72989 - DNA, 338 bp, Arabidopsis thaliana landsberg
gaacggccgaggtttacgagatgagaacagtgcaacatagatatggcgattgcaatcactcctggaaacagtggatcgaaggttaaatggggtattattccaaatatgctcacaataacgaacaagttaaaccatcaatactggacatctcctcccaatgcttcgcctctcctcgtttgactcttccaacgcaccccgaaacctaaccggctgtatataatctgattcacctcaatagacgtttgcagacgtgtcgatcgggatgggcaagtgtaaaatatgagtgtatcccgagaaaaaacaaccccccgacagatgaacgcctttgcggttggagc

SEQ ID NO: 72990 - DNA, 423 bp, Arabidopsis thaliana landsberg
tgaggtactcataagaaacctcatcgtttaccgatacattttcttgggcatatcaggggcgcctgcaatgccagtaacaggatggcgcctgcaaacagtcttttacaattgagcatatgtatagaacgcatctttgcggttatcattgcagcagccaggtttgtattgccactgtcccttaaagttagtaaaactaagctttgacccggtaccaggaaaggaacggaatatcaggatctttgttgtgtcatgtatcgaaaaaatctatcttgaagcaccatttcacaccctatgtcgctggcagatacgatcaaacagaaccccaggcttaagaaaacggtgcacagcatgctggtacgcagctatgaggcgcgcccgcgtacctgggtgaggtggttcgtaaacccgtctgtacacaaaaaa

SEQ ID NO: 72991 - DNA, 235 bp, Arabidopsis thaliana landsberg
gtgacgcaggaagccggtgccgacgatgtcgaacagcacgatcgcgccctcacgccgcaccgacgccgcttcgatcgtccgcaccgtcgtcgcggcggagcagccgaccgcgcggaacgcggtgaagtcgtgcgtgccgactagcggaccggctgccttgtccatccgcgcgacgttgagcgggccgggcacgtgccacgctcgatcgtgcagcaagggactgtgttagcggctg

SEQ ID NO: 72992 - DNA, 311 bp, Arabidopsis thaliana landsberg
agtgtaagtttatgtttgttgtataagggggacgtgaccttttgagattttggatttgaggaggataaatatgccaaagagattcgatatgagagattgtgtgtgatactgtgtgacatagtttcggtgtttggtgcttgtgtgattaagctgatttatgtgttggtgttgacgtaagtattggggcgttttggtgatcgttgggtttgttggtgtgaagttcgtgtgtggccgttgctccaagacatggagaagtgatatctaggctcatggggcaattatcttaaggcgtggtaatctttatgaaatct

SEQ ID NO: 72993 - DNA, 256 bp, Arabidopsis thaliana landsberg
gagagctacctatcaacgggaagaaatgaaattctagtctttgagagaagaaacgtaaggtggggctaaagaaaagttaagtggttttttacctcgttacgtagtttttggagtgctcgactagaaaggctacagatacttaatcctccactattcatttcattagaaaatttgctggctacagaaataagctttagatagatgctagcgaccccatccgccattgttatcaagaagaattccaaaatggcaactt

SEQ ID NO: 72994 - DNA, 606 bp, Arabidopsis thaliana landsberg
caagacattacaaatggcaagaaaaataggaatacgaaacgctaatgattacataagcgagtcccaaaaacatatcaagatgaacgggttaaacttcatgagaggccgcaagacacacatccgattaatagctcaagatctagttcaaacaaaattggagacagttggaggccagcctcattgttgatcacacagatctcgtgtcttctgctcccaaatacctaaattataactagctctagagtttcatcctcatcagtgtcgatttcatgatcttcatgcatccaccaaattcgaccatccctgacatatactaaattcaaaggtaaaaaaataggagcgctagtgaagctttcaaattcgtgtagtatcgcacaccgattaccaaaataatataacaaaagacgatgaagagacattatgcgaaaaatgtccagtgatgattggaatcaacgtagtagttataatatattcttctcatcttgtgcatttagagctcaactattgcttcactttctgactaatcatcaatgtaaaattgcgcacattagactttgaagacgagcgaccacacaatagacgataactcgaaaagaacaccttaca

SEQ ID NO: 72995 - DNA, 467 bp, Arabidopsis thaliana landsberg
  unsure (1)..(467): unsure at all n locations
cggggcgatacgcannnnnnnnnnnnnnnnnnnnnnnnnnnnnnnnnnnnnnnnnnnnnnnnnnnnactgggtgacttatcttaccaaagtcagggtctgcgcatgtcgaaaggaccgctcactgcgaagaggaagttagactaaatactagacagcgattgccggatatcaaacttggccttaccgggcagataccannnnnnnnnnnnnnnnnnnnnnnnnnnnnnnnnnnnnnnnnnnnnnnnnnnnnnnnnnnnnnnnnnnnnnnnnnnnnnnnnnnnnnnnnnnnnnnnnnnnnnnnnnnnnnnnnnnnnnnnnnnnnnnnnnnnnnnnnnnnnnnnnnnnnnnnnnnnnnnnnnnnnnnnnnnnnnnnnnnnnnnnnnnnnnnnnnnnnnnnnnnnnnnnnnnnnnnnnnnnnnnnnnnnnnnnnnnnnnnnnnnnnnnnnnnnnnnnnnnnnnnnnnnnn

SEQ ID NO: 72996 - DNA, 231 bp, Arabidopsis thaliana landsberg
gacacctgcggcttgatcatggcggctactttggttaagatccggaactgaatctaacatcagggggggatctgatccatgccctacagcgacaggaagccagattaggtgccgtcacccttcgttcaccgcgatccgttgtctacccaccgcggtctgctcacccaggccgtcatctacgccttcgcgcgtgcggtgatcgcccataagggcgtgctggccaccacctat

SEQ ID NO: 72997 - DNA, 444 bp, Arabidopsis thaliana landsberg
attccattttaaaatgaaaaaaaatctattcctgatttttttctactttattggagtttcaataaatagcgggcacgcgcaaaattgtccaacggatttattatctggacaaaatttaattatcaatggagacttttctcaagattatactggctgggcgtttacaccagactctgatggagatttaaatactggtcctaacggatacaaacaatttacttcaggcttttctataccaggatatctatttgttggtacaggtgcacaaatgcctagtttcaataatgcattctcttctaccttcaatgatcatagtgattctggagacgataaatttttaatgatagatggtgtttgtgtaactggagtgaaaatatggcaacaagatgttgaagtcaagccaaatacaaattattatttctcagcatggatcaattctcttaa

SEQ ID NO: 72998 - DNA, 565 bp, Arabidopsis thaliana landsberg
ctaacttgtgatgaaggaccaatgatgtcctaacagaagcaaatatcatatatcatatcgtacaaatctgttacttataatgaaataaataacatcaacatatgaaataaatcgttttaaaaatatcaaaagcttcgtcacgttacccgatagtacacgaagccgcaacaacattacaacttcacatttaataaagttacaagttacaaccttctacacttttggaagccaataagctgttgtaccaccaaatgtgtaggcatattcggatgtgtttctttaccgtcaagactatcgtaaaatacttaatccattcttccaatgacacaccatacaacaacaccaacaacaaaatacttagaaagtagaaaagctaattttatcgatcactatttttttgtaatcatttattattcctaatttattaataagtggtctgtctttacacatgcatttatccagtagtttccaattagattcctcaagatcctataagtgtgctgtcagtccacatgttggttttaattaactgaaccaaatcttcattatataattaaccagagtc

SEQ ID NO: 72999 - DNA, 600 bp, Arabidopsis thaliana landsberg
actctctttttaatctttgtatatatatagataattttataattctttttgtgtgaaaataaaagcgtaccaactgttatgagtttcggcatgactatcatcaagtagaagttcagcatccagacatgtggtggggtcgtagtccgttattttcggtaaacaaatcgtaaaaacatatagaagtataagtaacaggaaaaatataaagtataatatgcctatatagcgttctgctggactatcacttgcatggctgattcgccctaataccttgctaatgcaccagatcaaactaggatcatctgaccatcgacagatgagagagagttcgcagatcccaaaacttaagtacaagaggaagagtggtgacaatatgatttcgagaactgtattgttatatatattcactgccataatataccctataatcagctcatgcacagttcgagaatagctgcacgatgcccacctaacaaattccaaatgatatttttttttcgggttacaaattttagcttatataatcgcataataagtatcacaaatcctttaaatcaaaaatgtatatcacaaatcattatgtaccataaaatccattgc

SEQ ID NO: 73000 - DNA, 552 bp, Arabidopsis thaliana landsberg
atttgctgatttgttcccagcaacatattatacaagttccggtctcgtcacggctgcaaaaagcggagacattattatattcatataccccagatacgcaatccgcaaagcatgagaccgtgtacggaccaaccggatgttggcaatctggatcaagagatttaggtcctgcaaatacacaaacgttagtttgaagaaatatatgcatgtgagtaggctgggcccatctaaaacagattgtgttgaaaaaaaaaagctatctcaaatataaacatgattgtcaatttgttattgaaaaactacgaggactcacccgcaatggtgaatatagaccatgatggtggtaatcaaaattagtagaggagaagatgaagatctcttgggtgccatttttctcgtattaagacttgagagataatggtggttttaatcaactgatacatgatggttgtatagggttctattgtgatacactcttccatatgtatagggacttatgagatatattattaaccaaaaacatgtatcacacctatctgttttaaaaactgg

SEQ ID NO: 73001 - DNA, 335 bp, Arabidopsis thaliana landsberg
  unsure (1)..(335): unsure at all n locations
nnnnnnnnnnnnnnnnnnnnnnnnnnnnnnnnnnnnnnnnnnnnnnnnnnnnnnnnnnnnnnnnnnnnnnnnnnnnnnnnnnnnnnnnnnnnnnnnnnnnnnnnnnnnnnnnnnnnnnnnnnnnnnnnnnnnnnnnnnnnnnnnnnnnnnnnnnnnnnnnnnnnnnnnnnnnnnnnnnnnnnnnnnnnnnnnnnnnnnnnnnnnncctcttctctctatatcttttttatttccactcctcccctttttttttctctttcgggcgttcctctttttctctttccttcctacttttatctcttttcttttttttcttccttttttttttttttatt

SEQ ID NO: 73002 - DNA, 317 bp, Arabidopsis thaliana landsberg
tacttaactacaaatccacacaaacacagtctcaaacccaccgtaattattccgatgacccgcattcatacagaagaccatgcgactgagtaggacaatagtgacgaactgaagaaccgagagagacaaccctctagatgcatactcgatcactaagggagaataaaataaccgagagtttgtaacatacagcaagagaggtaatcttttgggaacatattgacttaatgtatggaggcatgtccagtgcggcttagacacgacgtgagcatacatatggcatcactttaggatcatatcaccacctgttttatacc

SEQ ID NO: 73003 - DNA, 122 bp, Arabidopsis thaliana landsberg
caaaggttatgagagctgagtcgtctggtggcttgccttgttatttctcataagagactgcctcttcatagggcagagggctagatgtcgtggaacgaatgatctgatttaattaatgttct

SEQ ID NO: 73004 - DNA, 607 bp, Arabidopsis thaliana landsberg
  unsure (1)..(607): unsure at all n locations
cctttgacgacatgttgtttgngattaattattttgtgttcataccaataattatgaaatacctgggaggattttttaaaatatagctcgatttaaatgtagtgtcattacaattcgactaatttgagtgaaaagagtgactgactgattgcttatcctttttaattattgaaggagataattattattacttttttgacgaaaattataaggttctcaaattttctcaggctatttttttcgtaattttcttttctatgattattagtattgtttagcaacatatagtagattctatttcaagagggagacagatcacgtggtgtccgccagaaacctatcgatcatgtacatgtggatctagttttcccacatactccaattatacaagatcttgtcttttccgtttggtgatctaacgtatatgactggaaattccattagacaaccttaaagagattagttagtaaagaaagatggttgcatatggctcttggattgtgtttgcgttggtatcgtcgctctaaaccgtgttaagtacttacgagatgatgtataaaaatatacaactgcatagaatataatcgttcgaacggttttcttgttc

SEQ ID NO: 73005 - DNA, 390 bp, Arabidopsis thaliana landsberg
actggctgaatcaggcgacgaggagcgcgtgttactgttaggcacacgccatccaccgacacgctcgcgcccacggccagatccttgccgaacccctgggggaaacgcagcccgaatgtgcgcagcccttccttgtcttcgatggcctctatggtggccacgccctggacgattccggcgaacattttctagccctcgatcaggtgaagtttttccagagaggcaagcgtgcccgcgcacgctcgcgcggtctccaaacccttgacgcggaaatgctttgaaaagaaacgaagcagatcgttaccttttaaccccgcctgcggggggaggacacaggacaacatatgggactgagtcttgagctggacctgcatcaacccgcttgatgac

SEQ ID NO: 73006 - DNA, 1972 bp, Arabidopsis thaliana landsberg
gtttattattatcaatacctctaatattgaatcatcatatcaatgtcgatttcaaagttgtttatggtggaacaagaccttccaaaacaaattatcactctttttacgtaaatattattatatatatatatatatatatatatatatatatatatataaattataagattctcaaatccatggttaacaataaacaaattttatagattttaataagcaaaactagactactttttgttacaaaatgttaccttatttagaagtttttgcagctttaacctcccacacatgatgcggcaaaaaaatccaagcacatgataattatcattgtggtttcacggacacatggaaacatatacaattacttaatttttagtctagttaggttcatcaatatgcaaattaaaatgattttttttcctttttgtggcaagcagaaccaatattttctatgtagttggatatataatctactcggataaaactattgaagcactcgacattgtcacaaagtataaatttcatttatcataaaagaaaaaaacaaattaaaaatctacaattttccacattcagtgggaacaaacgataccgtttctttctcaagatcatgaagtacattaaaattctgctgttgaacatttccgaaaatagacatcccattagaacttcccatggccaaacacaaaacgccggtgcttgaatccgccaccatgtagttctctccgggaagctccaaatcagcacctttaaaatgaaaaatcagcttaggaacagcaatattcttggcagcatcaggtaacttgaagcacaagtcaagtcccgtggatccagagtcatctactggtaaactcatccgagaagtaaactcctccttcaacaccttaaacgcggtctcctcgagatacgtgatggtcgtgcctgagtctatgatcatacctccggttccatcttcggctagttcaaaagtagacttttcaacagaaaggcgttttgctccaacggtgatgccttgtaactcaaggtaatagaacgaaggctgatctggatttcgtagcaaagacatcgttttggtgacttcaccatctaaacttgcacctgttttgttgacgatacccgaggctaaagatccaataaacaacgagctagatgcttcactatcctcaatcgaggtcaagcaataagaaaacttagtctctttgagctgagaaataagcgagagcggtccgcgaccaagacctacaagacctgacccttgagaaaacccgtctccttcgttctcaaccccacacccaaacccgataccagaaatcgagttctcgtcctcgaaagtgaacgtttccgtggccaagagccctcttgtagatgagtaatctccataagtatacaaatactcacaagcatctttatcttcgttacagtttgatcgaggcaatgcgttacaaagaccagaagagcatcctactttcgagtaagaggaagatttctccgggtcaaaaatcggagttggttgatcaaaacattcagtgcacggcttgcattgagtccatatgaggtcacttccggtatcaacaatagcagagtatttaaccgccgggtttccaatagataactccataagaaactcaccgcttcctccatgagtaggtgctttaatgttattagtatcatcaggattagaggctacagccaaaacagccacagctcctaacctgtttaatctgtggaatccacggttaatccctctttgaatcttttggatcttggtgaggtttttaccagaatccacatgtcgaagactcaatcgaaaaccggatctcggaaggtttttcggaagagtacggtcgattaatgatcttcttgacgatgaaaccgcgattaaacatgaaaaaagaataagaaagaaaggaaataataaagaagaagaagaagaagaagccatggtttgtgtgtgtgtgagtggatagatgaa

SEQ ID NO: 73007 - DNA, 459 bp, Arabidopsis thaliana landsberg
ctcaagattcttgatactgatagccatttttacagtatggaagacatccctctaagagacgggggcggctgaattatcatctacatttggtcattcgatataaagcattggaaaatcagcactactgctgtagcccatttctttttttcctctgagttcttcaatcttcttctggctaatgctaaagaattttaagtttaaggcatgaagcagtgtattagaaacaagatggaagccgtggtcagcaggagcattcattgagcagtttgctttcaatctcaggcctgattccatccctcactctgaggtcgtaagtttggaaagaagaacataattttgcgatagttcttttaacagagaagacagcatagtaatgattagagttacagaatcgaggatgtttgtgaatttagcttgcccttcatctattattctctccaaagacacctaggaaaaccc

SEQ ID NO: 73008 - DNA, 532 bp, Arabidopsis thaliana landsberg
  unsure (1)..(532): unsure at all n locations
tccatggcacaattggattttaatgtatatttagcctaatatatctgaacatgaaaaaatacctcttctccctttccctggtcctggttgcacatgcggccatgtctgccgtctctaccgtgtcgggcactattaccaacggtgaaggcctcaagctctattttgaaaaatatgtcgaaacaggactggtcaaactcgactccaccgtgctcaccaaagccggtaaattcagcttcaaggtcaccgatgaccaaaccaattattaccgcatttccaccaaacccaccgattttgtagtcgctattgtcaaaccgggtgaaaaagttaccattaacgccaaaggtaacgacctcaaccgcagttataccattaaaggatcgacctattcctcacagctcaaagaattctccgatatcgtgnaccgtaccgtgatcacccgcgataccatttcggcccgtttnnnnnnnnnnnnnnnnnnnnnnnnnnnnnntgaaagcgaatagctgggcaaagagctgggcaatgcatacaa

SEQ ID NO: 73009 - DNA, 528 bp, Arabidopsis thaliana landsberg
gagcgcgaccgcgctgccgtcgtcgcgcttgacggtgatgcccggacgcgcggcttccggcgccttctacgcctcggcggcgcgcttgcgcgcctgctcgtcgcggtacagcacgtaggaacgcgcgaccttgtgctcaccggcgcgcatcagcgccagttcgacctggtcctggatgtcctcgatgtgcagcgtgccgccgccgaccatgtgccgcgtcagcgccgactcgacctgctgggtgatcgcctcgaccttggaacgcacggcggccgacgcggcggcggcgccgccttcgaccgcgaggaacgccttggtgacggcgaccgaaatcttcttcgcgtcgaagccggtcagtttgccgttgcggcggatgaccttgatgccgcccggcgcggtcgcgacgacttccgcggtgctgacctgagcttccggcggggcgcggcgtggatcggtcgacgacgtggtggtttgagtaagcattttttgggcgtcccctggactgctgaattcggaatctggcgtcac

SEQ ID NO: 73010 - DNA, 540 bp, Arabidopsis thaliana landsberg
  unsure (1)..(540): unsure at all n locations
ctcgcgcagtttggtctcgcccttcacctgattgaccgtttcatcaactggttttgctttannnnnnnnnnnnnnnnnnnnnnnnnnnnnnnnnnnnnnnnnnnnnnnnnnnnnnnnnnnnnnnnnnnnnnnnnnnnnnnnnnnnnnnnnnnnnnnnnnnnnnnnnnnnnnnnntggaattgcgggcaggtcggcatgaacacggtgacgcggtcgcccttcttgacgcccttggacatcagcagcgacgcgaaacggtcgctctgcttatccagatcggcatagctcatgacatgaccgtagaagatcaccgccggatgctccggctgcttcttcgcccaagctcgcaggtattcggtcagcgccacctcgccatggagatactgcggctcgcgcgccgcgcctttcgggcacgccttgcgccagagcgcgtgaacctgatccagatagtccttttcgttcaaagcagcggccatgctcgccggtccttcatacctgtgcgcccgttacgacgccgatgagttgagttcgcccagaatc

SEQ ID NO: 73011 - DNA, 547 bp, Arabidopsis thaliana landsberg
ctaagcagtcgatttcgtctaatacacggtttagctcctcctcagtgtacgacgttcccatggatttgaaaacgtttccgagttctgaaactgagattttcccgtcgccgttggcatcgaacttgtcgaagactttctttagctccatatccgttgatggtgttgtggatttgttggtggattcaggatttgtgtttgccattttttgttttgtgatttgagtttctgtttttgacgtttttatagagtttttctgatcatttgcttttgattggtgagatgcttgatgctttttctatggctacccttcatggcttttaattaattaactatttatatttattcctatttttattaaccattaatatttgatattttttgtcctgctaataatatttctgaatgagttattttccttcactaattactcttggtatcaattactattagttttattttgtaataagtttttttttattaataggttgatcaatggtagtagagtcatcaactagtaaaattttgaaaaatgttctggagaaaagtt

SEQ ID NO: 73012 - DNA, 3819 bp, Arabidopsis thaliana landsberg
  unsure (1)..(3819): unsure at all n locations
ttttgtaatgtatagatatatatatgtattactttatgtagattttattttacattcttcataatatgatacaagttcggtttcgtagaggaaatatacaaatctattgtaaatgtatgatttgaaatcattctaattcaagttgaaacaagaaaaatcaaaaagtcgtttaaaataaggttcgaaaccnnnnnnnnnnnnnnnnnnattactagtttcaatgatatcgcacaacatgcatagcttagaataatttttagagtaatggagttcaaattgagtagctggttttttgataggtgtcagattctcgactagtcaacaatctctgctcatacattcaagtgaacacatacatattatactccatgcagtataaggataatgtaaaaaaaaaccatctcatattagataaattatctaagataatattttttttgttttcaaaaatctctacgttaattgtattttcttctgccaatatatttgtttattttcaattgtgtatttagttcccagtgttgtgggagttgtttgaagcgacaacgcttgtctctttttgccaatttgcaatgaactcaagataagatgtgttttttattcctaatctcatcatgactcgtgtgcataataatttggcacatttttcttgtctgcaaattgtttccttggaaataggataactccaatttttggccattttctaataattcaaaatgcaatgggacactttgcatccgttaccacaattgtttagggatttaaacatatatgataaatttggccgtagttgatacattccggttaatttcacctaattgaaaccttttttaaaaaaaataatcagatttttttttcttccaaatttggaatattaaggttgagcacttgagctaagctaaaccaaaaaacaaccaaacatcaaaatcaatgatatcatacgttatttattattcaaaacatcaaaatctaattaactagaagatcataaagcgtctcattcgaccaaataatcaaatgaacaattagatcagatcataaagcgtaatctctttattatttataaataatcaaatttattattttatttgattatagtcataaattaactagaagatcataaagcgtaattgatcatatttattattttacctatcagatcagactatacatgaaatttagtagctaatattcaggactagaaaatcttcagatgtttaagaatcttgatcggtaagtttataagttcaagaaaatgacatccttatatcataacgaagataagattcatttaaataatcaaatgaacaattactgtgaattccaattagaccgcatattagtattaatgatgtcgtatctatttacaatccatgaacaatgaacctagaacaacaatccaaagcttttttaattttagtgaggtactaagtgagtttgacagtaaattaagacccacaaatttgacctatttgcaaattttttctttaagaattaactactattacaaaaacaaaaaaaacaaaatttacattactataaaattcaccggtcggtatcaaggactccgaaaactctagccaacctcaaggacaagaaacagaggtaaatagcgagtaagcccccaccgacaagcttatcaagtctcatcttcttctttggcattatcacaagtgcccaaagcaagcctaccattaagaaccctagtgtctcaagcaacgaattgtcactaggaatgatgtagaccccggggtattcggccaacgaggagatgacaagtggcacacctagtccaattaccgtgttgaatagcgggcctgcgtagcatccggaaagtgctatctgagcaccatcgttgcctccgtgaaacgccacggtcacattcgcgataagatcgcctagagaatttccccaagctaggacggttagtcctagcacggatgggcttataccaaagatattacctaaggatattaacaatgagactagctcttgtgctatcatgtatgtccatgtcacactcatcgtgaaccctcctagaagccaaactaatgagaatttcttcggcggatgtgatttttctgtcgtcaagtaagctaagataccgacgattagcccgatagatccggatattatgtacaagattaggtttctttgtgacccgctgtaatgagaacagtaaagttcggttagtagaacaggagcgatggccgtggaaaccacagcgcaaggctttgaccatttttcttcgcaaacgacgggaattgtgagccgcctggggagatatagaggtagtccaattatgctcactagcaccgagaagcaagatcggtgcctttttggagaatcttcaaacacaatcttgaattcttgagttgttttctctggcaaagccagcttctcctctgctatatagcctagcaacgaaacacccatctcggccaaatcttctctgctacgaagaatctgatcggacatacgtttcttgcggtcaaagaaatgtgaaaccgataaaaaccctacatagaggagataaatggagagataacagagagcgacccaaatggttactttgcctatgaagatgatcaaaccgagacagcaaagagcgacaagaagaaaaaccacatcgcggataaaactgtttctgtcgatagagacatctctagatccaatcaacacacaaatcgtcccaacaacgaagctagagacgaagaacgcaccgcctaaaatagagttgagcccaaaatcgccattattcgatcttgtgaaggagacaacacttgagaacaaatcaggcgcaccgttgccaagagagagaagcgtgactccagccattgtaggagacagcttcaaaaccttagataagctgtctaaagaaggacagaagtaactcgcggccgtgtctccgagcaagtagaacagaacaaacaaccaggcggataaaactagatggcccaaaacaggggattgtccgaagatgcagaagaaaatcttgagatagtctatgtaaccttgtgggccacattttgattgagatcttatgtaagaacacttggaacggtggtcgtcaaggctggcgagtcctccgctgcagctgtcactgtcaccgccggcaaaggaatttaaggtttggatggatccggaggaggaggattttgtgaagcgaaatggagaaagatgagaaagatgaagaagatgttgatgaggagagaaagagattgagagctgagacgtgaggagaagagacttgccattcaaggaagcaaatgggtatgaagtgggaacaataatgaggtgtgttaggttttctgatataataatgagaaaattgtagttttttttttttttttttgtgtggaagttttgaattgttaatatttcggaaaataaaagattcctttttatttcatgcggatgtgggtaggggaaagtattgtctttttatgcgaaatatattaagtgggggaggttatattcaattattcacacaaggaggaaaaatcgaagttgataaagtgtttttatagaactctatatctactattattggttttacgagatattcatgttactacaatttgtatgtagtgtttttatttttctatggtccaacttggagtccaattttctagtgtaatcgtcgcgaggcatgcaaatcacacgtgtcatgatatttgtgacaataacaaggagttgaggattaatgtagttcataatgttgctattatagttaatattcgatgaaaaatagtcagcataaagtattaatagaaaaaaccataactatcaaagtgagtgagattgtgttgcaatggt

SEQ ID NO: 73013 - DNA, 544 bp, Arabidopsis thaliana landsberg
gacaaggttcggccctcacaaagacttttttcccaccacaacaacttttttttaagtgtctttacgaaattaagatataaacttagttcataagaaattaaacgtaaagggaaaaatgagaaggatgaatttgttgaccttaggtttgaggatgccgtacttcttgaactgttccctcacgactttgttgtatataaaagcagctcctctaaattgtggtaaaaccaaccatgccacaaacactagcttcgccgtgtaccatatcggtatcctataaatattcgatatccattttaatatcattaccataacaaaaacataacaagaaatgagacaggtttgatatgattgttaccactagccacttaccactttaggagagattgaaggatgaattctgatagagtaaggaaagaatagagaatccaattagcaagccattgctcgtcatctacttatgatgggctctttattggtatcaccgacgcttatctttatcaaaatcttaaaacaaaattagatcaaaataaactaaacaaaatgt

SEQ ID NO: 73014 - DNA, 613 bp, Arabidopsis thaliana landsberg
gggcggtggctgccatgaccgggcctgccgccacaacggcaatgacaagcacattttggcaagttagcgtcgcatgaccgcgaaacgcaccctagcgtcaaaagtggtctcaaaaagaccacacaacacccgcagcggttccgccacggctctctctccatcttcgattctatgccattttaccttttgctaacaagtggccaatgcttgcgggacgtgcgcgacttcacgaatcccgccgtccgcccggcacgccgggccgttcgggcaatgcccggttatactgaccatgggacttttgcgcaggactgcgacggcaatgaccgcagagccttccatactggcaacaccaacgacggtcgataccgtcgaacaattggtggaacagctttttcgggcatccgacgtcgaaacccttgccgatgcctgcagcgcctttgccgacgcacgctgtcccggctcccgcgttcgccggcgagcgcccgacgccgattcccgtcacgccgacacatcccgcgccgtgcttgcgcgcggtgcccatgaccgtgacgtgctggaactggttggccccgccgcccgccatgtcgatgccgagccgtggccgtggatcgcc

SEQ ID NO: 73015 - DNA, 437 bp, Arabidopsis thaliana landsberg
ggcatattctccggtgagacaccttattgctgccatgcctaaaaactcgtttggaacgatgtagcatttcccctgtatgccggtactttgagtgtgattacacaaaaagaacttgctaaagaagcccggatactgcaatctcaaatggcggaagcaggctggaaaatgaatattaaaaatcaggtgcagcagaaggaacctgttattcgaatgcagctgcgggatgatacattcgccaggtcaaaagaagcttatcatttacaggtatcacctggcaatatactgatcacagctgctgatgcacatggaatttctaacgctttacagaccctgcggcagattgtacgggatggaaatacggcagatgcctgtgatatacaggaccagcccgtatatacctggcgtggatacatggtggatgagggcccgaactatat

SEQ ID NO: 73016 - DNA, 239 bp, Arabidopsis thaliana landsberg
atgaaaccattttacgcagaactctgtcccgaactgagtggcgaaagcagcaatcagtggagtctttcttataaatgaacccctaatggctaatgtcattcattgactaaagatcagcgagcttcaatctcaaaaacattcggaatcaaccatgtcactatctagtttctgctgagttggacgccaagcgcttaacggtccacttctgctaccactatgcacttacgaaagataaaacg

SEQ ID NO: 73017 - DNA, 453 bp, Arabidopsis thaliana landsberg
gacgcttcgttaaaaaaaaaaatctaaaattcattcttctttcaaggtacaaccatgcggcgaactcgatttatattctaaactgggtctactctctgagttcttaccgaaagtaagtaaagctagattctttaactaattttctataaaactaagattatatcgctcttctttcaatgtgtttcgttacatttagatcttaggacccttcctggaagagatatcgagatcacttgagctagacgatgaagctactacaccacttaacacaatttcaggttctactctatccatacactatctttagctttagcttcgtggctttaatattagataatgatgtcacaacttcgattaattctgaattttgagtattcttgatcgttaccaattcttatgcagcagagtgtcaaaatagctgtgtgaagaggagtgtaatggacaatgttgatc

SEQ ID NO: 73018 - DNA, 216 bp, Arabidopsis thaliana landsberg
tatttaaacagcactgctcttctggatctgaactctgttgaacacagtgctggaggagctgatgtaaccgctggggttctacctatattagacgaagtgttacttcatcaggattttcttccgctctacatgtccgaaaggtatacattccccagcagatgattcttgacgcttacgtatgggttgcatgtgtaaaccgatgcctaggtaccgacg

SEQ ID NO: 73019 - DNA, 440 bp, Arabidopsis thaliana landsberg
gcccgggctgcgctcgcggcctacgacccgttccacctgctgtgcgcggacaccgtttcggtgcttttgctgggctgggacggggcggccgcgacgcgtccgggacctggcgcccggcacgcacatgctgaccaacgcggggcacagctacccagcggcggaaccggccagcaccgggccggccagcacggggccgggcagcacagggccgggcagcgcggagtcttcccggatcacggagccgaaggccgcgtatttcgcgccgaagttcgccgccgcggtccgcccgtctggcgacccggggctttcgctggcgcacgcctggggggagtggctggtgctcgccgacggcgactggcttccgccggacgacccgcgcgcgatcgtggcgggccgtccgcattcgaacggacggcgctggggcagcacgtagcaaacgc

SEQ ID NO: 73020 - DNA, 404 bp, Arabidopsis thaliana landsberg
cgcccggtcaccggggagatcgggccgggtaccacgtcgcttgcgcgatccgtacgagggtcggcggggctgggcccgacaggcggataccaagtcgcgtcggcacaggcggactatacggaagaactacgagggatcgccgagtcgatccggcctaggctcgggtacacgacccgatgtaccaatcagacggttcgtccgcgatcgcggggcgggagcgtactgctcaaccactggtatatcgacgcgtctgtcggggcggtggccgcgccggaacgtgcgcggggagcggggcttaaaccctgatcccggagccgttgggaccgaagctataacctgacggactcaacgtaggctggtacccgtaaggtcttgcgagaccatccgagacgttgcggatatac

SEQ ID NO: 73021 - DNA, 595 bp, Arabidopsis thaliana landsberg
agcttgtaaaacttttctccaattccaaattgtgcagtctttctatatagagttgttaaatattgttcacttattattatatgttttcagatggcagcttaagtactatagagttgctacaaggtttggtctattagccgaagcatgtctctctcttcttcttttccctgacttgaggggactctcgatgttccggttacttaacattgagtttgcagcttctgtaaaatatcatgtgtggctcgggaccggtttgatcttcttttctttggttcatggtggaagcactctgttcatatggactattactcatcacattgaagaagaggtaaattaaataacttcttttttttttataacaatcttaaactagtgtcctaactctaatacttgtggtaaaaacagatttggaaatggcatagaacgggtcgggtatatgtagctggactaatcagccttgtaacaggattactgatgtggatcacatcacttcctcaaattcgaaggaaaaaatttgaagttttctattacacacaccatttgtatatagctgttcttgtagctttcttgtttcatgccggggaatcgcacttct

SEQ ID NO: 73022 - DNA, 497 bp, Arabidopsis thaliana landsberg
  unsure (1)..(497): unsure at all n locations
gttgtcgatatagaactggcgcgggttggttagccttgttagcgcgacatgacttcctgcgggatcggggctggcaggcgcgatgcgttcaggatggccttgnnnnnnnnnnnnnnnnnnnnnnnnnnnnnnnnnnnnnnnnnnnnnnnnnnnnnnnnnnnnnnnnnnnnnnnnnnnnnnnnnnnnnnnnnnnnnnnnnnnnnnnnnnnnnnnnnnnnnnnnnnnnnnnnnnnnnnnnnnnnnnnnnnnnnnnnnnnnnnnnnnnnnnnnnnnnnnnnnnnnnnnnnnnnnnnnnnnnnnnnnnnnnnnnnnnnnnnnnnnnnnnnnnnnnnnnnnnnnnnnnnnnnnnnnnnnnnnnnnnnnnnnnnnnnnnnnnnnnnnnnnnnnnnnnnnnnnnnnnnnnnnnnnnnnnnnnnnnnnnnnnnnnnnnnnnnnnnnnnnnnnnnnnnnnnnnnnnnnnnnnnnnnnnnnnnnnnnnnnnnnnnnnnnnnnnnnnn

SEQ ID NO: 73023 - DNA, 610 bp, Arabidopsis thaliana landsberg
  unsure (1)..(610): unsure at all n locations
aaactcaaatacataaaaacatgcatataccaaaaagaaatttggtttatatctggatattcttcaccaattaattctatgtacttttgacatttcgttttgtaaccagttagattgcaattgactttttttttttttatcacctattaaattataattgactttcgttcaatgtattttaaatatttttattgtcttaatttttgatgttcacagctaaggcagaaataagatgtacaaatcgaattatcaaattcaaccaaaataaaataaaacaaattacaaaatggagaacgggaaaagtcattttcctagtatttggggaattaattaaacaaaactatgcaccacatacacaaatttcatacatatatctatatgcaaaaactttatataaattcacaacagtcatagtctatttgtaggattattatttttatcatttgacaccgaagctgatatttgtgactgttccttgttcattatatattcatctgtcgntttcttaacttttacttctaaatacttgacagttttttttttacaaattaaaagatttgaatcgcttagacccatcttagtaaaatgcaactttctgaatcttcccaat

SEQ ID NO: 73024 - DNA, 337 bp, Arabidopsis thaliana landsberg
gctgggaaaacagatcttgcgtactccctatagtgagctaggattaagtatgcttacctagggtgagctgccttaaggaattggccaacgcacggtgagaggcagaatgtcgtctagggcgctgtttcgtttaatcgatgcgagcatcgctgcgctcgggcactcggttgcagcgagcgttctcagttcaatcagatgcggcgatactggtattcacatggttaagcgataacgcaggaatgaacatgtgtgcatatggtcagtataaggctcggtaccgtggataggactctatgattgcgtattttcataagcttgaggccctgactagcatgac

SEQ ID NO: 73025 - DNA, 700 bp, Arabidopsis thaliana landsberg
ctaagtttgaacgagcgcttacaaaaagagaggaagaaaccctagtttagcatataatcgatctatgcggtcctgaaattctcgaatcttgtaagacttctagactttgtttcgttcaaaaatcatagatatgtggaattaatgtggtcctgctctgtgacatgtacggactatatatactcacgactaataattactgtacatgatacataatgtgtctttgcgttagagatgatagattcagttttcagatgacgacgtaattaataatatcactatattttcatcgttttttgggggttataaccttaattaacacttatgtgatgtcaggaacaaagaaaaacaacaactatgcattctctaagtatgaagaaaatactataggaatcatatctaatctgatcgttaaagtaacttttatgatatactataaattaacatatatgtatgcgtatggatattatcatatgaagagtatttcgttctaaaaattccatttgtgttgttgttgttgagttatatatatttaggattctaggagtatacaccttcaattttcagaactattaagactatctttattttacttatttaaaatgtgactataaatgccttatttaaaaaaatggctcaaaaggtccttaccaaaaaaaaaattttttgcttaaaagcttttggacctaattctttagatttt

SEQ ID NO: 73026 - DNA, 329 bp, Arabidopsis thaliana landsberg
accgggctggaaggcctcggactactacaccaatgctttcatcaattgacgcggcggacggcgcaatgggaacgaacgggatggctgcggggccgggccggccccctcatccggtcgcggaggctgcctatgtcgcaatccgacaggttggaaagtcatacggatcgttgaaaggcgccgtccatgcgctcgacggaatcgatcttgatattcgcgggggcgaattcgtttcgatcctgggtcccagcgggtgcggacagtcgactctgctcaagtgcatcgccggccttgagaacacgacgtccggacagatcgatatccagggcaag

SEQ ID NO: 73027 - DNA, 508 bp, Arabidopsis thaliana landsberg
acggagcgcgagcgtcaacaggagctggagaaccttctcatttgtcctgaaggaccccagtaggctggcgacgggggcgatggtgaagaccaggacggtgaggagaggatctataaccccctcaagctacccctcgcatgggacggaaagcccattcccttctggctgtaccgccttcacggtctaggcgtcgaattcccctgcgagatctgcggaaactttgtctacatgggcagaagggcattcgacaagcacttcaacgaggcgcgacacatctacggcctcaagtgccttggcgtcaccaacacggcgctgttcagagatatcacacgaatcgacgaggcgctcaagctatgggagaagatccagagggagaagaagcgcaacaaggtcgacgagggcagcgtggtgcacatggaggatggagagggtaatgtcatgcctgagaaggtgtactatgatttgcagaagcagggtctcttgtaagcttcgttggaaattgcgtaca

SEQ ID NO: 73028 - DNA, 521 bp, Arabidopsis thaliana landsberg
  unsure (1)..(521): unsure at all n locations
cttttttttttccgtcaaaaaaaagaaaaaaaaaaaaagactaattggttacacacttttaattttaacatatattatcactaaaaccaattagtcaattacacaaatttagtaataatacatagggtctctaatatgtattaagctttatataaactaatgaggaaatctgtaaaaatatacaaataagaatttccaaagtagatcctatgtaatttcgaagcgtattactgtgcataagacagtgttaaccaaaaaaaaaaaaaacatttccgagatgaactgtgttttgtcctcaccggataagaaagtggaagaatgaaccactacaaagtccgcgtcgaaagcactcagttataaaagtaaaattgacatgcgattacattaaaaataccaaactcgcttgtccatttttattgatattgcttgctaatgnnnnnnnnnnnnnnnnncgctttcttggttgactttctttctttctctttgagttcttttaaatattaatagatgcattttatgtt

SEQ ID NO: 73029 - DNA, 513 bp, Arabidopsis thaliana landsberg
aacccttgtagaataataatattggatactgaagataaattttgttgtttgctctctatttgacagtcacaggcatataggcttcctttaaccagtccatgaaatttcactacttttataactctctctccctccttcttcttcttccataaaactcttcactaaacctaaagatctcttaagcttaattttgcaagatcatggaccaaagcaattctcttcttagctggacttacttctctcatggaaaggtagaggctttttttatctctaacattttggcttcctctgtttttcttaacatttgtgatgggttcactattctgcttagatctatgcataatgtgtgtctaaaaaacataaatttcttgtgtcttcttcttcgtttatgttataaaaccctaagtttgactcaatttctgatttttatatcaaatttgttgaaatcacttatactctgtttctgagcttacatttgcttaatgggtgttcttaatcttaaaattttagttt

SEQ ID NO: 73030 - DNA, 187 bp, Arabidopsis thaliana landsberg
aataagcactttttttttgtttagaaaagagaagccttttgtttagatttcatgtcggttggaatgtttgaggtcaattggttttcactttgtcaccatctatgatgactcatttggttttgacatataatacttttgatttttgttaaatgtcacagcatgcttgtcatttgggatggttttcgga

SEQ ID NO: 73031 - DNA, 666 bp, Arabidopsis thaliana landsberg
gtgacggaggtgatcgaggaagagttctaccggcattgatagagaaaccttcttatgcgttagagactttttctgaattgtttacacaaaaaccaaaatataatttaataatttattaatgctatttttattctctctttgatttcccattattgttgaggtggtccataggattgttggattaatactgaattactgatatgcaaaatttgtccagagtagcgaaggaaaatcttaactgattctattcttcttttattcaaactttttagttcaggcttcgtcatgtaaggatcgatagataagaatcattaaccaaaaaattattaaaaataaatataaatcttcagagtgaaaaaaaatataagtgtcaaaaacattttggcgatttttgttttgaaaaaaaaaacccccactaaaacattaaaccaaactaaacttaagaaccaacatgtttttataccattaccaaaactttaacctaaatattgaaccaaactaaacctaaattggctgctcagctaaatcttacgacctgtttgattagcattttagaaagctatgagttgctggcaaacaaaaaaaacccaactccaagtctaatatacctcataaataagatttacgctgaccatggacttggagttgcgcttttttttgttattg

SEQ ID NO: 73032 - DNA, 689 bp, Arabidopsis thaliana landsberg
tattgaatttgtgtggaatagttcccatgttggttgcatgtgtatgcggtggatccattttctttttacacccttaactattcagatcagaaggttttcagagagttttgggtaaaacacacacaaagccccaatatgacaataattgaaacttgtctctggaaacacctttcactacacatgcatgccttcacttctcttatcatatattcatatgtacatataatggatgattacattttacacgttatcatcatcacaatcattagttactttctttgagcgtttctcattatctgtttactatttactatttgttgagaaatatattttagttgaaaacgagttcataaacttaaatcttgaacttctaagtggtatatattttttatttcctatgcttaaacgatgtaattttaaaaaattctatacttactctttattgaatattaaaaatatgtttcttataaacatgccagtaaattaaatctaatacgaatcgaatttgtaaccaatcggtaaaaaagagtttatgatagaatcattaacatttatgaatcaagaaccacaattaatatagaccataatcaaccacatatccccacataattttttaaataaattaattaaaaagaaattcatcttttccttattccttttgagggcatttacaaaaacccccccccaaa

SEQ ID NO: 73033 - DNA, 574 bp, Arabidopsis thaliana landsberg
gtagtttatgaactctttttctattactattaactacaatccgagctaaatatatgatacgtacttcaaactatacataacaattacatattcatcttttataaattttcaagcatcaaaaagaaacagagttctccaatttccctgatttgagatctctacatgttcaatatcctctaaatttgagtttttttctgagcaacagtcagatattatattgacctaaatttgtcagaatcatcatatatagaatctttcaaaaacaattttgaaaaatcccactatttctctcactcttctccggtcaattagattgaaaaactcatgttaatgtcaaatatttactgttttatattctaaaagtttgtgtaattatccaaaagaaaaccacaaattctggcaaaatcttacgtcaaatattttctgacatcattcacttctaagttctagcaaaggaaatgtgttagaatactaattgattaaatacacaatcattcaaacacttaaaacccttttttttttttttggtgaaattagctttcttatagataggccccaaaacatactcgatgac

SEQ ID NO: 73034 - DNA, 535 bp, Arabidopsis thaliana landsberg
  unsure (1)..(535): unsure at all n locations
ataattagaactataacttactattagttgaatccattgatttaaataaccttattttaatttacacgtttcgtagttaaaaaaataaaccaaacactgattcaaaatagaaaaataactgtcagagaagaattttctctttaatgacttttgtattctatatgaggattgaacattatgggttattcatagcaataaaaacatnnnnnnnnnnnnnnnnnnnnnnnnnnnnnnnnnnnnnnnnnnnntaagcacgtgtcgtaggttgaataaataattcatagtggaaccatagattagtgacctgtacgagtgattggtttcagcgtgcagaatccactaccacgcttccactcaatttagtggaccgtcgactctggtgggtttggtagcagcagaagataatgcacacattacctgaatccacatttttaaaatatgcacttgccagttctattatcctgaaagtttcgntagaataaaacgcaagcgaaataataatcctatcaagcattntagataatcactcattcac

SEQ ID NO: 73035 - DNA, 422 bp, Arabidopsis thaliana landsberg
caaaacacttaaagggttagatattactttaggatgttaatttttaggaaaactgacctgatcgatcttgtacaaaacaagggaaagctcaagggcgcggtgaactagggttcgcttgggatgaaggtcacctagtttagggattcttgatgtatcttgcttggggccatgaataggtttagcatggggtagagcgtctattccgacagttggataagctttcaggacgagtatgacgatctttttgttgcaactaatacacggaggaatgacgtggtaactggtatgggcatgagcctagagtaaagagtggagcgtgtgccgctgatagtgatcttgtctacagtgaccattggaattactacgactatcagcacacagtctattagtgggatgttcattgaatgtgagtgtcgtatgtt

SEQ ID NO: 73036 - DNA, 3051 bp, Arabidopsis thaliana landsberg
cctctcggatgatgcgtctgatggtaatgaatctggaacggaagaggatcaatctgcttttatgaaagaattggatagtttttttagagagcaaaacatggatttcaaacctccaaaattttacggggagggactgaactgcctcaagtaagcttgatacccgtcattatttggtcactttactgtgttacattttaaaattttcagcaggagctgatatctaatcaatttctttggcacaaggttgtggagagctgtaactagattgggcggatatgacaaggtacgggtcactgtgaatacgcctgttgaatgtcacagcatcttttttgacaagcaaatgtgacttcggcttttcatcttttgttccatcctggcttacttgcatgcgtactgttgttcatgatctagcagtggtgcttttggtgattttctatgattattatatgctttttatactggataggttactggaagcaaattatggcggcaagtgggagagtctttcaggcccccaaagtaagaagaatgcttttcttattagtggtttgtcttagaaattttgggaaatcatgtggatatttgtaagaattaccctctaattggtcaattgtttgttcaggacatgtacaacagtatcatggactttccgaggtttctacgaaaaggtgagactatattcaccaccttttcctctctctgcttttggttcgtctatgtgacttttgtatacactggcatgggactgggactctatgtatcaacccttctgagaaataattgaaatgattgaacagtgaacaactgtgaatcatcttgagatatgtttccctttagatacagtaacatcttgtaacattatagtttcttcatttttcaggctcttcttgaatatgagcggcataaagttagtgaaggtgaacttcagataccccttccgttggaactagaaccgataaatattgataatcaggtaaaattgagaaaaccatatcatgtgtctgtagtttttgtttgatcttcttcttctgattaatgtcagtgttttaacttaacccactgccttgtttctacactaggcgtctggatcagggagagcaaggagagatgcagcatcacgtgctatgcaaggttggcattcacagcgtcttaatggtaacggtgaagttagtgaccctgcaatcaaggtccggtagaatctttttatatgtttcattttacattcacactagatctctcgtttttttttttgtcaaacatttaatctatatctcatagtctgaacgaacatactgttttgtaattaataggataagaacttagttcttcatcaaaagcgcgaaaaacagattggaaccacccctggtatgagttctgtttgatgaagaagtgttgttctcatttttattttgaaactttgacatgggttatcacttacatctcacaatgtcatcaggtttgctcaaacgtaagagggctgctgaacatggtgcaaaaaatgccatccatgtatctaaacctatgtacgatttttggctttgtggtctggttttcgatgcgtgataattcacatttgaattctgattccagttgttgtttttcctaggttggatgtgactgttgttgatgttggaccaccagctgactgggtgaagattaacgtacagagaacggtaaaatcaattgccacttccttaaaaacctgagcaatcactttctggttttacatgtattaataaactcttccacaatctgcagcaagattgctttgaggtgtatgcattagtcccaggattagtccgtgaagaggttagctctcaaatctcgttttgtttacatatggatcctaagattgagtttagcactcagtttttgtcttggcaacaataatacaggtccgagtccaatcagatcgggctgggcggttagtaataagtggcgaacccgagaaccctatgaatccttggggagctactcctttcaagaaggtaaatcctcattacacgatttttcagcttacacatagaatgttgaacgacattttcaaacctcttttggaactgcaggtggtaagtttgccaacgagaatcgatccgcatcacacatcggctgtggtaaccttaaacgggcagttatttgttcgtgtgcctctggagcaattggagtagaaacatttacagtttaacaaagcctttgaagatctgaaagagagaagattgttagaagtagtgttgagacttgagagtattttgtttgtatattatgagagattaaacacaacatgagaagagcctttaggaatccttaattaggccatctagtttttattgtctctcctctctttgattagattcttcttctaagtgtcgtaactattgatttgttgtagcaccaaacttctttaaacctttctattaagaacacacaaatctacagctttttttcttaaattgtttatgtgatttgatttctgtggcagtgaatgttttatgttatcaacttatcatgttaactcaagattgcatctcaatttgtactcatcttagtggcaattagaaaaaacaaaattaggctacaatagttttgttttgtttgtttaggtgttagggatagaatttatttttcgtgagtttattagtgtttagtatttagagtttatgtttccaaaattttatggtttaatttatactctcagattaggttaacattttaaaaaatgttgctaattttcaaaaatctagaatattgttctaattttattttaaaattctagactaaataattaattcagccttatatcttaaaaattttaagaatcactttggcttgtaatgaaatgaaacccactgttttaatattcaatttcaaagtgattctagtcttgtattaactattaaaatattccaatctttaacaacaaagaaaactataatattcaaagccatgtatatacactaataatggacatggtccaataatttttacaatatgagcttttattcataaaaaatattaaaattttgaaagagaaaaagtaattcacataagtgg

SEQ ID NO: 73037 - DNA, 531 bp, Arabidopsis thaliana landsberg
  unsure (1)..(531): unsure at all n locations
aacacaatatcatctatccgttcagcatttactcggactttgtaaaattttcttccctggtaaccgtcgcggggcccagtgtccccaccacaatgccaccggcacggtttgcgatggataccgcgtcggtgagcggcacacccgcannnnnnnnnnnnnnnnnnnnnnnnnnnnnnnnnnnnnnggcgccggacacgtcgtagacctctctggcaacggtcgggatatgaatgacatcgccttcggtatagagcgtcatgccttcttccgagcgcgtcaacagaagcgcttccagttccagcgccgcacgtagccgctgcgccttcgtcgtcagctcttcctcgcttttccaggagccgaccacttgccgcaattccgacttgtttggggtcaggatcgacgctcccttgtaacgactgaaatcatcccctttccgatcgacaaggatgcgcttgttcaggcgtttggctgctgcaatcatatgcaccacattgatcaggctgcccttgggtagtccgacagcacgatcac

SEQ ID NO: 73038 - DNA, 472 bp, Arabidopsis thaliana landsberg
  unsure (1)..(472): unsure at all n locations
ggggtgttttgcaatggtaaaattttggtcgcaaatatgtgacttgtgccttttttagttagaaagaagagtcngggtattatggacttatttgcaacaacatttttcgatcatggttaagtggtattgtaatcgcaaattattgatacaaaatttggtggaaacattgaaaatgcgaaaagttaggtgtactgaacttttgcgactccttaaaaaatggtcacaaaaacatcacaaaatttctcctatatatatcaacgtacgtttcttcagttaaatttgcctccaactacaatgctaaaagaaaaattaaagagataggaagaaaacaaaaaaaaaaaagaatagaacagtgttaaaaaaagaagaagatgtggaataatccggtagaagaatggatgtacaatataatcgatccatacactaatcatgtatcatgtctcatcgaattatttggcaggcttgggacatt

SEQ ID NO: 73039 - DNA, 591 bp, Arabidopsis thaliana landsberg
  unsure (1)..(591): unsure at all n locations
ctgaccgcctaagattgatggtcttgttgagctcaagagcctctacttccatgaaaatatcaaccactctgattatggcttgaagaaggaagacccgaactctctgccctttctcggataatatgaacagtagcagatcttctgttgcggaaactactgaatgcatgtcgaatgatttcagttccgatgatttcttcaacgttttatcttctggagagtctcctgaagtcgcagaagcctgttctgatattgctgctacctggaaaatagagcttgttagctgctcattcgttagattattcaataatcataacgagaggagctatatgannnnnnnnnnnnnnnnnnnnnnnnnnnnnnnnnnnntccatcattacaaatgacaagctcccttagtattttcctcatatctgggcttggatctgctaatagcctcccgataacaaatggatatgcactctcaatcactttaaactctggatcaagaatcttagccgtgccttccagtgaaccaagagatcttataacaagagcatagtctggaggcagcgaanagttgaactcgtacataacatcatataattgtccatc

SEQ ID NO: 73040 - DNA, 522 bp, Arabidopsis thaliana landsberg
  unsure (1)..(522): unsure at all n locations
ctccaatcgaaaggcagccttcattttctttgacagcctttgtgctgcttaaatttctaccgcgagcatatgattacacccccttcttccaaaaacatcactgaagatgttgtttaattgttctcatggaagaataaattacttgccatcaagaaaaacaagtgacgaaaaacttcctgcaagatatgattagtaagatgctgcagtgctgagtgatccttccaggaacgtcagcctccatcgaggctcactgataggcggtgtccctccagggtcaaacacctcaagaacgcagacacagtatatctttagaaccaaatggcatctatcaaaagtagctagaaaggaagagggtgttttattgaagatattcacaagggggctgggagatggctcgctgggtaaagtgcttgccatgccagcatgtggacttgagttctgagctccatcagccacagaatagctttgagtgcagnnnnnnnnnnnnnnnnnnnnnnnnnnnnnnnnnnnctgatgagacag

SEQ ID NO: 73041 - DNA, 507 bp, Arabidopsis thaliana landsberg
tatctgtcgcccagccccagggcgccgctgaccttttcggcgtactgggccgacagcagatcctgggcgcgtcggcaggcccggtgcagctcggtgcggacgtcgagcaccgtgcggtaggcaacgcgcaaggcacccccgccgatatgcggcctcgagctgccggacgcatgtgccaccgccagcgcaccgagcaattgaacatcgcgtaagccgccgcggccacctttcagatcgggttcggcgctgccggctatggccccactgcgctgccaccgggcgtgtgtcacgtcgacaagctcgccgtagcgggcgccgatcccctggcgccattgctgtcgaatgccggcgatcaggcctgccgacagccgatcatcgccggcgatatggcgtgcgtccagcatggccagggcggcgaggatatcgacctccgcgacctgcagcgcctgcggaatcgtccggacgctgcgatcgagacgaacgttggcgttccacaatggataccaa

SEQ ID NO: 73042 - DNA, 563 bp, Arabidopsis thaliana landsberg
aaataatattatatctaaggcggttgatgagtgattaatcatgagtaacagtattagaagtttttgtttttaattagaaaatctagcacgacgtatgtgatttttctttatgttttttgcacaaacgatatatatatatgattaataataatataaatatcaaacttactgtaagtatttatatgaaaaattgttaagaactacacaatgtattagtgtgccaactacacaataatataaatatcaaacttaaaaaagagtaagttattatatataggataatattatgaatatctgtaccaatctaattgccgaattaaatcatcgcagattttagtgtatatttaggatagagagtggggaaaatatttaatctaatacatgcatggtgaaacaaaaagggtattttgaacgagtaattgacttgaagtaagactaatggagaaaataatataaattccatatatagttggaattttatattcatgtatatatgatacaccaaatatatttaaaattggtatattatagtatatcaaaataaagccatacaaactttagga

SEQ ID NO: 73043 - DNA, 205 bp, Arabidopsis thaliana landsberg
ttcttcaattgacaagtgtttcgagatgctcgtgattgatgagatctttggccttatctaattgagagccttattgtgaaaagagataagagaaatgagaaatgatattgctagtggaataatctgactctggatgagtttaaataactcagttggagcagtatagaggagactatgaacacttataagtactaatcactttcgc

SEQ ID NO: 73044 - DNA, 221 bp, Arabidopsis thaliana landsberg
gaacagcggggccactctagcttggtacagctcacggatatatgactgtcagggagaatccgatttgttacagcattggtcctaggaatgaagcttctgccttttgtatcgggcgtgcatacatcgaaacataactcatgcacatgcatggcaaatagagatatgccaaaagcctgggtcttgattactttacaaacgtgaagcttgaaactagtatttac

SEQ ID NO: 73045 - DNA, 600 bp, Arabidopsis thaliana landsberg
  unsure (1)..(600): unsure at all n locations
atgttaaattgtatctgcgtgaacacactgtattatgagtacttttttttgaaattaatagaacaaacctaactgtttggaccaccgggtattctgaagagattctcctctctcatattgcattgcaatgcactcttttttttgttttttatgtatagccaacttgttacgcataccagtagtctacggatcgcgacctaatacgtaaccataaactcagctgtgcaatgactcaaacataacataatgtgaattggcatccaacatgatttatatagtgtggatgccgctagaaatcttagaccgcaccacttataaatgtttacgtctacttaaaccggtggattactcatatcttgatcagtactatcatcggccaatgattcgtccttgctttctttttagaggacaggaaatgaaacaaatcgtattgatatgtgtagttgggaatagaacaatgagactagagagcgataattgaaccaatcaaaatatgtcttcacttctgtccatatcttctttttctttntggttatacaaagtgaatattttttttttctttccatggagaccacttagaagcagaattatgcctttcac

SEQ ID NO: 73046 - DNA, 463 bp, Arabidopsis thaliana landsberg
  unsure (1)..(463): unsure at all n locations
taactaactctgttacttaatttcttcttacgggttatataagaataacaacntgccggatatgtcggtgtttgatgtgaatttcaaatcgctataaacgcggctttaggttttgacagctacatggtaatgcgccatggtgctggccccacctctctgtctgatgatatgcagaatcttgacataaacaagacagatacacagagacttggttgttacttctgcaacgacgtggttgcacctcaggatgtaattccctggttccttcattttgaattgatttgtttcgtgttacctccagttcagtcctgattcgtcgtgacccactcttttcttgcatttgcagtcaatgactgatcgaactctaaaccaacaatgcactgttacacgcccgggtctagctcctattgcaagagcctctcgccggtgaactcttagtcggagtcctacaacacccacttgg

SEQ ID NO: 73047 - DNA, 111 bp, Arabidopsis thaliana landsberg
  unsure (1)..(111): unsure at all n locations
ggtgactgtctttggtacaaaacaaaaattataattgataattgaaacgattaaaatgaaatggaantgttgaattttaaagctaccccccccatccccatgggantagag

SEQ ID NO: 73048 - DNA, 546 bp, Arabidopsis thaliana landsberg
tacttacatatttttctgcaaaggcagacgactacttatgaagaatacaggagactaattatgaagaataatgaaacattacggtatttaaatgggaatataatctctgatcttgactaaactaattggacataaacgcatgatgaaaagttaaatctaaaatatagcattaattatatacttaacatgctttgttggcgtaaagctccaagaatcacctgaaaaactatattctatatttataacaataggtgtctgcaatataaatctgctacttgaacaacagatagtcagcagtatgggcgtattatttaaactctatagtaagcacatcaatttggtaaagaaataggtcatctgtgaaacctattactctttggtaactagctcttatggattacagatcctatacatgtgttagatatttggtttagtcattacaaaacatttcttaagaaataggtcttatttatatacacagcaaagaataacacacacaattacacaaaacaaatattgttaaaggggttttaagacccaaacaaa

SEQ ID NO: 73049 - DNA, 223 bp, Arabidopsis thaliana landsberg
tgggactgcaattgtttaaattaatttatagaaattttaatttatcgatatttattaaaaattaaaaatgattgtaccattaatactctattaacccatagccaagtttttctaatttactaactctttattcccttcacctacatcatccttttatctttcccccacccattctcccaccctccccaatttcattccctcccctatcccttctttccccttc

SEQ ID NO: 73050 - DNA, 554 bp, Arabidopsis thaliana landsberg
aaactgaaagcttattaggggttcgatagaaatattgaggttttacaagggtaattacaatctatctattcttaattgcataaggtgtgcaaaccgcacatgcaaaagtcaaacgtaaacaaagggataaccacttatcagaaaataacgagttctcatgcttaagctcaacgattcaattcacatagaaaaataaaataattcgtcggccggtacctacatgaagcaatatatataaaattaggcaaatactcgacgacgacaaatgttaataaaaaaagaggcgttatatgagactcacggtcatgttgttttgcagccaagaacaccaagtgggccatgttaatgtcctcttcccaattctcacatatcctttctattcttttattgattgatattaccgcgtccgtttatttcaattgctccaaatattagtattatcgttttctatgataaccatggttgctatctgtggaagccgcacttattacatgttctctgcatactatgccaatattattgctacgggctattattgtatcatatatgataca

SEQ ID NO: 73051 - DNA, 457 bp, Arabidopsis thaliana landsberg
  unsure (1)..(457): unsure at all n locations
acaaagctaaacgaaaagaatagcgatatgatacattcttataaaggttatcgacaaatgggtgccaggggcccatttcttcgttaacaatgttaaacacgtcaatataattaattatttatttatttattaatatataaaaaacgaaatctaatttgataacgtatatccatgcatttttcaataattgtttttacaaattgttcccattttaccgtcgaaacaatttcagaaacctcaacttatgataacatgatcgacggatcttgctggaccgtaacaacagtactgttattacaaggccaagtggcacagtttgatgagcttcgttaggtttgacgaaacatcaaaacttgtctgatgttcaacaacttatcatgcagtatacggtgctccataagtagacgatcattttccatcttcggtcgttgacaatggtatanaacgtaccgaagct

SEQ ID NO: 73052 - DNA, 684 bp, Arabidopsis thaliana landsberg
gaacaaaaattgtacaaatttctttaataaccattttttacaagtaataatagctgagattggacatctcacattacattactttgattatcccatagatgaatcatctgacaataatcataatcaaaacaacttacaagtagttttttttttcatttatacgatctaggttataaacttaaactaagttttgaggattgataatttgattataattttacgatttttgctttcaaagtatcttaaattaaatcctgttaaattaaaaatcaaatatttagtggtgtgctcctccaccttacaccatcatcaagtccttttttcagtgaaagatggttttgattaatgctaactgctaactgtctccccttacaccatcattcagttgtattcttgttacatgttaggtctaaaaatagtggaatgtggtattaaaaataaaaataatgagttaatcacaacaaaaccattattgggcatacgatatatattttctttgctcaaaaagaaaacgaaaattgaactatgcaattcaaaaatatatcaggttccttaccttttatttatcaaattcaacgtcacaattttactacatgacagcaattgtaacgaaaaaagttaaagttgaatcttggattgtgaaaacttctcgtatttggatgaaaataattatgagcaataatc

SEQ ID NO: 73053 - DNA, 519 bp, Arabidopsis thaliana landsberg
atttccgtttaccgatcgtccgattccgcctgaaaaccggagatctgtaacaaattttattctccagacgatgatgaatctagaagatgaagaaacacacatcttcgttatgaaccgtttcgaatcttcccttattttttcaaggggcaagatcgaaatatcttcttaacaggtcttagtttctcttcttagggtttagtgtttgtgtaggagtatttgtgtatagactttttactagttttcgtatcttttctctgtatcttcgggtttttaatttctgcttaatcgtcaggttctctgggtaaatcataggttggcttttgtcatttcgtctgtgtcttaagtggattagttggtcgtaagacaagttatagagatgtgtttactggtaaagatgaagcttaagttttgatgtaatcttcttcggtttttcaatactctgtatttctctatctttttagcttaccaaggttaagttttatttggggtttcttcttcgtttgggtatctttctgtttt

SEQ ID NO: 73054 - DNA, 248 bp, Arabidopsis thaliana landsberg
cgatagttgaatgtcgtttttgatctgaattttcaagtaacttaaagagtactgacctgtgctgatgacagttgacagccttcgaatcactgtgttatctccggttgatggtgttcacgtgaccctgaaagaacgcttatactgaacaccttttcatcttgtgggatatcaatgaaagttttgttcattttgacatggggcatctaccttgagcatggtgagctgtcgttgctagttatttcgctttt

SEQ ID NO: 73055 - DNA, 133 bp, Arabidopsis thaliana landsberg
cgggtggtttgaaacgtcgtttgcaatcctttctatcatttccgcctcactgctgctaacagagtcaaaggtaaatttaaaaaaaacagcgcccgctcctatcaaatagtcaaacggaaactagtttgtccac

SEQ ID NO: 73056 - DNA, 152 bp, Arabidopsis thaliana landsberg
ctaatgtatggctgaaaatctgcttttttgagatattcacaaggcaatcactcccggtgcgcatgttaagtttaaaacagatccggccacaaccaataaacctatattaactctaactcgtacattgaaacagatactccttctaactcatc

SEQ ID NO: 73057 - DNA, 526 bp, Arabidopsis thaliana landsberg
cggagattgaagctagatatcggttaggcgttgttaagcttttgaaaagagagagagacttgaggggcttgggctcaaagagttgtggtctgatcactggactttcagaacaagcaagagagttgtctttcatagtcccaaagcttagagcagttacataccaaagctcatcatagatatcacaagtcacaccctgcagagttaaacaacagagaattacatcagctactcaacattttcaacggcttccgaattcaataatcataatcttgataggcttaaaacattactaagatagttttttgttgttttttattgataatcaaagaatagtgatgagagaaaggacctggataggagtccagccacaagggtcaggataaagataagagccattccaagattcaccaacaaagccttgaatggtagagtatagagcagcttgctctgttttctccatgggacttccatcactttcctctgtttctgctttgctccaatccaccaccaaacaccacacgcatag

SEQ ID NO: 73058 - DNA, 632 bp, Arabidopsis thaliana landsberg
tttatatttttctcttttttataggttttaagacatgaaacactgcttctatgttttttttttggtaatcaacactgcttctatgtttggtgaagacatcttgcaaatgacattacataaatcatagaaattagtttcgatgttattctaattaaatcctaaaatatggacaaaaaagagtgattctattgttcaaaaagaaaaagaagagtgattctaaaattataagctaaatatcgattttagaatgtacaagttgttcctacaaattgctaaatattcttttaagagtgtcccattcatataaaatgtaagatttttgttaataaactaataaccagtggataagggattttgtcttttcgaacaaaaacgaatggtgagcactaagaaaagagcgaagtgactctatattcattccaccatattccccaagaatacaattggtcaagaacttcacaatcacaaattcacgatcgctatgtcatccttttaatattgctatcatccctctaatttactttccattttttaagatcatgaaatttaatttgaaatgtcacatatacatccgttgtaacttttttctagtcagaaaaaaaaaaaacgactcgtgtttacccatttggaac

SEQ ID NO: 73059 - DNA, 385 bp, Arabidopsis thaliana landsberg
tgatatagaaacttataaaagatacatgttcattagtatgataattagtctacacttttaaagacaatatttacttttaaaagtaagccataatgtggttaatcaaattgttttgtgggaaaaaaaatcaagtacaattatctgactagaaaataaatatgaaaatctagatctcgccagtcgtgttgtgtaaagtcaagtcgtgtaatttaaatgttggttcaattttaaatgtagctcccaaggggacgcagcatctacatctcgccagtcgtgttgtgtaaagtcaagacttaaacaaaaagattggcttatcttcacatatattatttatctaataattatttaaacaatctttctaaaaaaaaacgatatcacagctagg

SEQ ID NO: 73060 - DNA, 366 bp, Arabidopsis thaliana landsberg
ttggtgcaagcttccttcgtaccgtcattctctcgcactgcttgcctgtgttcttttacataacgcatgctatcctcatcattcaaatcactcttgtattctgtcatatgaatcatatccaatgtctattctggcgactagacattgtactaagtctcatgtgctgtcttactgagtgacctatcatgcgcttgcgtaactatgctgatgcgaaacagaaagacctccgcggcctcatcattaacctgcaacagggccgataaatcctttagggaagaacgaaatgtgcactgaatgttatcgggcatcattgcaccattcacatgcttccagcgccacaagagaaacagatgagacatgctcgga

SEQ ID NO: 73061 - DNA, 543 bp, Arabidopsis thaliana landsberg
gaccgttatagtccactacaagcattacagctattcgcatgagcggactcgtcgaaatcgtttacaaagttggtaacatcgaggtacgaagtaccctcaaatagcctgcacttcaattatgatactatcctcagcatagcgaaattacattcctgcactctctcaaagccttggaatctcaatttttttccactcctctaatgcatgagggagagttattactctctggtaactctccctggttggcaaaccgtgctttgaaagcacgcaacaactttgttggatgttttctgtgagcatagtcatgcttaacattactatcgagatgtattcttaagaatattatcgctgtctctttatctttgggaggcgatggatcttctgatttaaggattaagagaaaccttgcgactcaaaatagagtttgacattagtggtacatgctatgtactttgagcctgtaattttgagagccggaaaattaagcttctcaaggactgccatttgttatctaaacacattaagttaataaagaatattagt

SEQ ID NO: 73062 - DNA, 468 bp, Arabidopsis thaliana landsberg
gttggattttaggttacgaataatgtcaatatttatatgttactaattattaaacatgatcgaattatccttaaaataagtatatcgaagtcgctttcgttaagatatcacgatgatcagagagattgtatgagctggtgatacatataaaattagaaagaaaactcataccatctatctttgatcacttagatttaattattggttaataaaacgaaagatacttcgttgtttttataatttcattaacaagtttaagatacttcattgcttctaattatcttccatcttcttgctaattttctttcgaaccatattattatataaaagttagttttaaagttactaactaaaatgatcaatgtcatatttcttgatacagattttgacatatgcaaaaacatcgcaagaaaatgatacaatattgattaaagattttgtcacgactcatatgtaaacatattatat

SEQ ID NO: 73063 - DNA, 443 bp, Arabidopsis thaliana landsberg
  unsure (1)..(443): unsure at all n locations
nnnnnnnnnnnnnnnnnnnnnnnnnnnnnnnnnnnnnnnnnnnnnnnnnnnnnnnnnnnnnnnnnnnnnnnnnnnnnnnnnnnnnnnnnnnnnnnnnnnnnnnnnnnnnnnnnnnnnnnnnnnnnnnnnnnnnnnnnnnnnnnnnnnnnnnnnnnnnnnnnnnnnnnnnnnnnnnnnnnnnnnnnnnnnnnnnnnnnnnnnnnnnnnnnnnnnnnnnnnnnnnnnnnnnnnnnnnnnnnnnnnttttttttttttttccacccctaacaagacattgacaacgatctttttatggtgttccctctctccctttgattttttctttttgtcttctatctttttttctctctttttttgggttttttctgtcttctcttttttctctttctctttattctctactgtctttttctttccttactttaccttttttttttttcttt

SEQ ID NO: 73064 - DNA, 573 bp, Arabidopsis thaliana landsberg
atggcactattgccaccagtgacagatgaaaacgaaaaatattgggctttaagtttgcctttctcctttgtcattttttatggtacgcgggccatctatcattttctaacggataaacaaggctttttaagaggaagtatcgttcattctatgacggaaaaagagcgaattaggcatattcagactatttgctatacgttggcgctggataggttatatcaaaagaacctccccgttaagttggaaatattccaaaacctggcctcggatgcagataacctgcaaagagcctataaagttcagtttgattccagatttgttgatgtgcgctatactggtaatgaattgccagatctggatctgcaaatgatagaggttcatgataataatattacggatgaggggttgactttattgcaggaaaacttgcctttggatcatttgcgctttgaaggttttagtattgttcaggtaagcgatgtaactgcccgcaaggcaattgaaaatataaaaaatattatagtcaacttaaagcctggggccaatgtctatgatgagggtcgcgcgtgcatc

SEQ ID NO: 73065 - DNA, 511 bp, Arabidopsis thaliana landsberg
gccaacgttgacgctccggcttctgagcgcaatcttgtcatatacatgctcaacgacctcaatgaaaaatttgataacattaattatgctatcaaacacaaagatccgtttcccagttctgagactgcaaagtcaatgcttcaatcggaggaaacaaggttgaaaagcccaataaacatggctggtctaccgacctcagcgttttaagaattacccacaacgcgtaatggcctctttgtgcccccaaaaaaaaacggaaaaaaatctaaattacccaacagaggctctcgaacccacgttatggagaatagatgggctacatagcctacattcaaccactagactaagacaaaatacttgcaaagctgtgaaagagatcttatatatttacgcaaaaaccatgagttaagctttaaccgcagttagtgtttccgctagcaaagttaacagccgctaactcgggaatggtattttatcaaaccttattaaacgaaggctctaaaaggcaacc

SEQ ID NO: 73066 - DNA, 514 bp, Arabidopsis thaliana landsberg
gaatatctttatactgttttagaatatttaaaaatagggaaaatctttatttaatgatccaacttttgaaaatatatgatatttttatatatcaatttcacatgtgttaattttttaacatgaacaatatgttgattaactgtttgaaacatgagaatgtgttgattagactaaaaaaccaaacagtatcaagcgataacagatttttaacactcgttggcacctgttaacgacttcgttagtcagcccaaaacgacatcatttaagctttgatcgaattaaaattaggacttttcccaaattcaaaaaatcaatcccaaattttcctaattcatgcttttgacgaaaccctaattatctcccacaatcttgaattcgttttcacgaataccttcagttagaaagaaaacatcacatggaatattgaataccaatgcaagacaaattctagacattgcaaattgcaatggtgacacaattacccttgacatttaaaaaaaagttaaaaaaaatt

SEQ ID NO: 73067 - DNA, 584 bp, Arabidopsis thaliana landsberg
tgatgagaacctacctatgtattgtaagttaaaggtaagctgcatgcaagacaatagatttgttgatagatgacacttgtacttgggtaattaatttaggggaaactaaagtggtttgtattcgatatgtttgcacacgatgtaatgtttaggagaaattgaagcatctaaaagttaatggttttgtgattatgggaaaattaaagtatttaattattagtaattaattaatctgtttaataaaaatcagctttaactgtcaaaaacaaattgcaaaaaaacaaacagctttaaccgtgggttgacaattgcgaccaatacagatgaagtgaacattaattatccaaaatttctttattggattcttattttaaaatgataagattcctgagtttcttacacatagtttgatgtatgttacgttattcctaaaccttactccaaatctttaaatttttacataaaatcaaattttttttatgaatatgaaatttaaattttcaagttcaaagacatttttccatagataaaagtcaaacagtggagaatatcaacaatgaaaaatatctcatagaaaaataatt

SEQ ID NO: 73068 - DNA, 589 bp, Arabidopsis thaliana landsberg
  unsure (1)..(589): unsure at all n locations
ctcttccttgccggccgcgccgaaatgcaggtacagccccaatgccagcagcggcaccagcatcgccgccagcaacggcagggcctggcccagatgcccctggcgcggggcttcagcaccctcggtatccgccagcagctcacggccggcctcgtcacggcccttggccatctgcgcctcgtcgagcacgccggcggcctgctgggcagccaattcggcgatgcgctcctggtacagggccacgttcagggctgtacggtcttcttcctgctggcggccacggccacgcaggatcgggatcagcaggaagctgagggcagcgagcagcagcaggcccgcgctaagccagaattcaatcatgggtctgttctttttnnnnnnnnnnnnnnnnncgctcgcgttcttcggcggacaactcattggcgccctgcacggccgcactgcggcgccggcgcacgatcagcgccagcaccacgaaaccaccagccagcaaaatccccgggccgaaccacagcagccaggtacgcccgctgagcgccggcttgtagcgcacgaagtcaccatagcggtcgaccatgaagtcgacgat

SEQ ID NO: 73069 - DNA, 460 bp, Arabidopsis thaliana landsberg
aaaaaaaaaaatctgaacaagtaaaaggaatataatggtgattggtgcctctacttacttctctccgcgtaacgaaagagaggtcgcgtcctcgtgctctctctctctccttgaaattcttcttggcctcctttttcccacatgccacattggccttttgcgtatttgcatattgcatgcacaacaattattatcatcatcgtatggctacgtttatgcacagaaatcgaggaagtgtccataaatgataagtatttataatttaaaacccaaattttagggtccatataagaagctttgcatagagttttatatataagctaatcgaaatgtaatacataaatttaatgtgatataaaaaaaacagaggccgagaactgccgatagagaaaaaagttaagttgatcatgcttgtttaatattatatataaaaactgatcatattcttgttaaattaaca

SEQ ID NO: 73070 - DNA, 616 bp, Arabidopsis thaliana landsberg
catagctcctctactacctcagaggcagatcaaggcctttatcgcaattttacctggaactgggacaacactttgacctatgacaatcagttcggcaggcataaactcaatgtactggtaggaaccagtgctcaggaatttgccggctttactgtgagcggcagcaaacaggacctgtccatacccgactttgaccatgcattattgacaacggcaaggatggcacccaaaaagcctatggttccagaagcgaatatgcacttaactcctatatggcccgcgtaaattatagttttgcggacaaatacctgctctccgctattgtcagacgggacggttctaccaattttggagaaaacaaccgatggggcaccttcccctccttttctgccggctggattttaaccaacgaagcatttttaaaatccgcaaactggctgaactttttgaaacttcacgctggttggggaagaaatggcaatgaccagattagatcctttgcttatttagcgacagtatcttctaaaaatattggctattattttggtggtcaggatgctgcgtccatcagtgtgggtactgctcctacgaatgtggccaaccctgatttaaaatg

SEQ ID NO: 73071 - DNA, 489 bp, Arabidopsis thaliana landsberg
  unsure (1)..(489): unsure at all n locations
ccgcccagcttagagatgacgtagcaactgtaataatataagccaaacgatacgacggcgttttgctactgctctcattagtaatcagaaaaagttaaaaaccttgtcttttttttttttttttggttcaatagattgattagcgatggcgaagaggnnnnnnnnnnnnnnnnnnnnnnnnnnnnnnnnnnnggaacttactgagctcggggcgggtaaagaaggatggctcgtgaacaatccaaaccttttgcgtgcacttgattctcactctttagccctagccaatcgatttctcatattgattgtgaattggggtgaacctgatgcgcctcgtgtcaagatcagacctgatctgtctccgattgaggctgagtcgactacggcgatcgagtggttagtgtttgatgatgtcagagtcgtcgttgcggggacttcctgtggatatctcttggcttactctgctaccggagatctgatccataagca

SEQ ID NO: 73072 - DNA, 567 bp, Arabidopsis thaliana landsberg
atttcgacgcacgagcagtgcgacgcggcggcggcttccctgttggcgcagctcatcggcttctcgttgcagctctcgataaccgctggcgtcaatccggcacttgacgtgaacgatgttgtagcggttaggcgtcgcaggtccgggattgatgaccgctacgccgttgacgcgctgtcgatcccgctcaaggcggcaggtacgtcttctctgactctcaggaataagaggacggtatgacgactccagtagacccggcaagcatgggatcgtcggcagcccccgtacaggtccccgcagcttcgccaacggatgatgaaatccgagacctagcggcgcagttgatggctatggctacgcctgacttcactccctctgctctactaaagggagttgtggatagctctgactttaccgtgagtccgtctcttgccactatcacgctgatgggtagtaccactcagatagccggtgtgctcatcgcggacaacgtaacgtgcgtagctggcgatgtggtcaacgtgaccatgcagggcaacaagctacagatcaccgggcgcgtagccg

SEQ ID NO: 73073 - DNA, 397 bp, Arabidopsis thaliana landsberg
accgcgcggccggcgcggtcgtaggcggttcgcgtcacccggtcttttaccgacgcggagagatagctacttagattggggactgtgagggtggccgggtccacgccttccagcgtcgctcccggcgctgccagcggggtggcgtatgtggtcacctggactaccatgcccacgcccgcgaatgccgtcgcggagacctccatcttggcgttcacgcgcatgacctggcggccggcgtcatcgtagacgtaggtctgcacccggtccgcagcgctgggcaccaaggcagcctgcatatgagaaagcgtgcgctgtgcggcgcttgcggcttccgtgttggtatatgccacggactgaatgacattgcccttcttattcaagattttatgcgtaaccg

SEQ ID NO: 73074 - DNA, 458 bp, Arabidopsis thaliana landsberg
agtacttggaattggcaacttcttaaacatgctagtacccatctataacgattttcttcttgtttaagagtaagcttgttcagttgataatttctgtcaattttgctacagatgaaactgaaggttaccggtctgagcttacaaaaattctggctgaattagaaccttgggaaaaagaactaatcgcgcgcaggcgaaagcttgatgttgcatcatccgaacgggaactattgagcaagaaggttcatgtcatataattataaccatttgcttgtagtcaagaacttttgcttgtcaaaataacttgggtcgtgttcaaaagaatatctagagaggtgttttattatcttatcccactgcttctgtacagaattcgatgggcatagacaaatctttatgtgctctctggagctgccttcgtgctgaataatccagaatactgttggacgactaatttt

SEQ ID NO: 73075 - DNA, 580 bp, Arabidopsis thaliana landsberg
aagatttgaacagccaaacatctgtcttcattccaatgaagtgttttgttgttagactaactgattttaggcctataagcctttgcaatgtcatatgaaaaatcattgggaaattatcggcttccagactgaagaaggtgctccctcttattatatctgaatctcaagctgcctttgtgcaaggtagactcatcagtgataacattctggtggcctatgagatactccatgcgttgagctcaaataataagtgttcggaggaaatcattgttgtcaagactgacatatccaaggcctatgatagagcggaatggaactttctacatgacacattggaagcgttggggttcaacacaagatgggaaagcctgattatggagtgagtcaagacagcgcgttatcaggcactaattaatggctcttcatatggggacattaagccatcaagaggtctaatacaaggttaccccccctgccccttaattatttgtgacccgaccacaaatgctaattaagatgcttcaaactgctgagaaaaaaaacagataacaggactgaaagttgcaaatccgagctcccc

SEQ ID NO: 73076 - DNA, 399 bp, Arabidopsis thaliana landsberg
gggattaacatcaacaatcgccacaagaaactattcttcacagttttatctttcttctctggccttctcctcatcatcttcctcgattggctcatcctccaccccgagagacccgagttctccctcacagaagccgatatatacagtctcaacctcaccacctcctccactcatatcctcaactcttcagtccaactaactctcttctccaaaaaccctaacaaaaaagttgggatctactacgacaagctactcgtatatgcagcgcataggggacaacaaatcacatcagaggcctctctaccgccttcttatcaatcccatgaagaaatcaaactcttgacagcgcttcttcaaaggactgagctaccccgtgcccaggcctttggttatcaaatc

SEQ ID NO: 73077 - DNA, 462 bp, Arabidopsis thaliana landsberg
  unsure (1)..(462): unsure at all n locations
tagcacgagaaacactaacacctccattaaagtagacagctattgattttcactgagaaggtgggactgtttagaaactggctatcccaaagagcttctgttttgattttgcatctgtcaaagcaggactgcaaatcacaaaagttgcagttccaggaaagggggcggagaagagggtgggaacgaccaccctggactctcttggccttctcccacccatttccctgcaacgcaggcactgagctcagcattgtttcatctccttcccttcaaatcacattatactttggtccctgaatgtttctcaaactcccactcccatgtgctaaattaaaggtttggcccccagcctgcttcactacgggaaggaacgtgagataagaagcgacagaagaaggagatattgngaccctngggcttgcttctctttctctctttttgcttcctagctgctatgagaac

SEQ ID NO: 73078 - DNA, 581 bp, Arabidopsis thaliana landsberg
gttgatcagattgacgtagcttctcggttgttaagtttggtgttggattgtggttcggcacctaatgtggtgaccttttgcacgttgattaatgggttttgcaaaagaggtgaaatggatagagcattcgatctttttaaagttatggaacagagagggatagcgccagacttgatcgcttacagtactctgattgatggatacttcaaagcagggatgttaggaatgggtcataagcttttctcgcaggccttacataaaggtgtgaagttggacgtggttgtgttcagttcaacgattgatgtatatgtaaaatttggggattttgcaacagcttctgatgtgtacaagagaatgttgtgtcaagggatttcccctaatgtggttacttacaccattctcataaaaggcttgtgccaggatggtaggatttacgaagcttttggtatgtatggtcagatcttgaaacgtggtatggagccatctgttgtaacttatagcagtctcattgatggtttttgcaagtgtgggaacttgagatccgggtttgctttatatgaggatatgataaagatgggtta

SEQ ID NO: 73079 - DNA, 626 bp, Arabidopsis thaliana landsberg
  unsure (1)..(626): unsure at all n locations
tacaggcatacagatcgttgcggttatggacaatgaaaagccggtattcaccacgccatccgctattacagccactgccggtgcaggcacatgcggtgcggcgcttacactgccggaacctgtagtaacagacaactttggcctggcatcgctcaccaatgatgccccggaaatattcccggttggcactaccacaattacctggacagcgagcgactattacggcaatatagccaccgccacacaaaccgtaacggttaccgatactgaaaaaccggtgatcgttgtgcctgtgcccataattgcctgcaacaatggaagcggcaattatcagccggtaacagcaactgctgcagacaattgcggtatacaaagcatcagctatatnnnnnnnnnnnnnnnnnnnnnnnnnnnnnnnnnnnnnnnnnnnnnnnnnnnnnnnnnnnnnnnnnnnnnnnnnnnnnnnnnnnnnnnnnnnnnnnnnnnnnnnnnnacagttacaggaagcacaacagttnnnnnnnnnnnnnnnnnnnnnnnnnnnnnnnnnnnnnnnagtgatccgttctgcaatggtgttaccgtaacaaccaatacatcacccatcggtattacagttatgaatg

SEQ ID NO: 73080 - DNA, 510 bp, Arabidopsis thaliana landsberg
aaaaacacacagattgcgatgactgaattcgattgtgtcagtcaaggacagtaaaatagcgagtttttatttttagatgcgagcatttaattttatacggaataaaaaaagttatttggcacatcgattttgaggtaacaaatcatttaaacctcaaaatacagataaaaagcaaaaatagaaatagatgacaaaatcaaatgacactctagccattttggaggggaaaagaaaccccatcttaactgtcacaaaaacgtttatacacatctaaaggaaagttttgccttttaggacgtacacacaaagaaattaaaataaaaaacaacgctatagacttatttgatatctaataattctacatgcatgtagtttaaagcttaaacacacgtatacccatattgatatacatgcaccccatgtacataacatttacacaaggtttggtccttttacggccgtaggaaaacttggacaaattctatcacttcctaaatttttaagcccata

SEQ ID NO: 73081 - DNA, 292 bp, Arabidopsis thaliana landsberg
aaacaagagggatagaaaaggacaattttaggacgaaggctattgaaaccacagagcagggccagaaacaaataggggctagcatcatagaaatgaaaaaagccagggatcgagaatgggagagaagaagagcaggcgttggaagacaaaaaggagagaaacgcatttaagctaaggcaaagggtggaaagggagaagaatggcgagacgaaagggagagggtgcgggacccgaagcagggagaggggaaaaaagcaggaggggaggcaaccgaggaacaaaaaagacccct

SEQ ID NO: 73082 - DNA, 477 bp, Arabidopsis thaliana landsberg
  unsure (1)..(477): unsure at all n locations
cttaaactggctcaatgaaggatatttactggtgatatccagttcattgcggtttaacatgttttcnnnnnnnnnnnnnnnnnnnnnnnnnnnnnnnnnnnnnnnnnnnnnncctaagcgaaagtcaacccggatgatcttaccttgttcaatctgctcaacgctgtactccatcgtaaacggctcataagtagtgtctatgtggataaaccaataggtatcggcacgtttagggctgcggctcatgatagagtacatgatcttttcttctacctgacggctgttattggctttggttaagtaaatgagctgaccggcatatttagcgattgattcatcggcactgagcgcattcagcatagggacatagtctttaatatcgacaaaatgcagaaatcggttgtttattttgcgtgctttataccaaacatacatggtaaatataagcccaaccttaaacaccaggaagaacagacg

SEQ ID NO: 73083 - DNA, 587 bp, Arabidopsis thaliana landsberg
aagacctatgctgggaataaatggatttggttaatcaaacaattagttataaatttaggaaagaataaattgttctctattggccgtgttaattacttcaccaagaaataattagtttactaacagggaattacgagagaagcagaaaacacatgaggcacatggaattccgattttaaaacaaatatagtaattatattataagaattcggttacatgaaaattgaataatagtaatatggaatattgtaccgttaagaatggttaatgtttgtaactggtcaaagtaagaattcttaaattgagtggttagtcaaagtttatagtcaccatactactaacatgtcatcactcatttttttttttaataagcacttaaatagccaacaaatatatccataatactatattatacgtaaatagaaccaaaaggaaaaaattggcttttacgttagtttttcttacaccattttgtcgacgatccataaacaaaagctttacaacgcagaagacacgaatatgtggagtcgaactctaaaaaaaataaaatacataagtgaatattaaccacttgacttaaataattt

SEQ ID NO: 73084 - DNA, 500 bp, Arabidopsis thaliana landsberg
aacagcgttgctacctgacacctgaccgttccgaacgaaattatacaaatccgggccgtatcctgtttacaacgtggccaaggcgttcgactataaaggtaagattgtcgatgaaacgcacgttaaggtgatccgcaccgagggcgacgttgagacggtcttgacgctcaatactgattacacggtcacgggcgttgacaacgacaacggcggccaaatcctaaccaccgtcgcgccgaccgatgagcagtcgattacgaacgagcgaaccgtgccgttcacccaagagatcgaccttgaaaatcagggggcctattacgccgagacggtcgaagaaggcttcgaccttgcggtgatgcgcgatcaggcactgaaagacgacgcggaccgctcgctcaaaagcaacggaacatattatgatgcgggcgggcaacgcatcagaaacggtggcgaccccgttgatgaccaagactttgtaacgatgaaatgggcgaacgatg

SEQ ID NO: 73085 - DNA, 420 bp, Arabidopsis thaliana landsberg
  unsure (1)..(420): unsure at all n locations
tttgaacaatcggtgaatccgngattttacaacggaaaggttggagtctttattgtcaaataacgtactagaaagaaactcataaatatgtatgtagtaccttctgctagtagtatgtaatgtaagtaatatctttctctttaacttcttcaacgtggattttatatgatgattatatttaactaagaagaacgttgtacttgtatattatactcaattagtcacgtaaatcgaatcatggtttcattttgaaaatgaaataagtactgtatattatattcacgtagatcgaatcatgagttcattttgaaaatgaaataattgtttaccatgcataaaaaaagcaattggatataaaaatcagagaatcccgtgggtaagtgacgacaataattttgacaaataaataaacaagtgacg

SEQ ID NO: 73086 - DNA, 588 bp, Arabidopsis thaliana landsberg
  unsure (1)..(588): unsure at all n locations
cggtgctntgggcaaaagcacaaacaccgtcgatattgggataatcggccagccgttccggcgtgaaatattcagcgatcttgtgcgccactgtggccgagcagttcacggtcgacaggacgcccaaataattgcgtgtggccacctggccgttggcgcggacgatgcccatgaatgttgcacgttcggcttccggaatcatctccaccggtttgtagtcacgggcataagcgtaatcacggtcgaactcgcggaattccaggttgtgcgaatgcacgtaagtgccggcgggaatatcaaccgaagcaaaaccgatggtcaccgcatatttgagtatgggctcgcccttgctgatcgccctcgcggcaatcttgtggccggcgggaatctggcttttcgaagtcagtccgccttcgatcttcgcaccgatcgcgatgtcgctgcgcgcgatcagcacattgtcgttgtcatgcaatcggatcgcgagccccgatgcgggtttgtcctnnnnnnnnnnnnnnnnnnnnnnnnnnnnnnnnnnnnntgggtcgtgacggacgatattctaagccttttgacccggaaaat

SEQ ID NO: 73087 - DNA, 3233 bp, Arabidopsis thaliana landsberg
  unsure (1)..(3233): unsure at all n locations
tgaaaagtctcaggttcttgtgcggggtttgagatagaattgtgccaggagaacatgaaaagtcactcgggtaaaaactcggtatattgctgtaaatcaatctgtctgggattagagttgtatgtgcttcagattcttgattcagtgaatctcaaatgtgtagctgaaatggcaattacaatgtcgttctatgtgaatgtaatgtgcaatcctaatgagaagacgcaatcggtatatgaatttcacttggcaatccacttttggtccctcgacatatatctgatttttggaattggtcatgtgtcatgtgtcatgttgaggttagaatatagacctatcaaagattgtttatctaccaaatgtgataatgacatattttcagatagtagctagtcttcataattacagtctttgttattggtcttcgtctatctcaaaagtaggaaataaattaaggaatgtacgaagaaacttgttgtctcttttaaatagtgggacatacaagcgaattagcaaatttggattacatttagtatttctaaaaatagttgaaaagtatataaattatgatcaaagatttttttatttaatgaactttccgaaacttaaatctagtgattattaatcatgatattagtttggtgactgaattgaatgatgtattgaaattttgttatattgatcagattataaagagaactaatttaataatatccgttatatcattcattatattatcctcggtgaaactatcaaaaattaaaattattttggattttgggtatacaaaagcactattatctaacaataattattccaacaagttgtggtaatgacgaaaaaatcgaataaattaaagaaaagatagaaaaattctgtttaaattaaaaatttactttatttagaccaaaaaaaaaaacaaaggcacacaaatctagtctcaagtctttcttctttgttcaaaaacaaaccatcttcttcttctttgccttttgaacaaaacaagaaaaaacaaataaaacaaacaacaaccatcaatttctaatttgttccatttcacaaacgtcgaacaaatccagacccttcgtcaactctttctctcccacctcagatttttatttttctttccttcttactaattttgaattttaatttaatttttctcccccattttcttgtcggaaaacagcttttcgtgtattttacctccgacacaaacccactcgtaacggctttttctggtttcttgtcttatcataccagattacaaacttttatcttggtcttggtttgttgtctctgtctctgtttttttttttttttgagaattgagtggtcggagaaaaaaagggaaaattaggtggaaggcgctaacgtgcgctttgggtgcgtaagttaagttttgggtttcttttttttttcaaaatcgaggagcgcgtaaggcacacgcgtgattattatttttgatggttatggtgatgatgacgacgacgatggagagtgattggggaacatgggaggagcttcttctcggcggcgctgttctccgtcatggaaccggtgattggaccgtcgttgccgacgaactccgttctcattctcttcctgagatttttacacctgaggttttgtctcaatctcctcattttctttgactcggagaaattttcgattaaactaatgtcagaatcaaaattgaaatctgtttaggcaatttaagcaaaatttgttatgttaatgtgattaatttttaaaatttaaaaatagaagataaaaggctttaaggcagaacaacagtgttgttgtcggtagatttagaagcatagattcattatcacttgtgtgtcaagaaaggtttagggtaatgtcaaaaaaaaaaatactcttgttagacaattgtaaataactcttatgcttctgttgaactgtgaaacataaccacactgaattcgaagtttcctaaataggttttagttatgcaagaaattagaaaatgtcagtgtggttgtgatatttcaggctcaatgcagacattgtctctctttctgaatctgccaaattctattcttgtttgcagatatgcaaggccaagtacaaagacttgcgaaaacgttatgtgggatgcaagtaaagaattgttttctctttcttgttcttctacactttttcttgttggatactggacttttgtgacctaaaatttaccgtgtttcttcatattcttgtagagcttggtttgaagagcttaagaagaaacgagtagctgagcttaaggcagctttacttaaatccgaagactctattgggttagcatttgtttttttatatttctttctattggcttaaacgttttcatgtcttggaatcaaaggcaaaaccagattgtgaatgttcaattctgtgctatgaaatactgtttttaggtctttggaatcaaagcttcagagtctgaagtcagaaagtaatgatgaatgtcatcaaaacaattatgattctagccgaacgttatcactcgaaccctccccaaaatccgagggcgggggagaatgcacgagcaaagatacatccaaagacttgtcatcagttggtagtttcacacagcaagagctgaccacaacaaactggtcaccggaagctaagtcagaagctccagtggtactagagcaagagaagacgaaaaacctattacacaacgacattttcgagtcagtgtacggaggtggaggacaagtgcttccaagtatgaggaagaaacgaggcaagagaaaacgaattgattgcagtgttggtgtcggtaaagaagtgatggaagttagcgctgtggaagaaagcgatttgttggatacatctgcggatattgctagcatttctaggagtaaagaagttgcttctactagcagcagtcaaagccgaggtcacggtttggctttacccaaggagcttatgaagatatacaacactattgcacagaacgaatgtgcactcgtcttccgtagacggcttgatagccaggtgatgatcatatatagtaatcctttagtctttgcttgaaaccactttttcgcttatctctttctttctttttggtgctaaacagaaaaggggaagatacaagaaattagtacggaggcatatggatttagacactctacaatcaagaatcaacggttgttcgatatcttcngcaaagagcttttagggacttctttggtggcaacatgcactttttttct

SEQ ID NO: 73088 - DNA, 561 bp, Arabidopsis thaliana landsberg
agtcttggctgatcgaaatgacgaggcgcagattggcctcgaccatttcagtcttggcctgtcggtctctcgcgttcgcccttctggaccgtgccgacgatgcggcggaagtcatcgaccgccacgcccatatcggtggccagctgggtcacttcgttgcggatacggttgatcgcggcgccgtcattatcaatgaacttctgccagcgaatgcccatgtcgcgcaccttgtcgccccaggcgggatcgagttcgcgggtatagtaggaggtgaggaattccgtgcgcgaaatgccgtagctgtcggccagacgcagcagacgcccctcaagccccatcagcttcttgttgatgctgtaaagctgctcgaccagggcttcgatgcgctggttgttgagcttcagcgtcttgaggtgacgggtgatcgtcgccgtcacctcgtcataggccgcccggtccgccggatcgaggggcaggccctccagcttggcggtcagcatcttttcctgggtgtggcgatagttttcgacttcccggcgatggcgtcaagcgtcgccatga

SEQ ID NO: 73089 - DNA, 558 bp, Arabidopsis thaliana landsberg
agaataaaatatttataatttttttttaagagttaaaaataaataaaataattttttttagtaattcttttaaaactttataagaattttaaaaatattttaaaaagatttacaaaggttttactaatatttacaattttatttattaataagaaacgcatcgtattatccataatactataataggtacatatatccatatgccgctttatatggaaacaaacacaccatcacatgagatttgtaaacgcactagccaaaaacaccaaaacggtcatcattatgtccaaaagaccgttgactcttggttggtacttttggtttgtctttggaatcgctgaatgtgctatagcatatcgcggcctacctccaaaatgcaacgataatgggcatcttttgaacgtcaagatatatttctagtttataaaccttttttaggcgttcttgtatactatgcgtttttgaagtaagttcagtctgtatgaaccaatgacaaacattctttggatattaacaccacacaaattcttttttttttttcttaaatccataaggttc

SEQ ID NO: 73090 - DNA, 589 bp, Arabidopsis thaliana landsberg
acatatttcaaatatacatcaattgtctattctcaacttattatttatagtctctttgttttcttgacaaattattggtcatatttttctttcacatggttccgaaggttacgttttcatgtatatatacatttgtaaaaaagtatatatataacatttgtacaaaaagcataaaaaaaattaaaatgtttatcccgattgctttttgtttgtcacatcaatatttaatgctctaaatattttggttgagtcacgaaactgtaaattaaaatcgttgaagttgctcaattatatatacgtcaccgaagttgttgtatattaacattgcatgctaaaatatatttcagatgtttacgacatataatgcattttccgtaaaataaagcttaaaaataaattaaaatatggttttataagacactattttatctttcttttttttttttttttttttgttgccaaacccctattttatccttttatctttttaaaatttttatgatgtatctatgaaaatgatttgtgactaatgcaccgaggcttcatatgatttcattaatcacatcccatataaaatcacgggttatgt

SEQ ID NO: 73091 - DNA, 432 bp, Arabidopsis thaliana landsberg
  unsure (1)..(432): unsure at all n locations
agcatcaacgccgcgatggaaagcagggcggtgatgcagtaaggcacgcgctggttaatgcacagctcgcatggctcgagcttgaaagggtactgggcggtgagggcggcgaaaagcgcgccgacggaaagagcgaaaaccgcgccgcagacaaggacgacatctgacaaaagctttttcataccttctcaattggcacggcagccaattctttgcaagaggggcgttgcgagaggggggcttttgaaatgaacgggctggtgctataaatacccaattaaccaagggacacccatgccacgggaagatcgccgcattatgttcgatggcgctgaaacctattcagccatctacatgcnttgcacgcaaaaagacatgaagaagccgccgcagggcgcgattaccgccgtgagcgaagacagcgccgacagc

SEQ ID NO: 73092 - DNA, 530 bp, Arabidopsis thaliana landsberg
cttaatgttttatggtcaattcgtatttggcatgtctgcaagagctggtgaaaatctgggtcacggtgttttggctttttcttccaataaatcgattctccactcatttcaacatagaaatgacctcctcatattttagacaaagtaaaaaaaactattttttgtcaaaaaaaaagaaaagaaattatttgccaataaaaaatgaccaccaatgtatttataacttctggcacccaaaaagctgtcacgtattttgtattttactaagtaattatccaccataaatagtggctactataaccattcaactcttaacttttctagaccaaatttaaatcataccgtctcttacttgtatttccaaatatttcatcgtaaataccacaattaaacaagatgaaatttaggaatctaatttgatcaaaattactaaattagagtagagtttagtggaatagcatcactggcatcgctgacgcgtcccataactgagtgcagagaacatcatgtgaagtgcaagccacacaagg

SEQ ID NO: 73093 - DNA, 257 bp, Arabidopsis thaliana landsberg
aaaaaaaaacaacgcgccggagccaaaacaccaccgacctaccaaccaacccacttaaaaagggcaagaggggcaggagacagggggggagcaaaaaccaaaaaccccaacgaaagggaaaaccaaagggacgacgaaagggcaaggggaaaaccggaaaccaaacggccgaagagacgaggaatggggaaaacggcggggccgagaaaggaaacgagacgggcccaaacagcacaaacaaccacccaaaagggggg

SEQ ID NO: 73094 - DNA, 545 bp, Arabidopsis thaliana landsberg
gtcggtgcacaattgaggaacagcgaaatgtgaatttgggtttgtcaattgaatcagtgcttgtgacgaaatgtgaaaaagttttgagctttatgatcaaaacccagaaatcatttagtagctaaattttgctctgttttcttaactttatgtctttattgaagagatttttttgggtcaaagattggatttttaacggaaattcgcggtttcttttcctgtctttttctcgggaaaattctaaattctaatagaaaaagtggggtataagggatgtaggatccaacgtgttattctcggaatatctgtaatgattgcgtcactgatagattaaactaacgaatcatagagcctttaccaatcaaaattcgttgcatttttctgatattagatatatggatttgatgagaaatagtcaaatggatttgggcagcctttgattagtatggattaccactttctatagtttccattgacgatctactatgtagctggagtctttgcactatattataattgtactatgcatcattggataatcattc

SEQ ID NO: 73095 - DNA, 527 bp, Arabidopsis thaliana landsberg
  unsure (1)..(527): unsure at all n locations
ccgccctggtggcgccctgcgacgtatccgaagatgatccgtcaacgaatggtgagcttgccgacgaattgggcaagacgcgggagcaacgcgacacatgcgcggctcaggtgaggggattggccaaatggcgggatnnnnnnnnnnnnnnnnnnnnnnnnnnnnnntgccttccatttatccgccgctctcagaaatgggggcggctttttgcgtttggggggttaggcggtagccctgtagcgcgcaacggctgcatcgatttcggacgtcttacgactcgtttgatatagcgaatatggcgcatcaagatcgattgccgttcctgacgcaacgatggtaaacttgatttcaccagtcacaatgtctggttgttcctcgcacaaatccatccccatatcgtatgccctgagaagcagcgcctcgcgctttgctgacaaggcaagcagccaatcagccctgatgtcgatgagatctacttgtcgatcaaccgagccgtctgcaaatatagtgacggcatctgactg

SEQ ID NO: 73096 - DNA, 1827 bp, Arabidopsis thaliana landsberg
ttctttctctttttttctttttggttggttgaactctatttaatcttttactggccataggtaaagagtatggaattatcatcactccataaaaagacaaaaatttatatagaaaaaaaccaaatactaaaatcataatacattgactaataaataatcaaaaggataccatcaacaacacattgaaatctaatggctccaaatcttctgcaaagattctgttctgataaaaccaaatcagaacacacacaaaaaaaaaaaaaaaaaaaaaagattctgttctgatacgaccaacccattacttccacgtttctcaatgaaacaaccttcaacatcatcctttatatacattctcaatctcttccattatctcaggtaaaaacaaaacaaaacacaaaaatggcaatctcagaggcatcgaaatcgagccacgagctcccagtaacaacagccgaatccagcgggaagaaagcaaccgcaaagaaactgactttaatccctttggttttccttatttactttgaggtcgctggtggtccatttggtgaagaaccggcggttcaagcggctggaccgcttttagcgattctcggtttccttatcttccctttcatttggagtatccctgaagccctaatcactgcagagctctccactgcgtttccaggtatttctcaattcaaatccaaatcacacaaagatcgtaactttatatgtgtagacgacatcactaagaacaccactgcttatctattagagattttagtggaaggaagctactttctgatttgttacactttcttcaagaattagggttgtaatttggatcaaagcctgaaacttttctgatttgatttcaaaattcatgattttggtgtattaggcaacggagggtttgtgatatgggcgcatcgagcatttggctctttcgtgggctcaatgatgggttcgttgaagttccttagtggggtgattaacgttgcttcgtttcctgttctctgtgtcacttacttggataagctcttccctgttcttgaatccggatggcctcgaaatgtctgcatattcgcctcgacggtggtcttgtctttcttaaactatactggcttagccattgtaggttacgcagctgttgtgctcggtctggtgtctctctcgcctttccttgtcatgtcggctatggctatccctaagatcaaacctcaccgttggggtagtttaggaaccaagaaaaaggattggaatctctacttcaacacactcttctggaacttgaatttctgggacaatgtcagtactcttgcaggggaagtggacgagcctcaaaagacgttccctttggcgcttcttatcgctgtgatcttcacttgtgtagcttacttgattcctcttttcgctgtcacgggtgcggtctcggtagatcagagcagatgggaaaacgggtttcacgcagaagcagctgagatgattgcagggaaatggttgaaaatatggattgagattggtgctgtcttatcgagcattggacttttcgaagctcagttaagcagtagtgcttatcagctggaggggatggcggaattagggttcttgcctaaattctttggggtacggtcgaaatggttcaacactccttgggtcgggattctaatctcagctctcatgtcgctcgggttatcgtacatgaacttcacagacatcatatcctcggcgaatttcttgtacactctagggatgtttctagagtttgcatctttcatttggttaagaagaaaactacctcagctaaagagaccttaccgagttccgttgaaataccgggctggt

SEQ ID NO: 73097 - DNA, 270 bp, Arabidopsis thaliana landsberg
tatcgtactgtagaagagagtcgttttggatggaaaagagattgtgttgaagggataggcgatgattgctcttgtggggaatagtagacagtgtcaggagactaattgacatctattaaatcatgctgatgacactgctcatgcctaggagcgctgagatgaatcgttggctatgatgatcacgatgccgtttcttcgccttcgtgtccgttaaggttaggaagccccgtcagcgtcccctccccgtgatatagacatgccacaatgtcc

SEQ ID NO: 73098 - DNA, 583 bp, Arabidopsis thaliana landsberg
  unsure (1)..(583): unsure at all n locations
accctgtaagtcatgacatcagccaaaagcatcatgtgacggatgtctatactcataccatggtttcccataactgtccctatttcatcaataatcgttgtccttgcagcctcgattccaagtgttttgcttacttcgacaacattgttacttgtagtagttctcccattgattcccggtgtccccataactgccaggaggtttgtgctgaaacatatatcaagctaaatattcataatctaaaataagaatttcaaaccggacatgtatatgtttctagaaagcgttttgttttgtttaaaagtttggtttaagcacgtgaaatactgaattcatatcagtggcttaccagaaacagaaacaaagactgcttaatgaactaaatcaaggattcaccataacaaaccatgcccaacgaggacatggaattatcagcttagctagcacttataggaaggacaaaagaacagaggaaaatcaaatctcttgaagctcgagaaaacttacccctccacaaacagtttccactntgtcttcccatctatctgtttacttttatccatatcctctgcgacaacaactc

SEQ ID NO: 73099 - DNA, 503 bp, Arabidopsis thaliana landsberg
aaggtcgcgggttgctcatggcgtgctcgaggtggcctgcaatgcgacttcgtaggtttcgaggctcagcgacgtgagtgccgcgggcgggatgccctcgtcgcggataccggattcacctgtcccggccgcgaccgcttccatctgctcgcgggtctcccacagcgagatgaccatgagcttgccggtcccggggtcggtgaggacgtagtagccgctgaatccgggcagctggcgggcaccgggaagctgccggcgggcgaggcgcaggaagctgctgagttcctcggtccccgcttcggccgtgatcacgcgcgcgaacatcctgttcatctccttgctggctgacggcggggtccgcggcgaccgtcgctcggcagagccgcagtcatcgccggcccgggcctgggcggctaccgcaaggatcgtgtcggcgacgacgccgggacgctcccctgggatgttatggccggtgccgctgacgacaacgtggcgtccctgcg

SEQ ID NO: 73100 - DNA, 636 bp, Arabidopsis thaliana landsberg
tttgtattttagcaaaaattagtaaaatgggtaaattaaaatatagctttgtgtatattaaaacttgatatttaaatcaattcctttgattaagaattaagaaagtaaatagtacacggtagagatactttttagttttcaacaatatgtcgaccattcaagaaccttaggacacgtatatattagtacgatattatatttacataataaatagggcataaatcatcgctatcacttacgtcaattacttcaacagccatgttaaagtaacattttcatgttttatatcaattaaccataaatttatttatgtggtttatatgtgtgtgtatgtgtaaagttgaattttagtccaaatctactccaattaggaaaatgcatacgtaattgctgacaaagccaattgaaatcatgaatcatgaatcatggctgctgccgttgaatcaaatttttcctttttaatgtagcttaatcttagcttctcgaaaacgaacgttcgaaaatagttggttttgttgcattttttaacgcatgatataataattgactgcattaaatggatactgtacacaagcaaaattttacaagggcccgtaaagtacgtgttaaaatacttttgaagccgtaatccttttt

SEQ ID NO: 73101 - DNA, 647 bp, Arabidopsis thaliana landsberg
  unsure (1)..(647): unsure at all n locations
aatgacccggccagccttgtcacccgaaagccaataaaatcctgagacgtatgatttcttcctattcgatcgtattatctgagtgagctcagcacagagtacaacagatcttgagtgactatcgaaagcagctggccgtggcgaagacacngtatgcacatatggcgtcccctcacggcactattgtgcaagtcttcggcattatagtatgagctctgtgtacgagattgcgtcttgccgaccttctactgcaatgcattgacatgcactcttctcagttcacctatttacattgacatgaaatcgtccaagacagagtttgcacctcccagtgaccacgacnnacggtttctgaggtagaatctgtcggataggtcaatctgaactcacgttcagcccgctacccccaaagcacgactacaaacagcactccantgcgttgggaacgtggctggtgcactccatgttctagacgctttatcagcttgtcatcgagcttcaattcgacgtccgggtcacatctcagcctctgcacgacctctgccagcacgacatcccgcggtgagaggcttgccgatccaccaccacctgaattcaggccgcggatacccttaagtaatggctccatggatgatgcactaccacca

SEQ ID NO: 73102 - DNA, 651 bp, Arabidopsis thaliana landsberg
atggacaaacttgtccaaggcaagtcacggtacgaggagccgcagttgcggcgagggaggtattccgcatgagtacagcagtagacgacatcatcaatgcggccatcgccactctcggcgtcggcgagaccaacggcaacaacacgaattacattacgcagtggtatgggctcaacgacgcctggtgcgacatgacagtcacctactgggcgtaccactcgggcaacgcgggtccggtatgcttcaacaagtaccatgactacacggttgagcacgcccaggcgttccagtcgcggggccagtggcacaccgacacggcaggaattcagcgcggcgacatcgtctttttcgattgggatggttctaattccatctcagcgatagaccatgtgggcatagttgagagcgtgtcgggttccaacgtgaacacgatcgagggaaacatcgacaacgtctgcaagcggatggttcgccactccgacttcatcgttggctatggccgcccggcgtaccccgccgactcgacttccacccctgcgcctactcccataccgaccgccggtacgtacacggtagttgctcgcgacaccctgtccggcatcgcgcacaccctcggcgtcacgctggctgccctgctcgcagcgaacccgc

SEQ ID NO: 73103 - DNA, 457 bp, Arabidopsis thaliana landsberg
attaatcactttttggttatattgtaaaagataatttagataaagactgtatggatctcccattattaaaatgggaccaaacgtgactgcttacaatgatttataatgggggacatgaagatgcctcttcctccttgcgtaagtgcaaaagagaaagtaataattacttgcacaacaactatttaatcttatggatctagaaacatatattactccacttgattaaatcgaaatattgtcgaagccacaaaaatcttctcaaacatgtgccttaatgttagctataatctcagccttgagatggatacattaagccttttgtacattcaatcgcggttcttggtttcttggcattaataaggaggaaaaatctgttctctgtacattcgtttattgaaaaatagtaaacaataagaagttaagtgtaattggtggaatatgggtggaaaagactaac

SEQ ID NO: 73104 - DNA, 527 bp, Arabidopsis thaliana landsberg
cgatcctcgtggcggacttcgtcgccgggattcactttgtgacccagcgtggtaactacctttccgtttacggagatgaggcccatcgttatgagttcgtcggcttcgcggcgtgaacaaacgccgctgttggcgatgaatttattgagtcgcatagggccgccagtagatgttggcgcaggtaattcaggctcctggcgaatggattgtccgccgcgttttacaccgccgcgatcgaactttttgaagggccggttacccgcagcctggtgaccgtggtcagtaccgccaaacgatttttcgctgtcgtgtcgtggtgccgaacgatcatagttgccgcggctgaatttctttgacctgtcaccttctttgctgcgcgctccttttcgttcgcgaccaaatccttcccgatcgccaccactgttggggcgttcggttttgtcgaaatctgcacggctgtctgcacgaggcgaacgactgccgaaaccggatttccgcacttcactcccctcttcaccttcggcacg

SEQ ID NO: 73105 - DNA, 663 bp, Arabidopsis thaliana landsberg
ccgcatcatgctgcgcagcaactccacgctcggctccgggtcgtagtagaacagcgtgttccacgccgaatgcatgacgcgcagcttgtcgagctgccgcttttcgtcatccgacagatcgtcgtaggccgcgtaggtgttgcagaactcggtatcgccaccgccggtcgagggcagctgcttcatcgacagcagcgatgccaggatcggcacgtcgttcatggtgccgtcgatgtgccagtacagcgagcccttcagataatcggctcgggaattggccttggtgtcgagcgtgaccttgtagatgatctcgccggccatttccggggcgaaggtgcccagcgagttggtgaacgcgacctgctcgtcgtcgctgaaatcgatctgagggaacaccagtacgccgcgctgctcgagcagctcgcgcatcgtggcgctgtgctcgccgctcagcagcgtcttcttgttcgagcggatttcggtggcgatgcgcggggtgagatcccgggtcgtgaacgtcatgtaccgcttctccagtaccgccaccggcctgatgcgaaagggaacgacggccggccgtcgattccgcgatgtctttatttgagcttgcgcggcgcttcggtgccgagatacttcgtcagattgctgtgcaggctggcgatc

SEQ ID NO: 73106 - DNA, 540 bp, Arabidopsis thaliana landsberg
gaatatgctacattaggtcaactcacacgtagatactacataggatgtccaactaggtttggctttcgagaataacactagttggattttctaggttatggcactccaattcatacggaaagaggatggtatatcaccccaaaaattctttactaaaatataatatatccaaagcatacatatatatgatcaccagacaatatatatggagggtgaaaaagcacctatgacaataaaccccaagaccaaattattttatgaagagggacaaaaaacaagagctttgacttgacacgatttcaactgataagggtaaaggttagatgcccctacataagatacggggctgaggtagacacctatccttacaccagagcaacaaatagcacaagagtataaaatgttagaccaaaacacaaagcactttgtttgagccaagggcatgctataccaacatttaactcactatacaactttacagtcctccttgcgatatagcacataccttttttttaaacaaagatgaatcctagattatca

SEQ ID NO: 73107 - DNA, 2863 bp, Arabidopsis thaliana landsberg
ctgaaaagtaaaagagagtaccaagtcatgacatagagaaaaaataaggttggaaaaaaaaaaatttctgaagatatctagaaaactataattcaattgcaaacctcatcagtcactagatagtcaatataggttgctccagtggtacccgggaagcccatatatgaaacctggatcggagcaggctgcatggcaaatatttcatttctagccccctgcataggttaaaccaaacaatgttagcaaaaacatttccataggaatgggtacagctccagagtaaaaagtttctgaaatgttcagagcatgcatgccttggtataaccgtttagattgatgaggatctggattttgtcttggtttataattttggcgatagcatcagatgacatagcagaaacgtccaggaaatgctcggcttctgactggattcgctgtctccactcagtattatcatttgcactcagtgcatagcagaaaacctgggaaaaaatgtgatttactttgctgaaaagccaaaaacaggataggcagatacagaatgatataccatcaattactaaagttctatattccacacacaggacccgtacggttccatacattcctaccatcataagaactaaacccagcatgtacgaattttatagcctcactagaaaacactgggctgaagaactcaaactctcgatataaaatcagagcagacctaagaaatggatcaacaagtatccaagtgcaggatacaaacctcaacgttttctctgttgtgcatcccaaacactgatcccatgaggtgtgacaacggatggttaccaaaatcactgctcacatatccaatccttaatctcttaaatcctccctcacgttttacagggagcccagctggatgggtaaaaggaggtagtccaaaacgagaagcgattatggagcagtgtgcagcgtatttacgactgaaaaaataggggatttataagaaataggcatatacataaagataatataaacatgtattttcatgagtattgagtattaaaaaatcagcctcaaacctgatttcaagggcaagaatagggtcaataggatatgctattgcatggaagggctggacacttggaaggaccgacatctgaagataggatcaataggatatgctatcaccttaatctgtaatagtatataagtaccacaaattttgtgtggcgtaaatacttacatttatttgcctcctaataatgctttcaacttcagcgaacattttgctacggtcctcccaacagcatacacactggttcagcagcaggaaagaaaaaatggagacgaagggagaattaacaagtagagaagaaagaagctatcataacagacgtgtgacatcaaaccaggaaaaataaatacctgtaaggtgtgtagaaggttgcacgttgcttctgggaagtctggtcgtagaagcaaggcctgcttatagctcgtaatggcagcttctacatgcccactgcttatgcaagaaggtgcaacaaatacattaatagtagaacaaatatttttctggtcaaacatactaactcctcagttaaaaggtggtcatgaactcattgttatactgccacatcttaaatgttctaaatcccagaaaacaagagcctaacacgaaaccaccttaagaactgtacgtagagatataaaggcttctagtgaagtaggaaaattataagtaattttaagatatatgacaccataagctattcaagaaccatgaaatacacaaaattcttctcgagtcagatttttttgttcaaggtaaagatgttttggctctgttcttagctaagcggtatttgaacatgtgtctggtatacctaataaatgaaagataaagacaatggttacctatccttgtaagctgaggccaggtttgcgtgagcttcagccattgtaggccggaagtttatagcatgcatgtaatcctgaattgcttcagttaccctcccgatctctttgtaagtattccctctattaaccagagcgtcagctgccaatgggtcaatacgaagaacctcattatagcaggatatagcatccgagtaatttccctgtagtaaaggagaagaaaacaagctaaatttgtcaaacatgagcaagactacaaaaatgattaaaaattgataatggagcacgtagctacctgttgcttgtaaattatagcaaggttattgaacggagcagatagccctgtagttacagccagagtagccttgaataatgaggaagcaggacccatcatattcctgtttcaagttgtgaaatggatttgatggtcatttagtcttttctatctagcaaaaagaaagaaaggatcacataccactccatataaatgtttccaagattagccatggcttgtggatgatttggttgtaaagcaagacattgctgcagtataaccacaggtttgtgagtaatacgcaaattcactagtaagtctcagatggaaaacacacatacattataacaccgaactgcttcatcaactcgcccaatatccttcaatgcattacccttcaagttccaaatgcaaaaaatatcatatgttagatactgagaattatagttcagacacaaaacccacaaaatgtgtgttgttgatgctaaccaagttattgtaagcctccaaaaatcgtggatcccgggagagagcctgcttgtagtgtcgaattgctaaatctagttgaccttgctcatagtatatactggctatattccctgcatttagtagttatatgtcaattatgaaagacgtcacgcatttacttggcaagtatattttatttcaggtgagcattcagttgatcaaattacactc

SEQ ID NO: 73108 - DNA, 530 bp, Arabidopsis thaliana landsberg
ttatccagtgacgaccggcggctcaggccagcgcgagcgaatggaccgtgggagcttgcgtcagatatcccaatttggtggctggatgtcctcatattccaacaatggcgacattgttcgatgtgaaattgactggtctgactggcttccaatggcctacgccgtccttaaagccgaccgccacgcatattttatgtcaaatgggcgtgaacttttcaacgcattccctgccgcaattgacgcgggcttcaagttccatacacttctgccttgggacaagcggtctgcgatgccgaaccaatggtatcagaacgtctgcgaatatacccttttcatgaggaagggtaaagcgtttccaatttccgacgcttcttccaaatgcctattcagcatgttccagcgcgatcagtcggagcacccaaccgaaaagcccgttgagctggtttcgcagcacgtcagcaatagcacaaagcccggcgagatcgtgcttgaccctttcatgggtagcggcaccacaggcgtagctgcag

SEQ ID NO: 73109 - DNA, 4149 bp, Arabidopsis thaliana landsberg
ataaatttgatgttgtatccccaattcttacatatgcacttcttgcacatcccaggctcttgtgttttttttgccaatgggtctaactaaagacagagctaatgtggggttcactttaaccggcaagctcactaattggtggacgatccatgatatctgctgcagctgctgcactacgttgcaggactgggtcaatatcaggcaacttaggaatctgagctaagagatcaattgtgcgtcgtaacaggcgagcaagatcgccttcgtccattgcacattccatcatcatttctttccaacttaatccagaagcccaagcttcaaccataccagagaactgaacgtccagacaacatggaatcataacctcgtgcttctcttgaagctttataagagagcttctttggtcttctaagaaattgaccatgtctactactgtatcagatggctcgtaaatatagttgttgtctctccaaggtcgaacttttatgccttctgaaactaaacttgcacatacaccagctagttgaggaggcttgagatccaccagggctttgttccgcaacaccattgcaagccaaagctcgttttctcctcggattgcagcagctgtttctcccagaggaaatatcaagtgtgtgttaatgtccaatgctctgctttcgtgaatcacgttgcttatgcgcatgaaatctttccaaccagacggttcaatctgctctaaacggtttataaggcgtctcgatctcgccttgagccgtttcatcttctcaaccgtcaagttagcattctctagaattttcttatattctctgaacccttctgaccgggacatcttcttcttcaatcgcgaaattttgctcctttgttccttgtatttttgcgccgcgttatcatactcttcggacatatgtaacacctcatcttcgtcagaaaggctgcttaggacaggtacgtttaaactccaggaccatgtctctagagatccttccaatctccacaaacttccaagttcagattcagctagtttatcccactgcatatctgctttatccaggagattcttcatgatttctcgaggcaaagcatctccaagcgctagagcaatgttagggaaaccagttctgtagacagtcctaacccacttctcagtaaagagataccatgagttatcagagccaagggccacatagtaagacggtttaacattaggctttccaggttcatcagccgccagctcatcctcgattaagtttaacgcaaaagactcatccaaagacatcatcttctgaagtttggaaccctgaaatgaatcaatatgccccaagtaaacagcagggactgactgctccctcccttcagaatccttgaactccaaacaaataaatggtaagttcccctcttccatcccttttaagagcggttttagagctgagaacctttcgagttccattcttcttcgttgttcagcacgcttgcgtttctcttcccgtagctcttctttaagtacagtgatctccttgtaatccctcgctgaaagaagtttcctactcttcttatctattgcttcatcacttatttcagatgacagaatctcgatcttattgtcgatttcagcaagttcctgctttgcagcaaccgtcacattgctgctcacatagtttccaaaactcttctcaactaatttcttggcttcttccagacttctccctgcttgtaagactttcccggcctcagttccacttgatttacgagtaacttttgaaccagctaccagattcagcaccatgccatatgaagcagtaaattgtgagacgagaggtttaactccagcaaagacaagtttgcagcactcttcagcgccttcaaaagcagtctgaaccagcacagtgtagcccttttcatcgatgcctctgcgtccagcacgcccagccatctggtacaattcgttaggacccaactctattcgttcattaccagccttttttgaaagagacgagattacagccgttctagccggcatgtttattccagcagcaagtgtctcagtagcaaagacaaccttaacaagtcctcgctgaaaaagttcctcaatgaaagatttccaaagaggtagacaacctgcatgatgagcagcaattcccctaagcagtcctttctctgcactctctctcactgcatctggataaagaacgcgaaacttcttcaaggccaactcaacctcactcttctcgcaatcatctaaaagctgaaaattttcaacatactgtacagctgcatcacatcctctacggttaaaaatgaaccatatcgctggtaacatatttttcccctggagatgccataatgtgtcgctaatttgaggtacctagaagtcaaaactcagcagtcattaaattatcatgagaagttaaaaatcatattcaaaatatataagaaacgacaaatgcctagtttgttagggttgttagaaagcatattgtaagacctgtgatcgacgaatcttgtttatctcattctttgaaagaggataatcagcaataaggttgttgtagctggtatcacctcctcgtttctttgacctccttttcctatacccgtcatcatcatcacggaatctagcttctgaggcagacagttgcaaataattgagagtaagcttcctgctccaattaaaaagcatcctccaattattatcaaagagaaagattttacaataaatgttggtgataaaagcacagagttgaaccagttacctattcacgtttatccctttctcatcaagcagaggtaataaagaatgttttgttgaaaagtaccaagttaatggaactgggcgtcttgtcgatgttaccaactcagttttaccatgaatctgagaaaattgagatacttcatcagctaaacaatatttatgttgcttaacgatagaagataaatgagacgatgaacaaggcactacgtacattgttataactccttatgataggaacatgataatggaaagctattcctaaagggaaaatgtcaacaaactcacctcaccaatccaaccagctaattcatccggatttgcaactgtagctgataagcatataagttgaacctcctttgggcaataaatgacctgatcgtatttgaaacacagaaacttagaaaactcaacagataaagcctttggaggaaagaagagaaacagtggaaaaacacactcactatctcttcccacacagttcccctagatatatcacttaaatagtgaacctcatccaaaacaatggcatcaacatgaaaaagtccagttcctgaagaagccattccaacactaaaaaagatttcaacacaaaaattgaggttaaaaagaagctcctgagcaaaccatataaaatacacacagagagagctgcagttgcaaaatacctttgatacaacatgttacggagaatctctgtagtcataatcacaatctgagcatctttgttaatagcagagtcacctgtgagtagaccaacattatcatccccaaatgtctccctaaactcacgaaacttctgattagagagtgctttaagaggtgtagtgtagaacaaccggcgacctttagccaccgtggaaacagcagcagcttcagcaatcaaagtcttgccactactagtcggagcagaaaccacaacagaagaacctctaagaaaagcttcaatagccaatctctgaaacttgtcgattcgaaaatcgtatattgaaataagttcatcgatatcaatcatctcaacaccaaaatctctaacaagactacgaagcttctccactctctgccaccggaactccactcgttcccgagctgattccgtcggcaaatccacggagaattcggtttcttcatcgtcgtcgtcgtcgtcgctattccgaatctcatcggagatattgtcgtattcgtcagcagcttcgtcatcatcatcttcgtcttcttcttcttcgtcgtcgtcgtcttcttcctcgtagagctgagactgagacggtgaaagagaatttaaggtggatttgaaggagaggtggtttggattgaggataagggatttggtgaaggagaagtttggggaatgagagagagcccggtgcagagaaggaaaatggaagaatttaaggaag

SEQ ID NO: 73110 - DNA, 547 bp, Arabidopsis thaliana landsberg
gttatttatttgttttttactatatatgttaacgactttagcaactgtttagattttttttaacatttcccttattttagctcccaagtttctaaaactaaaacacatgaagaaaattgtatccaccctcctgggggcaatgctatgttttatcatagcagcctccgcacaggaacgtacagttagcggtaaagtaactgatgccaaaggtgcaccgattccgggtgttaccattaaagtaaaagcaagttccaaagttgcattaagcgatgagaatggcatgtacagaatcagcgctgcacctaatgcaacgctggtattttctgctgttggattttctacaaaggaatccaaagcatctgctacttcattgaacatgtcattggatgcttattcaagtccgcttgatgaagttgtagtaactgctgccggtaccaccatccgaaaaaaggagcagggttacaatttcaccactatcaaattgcaggaactcactgccgcaaacccaccaacattgccgccggtctttgcggccaggttcccggtt

SEQ ID NO: 73111 - DNA, 378 bp, Arabidopsis thaliana landsberg
  unsure (1)..(378): unsure at all n locations
gacaaaagaggaagacatnnnnnnnnnnnnnnnnnnnnnnnnnnnnnnnnnnnnnnnnnnnnnnnnnnnnnnnnnnnnnnnnnnnnnnnnnnnnnnnnnnnnnnnnnnnnnnnnnnnnnnnnnnnnnnnnnnnnnnnnnnnnnnnnnnnnnnnnnnnnnnnnnnnnnnnnnnnnnnnnnnnnnnnnnnnnnnnnnnnnnnnnnnnnnnnnnnnnnnnnnnnnnnnnnnnnntgtagcggctcgggacgagatcaacttctggccaaagaatacaaattattggtcgaaatatacgccgaatactatatcatacaatcatgatatgcttagcttcatattggtatacatagggaacctttgcctatagccttgagaatc

SEQ ID NO: 73112 - DNA, 451 bp, Arabidopsis thaliana landsberg
  unsure (1)..(451): unsure at all n locations
aatactctgccaagattcaacaaacatgaggttatttnnnnnnnnnnnnnnnnnnnnnngtacaggaagggctataccattacctagattatatccaaaaatattgacgtcatacccccaccaaccatgacgagaccatagcataaaccagatgggactcttttatatgaaccatgtgagtaaggacctgttataccannnnnnnnnnnnnnnnnnnnnnnaacacgtatttgaaaaaagccacactcttcactatcactgcattacaaaacctgactagctctcatgaacaattatcatgaccaatgaacagggctcgctgaacgatcatctcatagatgcaacattacgaattctatgaccagtacacatcctatgcactagcgatcgtgcaaacacgggatcaatctacaatgtttcattgttaacaacaaaccttgcaccttttcta

SEQ ID NO: 73113 - DNA, 147 bp, Arabidopsis thaliana landsberg
ttgaaaagataaacaatataccctaaacgacaaaagacatagaaatacgaaacgacataattattaattgtcaaagggaaaagagaaaaaaaatacgggtaacgtgaaaaagaaacaaggaaaccggaaaccgaaaaagaaatatag

SEQ ID NO: 73114 - DNA, 403 bp, Arabidopsis thaliana landsberg
ctgacttattgcagtttttttccttttcacacaacgtacacaaaggctcttttttgtggactgatgaatctactatacaacactgcttttcatattacatttagcgaacggagtgtctttacaacttcaatccagcctaggggcacaaaaatgagtgctggaaaaccctcaagatatggactaatacaacgtcatggagctttgtgcatctgacattcacattcacacgttggcttgtctcgactacagcatggtgaatatatttcatctagttgctgaaaccccaaaatgcgcttcccgttaccttgtttaatggaacacgcattcagtgcccactgctaaggatgaggcgacatcttattcttcaaggatgaggacacttgttcttttttgactactcaat

SEQ ID NO: 73115 - DNA, 139 bp, Arabidopsis thaliana landsberg
tcaacagggaaagacaattattcccaccccgttttattgaataaacagagggcggataaaccagggctattatgttcccaccaagtgcactaaaatggatagaacatgcaaataatctgtctagtgcctcatcaaatac

SEQ ID NO: 73116 - DNA, 452 bp, Arabidopsis thaliana landsberg
accgcgaggcccttgttcgaggtctggccctttgggttcgaccacaccattgccattcccgcatcgtagcccgccttctggagctcgggggccacgatgatcgactgcaggtagcactgccgctcgttcgtcgtcaccgcgttcgtgaactcaaacccgcggtcgaggctgaacttggtgatcgtcttcttgatgcgcttccacacctcggtgcccgcctctcgtgcatcgtccgcgcctcccttagctcggtgtcccgcggcccaggcgttccaggtcggcaggcccgccttcaccgaacggtcgtccatcgtccggaagaactcttccggatcttttcgccctgccacccggtagctgtcctttacgaagccgttgaaggtctccccgtgataggggaaggtggccgccgtatgcgcgggcgagagcaaaagcgggatcaggccaatcat

SEQ ID NO: 73117 - DNA, 506 bp, Arabidopsis thaliana landsberg
gtttaaagacagaccctgagatagcactaaaataatttaacgagtaaaactctataaaaatagaagaaaggccattcaaccaataggtgcgtattatatacaaagatgaccaagcccatcaaggcaataactattgtaagaattccaaaggatccccgggtatagacttccaaattattctgaatggtgttggattaggctgaagtatttgatgaagagtgtaaattacatctcatgacaaccatgagtatttattggaatcaatcacactttggtgggtttatagacaatacacttaattaataatgaaaaacagtacttaacaaaataaatacagcgtttgtctgtcgcgtactaaatgtcattttagttttgacgtacataatgctttggtattcaatttaagatttacgtatattatatataaaaaaaacgttcattcaaatgtattagaggttttgtttgatatatgtacgtaatgatctgtcatagtacttacaccacat

SEQ ID NO: 73118 - DNA, 606 bp, Arabidopsis thaliana landsberg
tcaaaatcccactcggactttgtgcagtaaagtgagttttagatacgagagttaggccaaatctagagggtcttggtcttgctcaaactagttgatgatattagtttagattttatgtttgacgataatatcattgattttctaaaaagacaatcatttaagccagtattttttgtataacaaatgaatgacgggaacctaatgcgagtttggtgttgaaatatctatcaccgggtttggatatgggttcacattttttgattcgttgatttaatagctataattaagtagaactatctcccacctttgcatgttaaggtaatatacacgaaaaagcagggtcgtttacatatattgtgtaaaaacacatagcatgcaatacatataatcaaatagtataagttagaatttactaaggtaaatgttatcgaaagttgtaaagcttaaaatcgcacttattcattctccaacttgggtttgttgactatttctttccaaataatcggagaaactctaaccacatgtttactttttaataattataaggacaaactgaaacaacaaataaagaaataggaagttaagtttattctaaatttctaatct

SEQ ID NO: 73119 - DNA, 539 bp, Arabidopsis thaliana landsberg
  unsure (1)..(539): unsure at all n locations
taccagaaattcatcactaagcagcacatcattgactattaattctaatcggataacatccgtacctcaggnnnnnnnnnnnnnnnnnnnnnnnnnnnnttgcggatccttcccagcttttcagtattccccaactgagccgctatatctggatggatacaagaaagattcgcacctgaatcaaaaaggctgtatatgatctgtttactttttaaaccaacataatgcaagggcaatttgataatcgacatactctgatttttaagcaaattaccaaagaaaaagcctgcaaaaagcaggctcgtataaatacggagtattaatacttaactgtacatttcagcccttaattcccttacacgggcatcttccatatactcatcaaaggtcatcagcctgtcgataattcccttgggcgtaagctctataatgcggttggccaccgtttgcataaaggtatggtcatgcgaggtgatcagcacaatacccgggaatgtctggcacccttcattgaagctctgtatactctccaggtcgag

SEQ ID NO: 73120 - DNA, 692 bp, Arabidopsis thaliana landsberg
gccttgccctgtcgtggaatgcaaaaatatattgtagatagcgtgtaccaggtaagaggcagtgatagcgacaatggtattaatccaaaataattttttagaataatatacattgattgcattgaagatttcaacttgtttgaacgttatttgtattaaacctcagtaaaaaaaaatcgaataattctccgaccttattacctatcccttctaatccacagaaacccggataatgtaatgaggttgaactactataggaaattttttactaaggttataaaataccttctatcgcctatccggtctttgtatattattcgataactttttttcttttgtttgattaagcgatccgataatatgtttgatgcgctgtcgttttctctttcaggattcttagaaaaaatgaagtctacaaataaatagaaccgattttgattttgacaaatcaaatagaaagtgagaattaatggatggcccgactaccttttcaaatttatccgtcagatatgatgctcttccgacatatttatcgaaaaaccaaatcaagcttttgaatattcatggcaactatttttcttaaaaaatttgttaacattgcttatgcacattgttattggttccaatgctttaaaggcagcctttcttcaggcgatgcaccgcaatgcatcgctgaaagcttaaaaaaaagc

SEQ ID NO: 73121 - DNA, 506 bp, Arabidopsis thaliana landsberg
taaggtgtggcgaagcccgccaagctggcaaggttttaactggagtacccaggccggtgcgcgtcggatcggtggatcctcgagagcgagtccgagtccgaatgttagcgtgccagtgagcccatgtataagccgcgggctcaagactggtgacgcggttgatgcagttgagaaatcacagctgcagccctcgctttggaatactctaaattgtccaggggtgcgtaatcctacgtctctcggggcagatcctcgctatggttgcactgtttgagattcgggtcctcggattcgcacccgaaatacggaactcagctgcgtgcttcgtcagccctgtacaggagggcaggccttgttgaaatgtatccgacactaaaggcggttgtgcagacgatggcaacggcggccatatagaaattcatgtatataacatcaagaaacccccatcatctgtctacacctttccagtcatcatcgcattgcttccaacacaaaactcgtcaaaa

SEQ ID NO: 73122 - DNA, 546 bp, Arabidopsis thaliana landsberg
ctcgaaaatgccttcaagtgagcaaatttcactcgatccgcctgacggcagcgccttcggagcaccaatctactaccgaatcaccactcgggctatcttctttttgccggcctggatcactgcgctctcgccgcgcgtgaaagtgcgatcctcggtgatctgttcgccattcacgtaaaccgcgccacgggcaaacacgtccttggccgccttgccgttctgtgccagcccggccagccgcagcaacggcaccacatgaatttcgttaccgtcctccagggccacttccacctccggcacattgtccggaatcgcgcccagcgccgtgagattgcccgccgaggacggcgccgtttgcgccgcctcttcaccatgaaagcgggtcaccatctccagcgcgaaggcttttttggcttcctgagggctgcccagccgctcggcctgcgcccggcgttccaccagttcttcattggagatgccgctcagcaattcgtaatagcgccaggtgagggcgtcgggaatggacagcagcttgcggtacatgtc

SEQ ID NO: 73123 - DNA, 533 bp, Arabidopsis thaliana landsberg
aatgaatcacggaggcaatgtaatgtatggcctcaaacgggaaatggtcaccaatctatttacttcaatcccgaaaatgacttccatctaaccactttccttccaacatcctctcatcatttatatttattatttcgattactttgtatcataacaataatttattacaaaaaaaacaatcatcaaatctctggattgattttgaaatcgagcccgtgtttgtagagtgtggaagaagatcagcagtgaattgatattaaaatgatttgcaggggggacaaatccatatcagtaatgacgatggtttagcctattaatgatttaaagtcttaaaatgctgagagctaataaaatagattaatagcttaaaaagcctcaatgattaacggtcaatgggatccacgttagggacaattctagaatttcaaatgatacgtaagtcacccgccactgtatacgttgcaaaaagcaagatcatactcatctacaccaactttatttaacttgtaccttgtaccttttacccctatctt

SEQ ID NO: 73124 - DNA, 323 bp, Arabidopsis thaliana landsberg
cggaaacactaatacatacagccacccatgagtgatgcagattactaactgtgctcgacccaagaagaggagtgggaggtcggggaaaccactggaaactgccttacttaaccgcccatgcatgctcctgtgagtacggaataaagaagactcagaagctggccagatagggtgtacaccacagaaggagctaagaacactatgcttcccggtagactgatggagtcgaataaagaccatgaaacgatggtgaagacactcgacctctgtggcagagactgtgaaccagtgggaatgatgccacggaaatgactacactcctc

SEQ ID NO: 73125 - DNA, 708 bp, Arabidopsis thaliana landsberg
ttccagaaaaatacaacaaacttttaggaaaatcattacaaaggtctaaacaccttccaaaatcatgttacacttaaaaaactggtatttttgtaagacacaaaaaatattcgtatgtctgtatacatttcatacatatttacttttgtgtaagatcatatagttcctagcttttcaatggtcaaattagtatgcaaaatccacattctttatgtctttgtctctctgtggtaatgtgcacgatcaaatctcgtttttcgtttggtaatatgtaattatgtaagtaacataatttactattttttgttcttttcatttcaaccatgattctcagatatttattttttgtgtttctgatatttatttaaagttttaaactatataggttgtcttattaacaacacattgaaaatgatatttcgggagccaattacgtccgagttccatcttgtggatgaggttttaacgatagaaacaaaattaaaatacttgtttaattagtattcgttatattatatctcttccaaaatgtatataaaaacgagagaagtgagtggaagaagaaaaaatacaaaaaaagtaagtaaaagagagtgatgtagcaaaaattgaaagcgtgatagaattggcaatgataaccaaaaaaattgaggtttccattgagattcacattgtggtgtacccacgtgctttgtgttccacttcttc

SEQ ID NO: 73126 - DNA, 393 bp, Arabidopsis thaliana landsberg
  unsure (1)..(393): unsure at all n locations
tacaccaacttctttttggattactatagagtgttttgtttttttaccacacagagaccagttgttgacattttgtattaatactaaaactgagtgcagaaagggcagaactacagtggtagatgacaaaaatcagaaagggactggtataatcttagtagggggcgctgcccttcgcgcgcttttttctattgctcacccaatactagagggctgggagaaactggttgccctctgagacaggcaaaatgactactttttagtagtacggacgaannnnnnnnnnnnnnnnnnnnnnnnnnnnnnnnnnnnnatgatcattgggggacgtgctgaataagaagaacaagcttatgagagtcagcctgaattggatcggtatggctgctatgt

SEQ ID NO: 73127 - DNA, 554 bp, Arabidopsis thaliana landsberg
ttggtttggtactgaagaaaccgacttgagtctgttttgtttttggtgaaagccatggaagctataagaaagcaagctgcgaagctcagagagcaagtcgcgaggcaacaacaggtgggttcctttctgcttcttttagatttctgtgttcttagatttatatgtctggtttctgagaagaatttgttgtatggatttctgataaaggtggaatctttgaagtggttgatggttaatatatagtcttgggggtagataggattgttgaggtatgaattggttatagttaggtgaaaagtatgggactttgcttgttttagacatagattttgccttttttgttttgattttaggtttagattaccttctaataatatcagacaagattgtgttatttgtgtaggtttctttatttgtattaaaaaaataatctggtttttgtgcaggcggttttgaagcatttagggcatgttaatgcggattgcttgttgtgtgatgaagaagagcttcattgtcatcagaaacttcaagatctttatagctctactaaagct

SEQ ID NO: 73128 - DNA, 388 bp, Arabidopsis thaliana landsberg
  unsure (1)..(388): unsure at all n locations
tatttacatctgatcaccaatatatttgatttatgactcctcaaatctttgtaattacagtgactaactacaaaagctgatgtctatagctttagggtacttctcatggaactagtaccagccatcaagctattatatgaagatgatcatcacattcccagttggttcacgaaagtattcatcgacaaagactcattcgaaaaagccattaacaaaaccatggaccttaactagaagaccgcatcatcattaatgattgactaaataaagatattatttaatctaaatgatatataatatattattataaaatattcattacagacatagtttttttaatatatctgatgacacattaatacanatgcttataccaacaaataaaaat

SEQ ID NO: 73129 - DNA, 573 bp, Arabidopsis thaliana landsberg
tcttaacataacaagctttggggaagtgtccccatgtgttttctttgttgaaccagcttgacacctaagtgggcccaatattaatttagaatttatggcttcacaactttgtgaacaatctaagaaaatgtacacaccacatcctatccaaaaaactcaaactcaaatgcgttgttattatcgggtttaaatatatgtattggcgttgttggtgaaacggcgttaaattatgcttggaatttgaaaatgttgttgcaatttttataagtgaagtttcgtaaattactaatttaaaaataagaaaaataaatggattggcacatatttttaaaaaactatttacaattttagatatataattttaacacatttttctagataatagttattaatttattatcgatccatgttgaactaaatctaacaatggtaacaaacataaaactatattaatcctcataattacacatactagagagggttgtcaacataaaactatatttagtaggcttggacgagacctacacattcattcctataatcattatattcatattctaaagaaagataaat

SEQ ID NO: 73130 - DNA, 446 bp, Arabidopsis thaliana landsberg
caccagacatgattacggggagaaacatttaattgcctctttttatattcaaaaaacccgccattctatattggtggggagataaacctctctcatgaatatgggggggaattatattgtcaatcagtcacttccaaacaggtcgcgtgtatagaccttgtcctttacgtccatcaatgatttgtcgagcctgttggccacgattacgtctgcctcacgcttgaacgcagccagatctcgcaccactcgcgaccggaagaattcatcttcctgcaagacaggctcgtagacgatcacctcgatgcccttggccttgatgcgcttcatgattccctggatactggaagcacggaaagtgtccgaaccggctttcatgatcaagcgatagatacccactaccttcggattcatgcgcacaatggaatcggcaacaaaatccttgcgcg

SEQ ID NO: 73131 - DNA, 343 bp, Arabidopsis thaliana landsberg
  unsure (1)..(343): unsure at all n locations
ctataacataataaatcatggagcaaacttcagttctataatgngacttgtataaagtatgggggtttttttgttgttgaacatttttatagtaaacaatttagaagttggcactttcgcatgnnnnnnnnnnnnnnnnnnnnnnnnnnnnnnnngaaaacacaattccaaaaactgtgtatacaattttttgccaagaattagaagggtattttaaaaattagatttttgcaaccgtttttattggatttttggttcgaggggtttttgggccccattttcaatggaatccccccaacccccacttggcctgggtttttctccttgggggaccccccccccc

SEQ ID NO: 73132 - DNA, 636 bp, Arabidopsis thaliana landsberg
acaatcatcattcttttggtaatatatccgaggaaatggtaaaattgtaacattttttccatataataaacagtgagtctatagggaagaaattcaaattttgtacctctgacctttccaaccttcagttgcgtatgcatcgataagattctgctgcatcttcatcttaatgagcaaataccttgtcctcctttgcaaccttaaagaatcatcaacctcaaccttattatccttttgctgtctcttacttttcctctttcttgttttcttaaccttctcctcctccatttcctcacaacggacccatccccgagaatacttcttggttcttgatttcgaacagagttcttcttccgcttttcgcttattctgcttagaatttctcttatttgatacttctttacctttcttcacaaatgatgagagtaaagtagacccaattctctcaactgaaacacaagccttatcagtttcttgactgattctcccctttgtttcactctcctccatatcgaattccccgatcaccgagacttatagtcctcttagcaaatcatttcatataagatcttaccctgaaatattcaagaaccctcccctaaatcagtttcctcacatttacacaaccaaaccaac

SEQ ID NO: 73133 - DNA, 511 bp, Arabidopsis thaliana landsberg
  unsure (1)..(511): unsure at all n locations
gatgccggtgtcgggcttggccggcttgccgcgcttttaggttctggcgcccttgagcgtgggagccgggtctgtgacggtcagtttgacgctggccggcacctgcaggccgaccggcgcatcgtcgatcagttgcacgtagtacgcgccgtcttcctcggcttcgacgacatagccggcattgtcgccgacctgttcgggcgagaggatgaactgggtgtagtcctcggcgtccatgaacnnnnnnnnnnnnnnnnnnnnnnnnnnnnnnnnnnnnnnnnnnnnnnnnnnnnnnnnnnnnnnnnnnnnnnnnnnnnnnnnnnnnnnnnnnnnnnnnttgcggttgccgggcaccgaatacagcgtgaagcggaacgtgacgttgccgccgcgcgcggtcggtgcgctgcgctcgatgtcgcggatctggtaggcggtgccgtcgtgctcgatgacgttgcctttcttggcgtcggaagctttcatggatgtggtttgtcgaagtgggtga

SEQ ID NO: 73134 - DNA, 261 bp, Arabidopsis thaliana landsberg
cgtagtggttggaagtactcttgggaacttcaggcatcttttatgccatttcctttgccttttcttcgggtgtgatggatagcgtgcttccgtgcgagccgcctttaaacgtcagatccttaccgaaaatgatctttcccgggttaagcttggctgccttgatggcgccgctgctaggtgggggtatgttggggtcgaggcccattactccataacccgcaggtatcggcggcaggttgttcactccatcataccaggtaa

SEQ ID NO: 73135 - DNA, 567 bp, Arabidopsis thaliana landsberg
gaagtggtggaactggaggttctcgaagctgtggctttagttttgctcgccggagaggaatggtttgcgccggagctcctggccatcgcgaaggatgcggctggtgccttccaggtgcgccggtaacgcgcccaggcgcagttccggcccgaagctgcaggcgcgcagtttggaatgggccaggtacaggtaattgcgccgttccatgacatggtcggaaaactcgttgcccagggcatagccgaggcggtacggcgtgccgtcttcaccgatcaggtacagcccgaccagctccggctcctcgccggcatcctcagcgaaagcgggtaacggcaggtcggcgccggggcgtacgacgatgccgccgtcgcccttgtagaaccactccggctgtgcgccctcctcgcctgcaagcggtcgaccgccctccaggccccactggaacatgcgcatgctgtcggtcacggcgccttcggcctgctgctggtgcatcttgtcacgcgtggcggcgctgcccaggtgagtcaggcctgtaccagtgaccaagcaatgcgcccgatcccgatg

SEQ ID NO: 73136 - DNA, 817 bp, Arabidopsis thaliana landsberg
aaaaaattttaaagatgggctataggaaaagcaacaatcatataataaaatgatataaaactttatctaaaacaaatctcacacatatataatagacaacacaaattttgcaaaaattatgaaatcatatagaagaaactaatctaacacaaattctaacaaatccagattcaaaatcggacatatactaatccatatcctattcaattctaacagatctagattccaattcaccatctatcaaaaacttagaaaattaaaagtggaagtgataatttacaccataaagggagattggagatgaaatagcctaagttagatgcgtatctgagatatgaggtgagttttccggctattacgatgggaagatgatatcgacggcaaatctgcgtatttttcatttttgggagagaaagccaagtgaagaagaagaataaaattttatttcttataatgtcataactgacggatatcccgttagttttctgtcagttcaaatttgtatattttttaaatggtcttgtgttaataattattaaaattactcatgttaggtgttcgattttgttaattggataataaattgtaaattttttaattagttgaatgaaaatatgtgggatttatacctaatggcaaattgatgtaaatattctagtaagtgaaggacaaataattaattgggctatgaaactttttcagggcaacacgtcagcatgacatttttttgtttataacacgtaggggaaagtttatttttaaaaggttttgggggtattggacataaaatttggcaactatgaccccatcttactat

SEQ ID NO: 73137 - DNA, 559 bp, Arabidopsis thaliana landsberg
  unsure (1)..(559): unsure at all n locations
agaaactaacaatttttcaacgacaggttaaacgatattgtctactcctcttgacttgttgactacggtctggctgcgctgacattttatcccaattgggcctttttagctcttttatagcccaccatccttttttttggacagcagcccaccagacatttttttttgtcgaacccgaaannnnnnnnnnnnnnnnnnnnnnnnnnnaacagtggagtgtaagcagagaaattacgccatagatcggagcgattttggagcatcgccgaagctaaagaggaattggaggtttctgtaaatcggaaaacacttgttgttctctctctcgattcatcccaaagcaagattcttggatctgcctcttaagatcgatcggtgcctttgtatcctcaggtatgtgttgatacttgatcggacctatctagagagattaataatcctcaattgcttccgttttttatcgtatcgaaatctgatttggtagatttggaattgggaatcgagtggtttaaaaatggaggaagataaagagaatgcaaagagagcagtgtctgtgact

SEQ ID NO: 73138 - DNA, 359 bp, Arabidopsis thaliana landsberg
ccgacgcctggatggccgggtcgggtcgggccggggcgttcctgttagcctggagagggtcggcaagttcgggccggtggccatggtggtcatccgctccagcccggtgagcagggccgtggccatgtggaaggcgtctgtgttcacggactccggatcgccctccatttggaagacgagcaggacgagcaccggccgtgagcccgaatggcgcatgcgcagcatccgttcgtcgccattgaccgagaaggtgttgcgcaagtgcagggggcgcgaatgcctgcgccagaaaacatactatgcgccgacgaaatcccggtagagctcgtcgagggtctctgagggccaggcctgtcaca

SEQ ID NO: 73139 - DNA, 238 bp, Arabidopsis thaliana landsberg
aatggtagaaatggctcctttgtctgaacatttattttagttcataataagaaagatgatgagaaagaataggaaaaaaaaggaaggtgcttttgagggatgtccattgacttattaagtaaaaaaaaaacaatatagagaagaaaatgtcatattattccttaagaaaaagaaagagagatgagaggaagagagaaacgtgcaagtttggggtttctccatttgcaaaagggtccct

SEQ ID NO: 73140 - DNA, 283 bp, Arabidopsis thaliana landsberg
ttaactagaatactatgtcaagattaacagttacaggtcaattagctatatacacgggctaggactctacccccaatgtcaactatatatcattttgacttgacgaacaaaccataggaattttactcctatacaagggttggataaaaagcgacatggggcgtccactaccggcaaggccacgggctttgcacccactatccagaggtccaaattcttacgccccagtgcacaaatgttacgaaattaacatcatattggctttgaacaccatctctatctc

SEQ ID NO: 73141 - DNA, 1684 bp, Arabidopsis thaliana landsberg
caatttatgtgtaatgatgggtttagggtttaaatcgatatgtaggaatcaacgaagacatgtactacttttcattatgtcgaatgtcaataaccagacaattattatttaatggtaaaatcataatcaaatatgtatatgtctcctatggagcctgaagagccaagctgttttgatacattaactggctgcacacatattaaataggtgattccttcacctaataaactctactaacattagcctgtttagactaattccaaagactaatcagtttgtttaaaattatgctcgtattatatagctacgatttatattataaacaagaagaatatatgcaactttcttgcaatataaattaatgttgtcatctttacactaaaatactaactatattccactaattaatacaaatccggttagctatgaacaaaatgatcaatatcttattgaattttaaaataaataaacgttgcttgtttgaactgttcattcaagtcgggcgctactcccttatttgcttaacccatattattatatcagcatgtaataatatattatagctagttgttaaaaaaaagaattatatatagttttgttttcttatactaaattctacacttttttttgtcaactagtctgattttttttaatgagacagctatgatatttggataaacatcagtatttttttttaggttctctgcatttatatgttttaaaaacaggttgatgagatagaaaaaaatgaaatattgattacagattagattagtaagattacttaattatttatttagaaatagccgttactacgtcaccagaatcgaagcagactccggagttctctaatactccatttggctacgccgcgagtagtaaacacgcgcaatatttatcctctttagacgctaaattccttcgcttggaagtatgccggcgtttagtgtttacattaggcgcgtgtatttacgcttgccgtcgaaacgaattttatgttatcgccgacgaatgcgcaggttagaagcagacatgcgcaagatagaaaatataaaattataaggaaaagaaattataaattggagagaatttagaagagaataaaaaaatggatctacctggttcgcacatcagcgtgctaggtagtggagacatgacaattgaattttttaaaaacgaataactaaatattcataatcaaattattatcttaaaaaaaatattaagattcgattggtatcagtggatcatacatattaagtcgctgctaatcaaatttccttttcactaatttatttcctgcttttttccttagcaccatcaaacaaaaagtttatgtgaaaaaacgtattttttcccacaaacagataattagtccggtgtgttttgtatatagaaagtggaagaaaaaaatagtatagaaaaatgtaataattggttttgactcactgtagctgagttatgcgtgaagacaaaaatcaccgagaaaccacagaaacaaatagaaaaaatagttaaatatataaaacaaatataaaataactgcgtcaaaggtctcatttaagttgtcgtgattcttcttccttcgtctacttgaagatgatgaaacctgagtttctgagacagaaggaagagcttttaacatcccttctgtttatggtcggattccaactccggacttctt

SEQ ID NO: 73142 - DNA, 237 bp, Arabidopsis thaliana landsberg
actgagcagtcattaaataaccatgcttacttaatcacctatacgattatatagtctgctttcatccctaaactccttatcatcatgattcttgattcgacacctcaaagtcctcaagtgcatgtcagcacgtataaagttataaatataaaaaaaaaaaaaaaaaaaaaggttataaatatcaagcataatttagcactgagattaaaagagcattcctaacaaaaccaagattat

SEQ ID NO: 73143 - DNA, 236 bp, Arabidopsis thaliana landsberg
aagatggagacatctggagtagagaagagagttgtagaagtaatacgtgtaagcatttaagaacatgcagtttaattcgtggaagtgtcttgaagatccacgtcaaatcagattccttataattgggattcactgcagtaatgcgcgtgttttatttcattggttctgtcaaaattaaaaatatgagatattaattatattttaaatttgtatgcctaatggataagaccaaaatt

SEQ ID NO: 73144 - DNA, 505 bp, Arabidopsis thaliana landsberg
atttaaacacgcaatcatcaccgccaatgtggtgaagagaagaaaaagccatccaattcttttttcacccgcgtgtttttcactgaagttgttttgcagtacgctgtattcaaatggagcgtctggcgccatttttttaaatatattttcaatgtccttgatttcatcatctacattccctttcacgcgtatcgccatctcccaattaggctcaaatccgggaatgatggcaagcggttgtatcggttctttcagtgactgaaaatgaaaatcttttataattccgatgacctttctttttcttccttccggacgatcgtaaatcgaaagcagggtgtgttcttcgtagttcttgagtccaagtttttttgcagcagtttcattgacgatgatggctgtagtatcatcctccggaaattcgaaaaatctgccggccgtcatttggtagcccatggttctgagatggtcacgatccatttcatataccgagaaagagaaatctttc

SEQ ID NO: 73145 - DNA, 239 bp, Arabidopsis thaliana landsberg
tgtccgactaacaacaatttttgcaaaaaaaaaaaaaaaaatttgctaagagcttaccaactttagtgagaagactgacaccaacattatgagcatgtactgagccagccattgtaacacatggaactcccatgtagagagactcacaggtagtggtagttccagcataagggaatgtgtccaaactgcaataaatgtaaattaaatatgtgaatctataagcctcggtgttttacaga

SEQ ID NO: 73146 - DNA, 480 bp, Arabidopsis thaliana landsberg
aacctgggcagcattttcagtagcaaaaaagtacttctggaaggagtgactttccagaactcccctgcctggtgcctgcatcccatgctcaccgaggatctcaccgggagaaatatctatgcaaaaaatccctggtatgctcagaatggtgatggcatcgatgtcgaatcctgcaaaaatgtgctgatcgaaggcagtacttttgatgtaggagacgacggcatctgcatgaaatccggccgggatgaagaaggcaggaaaaggaacgcgccaactgaaaatgtcaccatccgcaactgtgtggcctatcatgcgcatggcggctttgccatcggcagcgaaatgtccggcggagtacgtaacataaccgttaccgactgctcgatcatcggtaccgatgttggcctcagatttaaaaccaccagaagccgtggtggagtcggtgaaaatatttatatatctaatatcaatatgcgggac

SEQ ID NO: 73147 - DNA, 514 bp, Arabidopsis thaliana landsberg
  unsure (1)..(514): unsure at all n locations
aaagggaaccgtgttttcctggggatagagtcaacccaaaaaaggtggaaaccatggtcctttcttggggtttaataatggtttggaattttaacctgcttctgattggcagctttactatcaaatcgagcctgaagaagctcaatcaacgagaaacgaaagctgtgctggatctctttcatgaaatcatangaagagccattgttcaatcagttgaggtttagtcaatcacatgtttacctagtttttttaatagatcaaaattgtattcatgtatagtcacacatatatatacatattttggatataggacaaaggagcagcttggttatgttgtccagtggggcccttgcttaacgtatcgtgtgcacggtttctgtttctgtgttcaatcttctaagtacggtccaattcatttgctggggagagttgacaattttcttaaagatatcgaagggcttcttggaagtctgtaatcaaaaagaatatattggttttttttgttaaatcttta

SEQ ID NO: 73148 - DNA, 601 bp, Arabidopsis thaliana landsberg
  unsure (1)..(601): unsure at all n locations
tggagtaatacgccaacacagaccaatggatgaacagaagatttgttattttttcccaatataggtttgacccaaacatctatgtgactagtaatgtcaaataatttttatttcgcatggatagttgaacattgaatagtgtcactttccatatatatacataaatattcggaaagtacatttcgtaacattttatccaagaaattaaggatctcagttaaacaattgaaacaattacatgtttttggtaatatatatatccaaccaagtaccaaggtgaattttcatttacaagaagaaaattagaaaggtttcttccctaacagactttgaatttaaattcagcagctcttgcaaaaaaaagggttctgactggttatggaagttaaaattattagatgtttgtttcgaaaatatttttaaaattctatcagaagaaaatgaaatgggtgtgctgtgtgcatgaaggctatatattccacaagttgacactgaaaaaatatattnttctggttctggtggttttctttcaaggttacttttgttgatttggttaaattaacatgtcagtcatatctggagttgtctctataaattttct

SEQ ID NO: 73149 - DNA, 608 bp, Arabidopsis thaliana landsberg
caccgaacaggagattcgatgtggactgttttgaaaggtttgagtatacaacatatcgccttatatgaatttttatcctggaggtgtcgatatgctgatgaaagcggttggaagagacggtacgctcttattcaacaaataccatgcctgggtcaatgttgatatcttacttgagaaatgccttgttggagttttggatgataccaaagtgaagaagcaagaaccctaattgctattgctaaaagagttcactcttgtagagaattcatacataagtcaataagaattttttaatgtttacattctgattcttcaaatgtaaactctgattacaatatgtactgtattagaaatttataatttttggtgtcaatatattcaaagtttccatatcagtggcatcatgttctcttttcttttacaatatttcagaatggcaaattatagatgagcaaatagaatctacacaaatttcggaatggattatagggtaaaccagaacaaagttgatgtcttaaaaacaaattccattacaagttttgttttagccaaactatcaaaatcccccaattcagaaaggtgaggggcctaaaaaaggacccgaaggg

SEQ ID NO: 73150 - DNA, 607 bp, Arabidopsis thaliana landsberg
  unsure (1)..(607): unsure at all n locations
atatacgttgttaactcgaaatcacatgttaaattcatgtgttttttacagtcacttgaaaatacacattggcaatcacatatataatcctttctaagtgtcgtatcatacacagataaattcatacaaaacaaaaaaaatgaataagaatttgtattttgtataactaaatatataaggtttgatgttttacccatagttttttttttaaaaaaaagcttcttcttataatatatagtaaattaaattagtctttctccatcgctagtttccaaatttaagactcggtacttttctccgaaagagttggaacgtgaatgaactcacgaacgatgtggaagtcacgtgactctcgtcctaacatccaaaaatcaaaataaagaaaatcttaacgggtgaacggaacctactttaaaatgtatgcgttcaaagaacttctccaaaatgtaagggttgagtgtagtaattctaatagacggatcgtaaattgaacgaagataataatgtgacgataagaatgttgctccctcacatgtcttgttggccctcactgaccctncctaatgtgggcacacacctcaaaataaacttncatgaaactaacttt

SEQ ID NO: 73151 - DNA, 623 bp, Arabidopsis thaliana landsberg
taacaattacgtggcttatcctttaatgtcgcacccaaatttacatactttttataaaatatttcggaaatttttattttctaggagttaacgaaaaaagatggaggaaaaagagaaacatacacatagatttaaggccctttttacgtatgcgcgtcataaatgaaaaacactttgattagtataagaacatttaaattttaactactataaagaaaaaaaaagcacacgtaaaagcttttagccatgcatgcacgatgtttactggttatcgagaaagcattatcgttggtggataagacattaacttttctctcctatatgatcataaagcttggttttcttcttcataaatcttggcgcttaattcttatgcattatacaccaaaaattcaattttgtaggcagctttatgaaataatgctttacacacattgtgactcgattataagtattatatatattcactattagaaatggcccacgatatctgtattttaatatgagggcaaatatcttattttggctaatgaattcaaactaagtacagtatgtgaattttggtaatatatggataatagagtttagttcaaatataaaaatcaagtggatgacggcaaaaa

SEQ ID NO: 73152 - DNA, 656 bp, Arabidopsis thaliana landsberg
  unsure (1)..(656): unsure at all n locations
tcaaatacttnacatatggtctaattaataatatacatttcttctctctatacgtttctttgatttacaacactaacagatagtggtttaccctaatcttcgaactacaatttataacgtacgtaatttaattttgttgatttttcgtacagtaatttatttttgtctacaagcattgaataagacacttcaatgaaaaataacaatgcattttgtacccgcgtgcaatattattgtgaattattgtattgatctggaggagccaagttttgtttctgtacattattgaattttactaacgttacgggaacttgaaatttttggatttgttttcttccatctttttgtactacatactccattcgcaaacaaaaagaaaagagagagagattcacaatataaagggaaaaaagtaaatttggatttttcactgtttctgtctcaactttcaccatctcacttaccaaataagccccacattcccttctcttttcgtcattctaaattacccaatataccatttacacaagaaaacataaatttaacaaattcgacgtaatgacatatttagcatcttttcctatttttaacactactttttgtttattctttttcaataatggtcaaaaaattatatacaactagtaaccaccaat

SEQ ID NO: 73153 - DNA, 446 bp, Arabidopsis thaliana landsberg
ggaacgtcacagtgcggtggatgctgcacgtgccgctgttgcccggtcccaggccaacattctgctggtgatcgacgaactggcccgcgataccgcctacgcctggatcgaaacccggcgctacgaacagctgatggtgatcgctcgcgagcagatccgtggcgtcggcgagatcgccggcatggcccggcagcgcagcgacatgggcgccagcactcgcagcgacagggtccaggccgagtcccgcgtcgaagccgcacgcgccactctggaagagtaccaggcgcagtacgaacgctggcgctcgaccctggcggccctgcttgggcgggtcacccctccggccctggccgaggaagccccaccggagctgggcggcgcctgcaaacgtccggccgccggcgacgaccgcctgccggccgtgctcatggcccttgcccagcgcg

SEQ ID NO: 73154 - DNA, 736 bp, Arabidopsis thaliana landsberg
ctcttgtattaattttgatgcatttaatcagcttactaaataaccgtttcatcaaggtattccgactaatttaaacaaaacattcatttacccatataaaataaaattagagaaagtatataataatagtaattttgttggcgtcatgacgtgatttgaatgcctcaatttcagatacgatccgtgacaatggtaaaagcttctgacagaatgttttcatcattcactaaaaacgatgtcccatgcttccactgaaacacgtacgcacaatcatggtaacagaagtaagtaccttgatgattgatgatgatagcattttctcacaagccaatcctatttctttaatccaatttcgtcacctttattattaggaactacttttattgtctttcaccaaaagctaaatttctagctaaggtcaaaaaaccttttcacgaatatcaataaatttccaccatttcttaaaagctagattgaattaactatttcaatactctcacaaaagtgatttattgcttttttttttcctttcgtaatttttatgttgatagtaacattaatattcgatccaatccaatcaactaaataataaagatggatttgggttttgtccggatcactagttcaatgtctttttcactaatgaatttggtctttacaaatttacccaaaaagaaagaaatgtcgtgtcgtgggaatagatgttacaggtccgggggaaaaagctgcgtctttc

SEQ ID NO: 73155 - DNA, 556 bp, Arabidopsis thaliana landsberg
aaaattaaaactttggattaacttttaaaataacataataatgatgatctgctgctgtcacgctcattatcattatgctcgctttctctcaaaatttgcttttaatttttacataaaacagagctttctctgcttacttgctttctctagaagatgtctttttcaaaacatgaattatggtgtttaatccattcaaatattacatgattaaacaattagtcaatcttaacactaatgttagtgactaacctgtttcagataacgagaataactataaatgaaagagcatacaaatatatttgcaatagaaatggaagactatatatatttcagtattaaaaacacataatcctttgaatcgttttagaacagtacaaatttacttcaaattagctaactcattctttgaatcgctttagaacagaacaacattttgtaccatacaaatcactcaacctcctcatatataagaatctatcgataagatatttaggaagaaggattaaagctgcgaaatattgaataagtcaacgaatatggtccgagagctcgatga

SEQ ID NO: 73156 - DNA, 506 bp, Arabidopsis thaliana landsberg
attctttacaaactttgtaatttgttgtatagtttcattaatgttgttaattcatggcctgaaaataccatcgaggtatacaatctgataaggataaattgttttggattgaccatctattatttttaaaatatgatggtataactcggattggttagctttcagattatactatatattcaaaacatgctttagtacgtatattctatcattttatccgcttaaaatgtaattactaatttttctttcatatcatgattcaccgattacctaaagaaaaaggattcaagattaccagctatctgttgcaaagcttattaattataaattcttaaaatttcagattgaattcaaatgtggaccgagtggccaacgaatgaatctcacatcaccgcataaataactagacgtcgatcgtatatgatataatcaacattgctgcttcggtcctgacgcaatctgctgaatcagccccttcaacaaaaactacatcatggagctgacgt

SEQ ID NO: 73157 - DNA, 255 bp, Arabidopsis thaliana landsberg
cacccatagaatcaaaatagagctcccagattgtattttctcactaggaatgcacctggggaggtagcgcgtgtagagtcagattcagccgccagctccactcatgggggtgcccatccgatgacccctgtgcgtaacggactagagaccatgcgcccccaggcacccaaacgctacgatgcctcataaggagccggccgtgcactgtaaccgacactcggtaatcccagggcggcatccctgatggtggagact

SEQ ID NO: 73158 - DNA, 560 bp, Arabidopsis thaliana landsberg
  unsure (1)..(560): unsure at all n locations
ggtattgggctaattgctagtgagtctagttatactttttctttacttngagaacatgaaccttacgggccaggaaactactcataggcctagatcgctctctactctttttataaaatttcaaacgaatagtataagactataagttttgtgataattgcaaaaatatactcaatctacaattaatttttaaaaaaatgttaggggtaaaattattaaaaaatgagtaaacaagttcaacactgaataagtgttaaaaacattatttgcttcgataccataaagtttaaacccaaattcagaatataatcctaataaataaggtgtatgcataaaaagctagtggtggaaactcgagcaccagtctcgattgaaagttgagaagaattatcaactcatggagcatcacaaatagccaattggtcgtaacatagatagtggctacaagtaatatttaactactgaatcgaatctgtagtgatttgttcaaataattcgaaacctattgtaccatttatatacttttttgtaacatcagctaaagtaccaaaataaatgat

SEQ ID NO: 73159 - DNA, 105 bp, Arabidopsis thaliana landsberg
aaaagatgaagatataaagaatcaatcaaaaacaaagttagtatgtgatttaaaaaaaattattatgatacatatagcaaacattcgtcatatgcgacggatcat

SEQ ID NO: 73160 - DNA, 399 bp, Arabidopsis thaliana landsberg
gggcaatatgccggaaattctgcgaccaggtaatgcttttttttgttgtataataataagagatatacatggcagatcctgccattgacatgaaggcaggctgtaccacgacccacaaccggagtgccgaaccaaggatggtgaataaaccgtcggattataccgccttccatgcccggtgggctaaaatgtttcaccaattctactatgccggcgcttgcacaggctagaatgattatgacaagcgcactccttgcatgcaaggaaacatatatacgcacaatcgagatatgcaggttcatagttcatgatggctgctgaaatacataatttattgcggacaattcaataataatgctgacaccccctaactcgggattgtaccaagctgcgctctcc

SEQ ID NO: 73161 - DNA, 545 bp, Arabidopsis thaliana landsberg
  unsure (1)..(545): unsure at all n locations
ttgaagccggggactttttcgttctcgatggccttattctttacgtcgccgaggtcggcgagccgttaaaaaccactgctggggaagtggaccgccgcctgcgcctcatcttctccaacggcaccgaaagcaatctgctgctgcgctcgctccagcgtgcgttctacaacgaccccgccgcgcggcgcctggcctcgcccgagagcgggcaactctccttcggcggagagcttgaggccgacgatgtcgaaagcggcacgatctacgtcctgcgctccctctacgatcattcctatgtcgcacagcaccgtgacatcatccacaagatgggcgtgaccggcggcagggtggagacgcgcattgccaacgccgagcacgactgcacctacctgctggcgaacgtcgaagtggcggcgacgtacaagctcgcgggcatcaaccgcacccggatggagaaccattttccaggctgttcgcgcctnnnnnnnnnnnnnnnnnnnnnnnnnnnnnnnnnnnnnnnnccgtgcagcccgaggaatgatttc

SEQ ID NO: 73162 - DNA, 533 bp, Arabidopsis thaliana landsberg
  unsure (1)..(533): unsure at all n locations
aaggaatataaaccttggcggaattgtaatcagggtctttgttggaggcaatggcttttgttgatgggaggatgtcggtaagtgtgactgttgtcaaaacctgccaaggaaaaaatacaaacacgcttaacagaatctggttttagatgattaagtgtataatagatctctacaacaatgcttacactagaatcagtgtcgattttgacatcaaacaaagcattcttgtactnnnnnnnnnnnnnnnnnnnnnnnnnnnnnnnnnnnnnnnnnnnnnnnnnnnnnnnnnnnnnnnnnnnnnnnnnnnnnnnnnnnnnnnnnnnnnnnnnnnnnnnnnnnnnnnnnnnnnnnattaaccatggagttaggctgctagatcatttgcagacaatcattaggtttctaaatacaaaaagtgcatttagctaattgatactgtcacaaacaataacttaataattntactataagcagcgcacctaaagaagaaaaatgtacatgaatcatatagtggagttcttatggcatatttt

SEQ ID NO: 73163 - DNA, 532 bp, Arabidopsis thaliana landsberg
acttgcgaaggatttgtttgctgaataatatatgtaaatttcaacagaccctcaaactaaccaagggttggaaaattttctataacctatgaaacttgacataaaacatcaaacaaatataaaggcctcaatatagcgtaattataacaatatatatcacaataaaataatttaaaattcgccatttggttttaataaaaacaaacacatatatagtgtctactaataaaccaacaaaaacacatatagtttctttgtcgtttatttataaaaaacggtataaaattcacatttgtaaacaaaaaactattggattggtttttattcgtaagctagaaaaatattaaaacaatttgaaaaaattcgggtaaatgttaaaccttgtttggtaaacttattctaagatctggattttagtttttttgtttatactgtatgatttttttttctagattataagttggattattaaaatgttgatttttataacctttgtttaccaatttgacttacatttagagttttggtctat

SEQ ID NO: 73164 - DNA, 1728 bp, Arabidopsis thaliana landsberg
tcatctagttaatcgttattaagctatttgcctagttatctagacaaataattttaaaatcaaattagatgacaatatcttgggatccaaaatagatgattccatcgtgaacctgaatatcttctcatctttttatcaaagaaaacgtaaaccacacgatcatattaaactgtataattctgttaaaatttccttttcaacatttttttttaaacttcaattaagtcatatactctcacaaatgacctggtgtaaatcatctcaaagaaaaataaaatttgaatgtatgtttaaatatatattacataaacgtacgagctatgttgttgctagtgattagctatgttgttgcgtcaacataaatccatatagtggctggttaacaaaagaaacctcgttttcaaatttattatttagaatattctgttctgtggatggagtcaactttatagattcaaaaaatactaataattgtaatgtcttggtttccacgaagttactccatctactaaaaagtaataatctaaatcaacaagcaaatcatttttgtcttctcaaagaaacaatcaaacttcaggattttgtcttcattaaagaaataatcatatttgtctatataagtaaacaatcaaactcgagaataaggtagagacaaaataaagaagtaccatggaagagattcgccagagaagagtgttgatggtcccagcaccgttccaaggccatttaccttcgatgatgaatctagcgtcctacctttcttcccaaggcttttcaatcacaatcgttagaaacgaattcaatttcaaagatatctcccataatttccctggtataaaattcttcaccatcaaggacggcttgtcagaatctgacgtgaagtctctgggtctccttgaatttgtcctggagcttaactctgtctgtgaacccctattgaaagagtttctatccaaccatgatgatgttgttgactttatcatttatgatgaattcgtttacttccctcgatgtgttgcggaagatctgaatctgccaaagatggtctttagcccttcttccgccgctacctcgatcagccgttgtgtgcttatggagaaccaagcaaatgggttacttcctccacaaggtaccatgcttactttttttttactttggttttttcaactagcaaattttgatgtatttaatttattgtttaacttttataaactactatgctagtttattaatttacaataaggttttggttaaatatacaagttaaagaaatattattcttgtaaaaaaatgttttggatcaattttgtagcattggcaatagactctgtttttttcaacatttaaaacgttttactgtatgttggtgatttgggtctatttctatgacagacgcaagatctcaactagaagaaacggtgccagagtttcatccctttcgtttcaaagatctgccttttacagcttatggatctatggagagattaatgatactttacgagaatgtaagcaatagagcctcatcttctggcatcatacacaactcttcggattgcttagagaactcattcataacaactgcacaagagaattggggagttccggtatacccggttggtccactccatatgaccaattcagcaatgtcatgtccaagtttatttgaagaagaaagaaactgtcttgaatggcttgagaagcaagaaacaaactcggtgatctacataa

SEQ ID NO: 73165 - DNA, 430 bp, Arabidopsis thaliana landsberg
ggagcccaacagccatggagagagttcgagagaaacgcacaattctgctttacgatgctgactgtaacttaggggacgagggtggtccacgagttatctcagagcctcttccacatttataataaaaaaaaaaaatggagatgtcaaaaaaaaattaaaaaaatggaattaatgtgtttttggataattgacagggaaatgtatttgggaattagtgtaaaaggcaacgaaccactgggaatgggacatgggaaatgtgtaatgcattattttttttatgggattggatttcatattgggggagaaaataatgggaagagatatcctactaaaagagcgtgcctacgccacaaaaaaaaaaaaattgggtcgcgaaggggaaagtcttttgaagtcgaaaatttatggtaaaactcttttctttaatgag

SEQ ID NO: 73166 - DNA, 606 bp, Arabidopsis thaliana landsberg
  unsure (1)..(606): unsure at all n locations
gaccgaaacggtcgagcccggcaccgacatgccgctcgacttcaccgtgccgcgcggcggcaacaatattctgcaattcgaggtcgcgccgctcgagggcgagatcaccacggcgaacaaccgcgccgtccatgtcatcgagggcatccgcgagaacctgcgcgtgctgctcgtctcgggcgagccgcatgccggcgagcgggcctggcgcaacctcctgaagtcggacacggccatcgacctcgtccacttcaccatcctgcgtccgccggaaaagcaggacggcacgccgatcaacgagctctcgctcatcgccttcccgacgcgcgagctcttcgtcgacaagatcaacgaattcgatctcatcatcttcgaccgctaccagcaccgcggcgtgctgccgatcctctactacgacaacatnnnnnnnnnnnnnnnnnnnnnnngcgcgctgctgatcgcggcggggccggagcatgcgggcgccgattccattgccggaacgccgctctcggccgtgctgccggcaagccccaccggcacgatgaacgtccgccccttctatccgcgcctgtccgagcagggccgcaagcattccgtcacccg

SEQ ID NO: 73167 - DNA, 737 bp, Arabidopsis thaliana landsberg
agtgttaagataatgatcacatttgtgagatgttgtggaacattagttctccctatatataacggttggagtaacttccaaagtgaaatttgacgcggatcgtcgacaaccaaatgccacaatccggtgggtagaaatacccgatgaacaaatttacatattcaacaacataaattaaatgtgttttcttataaaacatgacaaatattaatttgataagtatttgtgtctttgacattacttttttaaaaaagagttattttacgcatattttgtaaatattcaatttattctaaaatactaatgattaacaaaggatagacaagattggttgaaaacgaatatcacatgaccaatttctggttctcatcaatatatttggtaataacatttgccaaatcaagtaaaagtgtaataaaaaaatcccaaagatagaagaaaatttgaccaattgaaaagttaagtattctcattaaagaatgtagattccctcccttatgctaattacggttgtcaacattgactaatgtagattaaaaaaaaaaaatccaacggtaactaataaaccgtacagaagaagcttcaccgttccaacggtaacttgaaacttttccttcggacagaataaaacaaaaatcatccattttggaagggtaaacatccatttttggaggggagaaaaacttttcttatttttaacgggggtgtttctaaattaaccagcactgagaaaaaag

SEQ ID NO: 73168 - DNA, 536 bp, Arabidopsis thaliana landsberg
ggatttccttttaaatgcaatcttccattgttcttttgtacagcacaatgaagctaaagaacaacatcgagggatttcggtgctttgtcctgtacagaaataaattgcatagactactaatcttctttttttctttggggaggaacaatggtctctccgttgagtttagtattgatctgccaaagctcgtttcttacattggctttgtaccacactcagtaagaaatcagtgaatacatgctcatactctggcattttcccgtaccctgcgcaagttcttttgttcttaaaccacatgtttgtgatagtctattgcaaaaaatgtgtggaaatcaaacttgcctgggaaatagttgatgtcgatcacataaaaccgatctcttgtcccgagctctctaattatgtctaaattgaacagccttagaccctgcaacaaattagagatcagtagagtttgatataatactcctgcttggaatatagttgagaggactgaaacatacccattcacgacggagttcctttgccagtctctc

SEQ ID NO: 73169 - DNA, 566 bp, Arabidopsis thaliana landsberg
aaagacgaagcattaaactctaccgtatctcccttaatcgctattggtggcttttccccgactacggtaacggcattgagtgtgtgctcgttcatgggaagataaatatttcccaggttaagcgtatctctcttcacaccgttcaatgcccgcctataacgccggtatccggtataaaagatcataaagttcaatgcttcatctgctggaatatcttttagtgtaaaagcacccttttcgtctgtaaaccctatggcaacgacaacactatctttgatttcccgcacatataccgtggcggaaaccaatggcgtgtggttggcagaatcaagtaccttgccccggatcatgtacggattttgagatttttttgcagcagccggtgcagcaccggattttgcaattaccggttgtgcagttgcacgctgtccgaatgctgccaggaaaataaatagaattaagaaggtaaaagaacagggaaaccctttcataagtaatttttagaattcaatatacgtatcggtcgtaataaaacgaaaaatataatttttcctttacaagttttt

SEQ ID NO: 73170 - DNA, 115 bp, Arabidopsis thaliana landsberg
agtttttgttaaattggttggtttgaactattaccctccaagatgaagataaggctcacttgagttgaatatgtgtatgactcataaccaacccaaaatttttttaaaggttttt

SEQ ID NO: 73171 - DNA, 518 bp, Arabidopsis thaliana landsberg
atgggcacgaaaagtattctataataataacaaaactatagctactaatcaatatttcatgatataagttattgtagtaggtgtttttcagtccccttgacaaaaaaaaaaagtaaatgtttttctgtcgtaggttattttagtaacaataatcaaatatatatagttgttatagttgtttttctctcccaaacgacgaaagtgaaaccaattacctttttcttttaataaataaaccaatcacaaattcaacaaactaaaacaaaatatactataagctttttgaaacctttgaaaagcaagataaacaagaagtatgtaatatattctccgaatattaaactttattcaatccatttcagccatccgctctatacataaagaaaatatccaaataatagttattatagcaaaaattcgattatgcaatgcctccaactctttaaaacaaccagtccttcatgcagtaaaaaaagaagacgaaattaggctttcaaaggatggtacacaatttcttt

SEQ ID NO: 73172 - DNA, 576 bp, Arabidopsis thaliana landsberg
cccgtctactgggtgacgtgggcaggggcggcggccttcgccgcccgccacggcgcgcggcttctctttaggcgggagataaccgtcgaaaccagccgggaaggactgacagtcaccaaccacgactaccaggcgggcgacacggtcccggtgacgcagccgggcctggggcccggcgagatccaccacctcgccgggaatcttcaggtctggtgcggcgacggcccggcccggtccccggcggctctggcgtcgcgctggctgcacggtgccgcgtggaataccccgggaacgcaggaggagatccgtcggcctcgcaaccgccaccttcagggcgcgtcccgcggcgtcggaatcaggctcgtccgcgaccgccccgcacaatcggagatgccagcggccgacgtcgcaggcgccgtaagcacctgtgtccggagcctcgctgtccgggaccgccctcttcgcgacctcgacgaggggctgtcccggcgatagaagggtacaggccgatcgacgacttttgccccttgatgagccgggaccggggaacccggccgtgactagacccgcgaaccg

SEQ ID NO: 73173 - DNA, 211 bp, Arabidopsis thaliana landsberg
  unsure (1)..(211): unsure at all n locations
ttttggaaaaaaaaacgacttgtgactaactatcttgcgagaagctcttatttgatttggttccttacatattgtcttattaaggcgtttgttagttaaaacgagaagggactatagcaaaaacttgaacttagtcacatgtttacattgtgaaagtgtcattgattcctgaatttttagaagatttttattgggggggtgtanccccccc

SEQ ID NO: 73174 - DNA, 669 bp, Arabidopsis thaliana landsberg
acaccgactcatcactccccgtaaagagacaactcgaatgcaaacaaagatagcacacaaatgtggtcatctatttgtacataagtccgttgcatatgcacatcttaatcttgatactatattcaattattaatgttaactcttttttttttttgtcggctgaagtaatgtttaactaagcctttcttggcggaggggaaacaaaaaaaaaagaaaaagttatttggaaacagagatatacaaattaaaagagttttctattaaaaagtcattgttttggttttttaagtttatgtaatgatctaaatcctttacgtcgaggaagagtttttagaagtttacaaaggattcttccaaaaaaaatatatatatttgtaaaaagtttagaattggttctttatattatatacaatttaacatttctttaacgttcaaaaatctttccgaaacctaaaatttgtggaatctttgtagttttggggtttgatcattttttttaaaacataattattttttagttcttgagcattctttgtatatatttctatatttattacagaaaactagtaaatgatgacgttagttcagaaagaagataaaaagtggcactatcctaacatgcatgttataaaacatgggtttgatcagaaacctaacaccaaatctttc

SEQ ID NO: 73175 - DNA, 1055 bp, Arabidopsis thaliana landsberg
tgtttgcatgcttatgtagccattttctttttgttgagaagaaagaaagttttgtgccagttatgtaatacctgtctatatatttgatccgcatcatttgatatttgattattctatcttactaacacaagcaatgtcatttctttctccttttgaaggtcagcaagccgttaaatcaagttctttcttcactagttgatcaagaagctggccagcagcttgacaaccacaatatgagctcagatgatcttcaacggacatacaccgtagaggaatttgaaatccaaattttggaaccagaaagatctggtggcccctgggaaactaaagccaaaatcccaatgcagacctcagaacatgcactgactgtgcgagttgtcacgcttctggtaagttagctactaacccgcctaatgtcatatttggatcagatctctctgttttaattgcaataaccaagccacattctcttactccctggggtgtttcagaatgcaagcacaggggagaatgaaacacttcttgctgttgggactgcgtatgtccaaggggaggatgttgctgcaaggggccgtgtgcttcttttctcttttggaaaaaatggcgacaattctcaaaacgtggtatgtttaattgggttctacaacctggggaatctttttctttcttttcattttcaccttggatgttcgatttattgtgaagccacttttctataggttactgaagtctactcaagggagctaaaaggtgctatatcagctgtagcctccattcagggtcatcttctaatatcatctggtcctaaaatcatcttgcacaaatggaatggcaccgaattaaatggtgttgccttctttgatgctccaccgctctatgtagtcagcatgaatgttgtacgttttacttccttggccagattgcctagtgctgtgttggttttatgagctaactttactaaactgacctgtcttggctctgaggacagttttcttttacgtgatctggctttgtaaattcttctttacttgcaggttaagagtttcatccttctt

SEQ ID NO: 73176 - DNA, 657 bp, Arabidopsis thaliana landsberg
cgtgcccgatcgcggcacattgaaatgatccagtcttgggcgttcaggatgtcaactccccgcgacttccgcacatatgaccccttggccgtttcgctgccttcgccgagcacgtaaccgcctcgttcgccgccattgcaacggatatccaatactcccttgacaaggctagcttgagacgcttgtatccactgcggccaccggaagtagtagtgaagaccaccggaacccgtggcaacgcaatatgtggattcgatctcatgccagtccccaccgtaacggtgacagacttcattgaatacggagtctccatcaaccatcgggccatacgcatcgtgcaggtatgccaacttggttttggatagggcgtattcacgcttggggatgtcgcagtccacaaccaggagaccagaaggtttgcaagcgactccgatgtttgcgtgcggccattgcgtccagagcttgacgacggtagccagatcgtttgtcgcaaattcgctccaacggatcgtgtacggaggggtcgtggtgtgcggcgttttctcgccgtcctcaactgggaagatatgcaagcccttttgaatggcgcgcaccgcatcacccatcataatgactcgacgctccattcaacaccgaacgagttttgcactcttgcct

SEQ ID NO: 73177 - DNA, 1370 bp, Arabidopsis thaliana landsberg
tctaagttgttctggggggtttgatcagaagtcggctgcagagatctgggaaggacttcactatcatgaaagtgttaccttcaggagtctatgagtacaggttcattgtggatggacagtggaggcatgcccctgagctccctttagctagagatgatgctgggaacactttcaacattttggatcttcaggtaactccattctctttcgaattggttagttggttggtggagaaatgaaacggttaatgagagactactggaactgctaaatcagggttatagggaatgggaaagacatctatgttgattagcaagttaaaaaaccaggctttgtagttcctttttcgattttgccgtgtgaaaacagcagagatactttgatgttatgcaggactatgttcctgaagacattcaaagcatatctgggtttgagcctccgcaatctccagagaatagttacagctacttgcttctcggagctgagaactactctaaagaaccgcctgtggttcccccgcacctacaaatgacactgctgaacttgccggcagccaatcctgacattccatctccgctgccgagacctcagcatgtcattctcaatcatctttacatgcagaagggcaaaagtggtccttctgtggttgcgcttggttccactcaccgatttctagcaaagtatgtaactgtggtgctctacaaatccctgcagaggtgagtgaagatgatgcaattccaatgggtagttagcatgtggatcctcggcatgctcttatctattttggtgttaaaacgttaactcatggagtatgggtgaggctatatagaaaggagacacacgaagagagttatttccaggcaaagtattccctcgatacagcgaattttgttgtctttaaaagttgtcaataaggtttaccaacagaatgaagatgcagtattcagtcagtgtctgtgtaatcttttgatttgaagacttcatcatctgttttttttttagcatagaagaatgcaggaacgacttcacttgtaaaaccggcaaatcttttttatggttttgttttggggctttcaagttttcacaaaaagttgtcacctgccagtcttttaaattattgtttgctttcaaatttagcaaagtcatgtgtgattgtgacagatgatcatatgcttctgcaacttgtgtaacaaagcatctgcagatcaactatatatcggtgaaaaagcaaaagatgacagatgtctcaatagctcattatcattctcaaatgaatctaaggtagagtttattgcattctgatggccactatctaacagtagaaggctgtacagaaagaagcaatagaaagggcaaaacatgtgaatttt

SEQ ID NO: 73178 - DNA, 595 bp, Arabidopsis thaliana landsberg
gtaaagaacaagtgcatgcatgaatgcttcaagtctttttcctcgaaactgtttcgtagaaaaacaatgtaaaatacttttaaggtcgcttagtaattactgaactcaagacatacaaacgcagagactgtaatctgtcactggatctagacatttcttgggcattgacctaagccagaagatgatataacatcgcaaaaagcaagtcaaacttgcttgttctcaatcaaaacatctctcagtaagttatggtccaacctttttcattcactatcttcatcaacaagacatgaccaaatcatccaactaaaagtcaacaaagaggaaggaagcaaacaagacaactttcatcttaatcacagtagaccaagcataagcaattactattagccaacttaaggcaagaaacaagccacgcaagtgatagaaagaaactgcaacaaacttagtacagtgttaaagcctagttaatgatagaattaaaattgtattaatggattagtaatttagtagtcccttcacaaacagtacacactattgagaccctcttgacaaagacaacaagtaatattaagattggaagtaaggatatgag

SEQ ID NO: 73179 - DNA, 401 bp, Arabidopsis thaliana landsberg
tagccgcacgcgggtaattatggcccggtcacggtgtcgatgggcgtatgcatggcgttccactccgaggattccagcgagctctagttcaagaccgacatagtcctctatggggccacgcatgcagggcagaactgcagcgaattctactaagcacgcatgacacaagacttaccgacagctgactgattctacagagtgctaacgcgttaccataatgtgacgctgattaccacatggccttcttcgcacgccccgcccattggcgggcgaatgtctcgtggtcgaaatatttcgacctcacctttagcatcatgccgggcgttcgtaggctggccggatactatgaagaactatcgggtgccacagctgcgaacgcatgagggcccgaccacactgga

SEQ ID NO: 73180 - DNA, 445 bp, Arabidopsis thaliana landsberg
  unsure (1)..(445): unsure at all n locations
atagcgcgttcctgttaaaggcgctaccggtttcgttaagcatttgaaaccctattaatgcgcccgtgaagcgtgtatctgaaacgcggctggattgttcatcgcgccgcgtgacgattcagtcgacgcgctcgacggcgatggccgtggcttctccgccaccgatgcacagggcggccacgccgcgcttgagaccgcgcaccttgagggcattgagcagggtcaccaccaggcgtgcaccgcttgcgccgatcggatgccccagggcgcacgcgccgccgttgacgttgaccttgtcatgcgagataccgagctcgcggatcggcgccatcgccaccacggcaaacgcctcgttgatctcgaacaggtccacgtnctccaccttccagccggccttgtccagcaccttctggatcggcgccaccggtgcggtggtgaaccattc

SEQ ID NO: 73181 - DNA, 611 bp, Arabidopsis thaliana landsberg
gcaaacctactaaaaaatcgtaaaataattgtctttaaaaagctctggaataattaaaaaggtaactataaattttgttctatcttcttgattttatatctcaatttcgcaattcttttaatattaatggatatatcatctaaatacaatatttggcttatcaaaaggttaagacggcaacaaaatatttaataaatcattttacaaaatcaatcgcgaagaatctgcccttgaagtgtcttctgagatcgacacagttgtgctagatactgtattgaaattgtctgtttcaacaaatttatactcaaaccataattctaaccaatcgacatctgaaggagacagaacccatttcaaccctacagattgtgatttaaaattttccttttgtataaaatcgtgcacatgagctctttcatctgccaacaacttctttgttttgaactctttcaaaatttggaccaagtgaacaatcattattcccaaaaccaatgccaaaattcttcgagtgttgtacaaatttgcatgtgtataaatagtactcgatattatagcaccaataatagtcaatacctgcacaatagtagctccatatgaccaccaagactttt

SEQ ID NO: 73182 - DNA, 497 bp, Arabidopsis thaliana landsberg
gacttccagcggctggaatgttttttcgtccccgtgtgctcccttcagggatagctggaccatctgtgtgtggccgggggaacccgcaatgcgaatgctacccttgcttccgtggatttcccaccaaaggccctgtgcgtcgcgtgaagcgccaccacggtagtgaatggagacaggaacgccgctggcgaacacgccgctgaccagcacctggtcaggagccgtcatcggcagaacctcgccgctagcggcagcacgcacggccggctgccgtgttgccaatacggccgagacttgcgcgatatcgccgaaaacgctccgcaacgccgccaatgtgtgccccacaggaatcgtcaacatcgttgcgccattggtgcggtcaagcagatagccgtaagtcctcttgtctggaatggtgctgccgcccaaggccgcgccgccccggccgaccagagtggtcgataaaacctcgccgatgaacccgtccgcgatcagct

SEQ ID NO: 73183 - DNA, 543 bp, Arabidopsis thaliana landsberg
  unsure (1)..(543): unsure at all n locations
aagacagactgcgcagtattcatgaaggattcatcgcattttataaagaaaggttacccggtagattccgttactccgcaggcagctatctatcttaccattaaaatagacctggcaggcaggaccactgcagaaggtaaaaagctggaaacgcagcaggaggttacttcttatattctcggcgaagccaagctggccgtggtgccattctctgcattcggcgccggcagcaacagctcctggtatcgtcttagtgtaggcacctgcaaaaaagaagatattcctgatnnnnnnnnnnnnnnnnnnnnnnnnnnnngtaacctggttccttaatttttgctgcagacaaatacaaaccctttctggtttttctcctggaggatggcctgtatgagatggggcttatgtatgatcttgtggcggtgtatgtgtatgagttcgttggcaatgcagaaagtacgccagttctctacatgatacagcacttcattcagcatgtccagctgcctgtcgaatgcaacagggtcaacatgtgctgatgag

SEQ ID NO: 73184 - DNA, 552 bp, Arabidopsis thaliana landsberg
atagggattctgtaaagaaaataacacgtatgttactttttttttttggttttgtcattggtctcaaccatgtatctttcgacacatattcacctcttaactctaaaataacatcttagctaagattcactgcttaacattttaatctgttttgatttaatttttaaatcttataacataagatattatgctaagatataccgttggagaggctcttagaaactagaggtaaatgttttgtttcaaaagtatatatgaataaatcatataaaaaactgaatagaatatacacacataggacaactctagcatgacggcggacttattaaaacactataactattaacttatttcaaatattatagggtgatcatattttagaactaattaacttacaaattatatccatatttattatatgaactacaaaatttatacctattaacaccttcttactttcaaaacaattaatgtaaattggtacattttcaaataaatatttaatttgtatttacatcaaacaaacaactgagtgtactaattttattatcg

SEQ ID NO: 73185 - DNA, 390 bp, Arabidopsis thaliana landsberg
tgaaatccatggcaatatcacagtactgcttactatttttcttcgtttttcataaaactaagatatggtgtccacattttttttaaagatctattatgatatgtttcccctaaaaaacatttctaaatccgccactaagtatttgatcgcatgatcatgcacaacaagataatatgaaaattgaatcaacaagataagtaagtcacaagtcattatcacatctgtataacaaattcaaagtttcttattattatgagatcaaactttaaaggatagtgtttctttttttttatgaaacaacgaatagatacaaggcttacaagttcaaaccattataagtagaatggaccaacacgtcaagtctagaattctgaacaccactttattatc

SEQ ID NO: 73186 - DNA, 758 bp, Arabidopsis thaliana landsberg
aaaaaacattacctattaactcattagtttaagaatgtctaaatcaccaaaccttcttgttaaaaccttcataaatctatccaaaaagaaaagaaatagagactatttttttaaaaaacattatcagaagcttgctcgttaaacccaaaaaaaacaaactaaatacaactttagacttaaacacttatttataataaaataccaaaaactagatgtatgtgactatgtgtggattgtgatcattataaatttataacatatgcagttgagaaaataactcatacaaaatcaaaacaataatgttttggaaattgcatcacacgcgttaaatatacccccaaattccaatattgccaagatagtacggagcggccaggttttagtcgcaagaaagttatttatctcgtgtgattatataatcatagaggacaattctgtaaatccgtacttattcaccactttgagaatcaagagtggccggcgcatttataaaagcacaataaattctcttgaactcggaatctcgggtggaagccaaactctataagctaggataaaggcgcattcatagaaataactacgatgcaacgcaaggcaaactctacaagctagaaatcaaaacaaaattattggcataataaattatataacattcctttcgctttcattgaaacgctatttcaatattcttacttaagttaataaaactaaagtaaaattttactatatcttaaatgactgaaatcttaggatataaa

SEQ ID NO: 73187 - DNA, 570 bp, Arabidopsis thaliana landsberg
gaatctttatattctacgtatttaaaaagaattttatttttttgccgtctgatcagatcagtgcaggtgcgtgttgtttcctaccggtcaggcagaacaaagaaaaatgatatgtgagtaacccaaagtcttaactttcgtagttgggtacttgggttctatgtgaaacttggtccactcatattttttcttccgtttaataagtacgtcgtatgtatgatatgagtatatgacccatttatagtttctttagatataggcccatatgtgagtacctcgaggactataactaaggtttaatcgttgatataagataatatataaaaaaattacttcttctcattcaaaagggattcctaatcaaaacttagtaactcatgcatttgaattttaataatggtcaatataaaagaaaatttgatctaaaagaatttgtggcgtattgaaaaaaaaaaaaaaaaaaagaacaactattacaaaggttttttgtcacgtcattatgaaaaagtatagacttcaatttaaaactatttggccataaactgaaaagtgcatatccatcatatacta

SEQ ID NO: 73188 - DNA, 571 bp, Arabidopsis thaliana landsberg
ataagcctccatccgtacatgttaccaattcaatgacataaatcaagttgaaatgcctattacatcttattgttaataatgttgttattttaatcaaagtaaagtacatctccagttattcaaagctgagtggaaaattcctaccagattctgacaaatcattagctgtttgagcttgaattggtttgaaaggtatcctcttggggctactaattcagtcatcatgtctatatatttaaacataatctatagtaaactttggaatcgtaaggtaaaatattaaatatgttagtggaatatatatagtattataaaactctatcaatcatgaagtaaaatttgctacgttatcatcgctttttcaaataaaggatgataaaattgaaacttcaatgagccagccaactagaagtaaaataggaaattttacagatgattataatttccatcggcaaatagaaacaggacatataatttaactatgacaaagcgttcttgaaaaaatcactgaaatcatcaacttcgaaaagggtagtataccgctacacagtttagcgggatcaagtcacat

SEQ ID NO: 73189 - DNA, 614 bp, Arabidopsis thaliana landsberg
cgatgctagcttttaccttaacataaagtttatcattatccttcgtcattcgggtgctgtacacctgaggagggacctctgtcagtgaaatatcaaaagaactcaacttttctcgaaatcagtaagctaatgactcatacattactactgcaaatagacataatacttctgagtacatatgaatccgattatgaatcagaggttaggatcataaaaatcaaaactttaccggaatgatgaaggatattgaatcgaatgaactccaaacaatcatcaatctttctagtctcaaacttagcgaaacaaagccttcctttcacaacagagcaaccattacgagactcttcgctataatctccatttgcagagaaatacacaagcttgatcagagtccctacgaaaccagaaaaaaaaaaccccaattccggttaattcgagacaaacccagaaccgaaaaattctaaaactgaatgaaacaaagccaagtttggattttaaattacctccgatgtcgagagccaaatgagagatttgagtccgatccatggcgggttttttgttggggttttgcaaaatctctttttcaacgttaatagaaataattcacgatcact

SEQ ID NO: 73190 - DNA, 123 bp, Arabidopsis thaliana landsberg
ccgggaaaccgcaaacaacaccagggggggggatattgggagcccgatcgagactaccaccccgataatcgtacagatcaaagggctcatccgtgcgacaaacaaaaactccgggccgggcca

SEQ ID NO: 73191 - DNA, 456 bp, Arabidopsis thaliana landsberg
ctagagtatacttgtgaacagtccccagggggagagcagactgcggagctatagatacagaacttttagtgtgcaagagcagcagctgctgccaagtgttcagacgatcattttgacagaaagctgagtgtctcctcgctctgctattcaaggacagctcttgagattttcgggagattgagagcctgacacagcctgagcttatggcaaagctacatgtccggctaggattcgcattgaatccagacacagaaagaggaggtacatactcattagagagatcacacatattactgggagatactgaccggggctagcccacaaaaaagaggtgtatctcaaggagctggcgcataactttgagctcgagacccacctgctgagctatcagaacagcggtcgttatggtggggcatcacaggagcatgacaccaactcgtatcttgactgagaagc

SEQ ID NO: 73192 - DNA, 511 bp, Arabidopsis thaliana landsberg
  unsure (1)..(511): unsure at all n locations
ggcgacatcttggcgaacaccgtggtgcgcgcgaccagtgncgtccaaggccgcgtcgtccagatcgtcagatgtggtgccgatgacggaatcggccacgtccagcccgacctcgcgacagatcttgcgcgtcaccgcctcgttgtcaccggtcagcactttcacctgcacgccgtgctggcgcaatgcggcgatggccttgccggccgtgtccttgggcggatcgagaaacgccaggcagccgatggccgtcagccctgtttcgtcggccacgccgtaagtatgttcaatggccggcgcgcgtttgaccgcaacaatcaacacgcgcaggccatcctcgttcaggtggtgtgtcatggcgcggatttcggcgcggcgcgcctcgctcatcggctcgacgcggccatcgcgctgcgcgaaggcacagatcgacagcattttcttgaccgcgcccttgcacaccagcaggtgctcgtcgggactggccgccagcaccaccgacatgcgccgg

SEQ ID NO: 73193 - DNA, 132 bp, Arabidopsis thaliana landsberg
  unsure (1)..(132): unsure at all n locations
ggggagaactgcggcatcttanaaagacattacatagtcatgatggnggacacacataaacaatacgaggaattattttctaatcaacactgtctttactcacttcaaacaaaatcttcaaattgtgccatt

SEQ ID NO: 73194 - DNA, 591 bp, Arabidopsis thaliana landsberg
ccttgctccaccttcttgaccttattcttggtcttgttatcatactttctcacatagctcaagaatttcctacagccttacaattcaaaatcagataataataatactatgcaatcttcattatacatctaaaattttcataacaaggggtaaaacataaaactaaaagcactcacgttaaggaattgttaaggaattgatgcattattgagtcaaataatcctccaacgtctcttcgttctcttacaattcatcgccacccgtaaagacaattattatatagttagtgatttactaatccaaaagttcttaaaaattagaatagagtataaattaaaatgactacatgaaaggataaaataaaatataaggtggttttggaaggacattcctaataattattcaaagtaaaaattaaaaatacgatgatgtgtcgcacaaaatagaaatttttttttaattaaaagcgcaaatataaagagagagaatatatatgaacacaaaaagatgatacataataataataatcctattctattctatatttctattattaacgagacaatgtacttaactacgatggttaactaa

SEQ ID NO: 73195 - DNA, 426 bp, Arabidopsis thaliana landsberg
  unsure (1)..(426): unsure at all n locations
cggatagagatgttccgcggtagcacggctctagagtgttctataagttcaataagttcacagtatctgacactatcttaagattgccagcacattctttactcactcctgactggccagcggtatagcatgtgccgatgcacactaatttagtgtcctgccatatattgttacacattaaaanaaataaaaactgaggaataaagcaagaattatgaaacattcaccaacaaaatcaaacctgatagagttcatcatagatgagtcccatgccatgagtgaagggaacaatagcagtaccatcaaacacctcatctgtaacaccattacccaccatatatccctataccacatgtatagccaattctaagagtcaactgaatggataaagtatctctttctctcacatatacaaagagacattta

SEQ ID NO: 73196 - DNA, 447 bp, Arabidopsis thaliana landsberg
gtattattatattacatgcattgataataaagatgcacctagaagtaataatattctttttgttttttttagacgacagaaaccgtgcccttttgactcgggtctttactcttaacctatcgatgagaccacagaaagaaatataaaattgtaacgaacatattttattgagcttctttaccctcatatgtttggaaatcttcttcaaaattaaagagagagggagagagaaaacttgatagaatctgtctttgataatcatgatgcgattcacaatcatagtcatagctttccttttgattattcaatccctagaagaggaacaaatcctagtctatgctcgtaaaggtgcctttacataaagatccctaatttttccttttcttccataccttactttatttttctatcttttctctgaagaatagcttaaaaccaagtttacta

SEQ ID NO: 73197 - DNA, 278 bp, Arabidopsis thaliana landsberg
cctccactaaacaacttccacagaaagttcttttttaaatcattgaccaacgtgccacccacctcctcgtattctgagtcgactaatttgtcttcctctgattcatcttcctctatttctgtgtcctctaatggaggctttcaagcttcaataacccattccctatgaaaccgtaactcatcttttctaaaccgaaactgatccttagagctcctaaagaaaacactgaatttcccatcattcagaaactctagacacattccctttcccaccaaccg

SEQ ID NO: 73198 - DNA, 190 bp, Arabidopsis thaliana landsberg
aaaggacaaaaaccctaaatatccctctaagaacacaccatcctcggcaagtaatgttttacatacataccccccaccacaacatctttgacgacgaaatatctgtagaccacctcatctgttgccgaatgaataaagatggctccgtgatgggcatatatattgcgccaccaggaataagagctaatgg

SEQ ID NO: 73199 - DNA, 348 bp, Arabidopsis thaliana landsberg
  unsure (1)..(348): unsure at all n locations
ctcgcaccaccatantttctatttctgtcttttatcaacaacatatctgtggacggttttaatttcgatacaatataccatatcactataactatttattgtgttctgttttttttaataactagaatattggaatattcatatgaatatgttcgattcgatttgtttgaaggaaaattcgaccttcatttgagtcaactgtttttgttcttttttgaaaccgacttacaaagaaaataacacagattgtggtaaagataagttaacttgtggccccatttggtttatattttctgatttgggtcgccatgggatcacatggttggttaagattaataaaatttttac

SEQ ID NO: 73200 - DNA, 387 bp, Arabidopsis thaliana landsberg
  unsure (1)..(387): unsure at all n locations
acagtttggtgtataagtcgaaaacctctttctcttcagtgaatctgcagatccaagagcaggctggttcaagtacgcgtatttgctctntgtccacctgaatccaacatacacatcgaaaatcaaagttaaatcgcagaacagccgagacaaaaccacatggttcttgttttaggctcattgaatggttcaagatatctataaaggtgcaagactatattgatgagaaggaaacagagaccagtctttcaatccctgatgatcttcggtttccaggtcctccatgtccaagctctcttcaaaccgtttataatcctcatcctgcaatagatatagacaacagaaccacaggcttctcagagatcaagagataaagaacaacacaag

SEQ ID NO: 73201 - DNA, 896 bp, Arabidopsis thaliana landsberg
tagatggaaacaccccatatgctgatgaaggccgcgagttcgaatcccatgcaacagaagaagaagagtcatgtgctttgttactatcggcagttgaaggtcgagtgacacttccaccagaagaaggtcgattactgaggtggcttggtgaaccagggccactttcagttcgtggtgacaaggatgatgtcccccaagcattcagtgatgatttactgccccaactaagtgttcccctaaaatagatgtccagaagaaaattaaaccatctaaaatttgaggacgaaaaagaatgagggaaatagcatctcaaacaggtacaaacttactttggaacaatttctacatttgggtcaaggccttggttctctaaccttaaattcagaagagaagtgttcagggaacgagattatacatatatatgaagtctaaatgtgatcatgcgctcatcaaatacctttggcttggtaagttaatcggttttggaacagcaacctttcccaatatagtcatgccacttcttcttgtagtaccccatctgctaatatccagcacatgtaatttctcatcatcaccacagaggatacaaagctctttaagtgtaaatgagcaaagtataaatgattatacaatttattaaaaaaacgatcagctctttacatatgttttctacacacattttacaactttcccttcttttaatctaaatggtgatgttggcatgttgcaaatcaataataatgttgaataaaattattacaaatacatggtgaatgtctatcatgcaagcaagctctttcaaagaaagaaaagccacaccctgagttaccatctataccccaggcacatatagtgattctatattttaacaacagttggaatatacagcacaacga

SEQ ID NO: 73202 - DNA, 5432 bp, Arabidopsis thaliana landsberg
agtgtatacaaaaggctactacagtagttataatcatattcaaacaagtgactgaaacatataataataaactctcaagacaaagactttttttttttaatctgccaatacctcctcggataggtctcctctcagcaatctcccaagctatgtgcctacgaattagcttcctcaatcgccatatctcaaaatgcaagtatcctcagcatggcagctcttactacctaaataacaataagaggccaatcttagtttctatcaccagtgaatccatgaccaccgtttctcccactagtacccctttgctgttggtatccaccctgcctttgctgcccctgtcccttctctctgtatcttggaccttctgtctgagaactctctttcgattgttctcgactacgttctccatcataagtatgagacccaacaggtttgtattcataatgcagattttgcttctgtctatctctgtttgaaggtggcctctgatggtgatggtgcatattctcttgcgccggtaaaccccaacctccttgtgactcctgccctcttccaaaccgtcgaccctgccctgtgttcttttggaacatactattcggattttgctcaacctggacctccttattggtagatcggttttgcaactgggcttgtgtatcagctgatgtcgttttttgttctgtagtaaacccttgatgctcgtatccaacaacatttttttcctgagatccataaggtttgtcccttgtactttcacgaccaccatacttacctgtcctattagctgtatgccacacatgatctccagggacacgaccttcttttgaagcagcaggcaaatctggttggctaaacccatggccagagtgctgcgtatgagctttattgaaatccctcttattgccttttttagggtcaccatagttgcttcctccatccttgttgcttcttgaagcatgctgcctgccgtgcatgctcattccttgatcttttccaacagcactggattccatttcttcagcagcagagtaatgcgtttcaggagtcatataccagccatcgttccatccatccttattacatgtggtttgatccttggcagcaatttgttcggtttgcttactagagtgatagttcactgttcctcggatgggctgatttgaggttacaaattgtccatcctccaaagctttagtaggtgctccagaacctctctggtgccatgatccatgttctctaccatgctttccctgcctaccattcccatgtcttgactttgaaggagacccagatttccctgcagttgaaccagaaggttggagaattcctgtaccctcacctccacgattttctttctggtttacattctccgacatatctggagcagaggttactagatttttactgacgatttgctcagccatttcctttactataggcttcggtacatatctttcaatttccactcttttgcttttagaactagtctgtccttgatgctgactttttgaagaggtgccaaactcagggacagtagtctgactccctccaccagtggaaacatcagctttttgctgtggatgtactggagcccaaataacagcattgttgccagaaaatttctctgcaggcttatttaccagtgagtttctttgagtcctacgcacatgttgagatttccagttgtttttagctctgttttgagactcttcattagtgaaggaactgatttgttcagacgaatcaccagacactttgatatccaggcttggaactgaaacagaccccaactcaatttcagctgcccttgccctaccagtctcaattgactcatctcccgattttgtttcttttccaacggcaactcttgtagtattcatagttgctgtctcctcagccttgtgttttttcttaccattcctgttattttttcttttcgggaaagttgactcagctgaaacggttgacgtcgctggcatgtctgagttattgcttgagacaccttcattaacaacctcaggagacgggacaacatcaaacacctctgcagtagcaacagagctccctgtcggttttttctcaaatataatattttgcttctgcttataacccaagcgcttctgttttgaggcaccaccatcacgtggaagattatcctgttgggaagggcccacattatttgcatattctgttgaagtcctcgtgttttgcgttgtgttttttcctgatcctccagtaggttctacggaatttgtagcattagatgaatgagatccaggatctgttggcatgtcagccggagaagcattagatgcagcttccatgttcttaactgaaccctcctcatatacttgggaacgtctatttaactcttctagttttgcaagagccttagcccgctgatctctcgctctttcttcctcctctttctgcctctgttgagcacgttgcctggctaactctctcatcgtagaacgcttttaagggaacatggcaaacactcagtcaaaccaaaaaaggatgactacaaacaagagatacataaaagtataaataacaaccagaatcatatgaactagtttatacctggttatcctttgggtctgctgatattcccgacccaggcctcctgatggactcggtatccaaagagtcatcgacattaacctcgcaaaagctttctgtgtttgtagctaaagttgtatgggaggagcctgacataacagttgtcttctgccaagcatcattgccttcactgttcactattcgtttggtctgcggatctgctctgccttgagtctgttgagtaggtctcctgtaggtactaacatcaaaactttcccgacataaaggatggcataactggccgaaacacaattgaaaaatgataactgacctgaatatgctagttccacccatagctgcgggttcagcattcttgtttgtggcagaatcaccttgattatagtgtgatgagttcttactgtcacttgcatgaccagttcgatgatttctggctgaaactttatttgcagagttcccagaattgagtgtacgtggttggctttcctgctcatcaaaattaacaacagatgacgaattttgccaaccatcattagttctagtttttgcatttaagccctcgattttctgaatcaaactaggatctccaggggcagcaagttctgctttgactggttgtacttcaccacgtgcgtcatttctgatttctctcctctcgtttcttgaagtttgcatctgttgagctatcttctctgcattcgggagcctatttccaagaaattcttcccgctttgcattatcttccccaaacctcccatcttggtgctttaggagaaccttgtatggcctttgtgtttcttgagaatgtgatgactcgttccgttccaaagacactgaacttccaggcgtatcatatccaccttgaccagaatgattgttataagcatgcggaccagtaggcctacctgcaaaaggtaggtctctgttgctgggactgccataccccatgggaggaccatagtagccttcgtgtggcgctggaccaacataaaacccaggcctagtctgcatccttgggtggacataagagtcaagcattggaggtctgaacattctttcattattagcgtgattacccctaggaccagccccatgtccaggagcaggtggaacttgcgtaggataaaatggaaaaggatccatgtgaaaacccccaggacccattggggcaccatacgggtggttccctccgtaccagccacctccttgatgattatttactggaggaccacgccaagcatcatactgaggaggaaaattagcattaggataagattgtgaaccacgtgagtccaattgcccttcctctctacaatgtctaggtgcatcttcactgtatggttgattctctcttctccaggaattggcatccccaatccggtcattagcttctgcaaataaaagacaagatatggtcaaatatagtgtccgcgagaacatccactaaaaagatgtacggggaataaagcagtaagaagaattcacatgaacacctgtgagggtaacatggccctctcataagagatgattataaacataagtaactctcgaaatgagatgccaacatctgttgtatatccccaaaacatagaaaaataggtttgaaagtaagaaccttctgtgcaatctacaccttgcccttccacagatcttccagacgaagatggaggacgagcgtgaggtccagcatctgcaaatttgtagtttctaagagccatgtctaacgtatctccttcatataagcacatcacattctatctaggtaatcctaaaattctcagtggcacatattaggaggtcatctaagatcgaaaaagtggtcaaccaacagcaagccaaaaaaaaaggtcattcccgaaagttttaactttgctgaatatccgtgtagataaacttctcaacagaattacatttagaagtaccaactttcaaaatgaacccgtctgtgctaacgtcactcccttgaaggcaaggacgacgagtataagattgaattgtgtacaagttgaaacaatttttttttcctagtttacatgctgatcgtactttttgaaaagagcaaagagaactattcttaaatcaaagtactgtaatgcatggatgacacaataatttttactgttaatagatggtaccttgtggccttgtactcttttcagaagtgtccttttcagcaccaagggaaggaaaatctccagaagtcaaagaaaacccatcattctttgatggagcaactccctgtagaaaacaatgagaagtctaagaatgaagataaatttcatggtagataatgcaaaggtgggtaaattgtacacaactattcttcaaaaaaaccttgaagattgaagtttgccaaataataatacaaaaacccttccatcaaattctatttgcccaaccagaactcgagacttattggagaccatgtgccactcagttgtcagattatcttacgcactacaaagcatttctctaagagaaataagtgccctataatttgacaaatttagcatcctaatcttgttcccatagcaaacacgaatgatgtatccagctattaaagttctatctagattgaatatcaatcattaatcccaaaaagtaattaccattcacagtcccaaaaacataagaacttgctgtgtgtttgttgtaactaagcacaagtgaagtaagagaagagtgacatggagcttcacagatgtaaggataaaaaaagatgcttagcagagtcccgataaatattagagacgacttgaaagggaagaaccataccaacttctctggcgccacatgttgaccccatgttgcagaagtctctgacacgggttcagcaaatcgggataact

SEQ ID NO: 73203 - DNA, 438 bp, Arabidopsis thaliana landsberg
gccatgaccctcccccggcacgaagacctcgcagcaggctgcttcgatcctgtcccgcctgggcgtcgagctggccggttaatgcgagctgatcgcccgctcccccatcaccggcggcgagctgggccgcgtgcgcgcacacaccgcgtcggacgtcgaccgcatcgtcggcgaagccgccgaagcgttccgcgggtggcggaccgtgccggcgccggttcgtggtcagctggtccgcgaactggggctgctgctgcgcgagcacaaggaggacctcggcgcgctggtgtcgatcgaggcgggcaagatccgcttcgagggtctcggcgaggtccaggagatgatcgacatctgtgatctggccgtggggcagtcgcggcagctgttcgggctgacgatcgcgtccgagcgttctgggcaccggatgatggagcagtg

SEQ ID NO: 73204 - DNA, 3898 bp, Arabidopsis thaliana landsberg
gcgctctccgggtgcaagttgtcagaaaggcaatcgagaatctatctggctgtaagtttgcagctgtattgtttccttctctttgcccttctccagattcatatcttatgtctcttgaccactggctcatgcagacaagactccaaaacatgttaacgttggccaatatgtcgcttcaaatgtaccaagtcttgcggaattctgtgagcaatctgggaaatcccaaaattcagcatcaactttaagggctctttcatctgtgatgttggctatacaaaggtatttaagaagctcacacttcttgaaattttcactgcatcaatacttttttctctctctcgttccttttaaacgggtgcaataaaagattgttgttattccctctttgctggaggttactattttcttcttaagttgtattatatgcaaatatcgaagaagaaaggattttctttttaccaggcatgagttcaaaacaaatcatgaagaatggtggcaaacatgcaaatcgtttctagggccaagattttccaatgatgttgttacagctctgaagagcaaaaacgagagcattaaatccctctacagagtgaaaaatgagatgcgggccaccattcaaagccttttaaaggtaaactcgatttttggaaatttaaaattttcacagccattagtgtcttgaggacattttgccaccaaaacactgaagtctgaagagattgaattattaactttcatttttgcggcttctttttagttctatggtattatgattaaccatagatcggtatcttattactaggaagatggaattctggtaatccccacagttgctgatccccctccaaggcttaacacaaagagaaataaatctttgaatgagtttcttgatcgtacttatgcactctcctgcattgcaagcatgtctggatgttgtcaggtatatttccatctcctctttctcattcaatggttggggaacattcttgttgccttttccttactcttcagtctttagtcatgacacaaatatatacatattcttcaggttacaattcctttaggggaacatggtgatcgtccaatatccgtgtcgcttcttacttactatggaggtgataagttccttctcgatacaactctcgatgtatatgcatcccttcaagaccaagccaaacttgcatccaacttagctccagtgtctgacaccaatggtaacatggaggcttctgaagttatgaaagaaaaggtaaaactatctctttgagtttgacaaatagtatatttggttctgatccatgatatgctactggagttggaatgttctgaaagttaacagtggataaaatgtaattccagggcaatgctgcatacaaggggaaacaatggaataaggcggtaaacttttatacagaagctataaaattgaatggagcaaatgctacttattattgcaatagagctgcagctttcttggaactttgctggtaattgttctcttcatatctttcattctgatctgaatataatttattatgattttctgatctgagagtttgtttatagcttccaacaagccgaacaagattgtaccaaggccatgttgatcgataagaaggtgaaaacttgattagctgccttatttctccatccctcgtagtttgttttgttacattgtgtttttaacatggttttgtgtttaagtacacttgagctggaacaaaactattcactttttatttatttgatttgcggcgtaatacctttgtactatgactatctagtttcattatcactcagatcactcactatagacacaatgacgcattatttggaagctttgattcttataatagttatttgtttctacagaatgtgaaggcatatttgagacgagggactgctagagaatcacttgtacggtacaaggaagctgctgcaggtatgatgattaaactactctgagattgtaattttatcacattggagaaacttgttaaaagataaaattcatctagctatccagatgagttactctctctagtagggtattggagcgtaacattatggttgatcatctctgcagatttcaggcacgcattggtccttgaaccacagaacaagacggcaaaggttgctgagaagagactccgaaaacacatatgagttaaaaaggattattactcgatttctcttgttcaccaatctatcttttcacttatctaaaaccctaaaaaggaaaggttttgctccggtttcaacagactaataatttagtggttttgtgacatgtgtacagattgggatgaaaacttctacctctaattacttgatctgaaaagttttatggggtccttttagcttctttgttttcttaacggtcttttacgtaaattacaatttcccccaagtccaatactgtaattccttaaattacacggagggacccataaatgacacgtttacaatcaatttctcgacaaataactgaattcgttgtttgtttttttcctcttcgtcatcgtcacgcctccgtatcttctcctctgtttcatttttgaattattcgaatcaaaaatgtttgatcatatgaaactgctgcgatgcttcagcttcacggcgtcgcgagattggttattccggcaatcattcgcaaacgccggtctacgttccgtaacgacagatctctcccacggcaattcaatcgcatcaacagctatgcattgttggattcctaaatccccgaatcgatctaaacctaatctcctcctcctccacggattcggcgccaacgcaatgtggcaatacggagaacatctccgagctttcaccggccgattcaacgtctacgttcccgatctcctcttcttcgggttatcatccacatcggaaccaaaccgaaccgaatctttccaggctcggtgtctgatgaggttaatggaagcgcactggagtccagaggatgaacatcgtcgggattagttacggtggattcgttgggtatagtttagcggcgcagtttccggagaacgttgagaagcttgtgctgtgctgcgcaggggtttgtttggaggagaaagatatggaggacggattgtttaaggtgccgaatctagaagaagctaccggaattttgattcctcagacgccggaaaagcttaaggaactcataagattctctttcgttaaaccaatcaaaggtgttccttcgttttttctctgggattttatcgatgtaagttttttcctttataataatgtctttgtttgtttgtttgttgataaatgttggagttttgagaaatgttgttcaaaatgttgaaaaggtaatgtgtaggagtttgtagaggagaagagagatttgatcaaatcaatactcaaagataggagactttctgatcttcctaggatcaaacaggtacaaacctttattcggattttaatttgcttatgtaaatttcgcagttcctataacattgtgtgtatgtgtgtgtttattggttgaattagaaatcgttgatcatatggggagaagaagatcaaatatttccactggaactaggttacagattaaaaaggtaaacaacaacatgtatattaactatagagattaccctctgtatttttttatgtgtttataataattgtatggtgaaacagacatataggagagagtgcagagatagtggtgatcaagaaagcaggacatgctgtgaatttggagaagtccaaggaatttgtcaagcatttgaaatcttttctcattgactctttgtgaattactttttcctataatatcaaccatttttatttttacactattcttcaatatataggtgatctttctttcttgtctaaaagcttaaaacatcaactgtctattaggaaattatgttag

SEQ ID NO: 73205 - DNA, 141 bp, Arabidopsis thaliana landsberg
acgcgtgaggatgcccacatataaaccatttctttcataatctatctctcccctcactcagggttgctttcttaaaaaaatgcctaacatttcaaaacctctcttcttaaaacttctctataatcttcttctctatactgc

SEQ ID NO: 73206 - DNA, 489 bp, Arabidopsis thaliana landsberg
cggcatgacggggcgcgagattgtgcacgaaattggtataccgaaatgcaccgtttatcggcacatcaaagagatgagggcgacggcatgaaagagcgcggcatcatcttttctggtcccatggttcgagctttgctggaaggcagaaaaacccagacacggaggatcgtgaagcaccaaggcatagtggataacccagcctttcctgacttaaagatcatccaacttggaagcacgcaagcatggcttaacagccagccagatcatccgcaacacataagcaagttctccccctacggccagtcgggagataggctctgggtgaaggagactttctgcccagtccatgatggcgactacggcggaacgaactgggtggattatcgcgcaacccctcgatactcagaatcacaccccgcaggatgggagaacgctcccaatgatccggatgccttaaagtggaaaccatcaatcttcatgccccgatgg

SEQ ID NO: 73207 - DNA, 573 bp, Arabidopsis thaliana landsberg
gaaacagcttataatatacacgagacgtgcatgtgtgtgatgatgatattatgacataaaaatctatatctagagagatgagaaaaaaatgacgagtgaattaattatttaacaaagccttggaaaactagaacttgaatgtgtatgtccatgtctcacagatcttgacattacttcactcttcttctccttactaactttttcagaattattccattgcttcctctccaaattcatcattagatcatcttcaaacttctccgacatatcaaaacctttcaaacacaccagtattggtttctcttctaagtacttacgtgaattccagatcttgtttactttgttcttgtcctctcttgagtgtggtcgagtctcgtttgataattgttgtgacttgagtgcttgaactgcaatatttggagggatcttgggattttttgcaagttgtttgcatgtgtccaatgtcaatttcttgtagtttagacatcgacatagttttgttctatcctcggatgatagtttcggatgagaactgcatatcatagtttatattagttcatgccttcaaatata

SEQ ID NO: 73208 - DNA, 499 bp, Arabidopsis thaliana landsberg
gcagcaggctcatggtcaaggataccaacttctacttcagcttactgatttgggacaggggggtagggcaaaggatagttcgggaataaaaataaccaggccaaccgccacgctcaccaccgaaacaaccagcactgcacccgccgatacgtctttgacagccttgataacaggatgccactcgggatgtgccatatcacataggttttcgagggcatggttcaccatctcgagcgaggttaccagcgctgagcagagcaataccgcacaccattccatacccgatattttccagtaccaaccggcaaggcacactagtatggttgccagcaagtgtatacgcccgttgcgggcgtagcgggaaaaacggatgatgccgttgccggcatagccaaaggctatgatgagtgatggggatatcatgggggttgactatgtgtcggtatgcgatgaatgttatttgccttagattacgcagtatctgtacaggaaaattacc

SEQ ID NO: 73209 - DNA, 779 bp, Arabidopsis thaliana landsberg
atctacttacaacattcattctgtctttgttttccaaatacatagatataatggattaattggaacttggttaggttacgtatacaatttgaatttagattcatgaaaattagtgtataattaagtataagataagtacatttttgttttggtcaactagtagatagtacttagatcatcattaagtacttaaaagaactttgaccaaaataatagtactaaaatagtctcataggaaaactgggaagaacctgctataagaaaggcaaattaatcttaagttatatatcactttgatctataaggaaatgtcattcattttctttagtttctccatatttgaagacccaagaactcagtgaggatgctagaaaagtctcgaatttaattgattattttatttacacagatttcagttggcaataaaattcggaaaattaaataatgaaaaaagggaattagagggtacaaccacaaaacaagaagaagcaacagaccgtagcagtgatagctaaagattcaatgattgagacaaaactccacaaaagatcatcaactatggagagatcacccgacaaggacaacaatctcatgttccaaccagagctcaaggatgaaagattcacctccgaccaccggaatgcccacgatgacgacaggtacgatggtagatccatcaacgtccattcgggaagctgacattaccaattttttggctctcttcttcttcttcttctctggtttctaggtttgggttctttttggttccgaaattatta

SEQ ID NO: 73210 - DNA, 421 bp, Arabidopsis thaliana landsberg
aacggggctacatcacgggaaaacctgatgacataatgtgttggaccagacaggtaaggaagaggagtgggcgctttgattacagcgggggaattcttccggactgttattgtattcccgatcgttttaaatgaaaaattaaattttgaagctaaaagattcaatacattctgtaccttcaggtcatgaccccggatattaacattccgatgagaattgatgtcctctgcattataaacaaaagtaaatcctgattcttttttaatgatgtcaaatacctgtctgaccgaaacatattgcaggtcctcgtggatgggactgatatgttgggcttctccacttttacccaataaggtgttgaatgctattaattgtattagaaatccgtgcaaaaaatactatcaaaccataaaacgtacct

SEQ ID NO: 73211 - DNA, 745 bp, Arabidopsis thaliana landsberg
tttttgaattctcttttttttttttttttctaatctgaaattttagaaatattaaactttcatccaactatcttattgtaaagaagagggaatcgtatataaagcccaaaagggtaacgaattatcgacttcaaatataaatatccacgccatgctctcttgtctggtccaatagaggttctgacatagcaccaagagacatctctttatctaccaactaagcatttgactaagttgcacacatttgtaatttcaatttgcaccaccaattgtgtatcaacatttatacatgaaaaaattataatcaacggtcgtacatctaaattagtcttccttaacctaccactcactttgataaacatgaaatcgtcaacgatgcatactattgtaaaagattcaaggaccaaacactcgcatcaagtttcttataccacagcttacaaatattaacgaataaaatataatatgcaagtcgtactttgtagttggatttcgctttcagacactgtttttagtccgaagaattgtgtttcatatagtaagactcaaacccgacataagggcaaatattttaacacatatatcatatgattcatgattagaaatccaatatcattatatcttttaccactttctcatgaaaaatagtgacacactgaatgaaaagctcacaaacaaacataagagtgtttaatcgagtatcgagtatgtataaaaagttcgagttcatgatacaagcgcgaga

SEQ ID NO: 73212 - DNA, 599 bp, Arabidopsis thaliana landsberg
tcgaaatttacgtgttaaacgacattcaacgaatcccaaaaattagaattaaaaaacgtaattccatttataaaaaaataggactaattaattcctctatccacatcaaccgcacgtaccacgtgtgctgatcgtcgtgcaacttgcagatacttttattcccaaaaaaaaaaaaccaagttatactgtagagacgcacgtagccaaatccaacaatgttggtgacagaaccaaatctcacagtccaacttcaatcttttcccatttctactctttttcacctcattggaacgttcacataacaaacgtcacagtcagttaactctatcaaaatcaatcttacacgacacgatgtcgtttagacgaatcctgtaccttccttccttccttcatcttcttccttcctttgatttctataaatcaaactcctcatgacattaaaaaaatcaactttttcaaaaaaacaaaaaaaaaacagagctcactcattattatctctctaaaaaccctagctttctccatgggctttcccgtaggttacaacagaagttttcttaccgaagcttttcgtacaaacgctttcgattctcggattcatc

SEQ ID NO: 73213 - DNA, 589 bp, Arabidopsis thaliana landsberg
  unsure (1)..(589): unsure at all n locations
cgctaagctggatttatggaccagaaccaacttattgcttattgccaaaaatactgagctcacaaaaactgaccagctcacttataaaatcggtgcaaaataagtcatgaaaagtaaagccctaataactaataaccaatccctcctccccacactatcgccacgggtggcgatagtgcacgactggctgactggtttcggtggtgccgagcgagtggtcttggccatgcacgaagcttttccagaagcaccaatctacacttcgatccacgagccggactcannnnnnnnnnnnnnnnnnnnnnnnnnnnnnnnnnnnnnnnnnnnnnnnnnnnnnnnnnnnnnnnnnnnnnnnnnnctgtaccgcatctttccttggttgcgcgtcaaagccttccgcgacctagacctgtcagaatttgacattatcctgtcaagttctagtgccgagagtaaacaagtccgtaagtctcgaccaggacaaatacatatctgctactgtcatacgccgattcggtattactggagtcactacgacgaataccggcgtgatcctgggcctcgcgcttttactggctggccaactaat

SEQ ID NO: 73214 - DNA, 711 bp, Arabidopsis thaliana landsberg
atttgccatcaccacagttactaaaactgaaccaaactctcttaatctacactattcaacccaagactctaaaacccacttagcctctgcaaaaaaggtgctgcctttacactattcaaatcagctgcaacacgaattgaaacaaaatcaacaacaaagacaaagactcgacctttgacttcagatcgtcgatacaaatttccagatcaacaaaaaaaagcagttttctgaaggaatcaagaaatgggtactcgtaaaaacacgagattttatcagggaaggagaagaaatttttggagtcgttgaagaatctctcagcaaagtgccgagtcttaacgtgactttggtttcgcatttttttttagtcaccgatcaattgttacttaatttacgattctgccatccaattgttgactgctgtgttttttctttttcttaaaacgatattatttgctttaattacaaattttgtaatcaaactttatgcgaatagttcgttagaatgttgcatcatccttcatgacgtttatttgattaagaagatacttctatttaaagggttaaatattcatacgttactttatttacacccatacttacaatctctttaagtgtttgtatttaggctaaacttcaaatttaatatagcataaagtgtatcatcagaaatttaatgggaaaaaccctatcttacaaatcatggtttgggat

SEQ ID NO: 73215 - DNA, 758 bp, Arabidopsis thaliana landsberg
acgcttctttgctgttttggccggcaaaatccgtcagagatgctgccctccacaaatccttaaaatgtgccactaagccataaccgctactacttatgacgtcatcaatggcggccgttgcctggtctttggtataaccatcaggtaaagccgttttgctgtaatagccggtataatataaaaacacccggcccatcaaagcttcggctgcccattttgtagcccttccataatcggccgcattgatctgattgtagggtacagcggaaggggtcaggtctgtaatggcctcctgcaggtcactactgatcagcgtgtatacgctatctggactagcctgagcgatagcataattatcgccttcgatcggttctgtaatcagtgggacatgcccaaacatacgtaccaggtcaaaataataataggcgcgcaaaaactttgcttctcctatatattgctttttaagatcggggtttgttgaaaagtcgactccatctacttttttcaaaaactgattggtccggtaaatgccctcataatactttttccaggcctccgcattgtggtcattataagaggcaaagcggtcccattgaacgactccgttatcaacaggtccttcacctccgaagcaatcatcagaggccagctccgagcttaatataatgctgttgtccccgctaaaatcccacatggcgtaagcggataccactgcctgaaaagcattatcaggggttttataaaaatcggattctact

SEQ ID NO: 73216 - DNA, 579 bp, Arabidopsis thaliana landsberg
gtggttcatgaccccctgcaggtctcccccatggtttgtgttcagcgcatgcaggtccagggactggtctggcatgccggctacccggtcattggtggtgtctccattggaaaaccggtccggcatcagcaggtaaataagatcgctgggactgacgcccagggctctggtgatgccgtcctggggatttttcttttggagaggaaactggtaggtcagtttcttcccgctttcggggcggagcgtaaaggcgatatgacccggccttgcatttttgccaatgtgcaggtcgacaaaaagatagtcggggttttctacccggtgtacctggatgatccggacgcccgggtaagcgatggaaactttgtcttttccgatgtttttgccatgaaaaagcacctgcaggaaagggtttttcatacccgtccaccaggatggcggacaaatatggtccagtgccgcggtgtttgtgggagcggtggaaagctgctgcccgtaagaaagctggaagggcaataaaagaagtacggtgaagaatatgcgcgtcatcttgggggtaaatgtagcgaatatatggac

SEQ ID NO: 73217 - DNA, 595 bp, Arabidopsis thaliana landsberg
aaattgttattaaaacctgcgttcagtgaagagtaatttttgtttggatagtgctatcgtaactatccgggactggagcagagtttctaaaaaatagaacaaaaacagaagggcctttggtgccaagtcaggcttgacccgctctgtccgaatcggaatacgccacggcatcgcctggaacaagcataatgatagtgttaggagacgataagacctaaggactaagaggcagtaatcagtgtagatccttctttcgaattatgcccacatctacaggataagacatgtttcagatcgaaattcagtgagactaatagtcccaagacagtaagaaatagttcaaagttaatttcgaagtcaattatttagatcattctggaatgacactctatttctgaggagatataagatcgaattcaacagacatcacctcgcatcgatttctctcatagacgtaaaagtgcaaaatttttcgtcttcgctcctgctgctgatctaaaccataaaggtcggttccatcctttgggcattggccagcctcgacgtctatgatagtggatgttagtcactaatatttcttacacctcaagatgcg

SEQ ID NO: 73218 - DNA, 583 bp, Arabidopsis thaliana landsberg
caatgcagagatgaccataaaagaacattaaaacactacttccactaaatctatggggtgccttggcaaggctattgttttatgagaatgcatcaagatgatatagaacatgctattcagtttataacattaatgttttggcggaaaattttctatatattagacctttctgtaaaaaaaaaaaaatgatgtagaaaatgctatcatgtctcaaaaatttcgcactagcataatacggaacattgtagtttacactgctcattaccatgaaaaccaaggcagtgtataccaacattaataaactaaatcgcgatttctagcacccccattaattaattttactattatacattctctttgcttctcgaaataataaacttctctatatcattctacataataaataagaaagagatcgacaagatctaaatttagatctattcagctttttcgcctgaaaagccaaaatatgtgaatagaaaaaaaacagtcgtcattcttcccaccgtttgggacgaaataaaaacataaccacataataaaattattaaattcaaatattataaaatcccctaaatttgtc

SEQ ID NO: 73219 - DNA, 1570 bp, Arabidopsis thaliana landsberg
ttcgggcaaccactgaatgtttcctctggggattacgtaatgcttcaaggtattgcgatgttcccaattctattcatgatctccaggttgatctaattgataaagtcctagtgaagattctatgggcggacttcactgaactatctaagggcagcattccacctaatcagaggaagtcagctgaaaatcttggcatgggtaattcagttagttatctgcaagagctaggaagatgcatcttagaaattctatcagggattaatttacttgaacagaacctgctgtcttttttctgtaaagctgttcaagagagcttcttgaatatacttcagcagggagatttagagatagttgcgggaagcatgagaaaaatgattgattttctcttgttattggagagatattcagttttggaaggtgagagctggcccttgcatcaatttatggggccactgctgtccaaggctttcccgtggataagatcatctgtaagttatcgtccacgttttgttaccccgttttttcatagtagatcatatgatgtttttacttgactaacccgtgtggctgtatttatattttcaggaattgttagatggtgtgaagcttttgtcagtttcagtatcggtgtttggaccaagaaaggtagttccagtgctaattgatgatatagagacttctacccttctctctgttgaaaaagagaagaatatgagcccggagaagcttattaaagtttttcaagaaatttttattccttggtgtatggatggatatgactcttcgactgcagctagacaagatctcctattttcattgcttgatgatgaatgtttcactcagcagtggagtgatgtcatttcttatgtatttaatcaacaacatcagggcttcaataacctggctgctatgaaaatgcttttagagaaggcaagggatgaaattacaaaaagaagttctggacaggagttgaatcaaagaataggttctcggccaaaacattggcaccatacactcatagaatcaactgctataagtcttgtccattcctcctcagcgactacaacttctgctgttcagttcctgtggtaagttagtcaatatatctataaatagtatcaatattttgcatttatatatctcagtcaagtcttttatgttgcttgattgcttgttcccagttcttattctatattttttttgtatgcagttcagttctgggtggttcaacccaagacagcagtatttcttttgtgtcaagaagctcgttggtcttgatatatagagggatcctcgaaaaactgctatcttttatcaaacagtcaccattatgttcagtcaatgatacatgttcgtctcttattgtcgaggctatagcgtttgattcgagcagttctgtagatgtgatcgtggctgctaagtttgcagctgaagttattgatggtagtttcttcagtttgaagtctctgagtcaggacgcaaccctacttacaactgtattgtcttcttatatctatcattgacctagagaatagaatgacatcactagtggacaatacgctatgtgagt

SEQ ID NO: 73220 - DNA, 3698 bp, Arabidopsis thaliana landsberg
taagagttaaagcaaaactcacagactaatgtcacaaaaatgtatatcctcagctattgtattagcaaggagattggcacaaggggcagagtttcttattagacgtgtagaaccacttgtctaaacatgctttgtgaaacttgtacttgcaagtcacgcaagctcgccttggaaggctgtgattccctatgtgtatcacactgtaacatatcgggcagtcttctactccttcaaattccttgtccgaatttcgcttccatatccttatcgcctccgccagagccccattctgctttcagtaacaacacattagaaaaagaagaagaagaaaaacattcaatcaagacaggcactcaatttgggcttagatggagaggacaagattaatcatatatggtctacatgatggaactggagatatcattcaggttaacaaagatcgatatgactcataaagtacagtacctgatgacgaacaaacatttgcatagacatcaaccacttcctctgcttcgcttcgcttattccaatactttttgcgcaattaacgtcaacaggcttgagtgggtaagaaactggaagccggatcacgagatccatccccgtttcatccttcgtatatgtagcaactacctcatttgccgctttacttatgctgactgaaaagctctcatcattaaagtctgccttctttatctgcggctcacataaacaatgaacagaatatttgcaaatgcattagtggatcttcactgcaactctcagagatgagaaaaggttttttattgtacatacctgagacagttcgttcttgattagagatgggctgcaccacgttcttgtaaatgcttcaataagagatgatgcagaacggtcacgcatttcgctaaaccattctctaacataagctggaaggacacgtaacatcagaccatatatcgccccagcaagcgaagccatctttccagtttcaataggccaaagtgattcaaccgttgacagggacgaacccgtaataatcgcacgagtggctgctgaagctaccacagataactcagacggaatatccccatcttttttcttcaagctctgtcccatgtataattctagaggaatgtgctgaaaaagactatctaatatcaacggatttgcagttttttctatatattgcaccagtctctctcgtccttgggttagtgaaggtaaagagttaacattggagagtaacaaagaccacgccaggaacgtttgcacctgccattagaagtgattaaacagtgaatgacttgcccaaagagggaaaataaaccaaataaagcttttgaaaagtaagaattaccctttctggcgcagtcaagtccgtatcaagaagttcatgatctaacttctcaaccatacaagatacttcatctcttagcagtagcttgtcttcagatggtaaaccagcattgcttgagtcctgatcattgagagactcatcattcagtggtgcattcaaatcagcaactatggccagcctggaaataggttcggtagacaaaacagtgtatgcagcaagttgcaatgacgggattggattggaagagaacattattgcatacaaagagcttatagatcctctgcttagtccccagaattccactgctctgacagctctatctcttgcgcgtggagaagagtctactacaaggtgagctaccagctcccagaactgcagatgatcaactcgaaatgaagcaacaatagatgctgcctctggggaatatgaagcagcaatagcctcagtaagacccgtgcagaagaaaagacgcagaacaccttcaagtattcgatctttaacaggatcccatgtttcatctgccaaggatttcagattgtcttcaccttcaacagatttatggtttactaacgcattaagcaacgaaaatgctgagagagcattctgagcactgtttatagaaggatcagagataaaaactatatgcccaagtccttcaagggtatcattctccttctccttctccatggaagaaacaccactaatgaagtcgttgacgttctcggaagtttcctccatcacaactactgcagattgaatcagacgcttcagattagaaaagacaaaatcccaatcatcctcgttaaaatcgtttccacagtaactaactgcaatcataattagtcttgcgagcagaatttgcacagctggaagttgggtaactacagttgatgcaccaggatcttgcttttgtttgcggaacaagtcaagcaggagcgttctctcttcagtgctcagatgcctctgtagttcctttgcttcttcagctttatcacttacgggataacaagagataacaagctgaaaccaatcctgtatatctgataaagacggggaaaaacaataatgagctaggcatgcaaagtaaaagataaacaacaaaaccttagtcttaaattgctccctagactgtccatctgatgccaactatgaccacttctcagatgaggactcaggactatcactaagtcaatgttatttcataagtaaatatacttgttctacatccacacccgagcctaatcctcatttaaatctaagcattgttcataggttcaagatgagactacaagcaccactttcaaaaaaaataaaaaattaatcggtctttaccttccccactttgccagagcaccagaggaggaaacgacaaagacctctccagccaatttctaagcaaaacttccagtggtagcagagtatctttaccagaaccaccagattttacttttgtacgtaatggtgagattattatgctcataatgtaaggaataattctcaaacagtttttgcttgtctcttcccctatgaagagtttatctgtgatcattttgaaagcagccatggcttcttcttctccccaaaggtcctccttgaacaaaatgtgaaggaatgacactagagccctcaaaaatggttcaacgacgtccactatgttattattaaagtcaacccacatgttccctaagccctcttcctcatcctttacatgcacaagagcaccgttgagtagaatgtcaaaaatggaatttagtaaacctccactcgatggttcatccttacaaaatgatacaagatttggcaggaaagaagtctgaactttaccccctggccactcccacgtgcagagtatttctacggaaagccaagcttgagaggcaaacccatgatctttgtggccaacaataaatcggtgaattcccaatttcatgatcaggctgtcaatgaaagaaacatatctttgacttttcgatttcctcaattcgcacaactgaacaggcataccatgggtatctatgctagctgacgagctggggctgacccaaataggccacgcatcactctcaagcaggagcaggccacagatattctcttcatcgctttgatccaatgagagatattctaacacttcggtcatccttgaagcacacaataatgtaagttcaaaaggttgcagatcatcctcaagtaggacaactgacctcaggaactgagccaaagtgcttgctgaactcttccggacatcatagtttatagatttccagaattgattatccatcttagagcaaacggcatgaacataatcacacacaaaattccgatcctttctcttctctttggactcagatagcgtattgtc

SEQ ID NO: 73221 - DNA, 590 bp, Arabidopsis thaliana landsberg
  unsure (1)..(590): unsure at all n locations
tcccgtaaaagtagtcagtaattcacccaagcattttctattcaggtttaagagactctagtaaaacagaacgctaatccaacataggcactccctagccaaaagaacagggcagtatttgaagtgtatcattaactaaaaattaaggttacctcgtcaacatattcgtccaattgaggatgaacaaaggtctgagcgaacagaacacaaggctcagatcgtaccatgcctcaaggattgattggtggtcttcttgaattgctaggtctcttaggtcttcataaaattgattcagactggttgctaaaatctgagatttatcaaatcagaaatagagcaatcagagacaaatacacaactttcgcatatagagctcacaactagctactaattgacatcactcagcnaagcccgtttctgagggtaagcgaactacgcaactgcacagagcctctcgacaactagatcacgacttaaatctatatgtacagtaattctacaataaaacggggacagttaggtttaattctctctactgtgggtgggatcaacacagaccttagaaaagggagaaactcgcgttagaaacg

SEQ ID NO: 73222 - DNA, 519 bp, Arabidopsis thaliana landsberg
  unsure (1)..(519): unsure at all n locations
ggctttcggcgcggccgttttatgcgcggtttctggcgttatctggtacggaatcaagcgccggcgaatcggccatgctttggccgacggccatatcgacgccgccgaatacgaacacatcacccagtccagcacttggccgaccgttttcgctttcacgctcgtcgcttccgtcgttcttatgggcttcttcggcgcgcagaaagttttcgccggcgaccagcccgacaagnnnnnnnnnnnnnnnnnnnnnnnnnnnnnnnnnnnnnnnnnnnnnnnnnnnnnnnnnnnnnnnnnnagcgccgatcgcatcgagaaagccgcggaccgcatcgaagccggcaacgccgaaatcaaagaagcgctggctttgctgaacaagcgcctggagtcgatggataagaattcggcggccatcgagaagccgaagactccggaagactattattacaacgcccgcctttttgaattgaaaggcgaaagcgctgaggcgcggcanagctacgtcgagtatatgaa

SEQ ID NO: 73223 - DNA, 458 bp, Arabidopsis thaliana landsberg
agccggcctggcgtttctaccaccatttgcgcacctacgctcattgctccggcccgcgcggcccaggggggcaggcgcactaccgtgctgagtcacgacggcgccgacctggcagccgccttgcagacgatccgcgaaatcggtgacgaccgggccatggacggcgccgtcgaccgcgcctttcctggcagcagcatccagatcgccgacgtcggcgggcggtttgagctgcgcctgcgccagcccggcctgatgcggcccctgcgggcggccgaagtctccgacggaaccctgcggtacctgctgtgggtggccgcccttcttaccccccggccgcccgagctcctggtgctgaacgagccggagacaagcctgcaccccgatctgaccgggccgctggccgacctcatcatcgccgcctccgccagcacccaggttatcgtcgtcacccatgccca

SEQ ID NO: 73224 - DNA, 434 bp, Arabidopsis thaliana landsberg
  unsure (1)..(434): unsure at all n locations
caactactacttattaggtgcttgatctcctccattnnnnnnnnnnnnnnnnnnnnnnnnnnnnnnnnnnnnnnnnnnnnnnnnnnnnnnnnnnnnnnnnnnnnnnnnnnnnnnnnnnnnatcttcactcttgttactgtacttgttgtactcgacccacttcttacatcactcaacaacattattcccttgtttgtactttgctcttggttgtcttcttgatggctcattatgagattgtttctgtttggagaatttaccaaattgcccatgtcttcttgataaaataggtgtagttgttggcccatcattgtcatcatgataccctgatgaggtgtgagaagttggtttgttgatgtggtatacggaagaagactattgatcatgttgttatgtgatgatgatgatggggatgctgttgatgatgatgtacc

SEQ ID NO: 73225 - DNA, 2917 bp, Arabidopsis thaliana landsberg
  unsure (1)..(2917): unsure at all n locations
cacacctgtgctttcagatattcttccatctttaaacctccttagatcagacttctcaccccaaaacttccggaatctaagtgcctagaccaatatattacttagtaccacccaatgagacagcaattattcagaaattttggatatacctctatcttgttttcagcatctggcccaatatcaactgttctataagccttttcagtggagctgacagatatgccaatgaaaagaggttctctgtcaagaactgacaagccctggttcaatggcagttaagagtattagaaaagagcccacttcgttgcaatgaaaagtaaaattcatcatcggaaaaaacttacactctctacatgccaatcttgattggtatttctccaaactacacggattgatttagctctgtcacctagtccttctaaaagcaggctatgcactttctgctcatagagtctccaacattccttgtccaaacaaaaccctgacagagacactgctgttttcccctttagctgtaacctaagagaacttatatgtcaggatagctagctgacaagggaacaaactagctcagaaaaaatactatcttgaacctgtgacaaaaatattcctatctaaattttttagtatcatacttccacatgcataaaacggtttgacgaaagtaagaaataaccagccacttccataacggtttgacaaaagtaagaacataaccagccacttctatccttgacaatacaatacatatcaatcaggagaagtgagaagtgaagcttaccttatgcagtggtcatacttaacaggatagtcaatcttagtcataaaaatctcctcgaatcccccatctctgagtttctccatacacttaagcgtcaaagaagcctcatcttgaagctgtgctgaccaacaaacaaattccatgaaaaagtcactaacacaaccacagccttggatgaaatatcggataatcgaaaaacattgaattaagagtttttctccagcttcatgtacctccaggaatccaacactggtcatccggaaagccaagttcacaaacgtagatgaatcgcatataacaacagggaacaactctctgaactgcatcttctcctgaattttaatcattgataatcagttaacaaaagtatgcagagaacaggacacctgtatgcgcacatgaaaatttctttgatagaatacttgctaaaatatttgtcaattagctcgagtactataagaaaacttattgcctacatatggtttttcaaacattatcaagactatcatacacgaaaaatctagtgcctacatatggtttttcaaacattatcaagacttctatatgtagtctttggattatcagaagatgccttatgtctaatgttttatactacaataacagtatacaccagcagacgaatccagtagtaccagtgcatagtcatactgatacgcaaaaataaaaatgaaacagacagaaaagcaagtagactacacaccttcttcgagacacgaatttcactctgaggcggaagatacaaacctctctgccataatttagaagtggctgccaaacaggattgacatattttggttattcatattgcagaatcaaatacttcaaatgcaacaaatagatgtangctgtactaacatacctatgaaatccaatgtcactctgaatatatctaatgcacttagtgccttgttaattttggaatgggttgcaagatatgaaagtatcacagagattagaaatccgttcaagcaatcgtggacgtatatcgagctcctttgtcttgcccatatctgcacacaaccagagacgtttaaggatcccaatatacacaggtaacaatacttgttaactatccataccttcagcaaaatcaaagcatcgctcaactccttccactcagagaaggttttcttgagaaactcagaattttcctccagaaacatgtcctccaatatgcttgagttgtaagttggcgtgggctcagggacaccatctttatcatcaagacaaatcagaatgtcaatacaatgatgcctcaatatatttatccaagaagagttcaacattcttgatataaacatcattacctgcagttacagaacggacgttgtttctgctaatactcaatttggcaacactaaacagtgatgttgcggaagggattaaccttatggaaaatccaggaaactgatcaagtttcttagctgcaaacacacacattctcaacgtaaatataattgtcaacataaaaagtactatttctctaacccaaaaacaagagcacacctgggaaaacaacaaggactggcttcctagcttcgttatgtaaggttgaccatacaaccttctcaatggacgatgacgacaacaaatgcttttcaataacacaaagatatagacatcttttggcatggtatctatgattcatgtaatccttctcataaaaacattcctgcaagaacaattatataattacataacctgtaagacacgatttaaaacttacgaaatgagcaataaatacttactttaggcaagtgaacaagaagatcaacagaagtatccggctttgccatgccacaaatggagtaacttccacagagattgaaaccatttggcttcttaaaactgaactccacttctttatctgccccaatgtcctcaacaaaactaggagctaactccgaggtaacctaataaaaaacatgattttacagttccttaactgctaaaaaagctcaaatttttcaatttccagagaagaataacatatatagatgcacacaaaactacctgaaatttttcagggattccatcaatagcttctttaatcgacgaaacggtatcatcaacaagcttcctgagagaatcgtaatcaaagcgagcatcttttaa

SEQ ID NO: 73226 - DNA, 443 bp, Arabidopsis thaliana landsberg
agcaccgctgatcgcggacgctacaacctgcacgttttcgtttaggccggctacggcggccgccaagggatcggggtacgcctagcgtggcctgctcggcaagcagctggccaacggtgctacggacgaggaattggtcgacgcggagaccgatgagggcatctcggagaacctctacaccttgtgtcagcccgacccggacctggggatacgcacgtccggggagcaacggatgacgggacttctgctgtggcagagcgcctactcgtagatgtggttcaccgaggcgcactggccggcgattcggcgggacgactttctgcgggcactgcgcgactacagcgtgcggcaccggagattcgggcggtagcgagccatggtggtgttgagggcgctggtcttcacactgagttggtggctcgggatgtacctgttggcgcgcg

SEQ ID NO: 73227 - DNA, 602 bp, Arabidopsis thaliana landsberg
ctaacattattttcgttgtcttggttccaaaccctttaatacttgcaaaattacaattttttttaatctctataacttatgaattactctacatccaaatttgtgatgtttcactgtctaaaatcatctgtatgatcaaaaattcaaaagttgatattcagttactagagttagttataaaaaaaaacttttaccgtcactgttctggttcaacccagatattgttctcgttcaaagcagctaaaccggtgaaaactgactcgttgctgtgattcactcaaactagaccggttttatttgactggtgttttttgtgtgtcatatatgtcggaaacagttttgagtggtccacgaacaataatggagactccagctgtccatggaagatttgaggcagatattttttgctcaccgacctcaaatctcagagacaaaagttttgtccaaataaatttcatttttgaattctgattttgattatttccgaaattcttttttcttccaagaatgaagggaccatagaatcgtccaaaactgttgaaacttgaaagctttccaattttgctcatctggggttctcgattgatcggttaccagcaatg

SEQ ID NO: 73228 - DNA, 590 bp, Arabidopsis thaliana landsberg
cggagcactaccacatcacctgcatgcttacggcttttggagagtcctgcgatcaggtcgggctcacgatcaaatacgcgtgcggttccttcaaaacgctcgccttcctttccgctgatctttgccacgctgccgccttcggcgagattgccgtataatatctgcaggtgccccgttgccttcaacggtgtttccaatggaacgataatatcctgcctggtaaaatcgagatcaggagcactggcaaggttctccgccactgttttgccggttactgtaaggcagtcgccatgcagtaatccttttcctaataaatatttcatcactgcaggcacaccaccatgttcatgcaggtcttccataagatatttaccgctgggtttaaagtcggcaagtacaggtacacggtcactgatcgcctggaaatcatcctgcgtaagtttcacgcctgccgctttggccatagctatcaggtgcaacacggcattagtgctttctcccacaccattaccactgtgatggcattttcaaatgccctgcgtgtcatgatatcttttggcttgatatcttttttccagcatattttaatg

SEQ ID NO: 73229 - DNA, 1317 bp, Arabidopsis thaliana landsberg
  unsure (1)..(1317): unsure at all n locations
ttttaatcagaaaatatagttagatttcaaaagaaagtaaaacctagcaaaagtaatcaaaatcagtgttaaaattcgtaataagaggacatctcttgtcttcttcaataaaaaaatattcaacattttttatgaagtttaatattatatttaggatttacctttctttttggtcaaaatattgatgatttatcttttggttttataatatttctataatttattctatggctttgactagaatttaataaattaacatcatatgaaccattcaaacttactttaatagatcttccacaacattaaagaatttatcaatagtcttccataatatatatttttttaatatatcttccataataatatattatatagtaaataatatttagcaaatattttatttaatagttttttacttgataattttagtcatatggtttcatcatttaatacgtttggtacaaaaccaaatcaaaatggaaacaaaagaccgaaacaatttcggttctaacaaaaaccagatttaatttttggtatacaaccaaatcaaacggaaactaaaatacttggtataaaaccagaattttggttcggtataaaagtgggaaataatagaccgaaacaatttcggttctaataaaaaatcagaatcgagatcactgcaaaccgaaccaatgtaatcctcattcgtcattgtctgactctgagagaaagaactgttccgttgacggagcttgatgccccaaccaccgaatcctcatttctcaatagaaaaaccctttctttgtgatttcttcgttccacgaaattgtaagccaaaggaacattcatcgatccataatcaatatgcacttgcttctaacctcgttgacttcttcttcttcaacctttttgttactcgattaccaattcattgcctggaaattcttgaatcctatcaaagtcttctcctttgatttgtataataaacctaaagtgtctcacagatacgataactcagtttcctcttaaggtctttcttctctcttactaacatttacttttgggttctgttttgatgggtttgacgaaaactttgcttttcttggtgttttgttgtcaaagatactgtagcatggacggtgaagcttttgaaatctcattacttgatggagaggaagacagatttggaggtattgtggtgaacttgatggaagtggaatcaatgactgttgatgattttgatgcaaagcttgatgtttcacttaacgcttggaaggatcaggtattaaaaagattcaatctttccaagtttctttaaaatgngtcgctctgaat

SEQ ID NO: 73230 - DNA, 477 bp, Arabidopsis thaliana landsberg
ctgtccccattccctccattattactgctctctatcaaaaagatacagatttttttttttttcttcttcttctttatttttgtgtggtgtgatcatgctgtctcaatccatctttctatattctcaaaccattatttttattttgtaaatttacacgagtagttttttactttttgatacagtttttttgaaggtaaagaaaaaagttatagaaaaaaaacagagagatgaaaaatgagttaacatgagagtggcacgagtcttgtcgttgtaagtacaaaagcctgcacatgcttttgattgtaagaaaaataaagtttgaaacaaaagaacaaaactttgagcgaccctgtttaattgatagtgacaccaaaaatgaataatggcttatcggattgtttttgtgggcgccgcataaaggattaaacataaaaacacacagaggctctcttcttcttctcctatcaattacttatg

SEQ ID NO: 73231 - DNA, 445 bp, Arabidopsis thaliana landsberg
  unsure (1)..(445): unsure at all n locations
nnnnnnnnnnnnnnnnnnnnnnnnnnnnnnnnnnnnnnnnnnnnnnnnnnnnnnnnnnnnnnnnnnnnnnnnnnnnnnnnnnnnnnnnnnnnnnnnnnnnnnnnnnnnnnnnnnnnnnnnnnnnnnnnnnnnnnnnnnnnnnnnnnnnnnnnnnnnnnnnnnnnnnnnnnnnnnnnnnnnnnnnnnnnnnnnnnnnnnnnnnnnnnnnnnnnnnnnnnnnnnnnnnnnnnnnnnnnnnnnnnnnnnnnnnnnnnnnnnnnngctcgcgcacagagccatgcaccgcggttatatgaatataacaacgggcaacccgntcgactttattataatgcgtcttcatagtgggttgtgcacgtttacttagattactcgtatcagtgagtacataacaacttactgttatgagctcgagtccagctgatcgtatctaccatgctgctat

SEQ ID NO: 73232 - DNA, 139 bp, Arabidopsis thaliana landsberg
gcttctgctcatatcaagtggacttctgtccgtcattttcaaactttgctcattctcttattaagcttggctttaactaattggctcgccatcccacacatccttgaactgctgaatcacatcctaagcactattactg

SEQ ID NO: 73233 - DNA, 457 bp, Arabidopsis thaliana landsberg
ccaaaaccaaagaattactacaaagtaacacatacccggatattgtaaccacacctttacacgcggctatatcagatgttgctagttcgatacacacacggcacaagtaagcagattctgcatcgattttacaatttgatcccatagaaaaacaacaactattaatttgtgaaagcgaaccgaatgaatatgctgatgggaagactatccggtttggaaatggcagcattataacgtggtttttttctattccacaaacccacctacaatttccattttgcctgtttctctggcaccaattacatcaattacgctcgatacaaaatttcgagctctatcttctctttggaccgaataaaaataacaagaatatggcttgcctgtggctgtatacctacggtcgaccgaggacatacccaagctcgcagagacggagaggaacgaacatcagcgcttg

SEQ ID NO: 73234 - DNA, 373 bp, Arabidopsis thaliana landsberg
  unsure (1)..(373): unsure at all n locations
ggacctatattatatgctaggagtaccactttgctatggggggtcatgctattaaatatgaaccaagatacctatcgttgttgatcatacagaatcccgtgcgggaaacannnnnnnnnnnnnnnnnnnnnnnnnnnnnnnnnnnnnnnnnnnnnnnnnnnnnnnnnnnnnnnnnaactcatgtctataagatccttgatcaaaatacgatctatggcgctagcccaagggtttttcagttataggaacgacaccccgagattacgtttacacatcaacgggaaataaagaacaacattgcttttgtcattcaccccgtgcctacgggcgttccaaacgtacctggtataagtcctgtaaaaagaggaacatc

SEQ ID NO: 73235 - DNA, 594 bp, Arabidopsis thaliana landsberg
atcgattataaggtcgattcctatgatcaatctcccctgtgcatcggcgctatcgttacaggagattttaggctagattcgctcacagacttgctttgctcaacgtggaaggtatctcaactactaaccattatctgggctatgcagaaaatcctggagcgggaactaacgcgggttatagcggcacaatttccattgatgattccgccgactggtctttaacgacttccatcgcggattcctctttttcacgtgaagctgtagccgtgttcgattgcaatggcgatggattgcaggatgctgtggttcctcacatagagcttggcgctatgacgacttggcatttcttcttaggcgttttgatcaataacgggaatggattcaatgccgtaagtgctgctcctagcttcgatcaagattttggggctacagggacctccgtcagttattccattgattcagccgatttcaatgatgatggtgccttagacgtcgctgtcgctgcgtatagctcgtctgacgcttttgatagaacttatatttgtatcaataacgggacatgcggaagttttgattgttcgactgtcatcaatc

SEQ ID NO: 73236 - DNA, 551 bp, Arabidopsis thaliana landsberg
ttatatatcatatatccccaagattttcaacaaataatttctaacattttaatactggaagtctggaattaacatcatgtgagttatatatgttttttactgaacatgaacctatattcttactagttattgaaatcattactagcttttatatatcgatttgaaaagaaaatactgatttgagcaaaaatttatgttgatgaagaaaacgttcaaatactggatccagctaaatctcaaattcaaaatgtgaagccagataagatttgagagatatgttagattaaaggtaattaaataaaaggggtgtatatactgtaataagacaaaccaatgtttcattattcttaattaaatttcatatttattgttttgagaggtgggatttttctttgtaagatgctacttttctatataacatgttctaattaattatcacatgacaccacaacaaaattaaatttaaattcgaattcttcatataatagattggactcccacataattaaaaggcattgtttaagaaagaataatcagtttgttataatagt

SEQ ID NO: 73237 - DNA, 392 bp, Arabidopsis thaliana landsberg
  unsure (1)..(392): unsure at all n locations
aactccgaacgatgactagatgtatcgaaataataaaaatacatgatattttacgatctattgagcacccacagggaccggggnnnnnnnnnnnnnnnnnnnnnnnnnnnnnnnnnnnnnnnnnnnnnnnnnnnnnnnnnnnnnnnnnnnnnnnnnnnnnnnnnnnnnnnnnnnnnnnnnnnnnnnnnnnnnnnnnnnnnnnnnnnnnnnnnnnnnnnnnnnnnnnnnnnnnnnnnnnnnnnnnnnnnnnnnnnnnnnnnnnnnnnnnnnnnnnnnnnnnnnnnnnnnnnnnnnnnnnnnnnnnnnnnnnnnnnnnnnnnnnnnnnnnnnnnnnnnnnnnnnnnnnnnnnnnnnnnnnnatgttggaacgcaaaacaagccgcgcacttttg

SEQ ID NO: 73238 - DNA, 449 bp, Arabidopsis thaliana landsberg
ccaaaacatattaaaaacaattagcagtcttttaaatttatattttgcttagatgattatacgttcgtaggaaaggcttttgtttccaatgcatgttaagaactaagaactcgtatccttaagcaccaatgctttatgcttaatgcctcattagagatataaactgagattgactgtgttctgaatcatcataatataaggcacacaaagaacagaacaggaaatacttagcaatataataggtttccaataaaagtgaagaagaatacaataaacttttataaaaaaaaaagtatttaataatttcacactcgaatcaaccaaatgtaagatgtcttgttcatttacacatcacatgagtaagtgggatacagattgcaattgatgaaattttggatcttaacttaaaattattacgttactatatccatcgagtttaagatgttcat

SEQ ID NO: 73239 - DNA, 987 bp, Arabidopsis thaliana landsberg
  unsure (1)..(987): unsure at all n locations
agaaattgtgttattatggatcattggttgttattaggtttaccaagtacatgagactagtctcattgtagataatcttttactattttttttctcaactgattattatggatttatgctagatttcttcttcttcttttttgtgtgtggnnnnnnnnnnnnnnnnngaaatgatactataaaagttaattaatactccaaatttgagatatcttgtaagatttgatatacacatagaaacaaaaggttattacataatacaaaatttgcaaggtttctttacttcataaagagaaagacaccaaaaaaaaagtaagtcacaaaataaaaaagacagctcgacattcatcttcctcgttaatccttcatcttctctcaccaacctccaccaatctctctctctttcttctctgtgtataggatacgaagaagaagaagaaagaaagaaagattgtgaagtgataattacaagccaccaactaatatcctttcttcaattcaactctacgcgtcgcttagtaatacccaaaaagttttaatcttttgagtttcccaattattttccccaacagaaatatcattaattactccatttactaatccaatttctaggttttctctttttccccctaaagattgattctttatagccattgattttgacctctccatcactgttttcagagagtacccatcactccaagatttgattctttggattatcctttgagaataatggctaaagttctaaaatcgagccaatcatgtcatttcccttcaccttcaagctcttcttctacatcatgtggaggaggcaatgatggtagtaatagagacccacattctccttttaacatttctcgtcgtgaggaagaggaagaagaggaagagagaagcgagaaagagagagaaagattcgagctttcatctgcattggagattcttgtttctgctattagaaggtctgtgattggtgggtgtgttggt

SEQ ID NO: 73240 - DNA, 472 bp, Arabidopsis thaliana landsberg
tgaatcactgttttagcataggggaagaagtggcgggcatagttcttaggctgagtcgaacacataacatgttggcttatgagactgcaaaatactgagcttgcttctaattgcttgtaaaagctaacatggtgcttacaaagaatgaaggatatttttgttgtgcatgaactaacaaagaaacacttccttatgcacagaaagacaacggtggtgctcgcacttatactatatcatccacataagatatgtgcgtctttgacatacgaacatctaacataggcgttcttactgcttatacaactggatggtgaacatgggaaacacaagattctatgggtacgtctcttgtaacagagcaacattggtctatctgtcgggaaacaggatagtgctctagtacttatacttaaacgttcacatgacaaacagggatattatacttccatatactaaccaagctttgtatggt

SEQ ID NO: 73241 - DNA, 279 bp, Arabidopsis thaliana landsberg
cctgaagaatggtccgattggtacaaactgctacactattttttgttgcttcgcgactgcttccaccctggggtcggggtcccttatactcgctgacgttatgaacaatggcaccggttggaacgctcttctacaagaatgattgctggaattacttttgtaaacactattcccgctgattaggaaacttatgctggagaacttaaatgataatttatgtgggggtgaattaaaaaaaaaagaaagtttaacaaaaaccctagcctcactttgtttcac

SEQ ID NO: 73242 - DNA, 562 bp, Arabidopsis thaliana landsberg
gatccaccagtatcaaacctctttcatctgccatttttgttttcttctgaaaaagcgctctggtatatggttcgattttttcataatcctcttttgttataagccctttagcaagaatatcttctttcgaaatatcctcatcatgtccttcggacgctttggtggtaggggtaataatcggggagggtagtttgtcattttctttcaatccttcaggtaaagctacaccacataatattcttttcccggaatgatattccctccaggcatgccccgccagataacctctgataaccatttccactggaaaagcaatgcatttcatcccgatgctcacattgggatccggaacagagaggagccagttaggaacaatatctttcgtcgctctcagaaatttagctgctatctgatttaaaacctgtcctttaaagggatagcctctggagcacaacatcgatgccgagatccgtcagatgcaccaaaccagtttgctccagggaataacatctctactttgccttatagaatgactttgtctggaagttaaatttgttcttta

SEQ ID NO: 73243 - DNA, 1258 bp, Arabidopsis thaliana landsberg
ccatcgttaagagcttaatcacattcttgatcactttcttattcgtttctcctaataccatattgcaacagatgagattgcacctttatcagataaaaaatgagagagatgaaattgccagaaataagaaagaacaaaattgagggaaatggacttttcaatgagtattttttgattagagatgaaaagcttctgttcccacgcgccaccacgagcctaccacgcgccgccatgagcaaaccacgttgaatatcaagaacggcttgtggttccccactccgtcgttcccttaccacgtcatcagcgtaatttttcgtctctctctctatctattcctgtaataactttttttttgttttttgctaagataacaaatctccttgaaacgattttgacttttctcataccacatcagcaaacataattgaccaataagaatatcagaacgcaccacgtcagagaaaaatttagacaaaatccaccaactaagagagtgccacgtggcattataagtcatacacgtaacgttggcgaagcatacaacaagcttcatgcctatacgaaggaagattgtagtttcttacaaaatgtgtgactctcaattaggaagattataatatttcattggtcaacaacactgttttttaacctaagaaatttatgatatctttattggactcatttctctcaaacgggatcaagcggacagtgcaaggtttaacttccttcggaagaaccgaagaactgtcaccatcgcaccatacacttagtcgaagcacacaataacttactacaattccacgaattcaactacttaaacttgattatacacgagctaagaaaacaaaataaacactttcttaatttttatggcacaaaacaattctacgtattctacaacacacgaacttaaatattaaatacacatgatatggctctgctactaattgtcaagtagggtctattacaaattcgcaagtggagtgcttcattggctgcccgtgggttatctctgtgtctggagcatagatattttcatttcattaaatgtttctcgttgtcatttgtcgattgttcactctcttctattttcttatagctttcaaggtacgattttattattgtgtttaatacgggacagtactacggccttaattgatgtcctcgtccacgcctgccttgacacggatatggacttggaggtgagttctgatatgagcctttaccctccagtttctagcttcacgaccacattcta

SEQ ID NO: 73244 - DNA, 546 bp, Arabidopsis thaliana landsberg
  unsure (1)..(546): unsure at all n locations
cggcctgctccggttttttggcgttctgaaacgcataggcagttttcattacacctgtagtatccatagagatatggccggtaatccatttgtttttgatgatagtgttgatgtactggttactaatctcaaaatatttggcggcatcatcccatttcttattattgaaattcttggtgccgttttcgaatgtggatttatacatatcaaaataagcgtcggaacctttggatttcaccagtgccagtgagggatctatctcctcgtattttttgaatgccgcggcagcatcgtcatagaggttgggatatttctccagcatggccggtgttttggagagtgcggcataaatgcgcgacttccagtaccatgtttccgggttcacctgtaatttgggcgtctgcagcggctttatccaccttcgtcttggcttcttcatatttgccaaggatcgcataactttctacgtttttaatgtcctgcgccatcgctatctgncaagtggcaatgcccacagccagcaatagaagtttctttcatagcggg

SEQ ID NO: 73245 - DNA, 653 bp, Arabidopsis thaliana landsberg
  unsure (1)..(653): unsure at all n locations
caccccgacgacgtcgtgagttccggcggaagcggcgacggtggtgttatagctaccctgtagaagagtgcactttccaaagcgctgtagcagcgcctcggttcgcttgttcaccttcttaccgctgtgagtcgtcttggccatgtccatcgaaggctcggcgagggcataggcaaacagcctcgcccagccttgcgctcccatgacctccgagtgcgcatctctgatggccgcgttccatgcaagtgcatagaacgccctgacggcggcctgcgtcttggggccgtagttgtcgtcaggtactaccgaggctgccatgaaccccccggctttcagggccgcttggaggttcttggccgacggcttgttcgcgtcgggcttcaacccggtcgggaacggtggagctgtgtacgtcatcacgcccccgtcgcgcagtatccggcaggcatgtggatgtggccacccgcaaagatcagcgaatagttgtccggacggtcaccggctatgatgccggggttgaccgcctcgacgtccgccagcggtgcgccaactgccgccgccacggcagagaccgtgtcgccgtgcaccacgatgtgatcacacttcgnccgagcgcggcccggtgcccggatcgggccggaggggacccacta

SEQ ID NO: 73246 - DNA, 577 bp, Arabidopsis thaliana landsberg
ggcgtgtggcgaagattgacggaggccgcgtcgacaccgtgctcgacggcctgcaaaaaccgcagggcctggtcgtgcgcggcagcaagctctatgtcgtcgacgccggcgccaagactctgatcgaatccgacctcgccggtggcgcgcgccgggtaatcgcctccgggctgccggtcggcgcacctgccggcgtcacgccgaagttcctcggcgcgatcggcgatatgtccggaccgatggggccgtttgccggcgtcaccgctgccgtcgacggcacgctttacgtggccggcgacgccgagggcagggtgctggcgattcgacccgcataagcgaacggtgcggctgtcttgcccgaaaaggcgccgcatcggtcctgaattgggacccccgtcattgcgagccgcgaagcggtgaagcaatccagcagcgcagcccgatcgagcgctgtctccggattgcttcattggcctgtggcgtcgttgcaatgatgtggatcaacagcgccggcaggcctgctaaccgacatcgctgaacactaatggcgaatgtgtggccggccgatgcggttgac

SEQ ID NO: 73247 - DNA, 3766 bp, Arabidopsis thaliana landsberg
  unsure (1)..(3766): unsure at all n locations
tcagaatatgatccaaggtcaacgctcctctatatatatatacgtacttaacattacaatacttttaacattcatgatacattataacacatatgtaaaggaagatgcatacctatggatgtaaatttcagattgagtagtggagaaatagctataaagctcaggagggatagcgccatggctcaccagagctgtatgttttgtatatgcgtacatgtatatctgttggcgctatccatcctgagttccatagcttcttcttgcttatatgtgattcctacttcattccctccttcgtttatcttcttgtatacaagatatggtaatgggtaagtttattatttgcatgtaaatattttacctttttttatatagaattgttgaagttcaaatcatatagaaaattgtgtcgaaagtgagaaaaatcgcaggtattgtcaatttgaggttaagaacccattaagtattaaatagtgtggtcttacaagttacaacttacaaatatttggatttcacacatttaagcagtttgttagaattacattgttactgccttactttttttttttttttttttttttttgtaaatttatgcttaagactactggtggacttttattaagaatatgtatattatccaatatgtgtgtgaaagggatggtaaataagtaatatcgccatgtgctagagccagccagcgattgagctgtgaatatgcaatgttagaagatggattctctttgtcgaattgagaatgggaatcttgaaactaatgttacaggattccaaatttcctggattctttctctcgtccatattttctacacaacaagtcattaataaactttctcttgggattttcggcattagtcttttttgttcctataatttcaacataaactttcgttacatgtaacacattaaagagttggccaatccggcacttgaccaaaaggtcatgacatatacacatagagaactttacgagacacccttctctttagtccttgggatccagattgaacgattaactatttattaacaacgtcttttatccaaaaaaaggccactcatttgtaaaaccctaatcctaatcatagccccagtgagtgaagttggcaataaaatcatcaagttgatctttgaaaggtcactgcatacttcagatcaactgatcagacacaagtgcctagccatcccccactcctgccaattctcgaggaacacatgttgctataaaagaagtttgcgagaaaaaacgataacaactccgaaaattgtaaagagaagtgtggttgcctaaatgaatgcattacacaatacaacatgaaaacatacgactgttttgtttgtgttgaacagagtcaaaaaaagaaggaagagaagcaaaaaagggacttctggtgttgaaagaagtaatcaagatgaatgcactcacctgaaatcatcatagcaccaatttgcaatgcattttgcagttaaatatcagcttccttcaataaaacaaaaaacaaacatttcacatcgtgaaaaacaaactaaaaataaaccggagatgcatgaataatagatccccaaagaaacagaacaagtagggagaaaaaaggggtaattttgctcaaggtcaaagtgaacaaaaacctacctctttttttgtatctccaatatgaggattcatagaacattttactaaaattccctccttaacacacacaaaactcttagaacacataacagctgattcattcattcctctctttctctcaatatggacgagaccggtttcccccatggtggtttctgtctggccctgaactgtagttgtctcttcttctgtctcccccaccaccaccatagccaccaccttcttcttctttaccccgacctctgcgacattcacaagtttgcaaggttcatcattattagatcagacacaggggtntggattaaaaccagcttactacgccagatgaagtgactcaacacacaacaaagacgagtcttatagagcatggaaaaccagataaagatacaacttatatggggaattactaggagcttataagaagcatgaacaaacaacagatctcttcacaaccaagagcagccacagctataggttacaagataactacatagatttatttcctatggcatgaacatagacctaaggcataatttgatgacatacgaactcccaaccctttctgtcatacccagatgagtgtacaaagcaaatccccagtaggatacaagatccaaacagtcttcagagacaaggaacataaacttagcattgcaaaaactcatattccctactaaaattataaagctaaaagcctaaaacaactagagtacaaacacctataagatggagcaggtggtaacagctaaatggtaacaaaaaagaatgctgataaatgatcaggacagctacctctggtcaaaggtaggagcacggggcgcagacttttctgccatcgttacactaatcttgttccccctcatttcgtaatctacaaaacaatccaccaccattcacgaaacagaacttttaaacaattttaagctagacagcaattccatagtacatactgttgaaaaagccgcctgcagagtgtgcagcgctgggatcttcataagccagacaggcgtcacctttatagttacccttctcatcagtgtaaatcttaatattatagggccactgatctttgtaaccacgcttctgcttaattcttccaacctaaaatagatccaaccagacacactttatcagcacaccaataaacatgtacacaaacaagaacttaataacttatagcaagggaaaggcttattccaagatataaaacacaacagaagtaaaagaccagtgttattacttggccaatgccaccaaagagatccttgagttcatcagttgtcacatccggaggtaaattagagatgtatattctagcattatcacaattatcatcacaatcagcatcgcactgcttgactttttcagtagctgcatcttcataactagcttcctgccgtcgaggagcactaccaccatcatagccgccactcctaccaccacgaccaccagtgctcggtgcatcactgccataaccccctcgtggaccaccatatgacggcgggccaccagaatagcttgtaggcgggggaacagcttccattccataacccgtgggtggaggataacttccagaaccatcgtaggatggaatggctgcagcaggaggaggagcctgaccatacgaaccattttccctctgactaccactaccatagctaccaccactcctacttccaccatcatatctactactctcatagctcctaccactatcgtttctaccaccacgaccacccccacgatcactgtcacctccacctcggctatatccaccacctccacgatcattagcaccagaactagtaccagaaggagcaagtgcaccacacttgttacattcaactctccttgcaaagttcacgttcccacaactatacaaacagtttcgagggtaaacaatttcaaaacatgctcccacaaaggaattcaacagctaattcaattcattacatatgcagaaagaatggaatcccaaataatttgcaatcattacctggggttgggacaacgccaatcttcatcttttcctccgccgtcacttcctttttcaacctgatcaccttcttgatattcaccaccttcaccgtcttaaataaaaccgaatattttaatattgag

SEQ ID NO: 73248 - DNA, 497 bp, Arabidopsis thaliana landsberg
gtaggagaggtttatcgctcatcttctcatatttattttgtctaataaaaatttcatgaagaggttgggtgaattctgagtgtaaatgtccacaacgtgacaagtaatgcagatataaactccttctggaaaaatctttttatcgaagaggtgtacgcaatcaattcgccatcctgctttatacttaacctttcctaggatgtctttagctctgagaatgctcataatcaagaagctttcttgaatgccccacacttacatccgaaattgaagaggtctcgactctcacacttacagattgtcttatatacctttacattgatcaacttgtattcatcgcggaaaataaccgaagcaatagaacctggattttccttagactgaaagactgctccgtaagaaatcacgctaatcattttattaacggatgtaatctttccccgacaaccgatccattattaaggaaccccatcgggtttccgatgatctcgatttcg

SEQ ID NO: 73249 - DNA, 264 bp, Arabidopsis thaliana landsberg
agccggcccccgtgacggccgcggctgaacttttgttcgatctacaccgtgcgcccgggtccgggtgccggcgcttcttcacttgcgttgacgaggcgggtcatgggatggtctgcgcccggcgagggggtcgacgacaggtttcacaccgtccatgactggtgagccggccgcatgtttcgggcgctcttcacataaagaattcgcatgcgccgatgcgcttgggaaatccagcggacgtctttcgggcagaggccatctgtt

SEQ ID NO: 73250 - DNA, 545 bp, Arabidopsis thaliana landsberg
  unsure (1)..(545): unsure at all n locations
aaaacccagcagtgggcgaacatccgtgacgcccgtattgactttcgcaccttgacaacgtgcgagtcctgggtggtgctgaggatgttgagctccatctgcagcgcctgaatctccgacgtatcggtggcgccggcggctttattattcagcatcttcaccgccacatttttgccgcggtaggtcccccgatataccgtgccgaaggcgccgcggcccagggcacgatccagatggaggactacatcccgagccaactcgatgttcaggttcacatccctcggcacagggccgttgtgagccacgcgctcggagcttgatgatgaacctgtcgcgatatgaagagagctcaagcgatagcctcgcagcctggaggttcttgagcccgtgcctcgataccggaacgagcctcgacaacaacagcgatcagtggtcctggtggctcggaaggtaacatagcactttgggtccatcaatgcgcacctgtagatgcattgagatntagcagctcgtatgagacaggtgtatgaccttctgtcatgaga

SEQ ID NO: 73251 - DNA, 238 bp, Arabidopsis thaliana landsberg
acttgtcgaacgcctctctttctcgataatcgttaaaacttctttgacatatggcaactggtcggatccatgcgttttgataattttgtctagagtttggaataatcgatgacgaaacagagaattcggaaccaattttagatttatttttaaaactcactctctctagtgatcagttaactagtcccatatttgataccatcaccatttgtaaggttcgtgaacttgagaaccaccc

SEQ ID NO: 73252 - DNA, 418 bp, Arabidopsis thaliana landsberg
ccaaatcatcaaggcaaccattgctatatggtagaagacattttgtttcaagacaaaaatgtttccctaaaatgaatctaacttgaaatgaaagaaattaactaccaggtcaactgaatccactttggtatgatttcagtttggttctgtcaaatcagggaaaattgatttgaattgtaaaaacgttaaaataggattagttactcctgtagtttcctttggatcaatatattctattgaatttattcacgtttttggtcgaggaaaatgttaattaatccaaaattttccatcattttgattttgatataagtataactacctcattttattataggccagttaattttataagacgaaatccgcccacccgttaaagattgatataatcatatcgatttgatcgagtacatgcatg

SEQ ID NO: 73253 - DNA, 496 bp, Arabidopsis thaliana landsberg
  unsure (1)..(496): unsure at all n locations
tagcagaccagggcgaaggaataccgcatgatgaaaaatcctgatcttttccaggttttaccgggtgggaaggagaaatacacgtaaatcaaaaggaccggcctgggccttttctgcaaaaaaaatcatagaacagcacaacggccggatcacggttaccgataatacgccaaaaggaagtatttttgaaatcgttttaccgcaaatgccggcatagaagttccgtatgccatttgaccaaactgatctactcatgaagaatatccgttcaaaannnnnnnnnnnnnnnnnnnnnnnnnnnnnnnnnnnnnnnnnnnnnnnnnnnnnnnnnnnnnnnnnnnnnnnnnnnnnnnnnnnnnnnnnnnnnnnnnnnnnnnnnnnnnnnnnnnnnnnnnnnnnnnnnnnnnnnnnnnnnnnnnnnnnnnnnnnnnnnnnnnnnnnnnnnnnnnnnnnnnnnnnnnnnnnnnnnatccgggtacagaataacgatgtgccc

SEQ ID NO: 73254 - DNA, 480 bp, Arabidopsis thaliana landsberg
  unsure (1)..(480): unsure at all n locations
ggctgaagcatctgttcgccgccaaggcggagactctttgtcatggcgacctgcataccggttccgggatgggcaccgacgacaatacccgcgtcatcgatccggaattcgccttctatgggccgatcgccttcgacnnnnnnnnnnnnnnnnnnnnnnnnnnnnnnnnnnnnnnnnnnnnnnnnnnnnnnnnnnnnnnnnnnnnnnnnnnnnnnnnnnnnnnnnnnnnnntgaagacggtgacggagatctggcatttcttcgtggcggagttctcgcatctctggcgcacggagcgcacgggnnnnnnnnnnnnnnnnnnnnnnnnnnnnnnnnnnnnnnnnnnnnnnnnnnnggagcaggcgctgcaccggctgattcatgacatctgggtggacatgctcggctttgccggcatcgaaatccatcgccgcatcctcggcctggcccacaatgccgattttcgaaccatcgaagata

SEQ ID NO: 73255 - DNA, 262 bp, Arabidopsis thaliana landsberg
gtgtggcttgctaacgaggagagtatattgattcacacgagcggtatatgaccacgaggcgcgttcgattgagagctggggctttgacaggtcgttgtccgcacaaaaatatataataggttatctgtaaaccaaagtttccttaattacacaacataatctattatgaatgcaagttgattctccaccattatatacatggggcctgtttcaggtagttcaaacaaaaccatccaactcgaatttttaaattttataacta

SEQ ID NO: 73256 - DNA, 532 bp, Arabidopsis thaliana landsberg
gatggcggtgctcccgccgaagaagcgcagtttctcgtcctcgaggtcgtagtagggctcgggggggtttgcgcccgcgttcagcgccgccgtctccggctcgtagtcgaggccgccgctctccagcatcagcaccgaacggccgagcgccaggagccggcgcgccgcgacgatgcccgccgcgccgcagccgacgatgcagacgtccggctcgcgcagcggatcggtgtgggcctggtcgaggtcgagatgcatgggggcccgcccacccttgtgcgaacgcgcgtcaaacgcaggagggccggtttcgtacgccagtccggtccttcccgccgatcacgatttcgcaaccgcagcgtgtcggcccccgagctgcggcattcgggccacaccgtcgccgatttgcgacgcattaccgtgcggcaatgcaaaaggaacgccggtcacctacaaccgggaacgctgataacctatatccagcgtcgccgctggggcgcagaatgcggtggcggcgaagtgacgaaccgggggt

SEQ ID NO: 73257 - DNA, 177 bp, Arabidopsis thaliana landsberg
caaaacgctgaactgaacggaggttgagattaacggcggcgcgtgaaattcaggtcgtagatggcggctcctacgacggtgagacgtggtttatgtggacggtagacgagccaaaggattaaggctatgatacctagtatgacaaggatggtgaagatcgcgccgcagattgcgcgg

SEQ ID NO: 73258 - DNA, 2430 bp, Arabidopsis thaliana landsberg
catttgggcatatgttcgtaaaaatcgacctaaattctcaactcagagaaatactttaattttattattgttattcttttcacattactacgttataattaaattgatatctagaaatatagaacgggtccttatctagaaacatagacatatatgtatattaaaataactaaaaccaaaaaaatgctatatccaaaggctaattttcataagagaattaaattaactttataaacataactatagccttgttactactagtatagttgtgatatttgtaattgtgactgtcttgctcttactgcttaaattcattagaagggtaaatgacatacatgcagtttttgggttttgttttcacttattaacttttcttccgtttgatttttaatttaagttttcattcaattaaaatatttgaggaaccaatcagatttcgaaagaattggttcgagttgtgtagatgacataataaacaaaagaagtaacatcacaacttgagagcagcaattgattcgggtttgaactcgacccggagacccaaaacccgtctaacctcagctggtgtgagtctccaagtcatgggtcctgagttttctccccaaaagtccaaaatctctgagaccttttccaagttcagtatcgtcgccatctgagttaaccgagcaaacttatctctcactgttctttgagtcatacccgagaaatggctaaccaaagcccttgtgtctcgatcaagctgaagcccaccaagctggctaaaccgtttctgcatcattatgacttcgagtctcttgactatgaaatcaattatgagatgcagaaacgagtcgtagttgttggatgtcatcagtggttggagccacgcggcgtttgtttcgaccgagtggagaagtctttggacccacgggtcgttcacctcgttctctgcgtactcggtttctgttaactcgtagcttatggtagctacggtgtctagaaccggacggattcttggtgttacggttgctactagctgttccatgcctgagttgagtaactgcttgaacgtgctgcttaactcgcctagctcggatagacatgattttatcctctctcgatctgctggtgcaggaaatacctgtgattaggacacgagataaagaaagtgagaccgactgtctaaaattcaagagtgcaaaacgaccattcacagaattggtgcccctactcaaatgccaatttaaatggattttatgagacgaacagagcctgcattacctctagcaaacaacatagctgttctaaaatcgctatctaagttaacaccttaacacagagtaagtgaagagatatatccatatagagtcaggcaagagtaagcaagagaattctagtctcatagataccagccagttgttcctttagtatcctagataagtaaatcacctagtatcagaagtctgagacctaacctcaatacattgctccttgatttcatgttttagtttgagaatgtactcgcagctcacgtccatattgttcaaatgcagatgcaatctcagttccggtgttttccacacctataccacccaagaacaacctagcaccaaggttaggctctctaatcttctgttgtagagcttcatggtaatcattgcccaacaagctaccagcatagctcaacacagcaatcacagaacttatgtttgaagttgaaatcgctctcctcagacaactctgcaacacgtagaacacatcgtccaccattgaagtggtaaggctgtcaggtacatgctcatcgatcctaatagctttcctcacattctcaaccataaagaacccttctagtataacataatatctcgtcacatcctgaatcgctttgctaaaacttttatttctaaatgcctttgtagccgttggcaacaattcaggatctaccgacgtcaaagacttgatttttgacaccatgaactcggtatagtcctcacccaactgcatcagtgacagtatctcttccacatacagctcaacttctctcgggtctggtccttcagacgcaccaccgggaagaatattcagattgggagaattgttaatatcagacgccaatatagctaactttctaaagtccatgtacttcttcaagatcaacgaacctcttaaatcacattcctcttgcaattcacaaatcgcatacgcaacaccatcttctccacaaagacccctcaagatctcatcgttttcttcaatagccatgacaatatccttaaacaaattggttaagcacccaacgaaattaacctgtccgagtccttgctccatgagctcaacaacattttcatattccatccttcctctcaacgcaatgacctttttcaagtaaccaacgtaaagctgtagaccttctgtctccattccccagtggggaatacagtctcacgaatc

SEQ ID NO: 73259 - DNA, 309 bp, Arabidopsis thaliana landsberg
gcccgggggccggggctttctgatgcctgcgttccaagctggttttttcgggcgcggtggcctcatgcgcaacggggggtgaggaacccgcggttatcatatttatattgtgccccactacgtgtacctgcagtgcattcagcgcccgcgaaccgaactgcacgcagcattgttcgcaaggagttgcgccctaggaaacatgctgtaccgatcctgcgatctgggcccgtgggtcctgcgagggcggcagcggcaccgtgggctacttatccacgtgcggtggcgccagccgtgagaaataccgtccat

SEQ ID NO: 73260 - DNA, 632 bp, Arabidopsis thaliana landsberg
gccaggtcaggcggtcgctgacctgcacgagcggcagcgcgctcttaatagatcggcggcggcaatccgcagcgtcatctgcttttggtagcggcgcagcagatccatgccggcttcggtgtggccggacgggagttcgccgatgcgccgcacgaggtcggtgcgcaaggcgtcgcgatccggcaacgcgtacagcgtgcgcgcatcgaacagcgcgtcgagcagcaccggcgactgcgcgatcagctcggtcagccacggactcgccgcgcacagccgcacgagctgcgcgcgcggctcggcatggtcgtgcagcagactcagataagtcgagcggccggcgatcgcctgcacgacgcgcaacgtgcggaatagcgccagctccggctgcgcctgctcgcgcgccgcctcgaacagcgtcgcgagcagcgcgatcatcttctgcacgtcggcatcggacagagcgcgcaccagccgcgcattgcgcaactcgtcgatcgtgtcggcgaccttctgcggatcgtagacgaagccggccgagcgcagcccggcgcgcgcggcgtcgccgtcgacggtcgcgaaccacagcgcccgggccagtcgcgcatcggcggtgtcggcctcggcatggc

SEQ ID NO: 73261 - DNA, 346 bp, Arabidopsis thaliana landsberg
gcccggcgtgtccgtgacggatggatcgaggttgctttccgggcctttaaggatgtgcgcgtacacggggaccttggggtatactctcgggtggttgccgatgggcggcttgaacgacagcataatgtaggccgattctcccgtgcctaatccttgcgggtgatgtattccgagcggtgtttcttggaagtggagcgggtactcggcgcacaaccaaatccatggatatgggtacggagtggcgttcgctaccaccatgtagacatcggtcgtcggactgaaaagctgtctgttctttgtgcttcacgtgagggctgcgatacgttagctgcctgacgaacatggg

SEQ ID NO: 73262 - DNA, 264 bp, Arabidopsis thaliana landsberg
gcggatatttgtgtgcatcctgaaatgtgaaggttctcctaaagctaatgctgaaccatccacaagccgttttaagatattcgaccatgactccgctcaccaagcgtctttgtgcctcttcaggctttgatggacaagccccagcacgtatgagcaccttgctatgaaacggatagcaaggaagccctacttaacttttcgggacctcgtggtggctctaagtatttcttctaccctacacccgacctccgatcatattccact

SEQ ID NO: 73263 - DNA, 148 bp, Arabidopsis thaliana landsberg
gctactcacaaactaatctttatcaacccgaacaattatgagctcgaatcgttgctgacacactggaagtgacgtttatgcaaccttgtctcttgaaccgtatgattatcattacaaagctggaatccgccttgttgccaaaaagtct

SEQ ID NO: 73264 - DNA, 270 bp, Arabidopsis thaliana landsberg
gtgtgtcctacataagttgctatcacatcttatgtattggaggagttgcgcaatagaggatcaaggcaagtttggatttctattaacgtttctactctgcatttgcttacaaagtcattttcaaggttctgtggtcgtatgtcacttgatggctaccatcataaccgccatgtaaccaaacaattgccttgcggttacctacccatatggcgcatctaaccaagagatgcatcctaatctggcattgtcattgcctctactgatgtcata

SEQ ID NO: 73265 - DNA, 356 bp, Arabidopsis thaliana landsberg
  unsure (1)..(356): unsure at all n locations
gtcattcacaataaagtcatctgtgagtgaacaacgaggctatgttntatacaaggcanatacaatcaaaattattttaaaaccgattaatgtaaaagtaaaattaatattggtagaattagatcaaactagcccatctaacatgtcacaacatctgtaagtaacacatagtcttgaaaaaaaaaatcgaaatcattatagctntgaaaaattatttcattagaagacaatcttttggcggtttgtctctatatatagcccatcattttgatttgaagatataaaatagataacaataattntgcagagctacatgactgtcatatattcttaggaccctcccatgtcaatatatt

SEQ ID NO: 73266 - DNA, 1266 bp, Arabidopsis thaliana landsberg
gtacactacagattctttagtttgagagaaagtaccttgaggtttgtagatgatcagatgagcagacttttttgtgccctgtcttttgatccgaccagttgcagaaactgtaaggcaacaaccattcttggtcacttttagttcaacagtaaaagcaccatcctttttcgacgctgatatttcccgatcccacttgtaagactggcaaagatcaatcagttcctttataggactaatctgaaggttagacaagtttttgaccggatctagaaatgatagcatcatagtccagacatgattcaagttgaacccacaatcgaggaaaagagcccccaaacaggattctaccaagtcaccaagaacctgcataagaatataataactatattagctcttccactaatttacctatgtatgttcttatgtaattaagatattaattgactgcaaactaaaactaatgagatggggatagtctcttccattctcaacatctcgtatagataaaaagatattaaggtagaaaggtaacagagatagttcgagattctcaaaatgtaagtaagatgatatcaatacgagtgaatcttatcattgttttactatgacatgtgaaagggagatcggaacgcacctttgggcatcttggaccttcagattgtccacttgccaatggggaagatgccaggaaattggtataatcctctataacttcatgaagataaatggactcgcaaaatagaaatctctttagcgaaaaactgacagcaacatttgctagcgcctcattatttactgagagagatcttagatcggtcagttgaccaggtttcagtttcgggaagactgtgaaaaaataggatgtcatcaagtagtccagaacagcatccccaagaaactccaatctctgaggacccccaattagagaaatttggttaccatagatggatattatcgagagaaatgaaaaataagaaggaaacacaaaaatacctggtagcagcctcctccatgcctgttgtaagatggatggataaaggcttgtacaagtagacctttgtggaggaacttatagtcaagctggttttcaagggtctccaaattattgcgagtagtgaggggcaagtagcgcctgcttgcaatacaagcatcttgtacttgcaaggattcaaaatcaacatttacaccaatccacttcagaaatttcacagcacctttgaagccactgtcaactaagaaagctcccacaagagcctcaaccacatc

SEQ ID NO: 73267 - DNA, 443 bp, Arabidopsis thaliana landsberg
agcgccgacaccgtccccggacaggcgggcccgccgggcggtcagccgggcatgcttggcggcggcggccgatcgggtcagggggcggtcggcggtcagggcctggacgtcggccagggcggccgtcagccgctccggcccgccgaacaggtcgaagcgcagcaggtggatttccccggactcgatggcggcggcggcggtctggtccggggtggtggtgtgacgcgccgagtacgaggcgcaggacgccgtccgctccatgctggcgcggcggccggtgcggcgggcgtgctcgcgccacagcgccgaggcgcgcatccaggcctcgaaaggctggcgacaggacacccggtcggcgtgcacggcttcccgtcgggcctcggcctcgaccaggtcggcgccgatcaattccagccagccgaggtcgtcgctctcgcgcgcct

SEQ ID NO: 73268 - DNA, 478 bp, Arabidopsis thaliana landsberg
acctccccgcccttgtcctcgctgtcgccacccacgctgcattcgccggtgtctgggccactccgcacgatagctgcgtcctgctccgttggcgtgcttggctgcaagatcaacaccaaccgcgtcgcctactggccggactccgtcgactgcaacaacctttgcgtcaagctgagctacggcggccgctccgtctacctgctgcgtgtcgaccagtcgggtggggcctatgacatcagctatgacgcctggaactacctgcagacgggcgagtcggctactaccgaccctattgcgggcggcgccgtcgccatggactacgaagacgtggacgcgtccgagtgtgccgacttgatctacaccgatggctccaagctgcccctcagcgcgcccaacagcatgaacttcgtggccagctgcctcgctcagccgagcagctgggttgccaacaactacgttctgtacaacatcgtcgacg

SEQ ID NO: 73269 - DNA, 475 bp, Arabidopsis thaliana landsberg
gcctatgtccatatactgtatttatgttttgcaacagttggagttcatatcgaaatcattaaacatgtctctacagtgggagattaaccaaagttatagtcggattcagtttcttggttgactaattcaagcttaatcacactttataaaagtatgaaccattttttttctttttaaaaaatctcttttaccaaatatctgaaatcatcaaaacatactaataagcatgtaatatacaaaacatagatcgttcaagaaaaaacacacgtgaaaaatgtaacaaaagaaacaacggtttatataaaactaatcaacacgtgtagaccgtacgattctcaatcgtaaggtgcttacttcgccgttacggcaccatcctcatcagatctaagtgccacattcctaggaaacgaaacccgatgagcttgacacgtgacacgtcggttagtagcttctagtaactgatttactttggtgg

SEQ ID NO: 73270 - DNA, 457 bp, Arabidopsis thaliana landsberg
taattttgagaattggaggggatatctaattctctatatataaacatttgggagagattggagatgttcacccttaaatcaattattttctatattttgttggctttttcgaattgaataccattattttttatttatttttctttaataataatgtacgtctaaaatcacattggccaattatgattgaactggtgaatgaaaaaaattcagtttgaacttaatgcatttttagattagaaaaatgattcaggaacaaaaaatatcttttcttctttcgacgtcgaacgaaaatatctatcttcgttgcaaaattagatatttgaacagatattttacacatagactaaacttgaaactttttacatatctatttatgatggtgagcggcgtaaatttgtgttatgacgtggaatatttagtttgtagatttttagttgcgaaaagaacataattg

SEQ ID NO: 73271 - DNA, 1546 bp, Arabidopsis thaliana landsberg
ctaagaaaaaaaaaaaacaatttaccgaagaaagaatattattaaaaaatacaggaacaaggagagagaaatgtgttataaaggataaagcccactaaaggtcattcacttatctaactgtatactattattttcttcgaggcaatatataaaatttacttgatctagtaatttattttcactaaggtttagtattcttatacatttgtataatagttaacacaactcaacgatacttacttctaatatgtatcaacacgtacgtacagagccacgtaaagaaaaaaaacacacacacaatcgctgtcgaacagttaaatcccgaatctagatttgtattagttatctaatcgtattattgttaattccgaaagtagagtcaacatccaattaattgctttatcaaatatcgaatatgcaaaaggtctaaagaaaaacaaagtttttttttgttgttaaactttgcttacatcataggtatcccattaggttggtgtaccatgtgatgattctaccaccgaaaaaacagaagccaatattaaaaaatacatctatatagtacatgtacaataacaataattaaggattattgtattatattttaagaaaaaaactaaatagggttatgtgaaccagactttttttaacacttttactgtggtaaactttggaaagggaaaaaagagtgttagggttaatatatgtatatataattcatttattggggaaatgggctcatctagggtaacatcacctacccatacaattttatcatgcttttagggcttttatttatctcactggtccctcaattcctccactctctcttcccttcgcgtgaacaacacgctccaatgtctccccttcgtatgtgccgacgctccttacctctccgcgccacggacgaaacgtgcccacacgcgaaaagtaaacgccgtgacatccacgcgcctagggttttcttttcatcaggacacaagtgaaaaatgggttgtgataagaaccgcacattgcggccacgtggttaattctcattggtttcttgtgccccatcctatcacacacaaaaacgtctaatacgatttaaataaaaatcgggttctttcctaatataaagaaaaacactgagatcttttacttaatcttgttgtttaatttctggatactgttaccctaagccagctattttctactaatgctcagatttctttcttaactaaacatatgcataaaattttctccttttattcacttttgacagatacagagatacaaagaacagatacagagatgtacaaatacagatacgtgtacacaatagaagtaaaaagatacgtaactttgtttcgtgtaattggaaataggcagaccagatggtgacatggcattgtcatgttccatagatgagttgttctttttttaatataaaattattacaataaattaataaaaagattattttattgaaattaaaacccttatatcgacgcaaagccaaacaaaaaaaaaaccctcatttcaggataagagagctccactttctctc

SEQ ID NO: 73272 - DNA, 480 bp, Arabidopsis thaliana landsberg
  unsure (1)..(480): unsure at all n locations
gatcgagacagatagtatggccaattaattcaattcccaccatntgggcttaactatatcttggaaaanatcgccactttaatagtgaacgttggtgtgtctcaggtagaacataactgttccgagaccattaagttgctaatttcaaaaaacagtcgactaaactatntataagtgcggctnttacgctntaattgaaaccaaaaagaaaccgaaattagtaagtttaaatataaaaataaaaaattatagcaaaacaacttcaacattntggaataaacaaaanatntaatagaacaacccagaaaagaactcttacaaatggattaataaaataatttaatcaaaaagaattatagatttttattntaaaagctacaaatagtttaaaaaaaatataatatttacaatttccatcacagattgtttcttaatgcccaaggatgaaggatcacatagttaataagtaattaagtacta

SEQ ID NO: 73273 - DNA, 745 bp, Arabidopsis thaliana landsberg
tagctcgtgacttctcatacctatatttgtactcaagtgctactaattttttacttttatatcgataattagagaccattccttttcactctccctcataatgacgatgttcaagctattggagcctcacctcttattgatatcgaacattcgatcgtgttcttcaacttttgtcttcgtcgtctggttcgatttggtatagaagttgacccttgaattgtcttatatatatagtaccaaagtgcttattcgaacgacaagactatacttgaaccagatagccaccccactcttatcatgctcaaaagcattaattaatttgcttttgctccaaattgtaatcattcattttccatatgtatcccactcttttcccatgggagtgtttttcatgtataaatcaaagaaaagtatctatgcaacacatcatgatgcatattctttacgtactgtttacttgcattgcatgtgtaaatagatctcctgcgcacataatccttatctttgtagaacgttatccttaattttttttcgtagaggtttcgtgataaaattaaatacgtttcgatataatcgatgggtcttttccaaaatcatttttcaaatttaagaattaattacgaaatcgtatttctaatttgaaaatagcataagcgatatatgaacgattcaacaaagattgttttgacatcatttaaaagtagcaatctatccgttcatatataggatacagccttctttcttg

SEQ ID NO: 73274 - DNA, 984 bp, Arabidopsis thaliana landsberg
attcgttcattttcattgactatgaaaatagaataacagcaaaacttgcaagaccaatcaagctctttgtatctttttacaacacattaaagaacatataatttatatttctattgtatgtacagataataatggatcattatgcttatattatatgcacaaatgtatctggcgtttaacaaaaggaataagaaacatacatgacttcaacaaactttatttcttggaatttggacatctgacatagtattcacttctttcctataaccatgtctatagacacatgccaatgaggagcaaaaccccaacgcctctccgcttctcaaatggaaagcatcagagagatgattctgagtatagttggactgatgtaggtactggggagaaggccaggaatgtctccgtcctcggtgcgatcagaagggcagctaagaaagtctttgctattattttcttaggacaacggaagttaaagccaacagaatgtagatctgatcctggagagagcagcacgcacgacagagaatctacatgtaagcaaattggtgtttgattgaatctttcctaaaacagcctttcttgaatatcaggagcatgctttgaatctcttaagctctggtgatgtatgccgaccattaagacaaccaaactttgttacaaacctgagggtctttgatggatgatgcgatatatttctgtacatccatgctctctgtatatctgtgacaatcttttttctttttcttgaatatgtgcagtatcaggctggactggttattcatcaccaagctcctttggaaggtcaacagaaagaaaggtttcaggtcaatatcgtttttctggttcaagatttcaaagtcctgggaaagattcttcttctagcaaaagttggcatcaaggcccggtaatattttcttttggggagcttcaaagggcaaccgcaaatttttcttcggtggggatcctctagagtcgacctgcagc

SEQ ID NO: 73275 - DNA, 700 bp, Arabidopsis thaliana landsberg
  unsure (1)..(700): unsure at all n locations
ctgtatgaaatgtttgataattcaaaaaaaccaaattctgacattttcaaagttatagaatacaaacttaaagacgaaagcttctttgcaacattgatcaaaatcataaccagagctttagctttacgggttggcgaaagatgtgattcacctaggaatcatacaaaatctttttaattacaagtaaaacgagagacatgtattttactatttttctctaatcccaatcagttacacataaaccaaaaacttaataaggtttgagttactctttttcaaacttatcaccaaaaaaagtgacgttgaaatctttagtctactagtacaatgatcaatcaaccaacagaaaacagatcatcaccaacacataattatttgatgacttgactctttataattggctggttacaatgttaacatgagagtcattaccgtatcggataataacttaagtcattatttcccataatacccttgaaacagccacttactttttctcagctgcctaccatttacctgccacctcagcccccttttgtcattttctttaatacggcgtcgttttattttccgtatcaacttgaaaagccagttatacaatacgaccatcatcttcatacgtataaacgtatttataagtaagaaataagaacattcaataacctctgacatttnctcaattccctgaaaaaatttcata

SEQ ID NO: 73276 - DNA, 553 bp, Arabidopsis thaliana landsberg
gaactcttgggcagactctccacgcacacgttgacttattttttgagagatccattcagccatggccgggggggcttgggcatctcggatctcctttgctgcttggcgattgagtgtgaatttacgaggatcaagcccgtttattggagtcgattggcgctgcgatcgacgagcagctttcaatgcctgatcagcagctgcgccgttcggagtgttcattcttgatcaatcaaagagtatttgaaatgtattatcatataaaaacaaaatgaggcaagtagcgcgattcaagtttacgttgcggtctcagctatttaaacctcctttttttatgttgtgtgagcacgtttttgtattttccggaaaaacgcccgcgacaaatttgagccatgagttttaacgataccttggtacattttcctgaagttacatttttaacaattctcaattttcttgattgattgctgcaatttacatgtacactcgctcgtcaaataattcataaaaattctattctccacaactatgatccatttgaaatgagccgttcatg

SEQ ID NO: 73277 - DNA, 549 bp, Arabidopsis thaliana landsberg
  unsure (1)..(549): unsure at all n locations
agtcttgccgcaggctactaccacacctgtgggcttacttatcgcggagacgcacagtgctggggggggggcatcagcggtcagctcggaaatggagcaacgacagatcacgacgttccgtcgccggtcggaggaacggtgcgcttcgcacgtctctcgggaggctactggcattcatgcggagtgacggcggcgtccatcgcgtactgctggggaaacaacaactggggccaactgggcgactccacacgccgcacggatcgcctctcaccggtccgggtcgcgcccgcgccgggctttgccagcgtgtcggccggtgggcggcacagctgcgcgctgactgtcgacggcagcgcatactgctggggctacggcgtgcagggccagctcggcgatggcacagccacaaccaacccagggcccgttccggtctcggggggcctcgtcttcaccgcgctcacagcgggatggtaccacaactgcgcgctgacgaacacgggcaccgcgtattgctggnggcagaacgacagcgggcagctgggtgacggg

SEQ ID NO: 73278 - DNA, 501 bp, Arabidopsis thaliana landsberg
catggtgttaatctcttatatttatagtgccaaaatctgatatatatatagacaagtttttttttaaaaaatactataaaaatagtctaattaccagcaatatatcaactagtaaaataaatttatctatctaagaaattggatgcatgatgtattaatggttctcttttttttttcacagttataataaattattagaattgcagacaaaagaattagaggaatccaaacagtcacaatttttacaactaatcatacttttatcacaaagtaagaaccacattttataaagttttagtgtttacaataaacacctacacacgaacaggacaatcgttccaggacaatcgttccatcaactctctctcatctgtctccttaaaagtagatctaagaaaactccctttttcttttctttatgttacagattttcattgtcaatggtgtggcttgcggatcaatcggatggtgtggcgacggtcttgtttctccgcggtgata

SEQ ID NO: 73279 - DNA, 358 bp, Arabidopsis thaliana landsberg
  unsure (1)..(358): unsure at all n locations
cccctcgnnnnnnnnnnnnnnnnnnnnnnnnnnnnnnnnnnnnnnnnnnnnnnnnnnnnnnnnnnnnnnnnnntggggcgagtatcagaagtcggtcatggccattctggccgaagacgaggccaccattcagtcgaatatcgccaatctgtccgaaaaagaaaagcagatgcagctcgagaatctgcgggtcacgcgtgaaaccttcgagagcctgttcagcgacgaggcccatgcccgcaccgtggccgccggtcagcggaagctttcgcgcaaggccattctgaacgcgctgttcattctgctttaccgcgaggagcccatgctggccctgccgtttcagatgctgacgctgatg

SEQ ID NO: 73280 - DNA, 455 bp, Arabidopsis thaliana landsberg
  unsure (1)..(455): unsure at all n locations
ttaaacggcggtaacttgtcaacgccaggcttttgctctttgtggcgtgagccgcggccgcttcgaattggcttgcgacgtcgactgcgccgacgagagccatggtgagctcccctgcttgtattgcttgcgccgcaacatcaagggcgcggagtcctgaggtctcgccagctgacaaggtgaaacttggaccaccaaattgaaannnnnnnnnnnnnnnnnnnnnnacgatgccaccaagggcacccatggtgcggtttgcggtaagcggcggcaatagcacattgcgcaatgttctgagccaagccgcttcacctgccttatccaaatttaagccaaggcgtttattccagagcggcacaagttttttgaggtgccaacggacgtgaaagcgactggctgtgacatcaagacctatgcccatgaaaatgcccgcgttcacttttgcgttttta

SEQ ID NO: 73281 - DNA, 322 bp, Arabidopsis thaliana landsberg
  unsure (1)..(322): unsure at all n locations
ctccgnggttctctatctttttcgcgcctttagcattcgtttttggagagcccatcacgaggaacgctgagtgattttactatcgacgggcctgtagatagcgtatctacgatataatctacatcctctattcaaatctccttttctataactttcggaccgatatatatcccnnnnnnnnnnnnnnnnnnnnnnnnnnnnnnnnnnnnnnnnnnnnnnnnnnnncccaaaccggcaatagctctagaccctatctccgcacccggaccgataatctgaattccgccggctttctcggcccataactttgacatctatgaat

SEQ ID NO: 73282 - DNA, 494 bp, Arabidopsis thaliana landsberg
  unsure (1)..(494): unsure at all n locations
atgagccgggtgacgagtaacgaactgccggaaggtttggctttgttggcctataacccggcactgcaggtctagtggccctatgacgaaacgagtcccgnnnnnnnnnnnnnnnnnnnnnnnnnnnnnnnnnnnnnnnnnnnnnnnngacttctaggcggcgcgctaaccagcgcctaccgtaataagctcatagcactcgtcaacggcctgccggaaagcgtctaccgccagtcctacaacgtttggacgcggctcctcaacaagatcaacaccgaccatccggaatacatcgccccgatggcagcagcactgtcttatcaatccttcccgttaaaaacctaccgtcaatactgcgacgatagtgaatgcgattacatagactatgttgtgcagcagcggaccgattacaaggatgtcgtcacgagcgatgcgccgcatgccaccttgcttgccggcggcgatgccaccctaccattggaacctgaccaatc

SEQ ID NO: 73283 - DNA, 554 bp, Arabidopsis thaliana landsberg
cgcgcttttccgacctggcttacaccggcctttggtatctgacccggctgccgcgccggtctgggggggggggattttccgccgacggcgtttatggcatcgccgaggtgatccgccgccagcgcggcggcgccgccgtggtgctgggcgcgctgtcgccccgcacccgcaacgcgcaggtggaattgtaccagtcgggcgacgtggacttcctggtcgcgaccgacgccatcggcatgggcctgaacatggatgtggaccatgtcgccttcgccgctcgcgagaagttcgacggccagcgcctgcgcgcgctgctgccgcaggaagccggccagatcgcaggccgcgccgggcgctacatgaatgacggcacgtttggggtgacgggcgattgcgagccgttcgaggacgaactggtcgcccgcattgaaggccaccgttatgatcctgtgcgtgttcttcagtggcgcaacagcgcgctggacttccgcagtctcgcaaatttgaacgacagcctggacgcgccgccgaccgaacgcggtctggcgcgggca

SEQ ID NO: 73284 - DNA, 386 bp, Arabidopsis thaliana landsberg
  unsure (1)..(386): unsure at all n locations
cccgtttatataagagggcttacggtatgacataatatatttatgaattttcacactactcatcaaattttcganggacatgccattaaatgacnnnnnnnnnnnnnnnnnnnnnnnnnnnnnnnnnnnnnnnnnnnnnnnnnnnnnnnnnnnnnnnnnnnnnnnnnnnnnnnnnnnnnnnnnnnnnnnnnnnnnnnnnnnnnnnnnnnnnnnnnnnnnnnnnnnnnnnnnnnnnnnnnnnnnnnnnnnnnnnnnnnnnnnnnnnnnnnnnnnnnnnnnnnnnnnnnnnnnnnnnnnnnnnnnnnnnnnnnnnnnnnnnnnnnnnnnnnnnnnnnnnnnnnnnnnnnnnnnnnnnnnnnnnnnnnnnnnnnnnnnnnnnnnnnnnn

SEQ ID NO: 73285 - DNA, 638 bp, Arabidopsis thaliana landsberg
aactattaccgcgattacgtttaaaaaaaaatatcttaatatatgtctaactcacacctaaaaacttgttctataatacaacatttccacttatgtgattactgattctattcaaagataacaaagttttcgaaagttcaagatataaaatcaaatgaattttcttatccgactatgtatatgaggttaggggctgcatggaaagaagaagaaacttgacacaactcatttttaaagatgaaaaaataatccattttattaagtggcaataacaaatgtggccaatcatatcatatcctctccaatctctcttttaatctttctctttttatacgatctctagataaagccgacgtgatcgctatcttcatggatgtttgtttctctttttgtttgataattgcttattttccttttcattttcgtatcttataaaaatatgatttttccatgaaacgaactcgcacatcacgagtctcgatggacatggttagccatgatttgccaaaaaggttggagtaaaaaaccaatgatgacatcagtcatcactataacaaattaatggaatttgactgtttcgaggagttcttttcccattgtattggaaatgaaaaagctaattgtttgaatttaccatt

SEQ ID NO: 73286 - DNA, 422 bp, Arabidopsis thaliana landsberg
aacttgggatcgtattcgaacaaggccggctactcacgtacgctactcactctgcaccggaagaagtgaccaccccatgcattcttctaaagctgatccacaaacaactttgtggtctcatctgactctaccactatgcacctttaagcgcgtcatgacacgctttctctaacgtttctttgtgggcaaatctatcatttgactgactctaacgactatgcaccgacgagggggacgattaggacaaagatgcactttctcttattagaatcactatacacccatgcgagcgaagagggattacaaaacacttggggtggaacggaatctaaccaagtattaccatttagcctctcagagacaagctcgagtaacgaaggtattctaatatggcactgtagcttacgtgaagtgtaaaacac

SEQ ID NO: 73287 - DNA, 568 bp, Arabidopsis thaliana landsberg
  unsure (1)..(568): unsure at all n locations
gggggatctgtattaaaaacaaggttggttgtatacttttttttacaaaaccaaaaacgattggctgggggctgtttgtttataaaagcttcccacgacacccgttttgccatgagtttgctttatgatgacaaagaaaatattgaaggcattaaggaagcaagtttttgggcaattggagtttatatgcgcannntttttttnnnnnnnnnnnnnnnnnncagtgtcgctgatccgtcgaaggtctgaactactacttggcttttattgtctgaagatttagtaggtgtagagaggctaaaacaaggaaatcatggcaaaatctgtgtaatcgcataattttctcatgaaagtattgaatattgactcccttcttaatttcatgtccatagcttatgtatatatagaaaatttcttatgtattataatgcgtaggcttgacgtatagggatgacgaggtgcaagttccatgctttatagctattgaatatatccgtcataggagcggaatgtctttggnnnnnaatgggggatgccttgtcctgagctttacttggttcatgggcat

SEQ ID NO: 73288 - DNA, 536 bp, Arabidopsis thaliana landsberg
  unsure (1)..(536): unsure at all n locations
gcaattctataaccattgaataaaaacttctatttatactccctagatataatacgctatgcggagagttttacttaaaagacccagcccccacanaaacataaaaaaaaaagnnnnnnnnnnnnnnnnnnnnnnnnnnnnnnnnnnnnnnnnnnnnnnnnnnnnnnnnnnnnnnnnnnnnnnnnnnnnnnnnnnnnnnnnnnnnnnnnnnnnnnnnnnnnnnnnnnnnnnnnnnnnnnnnnnnnnnnnnnnnnnnnnnnnnnnnnnnnnnnnnnnnnnnnnnnnnnnnnnnnnnnnnnnnnnnnnnnnnnnnnnnnnnnnnnnnnnnnnnnnnnnnnnnnnnnnnnnnnnnnnnnnnnnnnnnnnnnnnnnnnnnnnnnnnnnnnnnnnnnnnnnnnnnnnnnnnnnnnnnnnnnnnnnnnnnnnnnnnnnnnnnnnnnnnnnnnnnnnnnnnnnnnnnnnnnnnnnnnnnnnnnnnnnnnnnnnnnnnnnnnnnnnnnnnnnnnnnnnnnnnnnnnnnnnnnnnnnnnaaaaaa

SEQ ID NO: 73289 - DNA, 618 bp, Arabidopsis thaliana landsberg
  unsure (1)..(618): unsure at all n locations
ggggtagattaagtagtctaccactatctaacccgttttctatcccagacggtgtagttgagctgtggatgaattgtgtagtagtgatggttgggtccttcgcattattcttatttctcagatgaaattgtcacatttctgagctctcttttctcagatgtgggtattgtacgcatttttttttctttatagattgagtaatacacgtacgtttaaaaaaagttgaattacatcatatgctaaagaatttattatctatacatactttttcataattcaaaataatagaaatataaaatcaaataaaaatgaaagataatcatatcttttaatttaaattagatagagaggtaggtcttaggatattatttcaaatttgttatattaacattaaataatcaaatttcatttccttaactataatatttggaaggaatataccataaaaaaaatagatatagtaattagttaagacaaaatatatttttagatttaaaaaattagttcngtatgaattttgattaaanttaacgaaatatccgactgaagaattcggattaaaataaattaaaaccgatccgatttttttttatccccgacctataagaaatagaaatt

SEQ ID NO: 73290 - DNA, 130 bp, Arabidopsis thaliana landsberg
cccacgaacacacacacataacaaaaacagatacacacaggaaaacaccaaacccaaacggaagccgcaaacaacacacacagaaaaaccctaacccccagaaagaacacaaaaccaggaccacaaccaa

SEQ ID NO: 73291 - DNA, 582 bp, Arabidopsis thaliana landsberg
  unsure (1)..(582): unsure at all n locations
ttccggagcgtgagctgctgagtttatatgcgcttggtacgctcttacgctgcgaaatggtttttggttgggcgcgcggagatgacagcgccgttcctgagatatggtacctctatgtgagctagcatcaagatccgtatcaaacgaaaacgcattcgacgataagggtatgaaatcttcgctcacgaacgaccattcgctggcattatcactnnnnnnnnnnnnnnnnnnnnnnncgccgatgattaaccagtcgctgtcgctagtagtaagactcgatggtccgcagccaacagcggaccactcgctgaggctgttaccgtcagaaactagaggaagtggtgtggattggtcattaggtgggttttcgaatgaatactcgaccaaatctgagaggtgtgaagtttgactttaattattagcttcaacccaatgctttaagattggaggaggtagtacgtagcagatatatgttcaaaagagcgaattgctttgactgcctcagccgatgtaatataacgattgggatcgtgtgcgaaaacgagttggtgcattttggctcgagtcattcccgagctacag

SEQ ID NO: 73292 - DNA, 576 bp, Arabidopsis thaliana landsberg
  unsure (1)..(576): unsure at all n locations
acagtataagcctcattattattccaaaattgaatatcaggttattatattttttccacatattctaatgttgtcggtatgcaacgaatcaatcacatgtaatataacattttggtaacaagaggacaaaataaaactaattaaatggtacgtgtctctcctgccaaaattagtttatttatacttaacttgcatatgtctgagcaagttataccatttctatttattattcagtgggaaaagcatacaaaaatttatataactatacttaatgtggtcgaacatgatgggcctttatatttgcccggcccaagaattttctgttcgagactttaggggggaaaaattgggacaatttatcatcaaaatactatttttaaaggtcatccttaagatttatgttgtgaaagattaggttcatattcggacctaagttctacttctaccctatggttttaaattctacatgtccgaaacttatatgtatcaatatttttgatatttcttttcatttaggaagtagctagtaataactatatcttttattatcattgggaaaaatattgntaatatgtc

SEQ ID NO: 73293 - DNA, 603 bp, Arabidopsis thaliana landsberg
  unsure (1)..(603): unsure at all n locations
aaaagcaccacaaaacaatagagatgaatactttttttttctaacaaatcaaagtgggcaaaactcagcgaaaaaacttaacaaaagtcctcttcttctatctttgatcttttttcttctttcttaggattaaaaaaaaatataagttgtatgaaataaatgttaagaagaagattcaaaatgattatatgcaaaaaaaagatgattataggctacaaaggtcgtccaggctatgtctgcgtaccttgaatccgtatgaactttaggtttcttggaatgagtaagagggccgatgagaagcatccgaggtctataagcttctggattcacttcacgcaactggcttggcactctgtatatacaagggtcttgagatcccatctccgattgcttatgcgctttacattttcaacatcaataacaattaaaaaaatcaaagagataccaaagaatcccaagttaaaatgttgtaaatgtttgtctacgtggtctttatgcttatgagatatttcttttttggtcaagatttaagacacagaatgaaggaaacaaaagcttactgtgatnaggatgtacatgaactatggnagggaggatttagtc

SEQ ID NO: 73294 - DNA, 573 bp, Arabidopsis thaliana landsberg
aaatcacttgaatactttcatattcgtctttttagattgccttctctcttttctaaaatatagggggagagcccccaaaacagccatcaccatcccggcgatacaaacgccggtccattcacctatattccaggcgatgctgccaacggtagagccgatggtgccgccgatgaaaaaggcggtcatataaatggtattgagccgggtgcgggcttcgggcagcagggcgtaattccgggccaggttaggcacatgtgtactttgcatacccatatcaatcaggataattcccacgatcaccaggctgatgcccaggcgcccttcaaacaagatcagccagcccgccaccatcatcaaaataccccagcgcatgggtttgaaagggccctgccggtcggttacctttcccacgtagggagaaataagcgcgccaccggtaccgataatgccgaataagccgatcagtaaaagagaataactgtaaggcggtttttccaggaagaaagccatggtagcccagaaagcagatacggcgccaaacaggcaggcgcctatccaggcactttccggatg

SEQ ID NO: 73295 - DNA, 538 bp, Arabidopsis thaliana landsberg
tagcctgcataatgcatacgatatctcaactatctttccgttaaacacctttaggatagagataaagatgtgggtattgatcaacgatgactccgaactttctattacaccttgttttcaccactttaatctccgagctatatgagccgatcatcatatacgtacccaaatctagatgttaaaaatatattagtactgaaccataaacgttggatatacaaaaattatagacctgacggtaaagctttaatgaaatctcggagaatccagtcatatctaagaagccacaaaacatgttccttagtctaagcaacatcgtagaattccaattgaatcccaaaaatatcgacaagcccaaaatttctttacatagctataaatacctacattctctcatcaacaataatcaatataagtagtaagatttaatgaaagagagatgaagtcatgggactcttagaagaatgttatatgcataaaatttgatgatggtgatggtgatatcgattgcacctatgactaacggtcatgatcatgc

SEQ ID NO: 73296 - DNA, 362 bp, Arabidopsis thaliana landsberg
gacctcgacgcgctgatggcgctcgagcgtgccgccgccgaccggactgacccgccggccgaggtcgtgatgaagcggggcgactgggacgacgcgctcgaggagtactacaccgagcacaagtcggtcggcaccaccggcgatgcccgcagcccgcagatgctggccacccgcgacgagagctccgacgaccgtcgtcggtggtacgtcacccagacgatcgacgacccagccggccatcacgactgggtgatcgaggcggtcatcgacctcgacgccaccgacgcgattggcgagctcgtcctgctgaccgaggcgatgccggcggctctgaatccgagtagcgccgccgctcgtctccg

SEQ ID NO: 73297 - DNA, 492 bp, Arabidopsis thaliana landsberg
aggaaatccaaatgatgttgagtttagggaaaaaaaaaaaattctttaatctttattaagaatgttaaacttcaattataaaagggggaagcagtattatataagatgtttaactaatcgaataatattttttgggatgaaattttcttgcatatgtttctaaaaaaataatatgtgaaaaattaacattcattgtatgtttataagaaatatatgtgagttttgtttagataaataatacttaaaattaagaatttgtaaagttatactgcacttcaaatatgttattttttccttttatttaaaatatcagcaacattctaaatgattttattttctttaaaaaattgaaaaaatgaaattagcacatatgtaaaatttaaaacgaatttaagaaaaaactttgtaaagatatgatatgctttataaaaaaaacttggtggcgttcctactaaatatgatcacattagagatttgtatcctttagcatat

SEQ ID NO: 73298 - DNA, 754 bp, Arabidopsis thaliana landsberg
tgtctactactggaatgggcattccagggatttatctaccagatgctaatgcaaggtcgtgatagcacttatctattatttaaagtttattgaatgtattattatgccacttggtgggctgcgctttcactattcattccgtcatatatccaaaatttgagacccaactagtcaggcacttgcggctgaaaataaccggtacggttcgtttggaacggatggagacaagaagtactcacgtgattcagctacaataacaaaaccgttggttaatcacgtgataaccgattaatatggtttttggttaggttgaaacggtgtgtttgctgaaggacagcgacacagcacaaacttgcactataaaagtgtgtgcagtctacagaccagtacatacctacgcataccttataatcattctgtctagctcattttctcctattcacgcacttctttgtatgaatctgatgttattcttatcattgcatacaactaaatagataatcattaaggacccatctgaactatcttcctgcatgtttttttttggtttacaactactaagatcgaacggagaaaaatcgaaagaaccagcagggtacatgaatggatggtaaaaggcacaaactactgcaatataatgccaattcatccaaaacttaacacgatttatggatatgatgaatttgtgggtcttttcttttcatagattgtttgcagcaaagtttgacggttcatatattgttcattttgaaaa

SEQ ID NO: 73299 - DNA, 575 bp, Arabidopsis thaliana landsberg
cgaaggcatgtttcggcggccagccgcgcgaaggcatcagtccgtgtgtgaaggactaggaccatcagcaggttggtgagttcatcgcggtcgatcttgcgcccggcggcatggatgacgacgcgctggccgatcagcgagcgcggcgcgcgccagcctcggaattcatagggcttggcgcctgcgatgatcagcgaggcccagggttgccagatggtgagcgccttcatttcgcgcctccatcttggatggcgcgctcggccgcgatctggcggtccattgagtttatggcgtccatcaggcgggcggctgcctctatggcgaacgagcgctgtgttgctggattttttgagctatccaaacaacggagcacgcccgtcgaggccaggctcaactgcgagtccagatcaaggagttcagcccatttggcctgtcggctttcgagggaatcgaaaaccgcatggccggcgggcgtgacgccctggcgcagatcgcccagatcgtcagcttttggcggggctccgtagccggcgtagggctcgccgcagaacgggcaatagctcggaacggcgatg

SEQ ID NO: 73300 - DNA, 562 bp, Arabidopsis thaliana landsberg
  unsure (1)..(562): unsure at all n locations
cctaattgccaacgccaccctcttaatcacattaaaatagatctcaaaacaggttccggttagcgcaattgctcccagtgttaatgtcaaattgagcttaaagttagcccagctgaacaaataaatcataataaaagaaataataacgatttgtatcaactgtgccaaaactgacagtccgtcgaaccacagnnnnnnnnnnnnnnnnnnnnnnnnnnnnnnnnnnnnnnnnnnnnnnnnnnnnnnnnnnnnnnnnnnnnnnnnnnnnnnnnnnnnnnnctctccgatgtaatcttcattcagaatcatggatacggcgtttgcgtgaacaactacgccatacatgtccgggcgtgttttacctgcataatttttgttcaagggtgtaaaaaatttatcatcccatgatgtatcgcgcaagtccgctccaaggaaccccatgatgatgatcttgtccttaatcatttcaggcacaaactgcgtggtatcgagcgcctgatcccaatccagcaccatnnnnnnnnnnnnnnnnnnnnnngcgccatgccagtcaacgatgtta

SEQ ID NO: 73301 - DNA, 732 bp, Arabidopsis thaliana landsberg
gggttcaagcccaaaagtttgagccttttttgatttgcagagtcctctgtgtttcttggtttgtctcttgatcaaggtctgcttgcgatttttgtttctttctctaccttactcgctagatagatgtttctgtagattggcagcatttggtctctctgtgtggttttattatttactgatataagtgtgaatctttcccagaatttcgttttctatatcaagaagctctcagaaaattttgggcttggcgtagttgtttagatatatcctagcttcctagagattgaatgttgaatgttgaatgactagtacttccttctctttctctgtgtcttggttgtcatattcaactgattgtctaataaagacagttgctttagctctgttattcacgaggattgtctcaagaagtttctaaagttggtagcatgtgtttgtagaatctgagatgggcgagccactaggactgctccaggtgactgttattcaaggaaagaaactggtgatccgagatttcaagtcaagtgatccttatgtgattgtcaaattaggaaatgaggtatgtttggtcagtgtttttcattgttcttggcaactagaaccagtgtttgtgtttctaccaaggaaacaagtatctcgttgtgtttatttgtctgatgatgtgatgttttactgttttgaaaaccagtcagcgaagaccaaagtgatcaacagttgcctgaatccagcgtg

SEQ ID NO: 73302 - DNA, 548 bp, Arabidopsis thaliana landsberg
gtggactctacacatgtcaataaacataactccaattctatggattttacctccaaagtgcaaaccaaaatatgataagagccaagttttgggggaaaaaagccaaaccaacgaatagatgtaagagagcattctacggctcacgagaccatttgtataagtaagagttttgttatatacatcccgcaagccaaaccgccatcaggaaaacttccatatcaacacttagctgaagcagccctgcattcacatttcctttatcacacctgtattatatcaacatatgaaactcacaagacagagacagtgaagcaaagtgaccaaaccttgataacaatggcctcgacttcacattcactttactcaaactgatttgtttcactgtgggtgtcacctgtgtgccattgctttcaaacagctcttcagccaagtttttcagaccctgaaacagattggacgatatattgctatcagcaagagaagaagtttccatttattttgttggaatagtgcgaacagtcacgttaaatacaagcaaacgtgacttc

SEQ ID NO: 73303 - DNA, 749 bp, Arabidopsis thaliana landsberg
gttggtgataccgacgcggaagcgcacccaatccggatcatccgggcgatcacccggctgcggtttgagaaaacccttgggcgtggtgtcggcgccgatcaccagcgcgacttcgcattcgccggagagaatcttcgagcgcgcggcagccagtgcctgcgaccccgaggcacaggccgcatacgaagtgttgacttgtgcgccctgccaaccgagcgcctgcgcgaacgtcgcgccggcaacctggcccggatagccgttacgaatcgtcgcggcgccggagacaaagcgcacgtcgcgccagttgacgccggcatcggcgagcgccgcacgcgcagccacgacgccgtaatcgacaaaattcttgccccatttgccccacgggtgcatgccgacgccgaggatggcgatatcaccggagttactcatgcacccgccctcaccccgccacccgctccgcggacggccctcccctctcccgcaagcgggcgaggggcaaaagcgcggcctgcggccgcatgttgatctcggtgcatgccgacgccgaggatggcgatgtccttgctcatgcaccagctccggcgattttccacttccacgtgagtttgccgtcggcgagcgcttcgagtgccagttccattttcatgccggccttcagcgactcgacgccgatgccattcacgaccggaccgagcacgatcatcttttcggtatcgagttcaaccgcggcgatcgcaaacggcacgaat

SEQ ID NO: 73304 - DNA, 587 bp, Arabidopsis thaliana landsberg
gaatgatatgaaaattcaatcacatgcaaaagactatggaagttaaacaataaaactctttacatagcctcaaatcattcacatacaaagactttgaaagctaaaacataaagcttaacagtactgaatcttaaagtcgccataagtttcacacatgctatgatcaaatacatatatcaaataaaataggaaaactcaaagctagcttcacttacctttaccatcatccatttgcttatcatttcatcacatctaagatgtccttagacggtggctcgatccaaagactcctaagagggcaaagttctttctgcatttgccacattgttggtttagggaactgcttacgcggatagtacctggcttcatcaaacgagtaggatacacatcccttgcaatctaaaccatactttgggaagtacacactgttcctcatcccaagaacatccaatctcgtcttcgaggaatacatacttgcaaagattgtcacgccgtcaagagtagtactatttatctcctcccaatttgaggagacaagtttatacaccatcggtatctcgctgatacatgtatacatgagaaagagc

SEQ ID NO: 73305 - DNA, 473 bp, Arabidopsis thaliana landsberg
gctgaggtcgtcatgctgaccggcgtgccgtgtcgctcaaggttttccggtgacgcgcacaacacgttgctgaaatggccgagcttgcgcgcgatcaggttggagtcttccagctcgcccatgcggatcgcgcagtcgatgccttcctcgatcaggccgatgttgcggtcgctcatcgacagctccagccgaatgtcgggatagcgtgcctcgaactcggccaggttggggatcagcgcagcccggcccaccgacacgttcaccgccacgcgcagcttgcctttcggcttggtgcgcgcgtagttcagcgcctccaccgcctcgcccaggtcggccaggatgtccttgcagcgctggtagaacgactcgccgtcgtcggtgagccgcagcgcccgcgtgctgcgaaacagcagccgcacgccgatctgctcttcagccgtgacaccgcccggctgaccccggaccgggtcatg

SEQ ID NO: 73306 - DNA, 446 bp, Arabidopsis thaliana landsberg
  unsure (1)..(446): unsure at all n locations
ccgaatccacgtgatcgacgcggtcaccggggcgataccggttccggaggtgttcgtagccgtaaccgtatccgttccggtcgcaccaacgagatcggtcacgtcgaacgtaacactgccgtcggcccgggtcgtcagtgtgtcgatagttccagcgtttgcatttggaccggtgccggtaaatgccaaggtgaccgatgcgaattggaccggcgagccattgactttgaggttggctgtcacctgagccgtcgcgttggtcccgactgattgcgtcgccggggannnnnnnnnnnnnnnnnnnnnnnnnnnnnnnnnnnnnnnnnnnnnnnnnnnnnnnnnnnnnnnnnnnnnnnnnnnnnnnnnnnnnnngggggtgctattcgtgaaatagacggtcgcctggccgtttccggcagtcgtcggataagccgggaactgatagc

SEQ ID NO: 73307 - DNA, 668 bp, Arabidopsis thaliana landsberg
ggcgcccaatgtactgctacctttacgcattatgctaacaggcggttttttcttttccccggtatttgatatcgtggctacgctgggagtggcggatacactcaaccggatggcaaaaagactggaagcgtttaaatggtattgatagaagttaaatggacatgaaggctgtgcaacgaatgttgacggcctttgttgattttgccgcattaaaaaggccggacaatgattgcccggcctttcttttatctcaaaagaattattttccttttgcgctttctttagcccaggcatccttgagggtaacggtcctgttgaacaccaccttcttcggtgtactgtccgggtctgccacaaagtatcctttgcgcataaactggaaacattctcccggattcgcttgcagcaatcccggctctacatatgcctgtttgatcacttgcagggaatccgggttgataaaggatttgaaatcggcttcttccgcaccggggttttcggaggtgaataaacggtcgtagatgcgcacttcggctgtagcggcatgtgctgcgcttacccagtgaatggtgccttttaccgttagcccgctctggtcgccgccacttttactttcatgcatgtaagtggcgtaaagggtagttatattaccgtctgaatctttctcg

SEQ ID NO: 73308 - DNA, 757 bp, Arabidopsis thaliana landsberg
atcatactaaaaatcccaattttgaatcaattttcccgaataaatttgtagtatctcaccataaaagttttacatttcctaattcctatattcactcttagagcgtaaaaaaactcgaacaaacttcacaacgactcactaataaaactcttcgcagtaatttagcgaccaaaaattatatattaaaaacggagcccgcgtttagcgctctttttcagttttctgttacaccaaacttttccttgtcacaaatttcccgagaaaaaagaaaaagagaaagcaaaaattctgattcaaagacacattctctgaattttcatttctgttacaaaaccagtggtcggaaatcgaatggatcagagaaaaggtgatccaagaatatacattatcactgttctcttcctttcatgtatcctcataggaggagtccttttaggactttacctggtccgttctgatccgaaccctctgtttctacaagcgggtatggtctttgttggtgtcccttggctcttttggttcttggcttacgtttactcctgcgtcctcaaaccttgcgtcatctttgttagccagagcaccatctttaatagcaagagcgttaccagtttcgatccggagaaaggcgatcctaacaaggctccggaaaccgtcacgacaacttcggatccggcgccgaggaattcaccgaaggaaggtgagaagcacgtgcaattcgggaatgtggtggttcttggggatgaagaaggtggaaaag

SEQ ID NO: 73309 - DNA, 866 bp, Arabidopsis thaliana landsberg
cttcttcgatttctcagattcaattctgctttttgctttcctcctgttgtttttaggtttttgtcgatctctatgttcagcgattcctaaaccctacttgttttccgctctattgtagtgaatccaacccagatttttcagattttaatcggaattattcgggatctaatgctcgcgtcgagtttatcgctagaaaaccctaatttcggaggatctgtcacttttactatcagaagcttgttgttgtaattacggattaggtatgtcctgatcgttattgttctttgtttgcaggttgcgatttgttgaaaaccttgatttagactatgaagtctcttaatgatcttcctgcgcccaaatcaaccactaccacgtattatgatcattctaatgatgcttggttcaaaaaccgagtcactgaatccgagacggtgaaatcctccagtatcaaatttaaagtggtgcctgcttacctgaatcgtcaaggtttacgtccgaagaatccagaggattttggcgatggtggtgctttcccggagattcatcttcctcagtatcctcttcttatgggtaagaataaatccaataagcctggagctaagactctccctgttactgtcgatgctcagggaaacgtggtctttgacgctattgtgaggcagaatgagaactcgaggaagattgtttattctcagcataaggatattattccaaagtttctgaaaaacgagggagacttgggtactgttgttgatgaagaggaggaattgcagaaggagattcaggagactgctgaagaaacgaaagctgccattgagaagattgtgaatgtgagactgagtgcagcgcagcctagtaggtcttta

SEQ ID NO: 73310 - DNA, 651 bp, Arabidopsis thaliana landsberg
tgaagggtaacaacatttacttgcttatttagttatctaccagtctattgcactggctttggtgatttgaagttttacttgttgcctttgcttatgaattcttggtactgcagtgttgcgtggttgattggctgggcgctgattttggaatacacaattggtggttcaacagttgcccgcggcatatctccaaatctggtttgttccccctttgactgattgatatcttcccttgcttgaaattcatactgaggttcatagttttttctttacataaagtgtggttatatattgttttgctgaactgaagtttagaactgttgcgtatttagaactgggtaggtagggatatccacatagctctataagatttacgttcttgtgttgtttgtgcaatgactctatttttaggattcttgctaataaatattgagtggcacttacagattgaaagaaaaaggcgacattttctttctgcaaagctttggatatctttgagttcaccaattcgtttggtttttcttgtttttaacaagaacatgtggaaattgttttgtttatcatgtgatgacattttaatataacatgaataggcaatgattttcggaggtgaagattgtctgcctacaatattagctcgtcatcaaatcc

SEQ ID NO: 73311 - DNA, 442 bp, Arabidopsis thaliana landsberg
cttcttttaattcccttgccgcagcctcaaatgattcctctctttcatcttttactccttttgggatagaccatctgttccacggtgaatttgtagcatggcaggccagaaattttcggattttggtagaatacaggaaaataccacaggtgagtgcaggtgtcttatgcgccttggccataataatttatttatcaagcagtttaaggctcttcaccaggtcaatacctttgcccagtataccggtaaatatatctccttttttttcaatacgtttcaaggcattgtggatgttaaaatccttggggcttaagcctggctttacctctttccaatccaatggcattgatacggttgccccttctttaggccgtaaactgtataccgaagaaatagtttgtcccctgcggttttgcaggtaatccatgtatatcctatcatc

SEQ ID NO: 73312 - DNA, 422 bp, Arabidopsis thaliana landsberg
atatgccccgtatagcttgtatataaatatatacattctaattctttttgctctcttttatcaaacgtcgctatttataacaatgcagcttttgctttcctccatattatatccccatcaaacaaacaaaaacaatatttgaccaaaaatagacaaatgaagataaagggtttgatgatattggcttcttctctcctgattcttgccttcattcatcagtcggaatcagcttcaatgcggagtttgctgatgaataatggatcatatgaagaagaagaacaagtctaaagtatgactccatgggaacgatcgctaactcttctgctttagactcaaaacgggtaattcccactggtccaaatccactccacaccaggaacgggggtaatggaagaacaatatatgtgtatctatgttcttgg

SEQ ID NO: 73313 - DNA, 294 bp, Arabidopsis thaliana landsberg
aaggaccaccggttttctccctttcaataaacatgcccgggaatttgggtgtataccggttgattcagatcggagaatcaccggttataaaccatgagcccggctcgaagcgaacaatcctattacgctaggagtgttgacaatggaatcctacttttccattatgttaggtatacccgacaaagtgcgacaggaaagcccgggacgatcaagttgtgcacgaatagtgacttgacctcggaccctggactacgttgcgaccttattcattgagggggagggattaactaccgg

SEQ ID NO: 73314 - DNA, 2016 bp, Arabidopsis thaliana landsberg
gcaccataaaaaaaaaacacattacaaaatctacgaaaatatccctggaaacaatcctaccctctgtgtcttgtgtaaagagatttatccagagaggattaaatatgaaagctgagctcattcctcattcctcactcagatttggccttaggtttctcttgttcttcggtgagaggcttaaacacaactttgaagaaccaaactgcaagcaacgtagccttcacaggtccaagccaatacacaagtaaatgctctttcgttatatgttcaccgcgtgcataagcccatcccataacctgcaaagattcacacaaaagcaaacattcaaaacaaagatcgctatttgctgaaatcacaatcacaagacttttttttggtacatacagctgcagggttcatgcatccaccggtaagatcagagccaagaatatgaagagttaacttagcaagactaccgatccaagtcttcatgaagaaacttcccgggatttttcttgttagtcccattgagagcagtacaatgaagaatgttagtatcccttctgttaaagcaccgtggtgaattgctacatttagtttaggtcctttcccaatctcagggaatacgtgaatgatatgcttaaccgcaagaattgatcctattacctgaaataacacaaaaccagagtttcacaaaagtatcatctttgattacacattagagcaaaagatcttcaagatgaagtctttataaaacaatagagcatataaccaaaatgatctggttttcaaagaagaacccatcagctaaattctctttttttttctctaatttgacattttacaacattacacaaaccctgagacctctctctaacgaagagtcaatttcaattaaaccaaaaaaagtcaacgaaacaaacctcgacggggattcgaacgaagacggagaagatgaaactgctgaagccaccggagactccagcagccaaagcggtcaaaggattataaagcccgcctttggtggcttgttgaaggtaggcgaagatgaacatggagatgatagagaagagataacgaacgatctcaccggaaggatcggtccggctaaatccaagaactccatggactaaaatgttgaccagaactcctgcccatatccacatgaacgacaataccagatcagtcactactaaaccgattcgtcccatttttcgattccaacgatgagaaccaatttctcagaaagaaagaaattaaaagttagcttttttatgatctgaatttaggataattgaggaccgttgaagagaatcgagattatatgattggctctaagcggctggtgaatttagcatataattgacgctagagacattgtttgagtctgagtcagcttccgacaataaaggttttggctttggtgtgtcgtgatgagattatagattctcttcgattttggaacgagcttcggctattaaccaatagacatcaactaaagtgatacgttattactggataaagtatttactttacacagttaactaataattacaaataaattactacaattagccttcttaagaattgtttacaaaaaagccctccaattttaacctgcgacggaagtttcccctcaggaaaaatatgaccttttgatctttacacgcttggctttgggttgtaacttttgtctctcttctatcgtttatggtgtttgcagcttcagcattgggaatggatctttccttttgaaaataagttgtgaatatacggaaaaatgtgacttgttagtggagaagcaatgcgtttaaagtgttcgacagaatgcctcagtgagttagagtttcagttacctctgtttttgattatagctcttagtgatctcagattggagacgttatcagtcttggctaaattgattaattattactttttccgattttttttgttctgaagaaaatatgtttgtttatgagaggaaagctcggagatgctaagaatagagaaaaatgggtcatgcttgtttctctaaat

SEQ ID NO: 73315 - DNA, 512 bp, Arabidopsis thaliana landsberg
gcgcggtcggcgggcaaatgctctacgtggaggacatcggcgaggtggtggacggtttgcccgtttacccgtcctttgtcagccgcctggccttcgggccgtcggacgcgcgcgccgcggccgatgccacgcgcggcgagctggcggcggtgaccatcgcggtggccaagaaacccaacgtcaacgcggtggtggtggccgattcgatccttgcgatgatcgagcagatgcgcgcgcagtacgtgccggccggcgtggaggtggtggccacccgcaacgacggtgtggaagccgaccacacggtggacaagctgctgttcgacctggcggtggcggtcagcgcggtgatgctggtgctgatccccttcctgggcctgcggcaggcgctgatcgtgtgcatctcggtgccgctggtgctgagcctgacggtggcggtggactacgtcaccggcgtgaccatcaaccgcatttcgttgttcgcgctgatcctggcgctgggcatgctggtggac

SEQ ID NO: 73316 - DNA, 648 bp, Arabidopsis thaliana landsberg
ctttaaactgcgaataaaaaaacaaaattgtaatgagttattttgataaatctttatgggtagttataatacaagaaaccattttgaacaaaagaggttgatgtttaaattgtgctggatcttttcctcaaatgcatgcacctcctcaatatttaacatcccaaaaaataattacgagttttttttcatataaaacatagcaagcataatcagccctatttcaaagatgtagctttaacaagaaaatataacggtacaaggaaattggcttagtcgcaaaagaaactagtataagaataaaaatccgtgtgttttgtagatattcacctactagtatatatatcaattacaacatcattcttgactatttcacaaacatttaaaaatacattatactgacatgagaaaacgaaatgatggggaccaaaagaccgaatagattcacgtgaagttttcttcatttggaaaatttaaaccccacgagtaatactgaagagaattcattgtatactagttgtaggtaaagaaatatctatgtattatctatggttccaatcaggaaaaattactattggcgtatctttttatggaatgtttgaggttgcaaaataaagtttttggaaaacgcatacctggcagggaaattaa

SEQ ID NO: 73317 - DNA, 163 bp, Arabidopsis thaliana landsberg
ctatcactccctctttgctcaaatcgattctcactcgcttacacgccatttctccctccattttggcatctcttgttatacgagcttacctcttgtccgactatacgagacggctatagctgaaggctggctttcgtcgatccaggcatgatcaatcgaagaa

SEQ ID NO: 73318 - DNA, 489 bp, Arabidopsis thaliana landsberg
ccgcaaatcccctgtgacacacaggccatctttctttatcaattcattggttctggtgccacagaccaaggggaaagcggggggtcgtttatgaaacctatgaggttttttaaaacctcataggtttatgcttctctggcgccagttgaaccagtcaaagagccagttgaacgaactcttcaccatggcttaatgctgaaggcttgaggcctaaagccttttgtcgtttcttaataaatcgtttatggtattcaaatctttcgatgagaaacgaactcttcaagggtttaaaacccttgaagagttacgactagatccaaccaacgattttagctttaggctttctgcgttaagcctaaagcttattacaaataaatctctcctgctttcttaaactcttccgatttcgctttcattccttcttcaaggatcgctgcgtcgttcaagccatttgcatctgcgtagtcgcgaactttcctgcgtattttc

SEQ ID NO: 73319 - DNA, 524 bp, Arabidopsis thaliana landsberg
  unsure (1)..(524): unsure at all n locations
ccgggcgagaacttgtccagcagcatccatttgttgtgctttagttatgccagatgacttcttaccannnnnnnnnnnnnnnnnnnnnnnnnnnnnnncatctgcttggtacatgttacctcacctttaacttcggcttttgaaccttcggcttgagaatctgttgcttcggcttcttcgtagaatcagccacagtcgttcctgtgattccaaggtgtgcagtagcacgttgaatcgcagcagccttagccgtttgttcttgttgcttttcgagagtagtcgcattcgcaacatcggtgtttaactgacgaagattacgattgcgagaaacttccaggtcaccagtcgatccgttactctgttgattctgctgagcaacttgatcgttgtgtgcctttgcgtacagaccagaaccaaacataccacgagacgcaaaatcactgttctgcgtactattgtcgtttgagaactgcttaagtaaccgagcgcgagtcgtagcgtaatcagtgtttacgtcattctga

SEQ ID NO: 73320 - DNA, 726 bp, Arabidopsis thaliana landsberg
aacctttcagaaagtcaacaagaacatgcatgtaaaacattggagcacgtataaataatgccatcatattgtgtaaggtttctgaacgcaagctcacactgagaaagatgacacctagcatccctcttctaatatgtgtctttcctctcaaatttctattaaattttattatatattaaaaaaatatcttgaaactatcaaggagatacatttttgcttctatcattcttttttttgaaagagataacattaaatcttatataataaataaaataaaattcaattaaactaatagaagtgccttttctttgtgacatgtgccttttctctcaaactttcattagatttcattatggtattatgattaaaaaaaaaaaatcttaaacaaatatctatgggacatactttgttttcatcatatcggaaaggcataacattaagctagacataatttttggctatttttctacttattttcattaaattttaaaattaacatctaacaaaatttataataaattaaatattctctttcctaaaaaaagtcatatataataataataaaagttatttaaatccatcaaataaagtaataaatagtgactaaattagtttttattgtttaaatccatcaaataaagtaattaatagtgactaaatccatcaaataaagtaataaatagtgacttaaatccttcaaatcccctatgtcccaaacgtaaaatc

SEQ ID NO: 73321 - DNA, 435 bp, Arabidopsis thaliana landsberg
gatcggtaacatcggtgagtacaatggtggcatatttttttctccagggtgcatcatcactccgtggcggggggggtaatcaacgaaatgataattaccgatcatggccgggttattatcgtccaccttcttgccttctgaattgtcgagcaggaaatttttcaggtaaccacatcctgtaggcagaaactgcagctggtctatcgtttcagcattgagctcggcgcccaggtcggtcattttgttctgtatttcgagcatcagtggctctttgtggatatcgggattgttgcgtaaataaagaagtattttctggcctaaatcgcgtgagcagtatttagcaatctgtctgccctgttcttcgagtggctgcctgggctcatcacgtttcatgccctgccatacagtggcaagcatttcaataaaacctgcggt

SEQ ID NO: 73322 - DNA, 697 bp, Arabidopsis thaliana landsberg
atcaataacaactctcatgaacttgcagattgattgtgtttcctcctcgctgaacccaccgatgccatctatattgctatcattgccaaatgaaaaaagtaaaaaatcattgactgttgcactataaacaaagacatatattgctattacaatgcagataagagcactaatagaaaccatcaagaaataagatattattctagaacgactaaagcttagatgataataaagactcctttggtcacaaaactgattcaagacatggagcttactaggttggtggatgaaatgaagtaggccatatcttactttgttcttcccactcttctttggataccgcagcatatttgcatacctatcatagttatagcagaaatatgagattgcactgaaaatataaatgaatgagcagaaagaaatctctgccttggaagctaaatgaatcaaaaagccttgaagcaaatagtggtgagaaaagagaaaaataaacctacttcggtaataaaaggactcaactcatagggatcaacgagtctctgcacatcaggaggcatgtcactcaaatgatcgttgtgctcaggtgctagacataagatgacagtcaactgagtttcacctgtccaataagcttacaataaaaacctcataatcttatgattggtgtatcagcgcgccaagaaaactaacaatgggatac

SEQ ID NO: 73323 - DNA, 382 bp, Arabidopsis thaliana landsberg
  unsure (1)..(382): unsure at all n locations
attcacgccgtaatcgccgtccgcaatgtcgatcattttnttctctccggtgacctgccgcgtgtaacgggcgggcgcgtcgatcacgaggttcggcgtaatcacgtggctgaagtcgataccgacattctgcagccgtccggacgcctgtcccgattgcccgccgtcgaacggcgcgccgcctgccgcaccgagtgactgcggatccaggatggagaacggctcgacgctgtagtgaccgaaaatgctggtcttgtcgctgggattgtaagtgaccttcgagtccgacgagtttcggttataggcaaacgtgtccgagcccgcgtagttctggtagaactgattcgcgagcgtgcttccagaagtggttggaagggtctgc

SEQ ID NO: 73324 - DNA, 520 bp, Arabidopsis thaliana landsberg
  unsure (1)..(520): unsure at all n locations
tttccctccaagctgcgcgccacctacccanaatcgatgctgtgncgtgtttatgttcccnnngcccacggnntagggagacgcggntcgggtgctcctagagttacgttaccattttcctggggataccgttgtagaatctcttctcgctcaattcnnnnnnnnnnnnnnnnnnnnnnnnnnnnnnnnnnnnnnnnnnnnnnnnnnnnnnnnnnnnnnnnnnnnnnnnnnnnnnnnnnnnnnnnnnnnnnnnnnnnnnnnnnnnnnnnnnnnnnnnnnnnnnnnnnnnnnnnnnnnnnnnnnnnnnnnnnnnnnnnnnnnnnnnnnnnnnnnnnnnnnnnnnnnnnnnnnnnnnnnnnnnnnnnnnnnnnnnnnnnnnnnnnnnnnnnnnnnnnnnnnnnnnnnnnnnnnnnnnnnnnnnnnnnnnnnnnnnnnnnnnnnnnnnnnnnnnnnnnnnnnnnnnnnnnnnnnnnnnnnnnnnnnnnnnnnnnnnnnnnnnnnnnnnnnnnnnnnnnnnnnn

SEQ ID NO: 73325 - DNA, 494 bp, Arabidopsis thaliana landsberg
aagttccttctctcatatctcattaggattttgttttgtttcatctcttgttgatcttcttcagtaggggagcttgccttattttctatgattgtttctgtatttgttctagtttttgccttaagttagagatacattgatcttcgtttccctacctacttgttctttatcttattgtagctcattttacatctggttatgtagagatgctttcaatgagcttaattacaattctattcctaggtgaagtggttgttttgacaatttgatttgcattattactacacagaatacattttgacatgacaatcagatacacaagagtcaagacactaccgttcttctcattttgatttctgtttgttgactagtgcttcaaatctgttcactgattagggttggaccgaagtttcctactatgattgtactcgcttgatattaaggtcttttagctagtgctcaagagccttggatttagatttagatttagacat

SEQ ID NO: 73326 - DNA, 329 bp, Arabidopsis thaliana landsberg
gatatgctgatgaagcgcgcgatgcggcgttttatatttgaaagatctcatcgatgccgcagggcatgggtatctccgtcaggccgcagaacatctcgcccaccgtctgcttcgcctgctggcgcgatatgacacggtccgtggcgaacgggctgacggtaaagcggctgacttcccatacgttggcggcggcgggcatggtcagcggcggcaggaattgcggccacaaattgcggatcatcgtcggccctgtcgtcggcagcaggcgccatgtgccgatcacctgccgttcggggttgagcgccagcatgtataccgcgttcggcagg

SEQ ID NO: 73327 - DNA, 1435 bp, Arabidopsis thaliana landsberg
  unsure (1)..(1435): unsure at all n locations
gtggaattggcccacttgcattcgttgcttctgtccagtctctagagcaaattccacagacattgagctcatcaggtacaaacgtgttatataccactacttctacctgttttaacaatattattttctaccagaatcagttcatgtgattattcatttgacattttcaggaaggtttgacttccatgtgcaactggctgctcctgctacctcggaacgtggggccatactgaagcatgagatacagaaacgccttttagactgttcagaagacattttacttaacttagctgctaaatgtgaaggatatgatgcatatgacctggtatttaaatttttctatatgcttttaaatttgccgttgtgctaagaccagaaaagacatttgacagaaatgttgacagactttggaagctgatactatctgtgattttcatgttataaattttattgttcaagcttgctatttcgttttaacttgattatcattctgtccgcagatctacagtgtgctctctttgaattctcttttttttttttttttccaggaaatattggttgatagagctgttcatgctgccattggccggcatctacctttagaatcaaatatatccaaatataatttggtcaaagaagactttactcgagctatgcatgattttgtgcctgttgccatgcgtgacatcacaaaatctgcctctgaaggtggtcgtttggggtgggaagatgtgggaggtgtgactgatattaaaaatgctatcaaagaggtatatgactatgcttactgccatatctgattttgttgccctcattaaaatctaaattagtgtggggtaggaaatcttgccaataaatgttatccttttataattgcaaccaggaagcatctgtttcctgcctctttgtctgttggcttttacttactgaagttaggtcgtgttcagtgggaaacaatatttctgtaagacctgagttgatataagttgaaatatcttggaatgaatctcacggaaataattccactgggctatataagagctactagttatgctaacaactacagtttgaaccagttcttatttagagatataattctagatatgcaactttattgctctttgccatgtccagatgattgagctgccatcaaaatttccaaaaatctttgcaaaatctcctctgcgtttgagatcgaatgttctcttgtatggcccaccggttgtgggaagaccacattgttggtgcagctgctgccgcgtgttcctacggtttatatcggtgaaggggcctgagctgttaaacaaatacattggtgcatctgaacaagcggtaagaatgacaacctttctttgttttccatcttcaagaacctttgagatnggtacgtantcagtctttagtgacgcagctatactatactgtgaattattga

SEQ ID NO: 73328 - DNA, 757 bp, Arabidopsis thaliana landsberg
catggggttaccgttacttcaaattcatacattgcaatatacggaaaaacttttatagatgatatctctttacaaaacctaaaaataacactagaacgatacttttgcgacactgaaaaatattatcacatcatcattatgattacaaagatgattcagtcgtgtacgttataacatgtcgaaattcatggtcacaaatctcacccatctgtcattctctttcttggacttcctaaataacttttagcctttttcccagattatattcaataattgacgatcgataactttaaactattcattctttaagagtgagtaaattgaaaagtttatgaacatttcacattctttaatcacgtgtttaagccaccagtagccatcattgttcactttcaagattgtctaaatcgcttcgacgtaccacttcttttgaagaactggaatcaatattgatcgtccgaagttttaaccactcatttgatttgtatcaatatataactgccaaattcttatgtgttttagtgtttatttcatacggctaaaccgtatacttttgttcacgtgtatattctctcggtttttaaagtaaatatcgcttaacaaaattccacagagactataagaaaattattaaaatttctttctatcttttattgatacaagatcatttcctaaacaagattaaatagtattatttctgtaagtaataaaagtacaaaatgacatgcattcttttgtacgaaatttaagaaaaact

SEQ ID NO: 73329 - DNA, 555 bp, Arabidopsis thaliana landsberg
  unsure (1)..(555): unsure at all n locations
aatttaaatattaaaacgacaactaaaccgaaacagaattttttttatcttacatttctagctctttttttgggatgtaagcaactgtagaatagtggtattaatcataaagatcatatagattttgttccctaaattctgtaatatatatgataataaattcattggataatttttttaaatacaaattcgaaaaggataatcggacattatgaattttcttcttaatattattaggtagattttatggatactagagtctctaactcttcgtctgtcctatgcgaaaatgttactatttaattgccaaaatacttttgatcatatttgattctaacattattttcttgaatattttaaagcttgccgcctataaacaatgatatgataaaacaatatcatggttaccgcctataaacaatgatatgataaaacaatatcatggttatgttgttttgcatccatatgtctctcaatagaaagaatttgntctcaaattgtttaaagaacaaactaaagattggatattatgaatttgatatagaattattctca

SEQ ID NO: 73330 - DNA, 534 bp, Arabidopsis thaliana landsberg
cctcttgtgaaattgtaagccaaattaatctttcgttctcttgtttataaattatccataagaatacatagcttacggccccacttccccactaccgtttttttattttgttttattttgaaaaaatgtttgctcaccaaacaatcaccatctgtaactctgcgtaacttcaaagcttttttgcccaagcctgcaacgaaatagctgtcatcaacaacccacccaaacgcgaaaatggtggatcaatttaccggcataaaattttcagatttgaattctttttaaaaacttttttttcactatctagtaagtgagcattattaaccgtccatggcataatttattttgtcttcgtattattcgagacaaaaatcattctgtaatgaaaaataaatatatttcgccatccgtaataaaaaataaaattaaacttgaattttgagcactggttcaagaaataaccggaccgcgctcaaactgccattttaaacaaatcaaaaggataaccctaaacctagtttagtccacccacac

SEQ ID NO: 73331 - DNA, 381 bp, Arabidopsis thaliana landsberg
cattttcaatcaccaaaactgaattgtttgaattctgggagcagatcacaggcaatagttttgatgataggctgcaaatcttttttgatatgtaagcatgattttatatttatttatagtattttgacaagtataatgcatgattatcatttgtcataaaatatggtaagttgattagttatctctttgtgtttatgtatataagggtggacaaaaatttggacggacgtattacaggagatgaggttaaggaggtgaggtataccttattaaattgatctcaatttcgatatggtcctaatataaaaatgttacaatctaagatgattcgcctgaataataaatgattgctgtaagtgcttcggcttcacaagctgtcaa

SEQ ID NO: 73332 - DNA, 412 bp, Arabidopsis thaliana landsberg
  unsure (1)..(412): unsure at all n locations
ggcctcggccatcggccggctgaccggcacgctttgggtggttctggtgacctcgggtccgggnnnnnnnnnnnnnnnnnnnnnnnnnnnnnnnnnnnnnnnnnnnnnnnnnnnnnnnnnnnnnnnnnnnnnnnnnnnnnnnnnnnnnnnnnnnnnnnnnnnnnnnnnnnnnnnnnnnnnnncggcggcgttgctgtcctccgtgaccaagtacacggccgaggtgaccgaccctggaacggtgccggaagcggtagccaacgcgttccgcatcgcctcggcggagccgcggggagcggcggccctggtgctggccgatgacgtgatggccgcgttcaccggggccacggagatcgccgcaccgcccgccggtccgctgggaccggcaccagccagcagaatcgacgaggcc

SEQ ID NO: 73333 - DNA, 565 bp, Arabidopsis thaliana landsberg
  unsure (1)..(565): unsure at all n locations
agccttaattttacattaaaaatacatctacatttgcatttcaaatttacaaatctttaacatctaagtaagttgtttggtgtttagattaggattaacttttaactagcataataatcccacattaatatgtaagataatatggatttgtatttgaaaagaataacaaatggaaagtaatattttttccgtctactagactaaatcattgattctctggacccaaagaaaaaaagaagaagactatcattaattttattaattgaaaaaaaatatggccctagttggctgctgctgctaatagatcctcccaagtgactaatttttctctgggcttgtttctctcaatccccatttgattttctttggcatcaatcttctgccacccactaaactccaccttcttcacttttatcttctccagcaattgcatcagtcctttgcttcctgcttttgagctcttcaaacaccttcttcaatgtcctcgcttatgctaccaacctgcaacagacacatatctnctagttaaagaacatcagttctattttcagggtcgacaagcttg

SEQ ID NO: 73334 - DNA, 362 bp, Arabidopsis thaliana landsberg
aaagactttgatgaggatgcaaatgcatgcataactattgttttttctttctcccttagaaattgttgttgcgggccatgttgaccgctcttatctcgcaagagaggtgctctagctcccagtgatcaatttgtacttgagatgcactacaacgaccagcaatgtttaactcgatggatgtagttaaggtagcaatcctctggaaaagaaaaaacgaagagaataaaaaaccgaaaactgaagaagttggaagttatcactataagtcaaggtaacattgaagaatattattagatatatcacctttttaaaacgaagatagcgttgcaagagtgcttttctttcgatgatgtcctagtctt

SEQ ID NO: 73335 - DNA, 519 bp, Arabidopsis thaliana landsberg
ccgcccgctgcgcaccgcctatcttgatcaggtgccgcagatgcttgtctgcggcggcctgcagcggcccgctgtggcgggccatctcgggcagcagcgtctcgacgatggccacgtagtcgctggacttgaagctctcggccgcgaccagggcgctgatctgcaccttgttcaaggtgtattcgagttcgctgctgcggtaggcggggttgatgttgaccaggatcatgccggccttggcggtggcgaactgaatcagcgcccactcggccttgttgggcgaccagatgcccacgcggtcgccgcgcttcagccccagcgccagcagcccggcgccaatgcggtcggcacgctcattcagttgcgcgtaagtcaggcgcacgccctggtgcaccgaaaccagggcctcttggtcgggccaggtgcgggccgcatattcgagcgcctggccgatggtttcggtgcgcaggggcggctcggtggcgccggtgacgaagctgggcgtagtcattgcatgtc

SEQ ID NO: 73336 - DNA, 316 bp, Arabidopsis thaliana landsberg
aaccacatacaagctggaatctattgtttcgcaggatccacgggggtttaaaggaagtacacataccgagcgcccgatatcacccgttcaagcaagctcggaatcttcctttgcttaattcattgaaagactgaaccttattatgaccatcctagggtgtcaggttcatataagaagtgtatccggttcttgaccaatttttctgaccatactattcccgggagatctactgtggggagatcggtaagtttgttcatagataactcttttagagtcatatatcgactcattagttcccctttatctgaagagggtt

SEQ ID NO: 73337 - DNA, 387 bp, Arabidopsis thaliana landsberg
ggcggcaggatcataagttacaccaagtttgtgttttgtctgaaatgactgggaccagcaccatttttgttccaacatgtgttgtcttttaacagcatcatttctgccagtgcacaaagtcggctcgtcttcttgtccttctaccccctatttatatagagccataatcggattgttgggcaactgagatcaaaccgatcatcactaaggactaatcactcatttaaaatattgttacaatgaatcgtacctgggaacagatatggagaaatcgttagcataagagctgtccaacttctgaaactggactctcaacatggcttgatattccttgacgaagctaaaagacagtgcgcatagctttcccaattataaattgagaggtgt

SEQ ID NO: 73338 - DNA, 468 bp, Arabidopsis thaliana landsberg
tcaactatgtaatataaggtatccatttttttttttcttttgatcactatatatcaaattcgttaaggtgttttctttcttgagggtattaatggctgaggcaataaattaaacggaactaccttgatcattcttggttttagtcttttagattaatggatatgtgaactgttataaacttatagttgatcatgcattcatggtatggtggtgctggctgatatatataacgatgcattgatattcttattcttagagtcatgttgttatttttggtgagatcttagagtcatgttgttgagaagttaattcttatttccattccgattttttggaaatcattcgaaaacaacgttacttattattctaaatttagtttttaggttattttcaatacatcgatatagcaaccagttttctttcccataatatcccgatatgaagaaaataaccataaatttttaaaac

SEQ ID NO: 73339 - DNA, 342 bp, Arabidopsis thaliana landsberg
ccctaccctacctaaatctaacccaaccgaaacctacataaacttaaccctaaacctaacaaaaccctaactaaaccctaatcctacccaaacctaaaccctaaccctaaccctaatctaaaccaaaaccctaaaccctaaaatttaaccctaacgtaaaccataccctacccctaaacctaaccaaaactaaacctaatcacttagcttcgaatccgtgggtctgtctatgctcaagatcacaaaattatatattgactacaactgtaccagctgttttattctaaacttgagtaaacaagtctataatttggcttgaagttacaagaacctacttacttt

SEQ ID NO: 73340 - DNA, 565 bp, Arabidopsis thaliana landsberg
cctgtcgcccccttccgggcagtcgccacgctcctctctattttctttgccgattctctccacggagggacgggtagcttctgccagttgagtgccgactacagcggagcggctctcagcacgatcagcactgaaggttttcgagctcgaatctcagtgatctgaccggcctgactccgggacaatcgattcagatctcctttacccccaaccaagcgactgcgtgggaaggattcttctactacaacgaaggccaagtggcgatcaactggcgtgcccaaatagaaatcagcgtcggcggccacacgacgaattacaccgatctctggacctttggcccaagccctgcaatcggtggagaaggaggagtctccgggagtaacagcggcccaacgccggtcacacactccttggtagtaccttggggcaccgaccttagtgcggtggtgatcaccattcgagatctctcttctatcagcggctccgcaggggccttacttaccgactcgaagatgaccttgtcgggagctaccttagtcactagcagcgtgcctgaacctttcgg

SEQ ID NO: 73341 - DNA, 280 bp, Arabidopsis thaliana landsberg
gatgcaaccaactctggaattggttctgacgaggaaacaattgcagaacttgcttgattacaatataaacagagacatgaggaatctatctaacaggccagtaataaaggtaaaactcatatttgcaaatcacataagcttaactttctcatttgctgtttctcttaagactcatttcaatgtccataagtagatgggatttcttggctgctgtggtgaagaagctgatggaatcaaatattacacgttcgtcgttgaagggtctaacaagagaaagtaa

SEQ ID NO: 73342 - DNA, 116 bp, Arabidopsis thaliana landsberg
aaagcgaatcccaaaaaacaaaagaagaagagaaccccgggcaaaaaaaaaaaaacggaaatacccagcgaacagaacccagaacaaccaaggcccccagccacaaaagaaggaaa

SEQ ID NO: 73343 - DNA, 586 bp, Arabidopsis thaliana landsberg
gtggtgggtacgttcgcatccccacgatagaagttgcccagcgtctcgtaggactgcatccagctcggttcggtgtcggcgcgggccaggtcatcgggcgaggtgtacggcagccagtgcgtgttgagcgcgccccagttgtacgagctgttggtgttgttgctgtagcggtgggtgtcggtggcacggacgcccacgcgcagcgagcgcaccacgtcactgtcgaagttcacctccaggtcgagcttggcggcccgttccaggccgtagtcgtgctgaagatggtccatggccgaccacaggatgtagttgtgcccgttggccaggtaggccgggtcggtgaccgtcacgctgggcacgctgccgctgacgtcaagctggagcggcggcatgtagatctggttgtagaccgtgaaatccagcgtgttgctggtggatttcgccagctgcaggtcgccgctcaggatcacgtcgtcggtgaggttgaccttgaagccgttggaccagtccgtggtttgtgtgaactgctgggcgttgcggttcgtcgtgtagtaggcgttgttgccgaacggccccagcgccgggg

SEQ ID NO: 73344 - DNA, 895 bp, Arabidopsis thaliana landsberg
gggtgttgatttcaatatgaattttagtagtttcattctcaatggtggagaaagagtgactggtagtttactaatcatgaggatggcagagagctttatactatatttccatggcatttataaaacagcagcattattaaagtttccggtgtttatgcttgttataaacttgttttacgaacttttacagggggttgttggaatggtttttggcgacaatcaatcttctaatgaagacaggtacattttcttctcttttctttgctatgagtctggagatatatgctatcatggctcgtaagtatttcgagaaatgaagtaatgaggattggatttttatttggtgtatatttgtagttacattcaacgcctgctggatcgtataagtaatggtaccttgcctgacgataggagaactgctatagtagaacttcagtctgttgtcgcagaaagtaatgctgctcaattagcttttggagcagccggtatgtgtctttctgttttatgttatgtgtctgattgattgtgagataaaatctaaagttacaatttacattctgtcatttcaggatttcctgtgatagtgggcatcctaaaggatcaacgagatgatcttgaaatggtgctgtacccttatttttttttcccatatttcttttgttctctctcagtttgtgcatagtgctgtttgtccttacgtcatagcacaatctcttgtcctcactttatggaaaatgtggtaacaatcgttgaagcaaagtttgttaaagatggattttttttttttcttgcgtcaaacaaagtagttttgggagagtagcatttgtaattctacatttcgtagtccttgcaaataatgtaacgatgtataatttaggatcagaataggccacaa

SEQ ID NO: 73345 - DNA, 548 bp, Arabidopsis thaliana landsberg
gtggttgtctaccaccatccacacgagccacacgcttccagtttggcccagtcagggggggttaggggggcgggcatgcttccacaggttggcggcggctgcttcatgcgggttgccatggagacgagttgctagccacccctgggcaagcaacgggggccagctgctgttttgggcaggggtctcacccagcgcagaaaataacagaccggtcaatgccaaacccatacaaaaacatcgtgggcccgttctagcatcgacgttgccaaccaccaccttttgtttctctcccattcgaaaaaaaaaagacaagacttgctcttgcaagtgttttgtttgtcttgtcttgtgctggacgccctcccgacccgggttctttactcccctcccttcagccatcaaacgccttttctgctgcaagttgcccgttgctttcccaccgttaccacgtcaccggctgcattgatattaccacgctgaactggaccgggccttgtacctcccctcgatcttgtgactgtttatttttatatattctctgcgttttt

SEQ ID NO: 73346 - DNA, 762 bp, Arabidopsis thaliana landsberg
tcttcctgcatattagccaatctctcccatccacattccactgcaagatcacctctagctatcataattcctaaaggattcgaacacttcattgcttctaaaagaatcaaggacaaattcttgaatccacttttcgtttcaatctttaaaacaataccaagatcatctagtttccttttcttcaactcttgtcgaagaacggttatatcatggacatcacgtatgaaagaaataccaaccatatcagcatgtgaagctacataatcaagatctttaatatcttttgatgttaagcctttgaaatggatatcgctctgcggtatgttaatggacttctctgatcctagttttgtaccttttggacgtgcatgagttatggagacaattacctctgaaggacttgttccttttatgactccccatatttttccatcatcaaaaccaatggtttcaccaggcttgactgaatcaaacaaataaccggaaggacaagttaacctatgagctcctggaacagttacagatggttcatcgagcgatccttctcgggttatgactagtaaatctccaacttttagccttacaaaagattctttgggaggacatctactactcgtccactaaacgtctcctttctttccctaacacttactcagtcatttcttgtagcagtgcaaacatcagcacaacccgtctgtgaacataacttttagattagctctttctcttacgactactagatacattgaacacaaactgctg

SEQ ID NO: 73347 - DNA, 354 bp, Arabidopsis thaliana landsberg
aagtccgtaacacaatcacatacaaatcctgcctcactttccagtgcacacacaaattgtgttaggaaagggtttatttaagttgcaccaaacccacatgggttcttgtagattgcatgacccatctttactcggacccatctgtcaacttcaataatcctatggcaactccatggcctgtttcaccaaaacgtttatagataaacccccgttccctgttgacttgataagcctatcagatgaacacagaaaactatccagatcatatgcaattctcgagccatctctgactaaacaaattaccctgactattcttaaagaaaccatctttcacacccattgtcaatgaaattt

SEQ ID NO: 73348 - DNA, 575 bp, Arabidopsis thaliana landsberg
  unsure (1)..(575): unsure at all n locations
aagcatcagannnnnnnnnnnnnnnnnagttaattgttcgacttcattagtgtaaatagcaacaataaatccaccactcactcactcactcactgaaacaaggaaatatgaaagatgatttatgatatcaaattagaaaggcaaatctatttcacgaagagagtattaacgtaacaaattttgattagatatgaatatctctgaaatgatttattgcgttaaggttcggcattcgaagcccgaaggcaagttagaattagagtcataaccctaattctcgattatgaccctcgctcggctcaaggagatgccgtaaaaccctctcagtccctgtcaaacactaggatcaaagatgagcggccaacctaaggaagaagatatcaatgatatctttgattcattccgtccccagatcgatgagcacattggcaagtggctgcccagaaaattcactcaggagtctatgactgagctctgcggtcccgcccactatgcgtacgatcttgagagtgccaccaacgctctattggtgcctacttgggatattctcgatagaggtatgtgaaagagagtga

SEQ ID NO: 73349 - DNA, 513 bp, Arabidopsis thaliana landsberg
cagggctacaaatgaagaaggcgctcaccacaagacatcctccaatagatgtttattgtatctgtagggaagtgacagaggtaatggagaaattgcatgccgcggatgctgaaaccatccctcttgccagcaatatacaaatggtcaacatggtgaataactacgtaagttttaccacatgtgaatcttgagcctttttttctacttcaacataattgttccgataaacataagatttggttggatgtttctaacaggtcattatgtcctacgggcttcttcacgatgattatgaatacggagccataactgagagttgccgaaaggatgtgctgctcttattgcgggagttatttccgaggaaaatatatttgtgggaaaattaattccatcaacaagtcagtctaattaacaaaggactagaaatcgtaagtttctttcggtgctaaacacatgggccaaaccttagagccaacatccgggttaatacttggactcctaattaaggggcct

SEQ ID NO: 73350 - DNA, 522 bp, Arabidopsis thaliana landsberg
caatgccttttatgtttattaagtttctagatattctaactatttttcattttaaaagcgacaacaaatctaaatggaatagatctaacaaatttaaaaggcttaaatttgtataaacaatttttttaagattattttaacaataatattgatgttgatttgtgaaactttttgtcaatcagccggtgtattggggaacatcatcaatggtagacgcagagaaaagactattagccaacgcacttttcgacgaatccaaccaaagattcgtcctcttgtccgattcttgcatcccactctacaatttcacaaccatctacgattacttaaccggcaccaatctcagcttcattggctcatttgacgacccaagaaaatccggtagaggccgttactaccacacaatgtatccacacatcaacatcacacattggagaaaaggatcacagtggtttgaaacaactcgagaacttgctcttcatataatcgaagacacggtttactacataatattcgatcaca

SEQ ID NO: 73351 - DNA, 509 bp, Arabidopsis thaliana landsberg
  unsure (1)..(509): unsure at all n locations
taccctcttcttaataaggcttttctagattacaatattcgtaatctcaaattaatgtccgtaaaagataacttcaagaatgttgcttaagtgtataaaattactatatattgtatgtttcagtctaattactattctgaatgacgatttggactcacataaatccaaaaatttcagagagtatacgtatatgcacaatgaactatgcctgcgtagtacatattaatacttatccatttattcgatttcttggcaaacccccccccccccccnccccccaataacttacatgcacaagagatatccagaagagaaaataaaatatatatgtttcgtaaattttgttccaatagttttggtttccttaatagagttgcatacgcttgacagctatataagtatataggtgtatgtaaaggaagaaaacattatttgtgactgtaaatatgttaatattgtctacgtataaagatggtgcagtgcacacttcacacatataaaaaaaaaaa

SEQ ID NO: 73352 - DNA, 319 bp, Arabidopsis thaliana landsberg
  unsure (1)..(319): unsure at all n locations
acgagagattacctttccagatggccttgcatattttccattttcgacgaaccacactaagcatcgcggggggggtggttatagcgcctacctcattattgttcaacacttacggtcattacctacttcatgcgcgccgatgtggccctccaatacgtatattgaaacaggctttggataaacgtattcttgnnnnnnnnnnnnnnnnnnnnnnnnnnnnnntatgttcgtatggttcccaaggaacaggaacaacttctactcttaatgactctgcatcacataggaaagaaaacagattgatggatggagtcgaatc

SEQ ID NO: 73353 - DNA, 476 bp, Arabidopsis thaliana landsberg
gccgctgcaggtggccgaacagttcggcacgctggcctcgctgtatccgggccgcatcgacctgggcctggggcgtgcgccgggcactgaccagcccaccatgcgggcgttgcgccgctatgccgatgccgccgatacgttccccgacgacgtgctggaattgctgcattacttcgagccggccaagcctggccagaccgtgcgtgcggtgcccggcgccggggtggacgtgccggtgtggctgctcggttccagcctgttcggtgcgcggctggcggcatcgctgggcttgccgtatgcgttcgcctcgcacttcgcgccggatgcgatggatgcggcgctggatgtctatcgccgcgagttccggccgtcggcacgcttgcagcggccgcacgcgatgcttggcatcaacgtggtggcggacggcagctaggccctggcgcggggggaggtcactatggagaatcggggctaca

SEQ ID NO: 73354 - DNA, 735 bp, Arabidopsis thaliana landsberg
tctttactatcctcttcataaaaaattcaatatatcacaatgaattttgagtgccaaatggggttgaaaaaataaattccaaataattactgcacaacattttttataagtttaatgcggaaggtgaagaatgaatggtactttaaattcttatatagtaaataaatgattaagaaaaaccctacttcaactatttttataattgtgggagatattacaacgaaatttagtaggttaactagatttactttattgaattttcacatcaccaaacaatcataaagaattttctcaaataacagcctgtgtaaaataaaacaatacactatgaaataaaagaattggtaacggtccatttgaatattatttgatcacatataagctgtgtgatgtgcttcctacccaatttccaatttaatgatttcaccgtcaatcccactttaatttgtctccacatattaatatcttatgaataattgaaacagtaccaatctataaatctatagataatgtaataaaattttgaatttactatttcaactaaaaatattatcaacttcttctccaaaaacgcggtttcttcgactttaagagactattcatctccaaactttcaaaaaaaaacctaaaacaaaaaaattatctttccttcttctttctccatcaatggcgtcaacaaaaccaaccgatcaaatcaaacaaactcaagatatcttcgctcgtttcgacatggac

SEQ ID NO: 73355 - DNA, 2018 bp, Arabidopsis thaliana landsberg
acccctccaattagcagtagatactagatactatactagtaatttcaatttatataaatgcagaaaaaaaagaagtagggcactggcaaaagttgaagttttgatgaatataccaaatcagattgaatgtaaccaaatcgctcatgttcctcagacaaaactgtgtaccaatcatgaccatatcccacgctaaccaatttcttataagtcatcttagtagtagcagtaaaaatatagccatggaaaggtatcactgatgatgcaaggagacattgaaagaacaaaatataccgcctggtttagcattgcgtagcccactgatacgaatggtgcaaaagtttcacaccgacgatggatcagtagaccaaatcaacgcactcaatatcttgaggataatgaaaccacataaaggaaacgaaaagaaaagaaaatcaacaaaaccgaaaagccatggttctgggtcttcataaagtctgtgatgtctttgagttgttttgttaatggacaaagaggcaatggaggttgatagtgtcagtgttgatgccccggagggaatgtcccaacgttaacggtggattgataatcccagagtttaagagcagcaatttttagaaattaaaggcacaagaatagctcaatattaaaagatatgcaaaaacaattctaccgctatttattctacaatctactattaacacaagggttcatgagttggtgattagtcctcaccactactgtttcaagttcaacagtgtagccagacaaaaatcgacaatgctcctaaaagaacagagtgactggtatatatcagagaaagatgaaacattccacaagtacaatgatagtatgagaaagagagagagactagacacacatggaagattggacaataatagtattacattattcagaatgtggcggataagtgttgtgaatggcttacccgcagaagaaacaaagcaataaagtgaaagaattcacatattatagtgtgtaatctacggggatgtagaaggagaagccactcgatcggcttctatcatcgactttatgtagtactctcccgctttgtacgacgacctcaccattggtcctgatgctacgtatctgaatccctgtttacaagattccatattagcctactttcccattgcaattctcagctaataaaacttgaaaacaaggaagagaccattaccatttccatgccaagaaggcgatacctctcgaaggcatctggtgtcacgtactcagctactggcatgtggcgtttagatggtcgcatatattggccaaatgtcataacgtcaacccctgctgctctcaccttctccattgtcttaaccacttgatcaggggtctctccacatcccagcattacagaagtctttgttaaggtgcctgcaggtgcatactccttagccatcttaagcacatccaatgactgcttaaagttagcacgatggtcccgcacaaaactctgaagctcttcaactgtctcaatgttgtgagctaagacatcaagccctgacttggaaaccttctcaacacatccaccatctccgcggaaatcaggaactacatcatcaaacaacaaaacaaattaaaaaacaaaactcatgatgatcaatcccaccagatcattatattacctagtgcttcaatcaacatctccggcttcaagaatttcaatctctgaacagtttcagcaaaatgaccactcccttgatcaggtaaatcatctcgatctacactggtgatcacaacataatcaaccccccaggaagcaattgcttcagccacattgttaggttcatttggatcaggcggtggaggtgtacgcgatgtcttcacattacaaaacctaaaatagaatccctttcagagaaaatagagaatcaagctgggcaaattcggtgagaggatgatacctgcagccgcgtgtacatgtatccccaaggatcataatcgtagcggtggcggttccagtttcaccaccagaccaacactcaccgaga

SEQ ID NO: 73356 - DNA, 524 bp, Arabidopsis thaliana landsberg
agattttttttttttcctttttgttttctttctataatatgttaatcattgttggtgaaatgtaaaagtttacagtttcaccatatcagtttcttatcgctttgatctaatgaaagcagaaaagaataaatatgtcaaagattaaggataaacaaatgcagaaaagaatggtatatataagaacaattaagaatgtgaacaggaaaaaaatgttagtttttaatctactttgaaattcagaaacatgatgtgcaggaaaaataaagtggtaataaaaattctcaaagtcaaattcaatgtcaaatacatacaacaaattaaaaagatcaatacatatgaatatttgatatatgtttttattataaccaactacttacacttgtgcatgttaatgttttacatgatacctctttattagatagtgctttactataataattgttaataataggtaaagtgagtgtatagtcagatgttgatatgtcctactttatcccataaatatttaactttggttaatactc

SEQ ID NO: 73357 - DNA, 560 bp, Arabidopsis thaliana landsberg
agaccaacacaaactcaaatccatcacaaaagtcctattcttatacattgcttcacctaaaccacacaagagggctcgagatatactgattcatacccttacaataatcaccaccccgtgaataatacaaatacttccctcttcgaaaactagtctgcgaaccaagagtcggaatcgtatcattaatctccgaatcaccaccgcgagctcctcgactcgagctcggtctactaatcctaggcctacgagcattaacaccagaatgccaaccactagtatgaaacactttataagtacaattctcaccaaatccaaacctaaacctcctgaaatctctgtatctcctccatgacttctccttcttattcctaaacctacaagaaacatcgcattcgtctagtttcgatccgttaaccggagtttcgtactctaagagcacaatagatttaaaaaccttcaaattaaacctctcaacagcaactaaaactcttggatcagaacaaatcacaatcttcaaattctcatcacaatctatagagttcttcacaggcatattaccg

SEQ ID NO: 73358 - DNA, 561 bp, Arabidopsis thaliana landsberg
agctctcccgagatcctctttagtcacaggaccagtagacttttcctgtaaataatatggagtgagggggagggaattgttacacataattcatatcaacaaaatccatcgctgaaatgaaaatgtcctgtaaataatatggagtgagtttgatgtaattgttacacatagttcatatcaacaaagtctatcgctgaaatgaaaatgtcgtataacacttgaaacccgtttcaatgagaccttaaaggtaaaacttttcgtaatgcaaccttattcaagatacagctattttttcatggctagttacacaaactccaaatcatcatataaaaaaagtatataccagttgaaatttcctgacaatagagaaccgaattgaataaagcatctaactttcaaccacaggtttggtaaaataacaaagaaagacgatttctgacccatgaaaggtagaaagagttcattggggaatttcatcgaacacgttggtgatgatgataagcaagggaaggtcttactaagtgacaaaacaaacccggaaaactaattgaatcgggatgg

SEQ ID NO: 73359 - DNA, 474 bp, Arabidopsis thaliana landsberg
gggcgatagtagtcataaatatttggtatgcacaatcaacgttcacaaattgtgaattacaatctgtgatctatgtcccattttgtatatactttatttcaaatcgtaatatatatgagtatatcggatcgaaataataattattagaagtagtcttgttccaacagatatcatttttcttttggtaacacattaagacgaagagataatagatttgaacaaatactaatcatatatatatccatatgtcttgcaagtccctaaattattgaccgaaattatttttgtagacattaacaaattttttaatatgtgaaattgtgaatagctgaactcatgtgcatggttaacctagaccttatacgttcacattacatccttaacaacatatcccacgttctaataaatcaacgagttgttgaacaacatatggggcgactgtaagaaatacatatatttcttggaccaccaaat

SEQ ID NO: 73360 - DNA, 587 bp, Arabidopsis thaliana landsberg
tgttagtattaataaatctataagccaattgcattttcgtatttagacacaataacaaggggaaaggggttcaacagaactaagtagtataaataattaatacacgtacgaaaatagaaattagaaacaattatttacttttcttcacacaaaagttttcgttaatataaaatattgttaggtaaattatatatgttctgtaccaaatctgaataaaaaaattagagacacaatcgacgaaagctccgatgtgggaggaggaggggaccatcttcaagactgacacgtgtatattctttctaagtgatctgcacagacacaaactttggaagctctaattagttccactaatctccataattacttgtaattattttataacaaggattaagaatcccacatttgagttcattggaatcaactccaaaccattataaaaaaacaagatatcatacacatgacacattaatatttgtatcatctcaatttttattggctagtgattcaactatcactagttaaattatgcaactcatcatgttttcagctataggttcgaggtcttggagcttactatatattgatat

SEQ ID NO: 73361 - DNA, 529 bp, Arabidopsis thaliana landsberg
  unsure (1)..(529): unsure at all n locations
tccacccgcgtgggtgaagaatttctcgtgctgttaaacctagtagaatatgccgttcacctgggggacggggttgggtccgatcaacccgcatccctcgccgattaggtcgaaggcgtagacaatcgccgggtctggaacggacctcatgcggtagaccgaggtatccgtaaagatcaggttctctctattgccagccatccctcggatgattcgagagccatgcgagaggatgtaggagccggcgtcgtttgctcccgatgccgtccaatcttggttattctcggatgcggaccacctgaccaccatcgggtcaaacacgcccgctgtgttcgtgcagccacaggcaacaagattccgctctgcggtgatgaacaccgagccaacacttgaaggcgagccgggtatctnnnnnnnnnnnnnnnnnnnnnnnnnnnnnnnnnnnnnnnnnnnnnnnnnnnnnnnacttgagccctcgaataccagggccgcataagatgacgctggggcgatgaaagcgcgtttatag

SEQ ID NO: 73362 - DNA, 388 bp, Arabidopsis thaliana landsberg
gtttgcatcgtactcttgtttcgggtttttttttgtttgtgacgatgcgtgtttctgttggggggattggattcgaattcgaattacggtttttcgtgagtatgtaagtatagtgattgtatgtgttgggaatttaattatatactgtgttaatgtgatatagttatggcttcttgttttcccatcaacattcgttgctttagtgatcatgctggaatctgattttgcttctttaagattatgggagagctaatcatacttagattcacagtattagtcattatatttgctaaaccttgaggcacctatggagtatcatacgtaatgatatacgatttgtgaacttttctttggcgtgacttatttgattcatcgctaggcccatatc

SEQ ID NO: 73363 - DNA, 614 bp, Arabidopsis thaliana landsberg
aagaataacccaaggctgcagactattttactaagtgggaactcattgacaaagcttcaactacctattcttgttcatggcttgcaagttctcgatatctcgagtaatatgatatatgattcgattcaagagcacatagggatggtgtttccacacctgaggtttatgaacttttcttcaaatcattttcaaggaactataccatcttcgattggggagatgaaaagcctacaagtcttggacatgtcttctaatggtctatatgggcagctacttattatgtttttaagtggttgctactcgctaagggttctgaagctctccaacaatcaattacaggggaaaatattttcgaagcatgcaaatcttactggtttagttgggctttttcttgatggcaacaattttactgggagtcttgaagagggtttattgaagtcaaagaatcttactcttttagacatatcagataataggttttcgggcatgcttccactttggattggtaggatatcaaggctttcctacctatacatgagtggtaatcagctaaaaggtcctttcccttttctacgacagagtccttgggttgaggttatggacatctcacacaa

SEQ ID NO: 73364 - DNA, 305 bp, Arabidopsis thaliana landsberg
ttactctcctctacctgaaacaaaaattttcttctcctcactgcctcgacttgacaaagggggggcactacacgtgttctgtgattaggctttaaaaaccttcatctagagctcattcaccggaggaagtaacagctctgtattaataaagctgaatgaatttacaagcccatacattagattggggtgaagatattactatgggtctaaatataggcgaccactgctaacttgcaccccagcacctgaccacaagtgcttaagggggtcactgccttccatgaacctcttgttgtgaaataggt

SEQ ID NO: 73365 - DNA, 706 bp, Arabidopsis thaliana landsberg
ttatgtattattttatggttttccctttttgtgtgtgtgtgatatttttcttaacaaatggtagattttcttcagcaactcaaccatctttctgttcaaataaaggcttactttcttccttggaattcaatagtttatttaggttatgtaattcggaacaaacaatatgaacagtctaaagttggctgatatgaaatatgaagaccgtgggccaaaccccgaaacataaacaacgggcgtcgactgttcgtctagtattctttctttacatttccagttgaaaatattattacaaaaacttcaaattattgattaaattacgtaggacatggttttgaatctctagtttcacaaatgggcaaacgaaattgaataagttcttctgaaggacgaaaattttgattttaaattttttaattatgatcagcatgcagccaattattacatatagatacccaagatggcaagatccaacaatcatcgtactaattcgtttttaattatatactgatatacacagaaatatttggatcacgttgctgttgtattttatttttctaaaagaggtttattgtttatctgacaaatcttattctttggatgaagttaatttatgtaagacaagaaagattcataaagttgatgattctacaaacccaatcgttgatgattaaatgtccatttaaattagggttcaagttgcctt

SEQ ID NO: 73366 - DNA, 113 bp, Arabidopsis thaliana landsberg
gaaagagacgaggatggggcgtgcaaaagcaggattggcgtaaagaaaggggaggtaaaggaaggaggggtgagggagaacaacgggttgctggaacaaagcaatagtggaaa

SEQ ID NO: 73367 - DNA, 477 bp, Arabidopsis thaliana landsberg
  unsure (1)..(477): unsure at all n locations
acaccattatacgaaaaaatgaaagtttaatgatcatcatgttggtctttgactatcctcatcattgaagttttatgatggaataggtaacatcaataaacatttaattgttgacaacaaaaataaatacatttactatgcaaataccctagttgtttcccatgttaagcccggtcccatgttactgtattaaatatcacttatcctttagttttgttaattaggaaattcaccggcttccttcttataggcccaaccatgcaaacaaattcatttactaataacaacaacctatcttatctttttatgaattatgaaaaccaaaatcttgagaataaacgtatgaaaaatataccaacatgtataaccagaannnnnnnnnnnnnnnnnnnnnnnnnnnnnnnnnnnnnnnnnnnnnnactggttttcaagggggagtaagttgatattcgaatatgtaattgtaacgtacgtaga

SEQ ID NO: 73368 - DNA, 674 bp, Arabidopsis thaliana landsberg
tattccagtaggatgagtcttcaaaccaatctcagaaacagtaacaaaaggttcactactgtaatacttgtcttcaaagacaaatctacttgtacctctaccaacagaagatggcccagtcaccttgttaagctttgttgttccatcaactgcgacagtgtaaccaggaatagcaccaagatcagctacacgtatcacaccacttgaggacatatttgtctcaccgccgcttatctgactagctttgttataagaaatgttgaactctgtacttccatcaatggaatcatatgagtctctaccattagaaaagcaaggacttttgccagaatgttctgtaccacctgagcatgactctacttcctcaggagtcctacaaacaaaataaagctcaattcttaaaaaagaaggctcttttccacaaattgaatcataaagtttcgattttaatcagtaccaagcatcgtcggaggaatcaccatcaccaaccaccgtagtagacttctgctgcaaaaacagttcttcatacgacggagctaaatcgagatcgttaaaacctccgaagacttcacggtagtcaaaaccttgactccgaacatcgaagtagacatctctatcatcaacaaggggaagatcgagtaccggaatcgaagaaacggcggcccgtgaggagc

SEQ ID NO: 73369 - DNA, 493 bp, Arabidopsis thaliana landsberg
ctacgcgtggcggcatcttatctatccggctttagattgatccggcccaaaccggcaagctgggtttgggctacgaagccaatccgatgagcttcatcgcgaacaggccggtggtgcgtaaccaatggctacgagcgcatcatggatgtgcagccggacaagttgcatcagcgaatcgctgcttcctcggttaaaaaacgaggtggagcgggcgacgaagtatcacgtcgacgctggtcctcagagctaaaggtagacaactaaggccccgcgcattgcggggccttgtttattgtacgagccactttagctgcgtggctggaaatcggtgaaatgcgcagccaaggcttcaaatgccgcgcggtccgcgtcggagcgaacagcgggagcgacgatctgcaacaagacaaactgatcaccggcggtcttgcccggcaggccgcgatgctttaggcgcagcttttggccgctgcggctgttgggagcgaccgtc

SEQ ID NO: 73370 - DNA, 431 bp, Arabidopsis thaliana landsberg
aactttgggcacatcctctatgatcttgtcatgtttgttcctagcatgtcctgaaatactgttaaaccaaatctgctgccaaggggatggggggattctcttttcgacatcttaatgcgctccaagcgctttgcctgttatattcctctagactgagattcttgttctaccttgaacagttatgccttcagttggggtcttcattataaagtttgatccgtatagatttgaagttagaaagagtagcatgccgtcatattttggctctgtgctattcgacctcggcattgactactcggttacctttcattggtagcggagtactctcaggtgacttctggggttcctagccaagacgcaatcgggggggggggtcaccagcctgttgctgataattaaggggtcaagacatcaaaattggctatgtgacc

SEQ ID NO: 73371 - DNA, 681 bp, Arabidopsis thaliana landsberg
ggcgtcgccgatcatgatgttgtgaaaagtggaaacataggattcgagcggtttgttgacctggctgaaaaattgcttttccgggtcgtagttctggtcgagcagatccgccgcacctcgcaggaacgaaccgcggaaaaaactcgggcaggtgagaaacgcaggtacctttctcttgaaagagacagggaaacccagaaaggcgcgccgctgccgatgatagcaactggtgccctttctcctgccatcccatgcctttgtcgcgtgattgaagcagatttgcgccagggacggatctttcccgaaagcgtcgatgatgccgggcgaaacggggcgctgaagcagccagtcgtcttcgagatgcagcaccgtttccgccgttgtcgagcgccagttccttttgacggcggcggtgaagccaggggcgtcgggacagtggatgattgcgtctgcccgataggcgcgaatgagatcgatacaggcttcttcgtcattcaccgttccgaaagccggatcgatattgacgatgaatcggccgatttcaaaatgcgaaagcagattcttgtcgaaggactcaagcgtcgtggccagcaggtcgggtcttctggcggcggtgacgcaaacgtcgatcatatccggtgtccggaaaacggaaccgtaactgaccggcgcaacggggtt

SEQ ID NO: 73372 - DNA, 491 bp, Arabidopsis thaliana landsberg
acgaatggattagggattctcgacaattctttttatttatcaactgaatcttcccaaacattgggatgggcaagatcctttagaacctcccaaacacaattattagactcgaatccagctcccatactcatcattagtatcttctcacctttctttagtctgttcttagcttccatgtagccaagaacataccataaaccaccagaagatgtgttcccgaacctatgaagcgccattctcgctggctcgatgtcaaattccgtgagccctaagcttttcccaactccttcgataatcgctcttcctccggggtgaatacaaacatgttgccaccctgtttttaggattagacctatccctgagctcgcgggttctctctttgcggcggttcttcgtttaagcgcacgaactatggcatatcgaatcagttccttgacaggcaagactctagggaggagaacttggaggttcttggttagggctcgagctgc

SEQ ID NO: 73373 - DNA, 1317 bp, Arabidopsis thaliana landsberg
gaagtaaaaaatcagtgatttgtaataataaagcgagccacatacagttttatctgtagccacacgaaacatccctggaagtgaaattccaccaccacaacccatggtcacaccatccattattgctatctgcagttaaacaaaactcttgatgtataagaggcttaagagcaagaattaaagttcaaaatatttcaaacacttgccttttatctacaaaatcagtttcatagattatcgagtggacacaaataagtaggttagctctttctagtcacacaaggtcatacgaaccaatcccatctggtattaacaaatagcatcgaaaaaaatggctaggaatcttacatttggttttaaatacgttccttggaggtatacaaacttgtacaagttctcgaaaaagagtttagattcttcagtatttcctgtgcaaacaaaaaagtgacaatacatcagcaaagcttctcagtaacttcaccaaattaactctggtgaaagggacttcaggctcacaaaacctttacaagtatttaacaactggaaactaatacaagagatggaccttcattgatcgagtgataaagagacaagacatctgcaccagagcagaaagttttaccgctacccttcaggaaaaataagaacagtagcttaattgagtgagattttggtaaaaaccaggcatcagaaggacacaagcagcagcaatgaatataagtaccataccttcatcaaaacaaaggaaatagctgggttctcttcccatgattcgtatagcctctttaaccgaccaacctaccaaggcaaaagtttttgaagcataactaaaaaaactaaacgagctcaagaaacgagacttcttaatccaaaaagactactctggtgaacacaataccataggcgcagaaagagcattgagagaagatgggttattgagaatggcagctcttgatttagcttttccttccaccagaaccttcaattacagcaaaatctcaaattgataaaaaggaagtacagatttcatttacactcccagaaaatcaagtgattagaatcccatttacgatcaatttagataacaatgttaaagagttccacaaacagactatcaaattaagcacatttagggaagatccgaaacaaaagaagacgaaaaacctggtcttcgaaatctgcatctgatgcggaatagtttgggagagcagaaaagcgtcttccataagaaacagaccgaacccattgtaagggttcactcactctcctcaaagctttcactgtttgcatatctctgtcgctctccgtcgagaagac

SEQ ID NO: 73374 - DNA, 330 bp, Arabidopsis thaliana landsberg
aataaatcttatcaatctcatattatggtacgcactctcttttttcaatgcccagcataacgactcgggaggggggatattcatttaatcgaaacgctaaccactaaaatatatccttgcccaatgcgccgaccctatctcatgtttatcctttatgcacagggtgtacatggccttaatttgaccatccactgttagaaactatccacttgtgagctcctatccaacttttttcactagctggggcaatccttatgactagaacttgtttggacattgctacataagggaattacacctgcaccatgcatgatgagcgatcgaaaatac

SEQ ID NO: 73375 - DNA, 678 bp, Arabidopsis thaliana landsberg
attatatttaacatgatatattttccttctatttttcatagaaactaaaaagggataatgttttcgtagaataaaacaggttaacaaataccagcaagaaaaatataagaatttttttaaaatttgaattattatcaattctacatatcaataataaataataatcataaatgtacaaaatgctgtggtcgaaattggttttgaactgctggctttatcctttgacgttggacataggccgatctacatttgatgtgacattgtaagatctctttaattaatggatttaaatctcttcattggacccaacacatgtgggttttaattgtcatcgcaaaatttattcacttttctcttttgttttttttccctcagaacataactacatatacaagtgtagtacatattattttttcttccccgtggttacgaatgtcgaccaaatattttctccaagttttgaatagttgtttttgctttgacattgttgataataacaagctttaaactatcataattatgttttattttccaaatttattacaaaataaaaaataagatacactaaaaataataccatgaaagatggtttggaaatagtcattcaaaatctttccaaggaataatattcttttataatgctctacgttttagctagataagatacactaattatta

SEQ ID NO: 73376 - DNA, 568 bp, Arabidopsis thaliana landsberg
  unsure (1)..(568): unsure at all n locations
gatcatgccgtggttttctttcatgcaacattcattatcctttgaacaaattagtttccgtgatgagacatcggattatagctagttagtagttaccaataaatatatgaacgaaatatatgtttataaagtaaatttaaggggatgaagtgattaccaaaacaagtgattagatccggaaagactccttttttctttnnnnnnnnnnnnnnnnnnnnnnnnnnnnnnnnnnnnnnngctttatatatagacacacatagagatgagatcacaatagcatattctattgggaaaaggaatagaattatcgtcaaactggaatttctttttggtttgataaaatcagattggaaattaagaataattcggaatgtaacaactctttttaataattttaaagtataagtcatttggtcaatagattttttccacatacatatctattttatattaaaaaaataacaactctaaaaaaaaaatgaacgtgtgaaaaaagattttttaaaaaacaaaacttataaaaacaactgcttttcccttttttatgatacaaataaaatgagaaaaa

SEQ ID NO: 73377 - DNA, 620 bp, Arabidopsis thaliana landsberg
ttctccctaaactaaacctattgttgaaactcaacattatctttctcttacaccgataaaatttgatgggttctaggttaacgtcattctgcttttcagagcaaatatttaggtccagttttaaaggacataaatagtatttacttgagctgattcactttctgattcacaaagtatatttcatttttttcaaatagacaacataaacataacctgaattcaccaaaccgtttttccactatagtaaaccgagaacacttaatttactgacaatcctttggccggaattcaattccttcaatcatcacaccacacttcaaattaggtgaagtaacgtctacaatactcacttgaacttcatcaaaacccattaatcctccatcattgaagaaatccccaatctctgcctccatccacccatctcccctcttctttgatttcattagcttcttctttggccactctttggttttatcggtagactcgtcaaagcatatgaattgtttaggcatttcttggcctttaatcctacaccaacttgtataggcaaatctcgtaagccatgacgttcatctattatcttgtacacaatgtaaactgaataatgagttcctagggat

SEQ ID NO: 73378 - DNA, 465 bp, Arabidopsis thaliana landsberg
cccatgaagcatttgtcgcgcgccgaggccgaaggcttttatgctttacatcgcgagcgcccgttcttcgaggccctggtggagttcatgatctccggcccggtgatgatcagcgtgctggagggcgaaaacgccgtgctggcccatcgtgacctgatgggcgccaccaacccgaaggaagctgcgccgggcacgatccgcgccgacttcgccgagtcgatcgacgccaacgccgtgcatggctccgacgccgtggaaaccgccaaggtggagatcgcctatttctttgcggcgacggatgtggtttcgcgttaatttcgtgcgttcatccttgaacgcgaagatcagacagcggccactcgtggccgcacagtagaaacaagtgcgttcgtccctgaacgcgaagatcaaacagcggccatccgtggccgcactcttcacaagagccactctttgaactcagtt

SEQ ID NO: 73379 - DNA, 460 bp, Arabidopsis thaliana landsberg
cggctggcagctcagcgtctaaacaatctattcagtatttatcatcccaattcaagagatgaatcttatatcttcttggtttaccatcatctattatcagaataaaaatatagtaattttttctcactataatagaaatagacgtgaatatgtcaaaattctacagacttacacagttgcacaagtacctcaatttaattctcaaattcatcacatatttcacacactcaaattcatggacgttaacacatttatgatacgtggttaccactgctattgaatagaaaactaatgactaatcacctgccgttgttttttgagattagtataaagaaaaaatatcaatccagtgctgtttagtgtcttgtttgagggtgtaaagcacaacccctatagtaaatatgagtgttaaaccgaactaaattgtcaggaatgttcttgcgactaacccaataaatat

SEQ ID NO: 73380 - DNA, 441 bp, Arabidopsis thaliana landsberg
gaggccggaatgccgtccgccttcatctccagctcgacgtttgacagcttgccgttgctgaacacgacgatcgggaccgggagctgctgctggcgcaaggtgagcagctcgccgagcagcatcgcaagaccgccgtcgccggccagcgcgatgacctggcggcccgggctggcggcctgggcgcctatggcgtgcgacagcgcgttagccatggacccgtggttgaacgagccgatcagccggcgggtgccgttcatgtgcaggtaacgggcggcccacatgcacggggtgccgacgtcagcggtgaagacggcgtccttcgcggccagcttgtcgaccgtggccgcgatgtgctgcgggtgcagcggcgcgccgacgcggccgggctttggcccggtggtcaagccgggcgcggacgcgccggcagtgcttggtcattcg

SEQ ID NO: 73381 - DNA, 502 bp, Arabidopsis thaliana landsberg
atgaccgcgacgaaggcgtccatatcatcgattttttaattttcgctcacagggtcggagggaaaataaggggttagcataatctgcctggcgggtaatgccatcggttctgttttgatagatgaaaacgcatattaggatattcctaaaatcaatttaatttatttgacggatctcgctagagtcgcctggcacgggccgcatgatgctgcccgcccagacaccgaggaacgccatgtccatccgatcgaagctgctgaccctggccgcggccctgctgctggccagccaggccggcgccgccgagcgcctgaccctgcgcatcggcgaccagaagggcaacatgcgcgcccagctggaagccgcaggcgcattgcgcgacctgccgtacgacatccactgggccgagttccccgcagccgcaccgctggccgaggcgctcaatgccggggcgatcgatgccggcatcatcggtgatgcgccgctgctgttcgtgctggct

SEQ ID NO: 73382 - DNA, 521 bp, Arabidopsis thaliana landsberg
  unsure (1)..(521): unsure at all n locations
accgtcgcatatgtagcaaccatcgcgccatcgctcggcgcatctggcgtcgcttcgcttgcccccgcgtctacggccgacggtccaagctggcgcgaagcctccgtattcgccgtccgtcccgaacgcggcgcggcggccgccggcccgcctgcgcctaggcccggtgacgtcgcctcggctgcgccatcggcttcgcctccgcgcccacctgcctcgctcttcgtcccgctttccggtcgcgaccaatgatcggctggcgcgccattccgcctgctatggacagagtggtctgggaatccaggggatccgacagaaggaagatttggggagggcaagataaaaggggtgccagcttgcggcaccctgatggtcggttttctgcggaatntgggtatggctttggtttcatgctgccagcgcccagcatattttatgcagtcggttcagcatgttgctgcctggcatcgcccaaatgagcggtgacgagcatgatttccgtatccggccgggaagggggc

SEQ ID NO: 73383 - DNA, 534 bp, Arabidopsis thaliana landsberg
atacaagccagcataatctcagcgtaacattcccatggaggaggcttctattgatttcgtcttaggagaacttaacacatccttatataatgttaaaggttagtgaaatgaaaactactctgagacgttgattaatgttagtttagatatctgttgttataaatttagattttgtaatactgttgtagaatttattttttggcagtctttttaattgagttacctaaattagtgagtagccatccattaacttctcttattgtttgataatattttaactaggctattgattatgtatatgaaaacattaactgacaattccacaatataaagttataaaaacattttaacttttcgaaaacaaagttaaggtattttgtttttattggttgagactttatggaaaatagaatgaattcaactgcttggctattcttaagactttatttttttctgggcaaagtgatatcccttacttcattacttgctaaaagcatgttgtcattctagcttgtacctgtccacatttttttg

SEQ ID NO: 73384 - DNA, 494 bp, Arabidopsis thaliana landsberg
  unsure (1)..(494): unsure at all n locations
aacttgaaccaaacatattttttgatttcaaacttgaaccaatgtaatcactgatcgcagtgttcgcagtgtaaggcatcataaaatagaagaagggacatagctatgaatcatataatcttgacacatgttttataggttttaggtgtgtatgctaacaaaaaatgagacagctttcttctaatagacttaatatttgggctaaatgtaccacagttgtgaatttcttacataaatgggccgagctacaaaaaactacaggcccactctcannnnnnnnnnnnnnnnnnnnnnnnncttttttaaaagcacacactttttgtttggtgtcggtgacggtgagtttcgcccgctcttcctttaaattgaagcaacggttttgatccgatcaaatccaacggtgctgattacacaaagcccgagacgaaaacgttgactattaagttaggttttaatctcagccgttaatctaaaaatcaacggttccctgtaaa

SEQ ID NO: 73385 - DNA, 569 bp, Arabidopsis thaliana landsberg
gcctgctttggttctcaatcattccctcgattttaaagactagacattatcattttaacaaattcactctcgaggtccattccacacttcgtacttgactacttgctttattaaaaacgattcttctagaccaattatataagattaaatagtgaatattaaaagtttaaggtgcgttagtataaatttgtccacagttttgttttgaccaacacgataatccgaccacttgattttatttgtttgtaatggaaatatacaggtggacaagcaccttgacccaaatatctcatattattctttttgctatttagtatgcgcattggcctaaatgcttaaaatgttaagaaggaaactaacttggatatattttaagaaaattaatttacgtacatttaaaacaaatttgagtttaaatattaataacgaatgtgctcttggagtttggatgttggagcctatatataagtacttcatgcatgcatccttgtaggtggtaataacatgaaaattcatgctttgcgaatcattatgcccaattgcttgagattaaggaaaactttttttaa

SEQ ID NO: 73386 - DNA, 109 bp, Arabidopsis thaliana landsberg
ctcgtttgtgttgtacttttctattgcatgagtcgcaataaactgtacatggcggcgtctaatacatcctcggcttggggcacatcaggactaactaaccgatgcagct

SEQ ID NO: 73387 - DNA, 392 bp, Arabidopsis thaliana landsberg
caggacgtgcaggtgggggcggaccgcgccgatcactcccgtcccgtccgccttgtagtcgatccggggggtgtgtaccgtttcggaggcgcgcctgctccgggccgtgtcgtcgtcgttctccccggcccgcgggtcgaccggggcggtgaacgcgatcctggcaccgtacggagaccaggtcggctcgcccgcgcccagcggcagcgtggcgacctgttccggctcaccgccgtcggccggcagcacccacatctgtgcgggaccgtccgtcgcgcgcaggaacgcgatcctcgtcccgtgcggggaccatacaggagcggagtccgctggaccgcgggtcaaccgactctcgtcgacgcccgtggcgctggcccggcacatggacgtga

SEQ ID NO: 73388 - DNA, 543 bp, Arabidopsis thaliana landsberg
cccccaggaaaggccaatagtgtgacctagtagtgcagttcttatatgtttaaagttgtaatatttccaccagctgggctggtggatagttagtacatgaactttccgttgatataaagaccaaacaaatttccagaacaaaaaagattgaccgatgctcaaaacttacaagtatgttagagaagagtttccaaactctttcggaatttctcctgacaaccgattcacaagaagagaactgcagagacattctgttactgtacaagagcatttagaaactaaaactaacacataacatgaaaacactcttacataaaagttaaatttgaagaagcccattcacgaggtaaggtcccattgatgtagttgtaggccaagtctctaaaatatagcaagaaccattgatcaaattagcagcttttaacttgcctagctagtttaaagcaaggttgagttacttgtataagagcacttacatctcccgaaagtagggaagcttgactatttgaggaagagttcctggaagattatggtccttgaatg

SEQ ID NO: 73389 - DNA, 1057 bp, Arabidopsis thaliana landsberg
  unsure (1)..(1057): unsure at all n locations
tgctgtagaagagtcatttgaaatctaccccacaaaaaggtaaactatatttttttgactcttcaatcatgtatggtggtaattatgaaagttggaagatcaaacaagtacaagataccacatttgaagaaatatacgctagaaagtattggtcttcttcctaagcaactgagttgtgaagctaccttggttgaagatgtgttgaacacactcaaaaaatttgatcagctgttattttttctgttttgtgttttagtgtcatttgtgaggtttctttcttttatttgggattttacagttttgaattgatctttctttttcgttagaattttttttttcttaaatttattttgaatttttagatcaatcccatcaactcacgtttgttgtcttcttactcactccactatcacacgaacacaattttaccaactgcttataataataaatcaccaatgaaagtaacatatcaacctaaagcaaagtaaacctagaaaacagaggatgaaaatgaacaactacaaaacatagttactttgtcaataatatcaccatgaaattttaaagatgactcaaactcaaaaatatccacgtatcagaagcttcagcattttcatgagagctttgtccatctcttccttgggcggaagtttgttatgatcaaaatttcgagtggtgctaagattcatcttgttggttgttccattgcttcgttggaatgaatctcttcctcttctccaaaatacggtttgtttaaatcaaatttgtgagtagacgaaagacttatctcgtacagtagaacatcttttgatttttgttttcttgctccgatgaatgtcctcatcttcttnnnnnnnnnnnnnnnnnnnnnnnnnnttgaaagcactagaacgatttgtcttgttcattggttgaccatcttttgatttgtttttttttcttccatttttatttgtacagaanatgttgtggtagtgaagtataaattatttattgagtaaagataaataactaaacaatgatttgactacgtatgtttttgtcgattggtatactt

SEQ ID NO: 73390 - DNA, 6573 bp, Arabidopsis thaliana landsberg
caaaactcgacgtttgcatgtcaatgaagccaaagcctgtagtcaaatatgatgataaccaatattagaaagaaaaaaaatgtatcaacctggaaggatacgaaataagtatgtatttgcatcctaccctgtttgtaagtgtctggtcatttttcaacctatggagcctcatcgcatattagaagatcacaggattcactctggcagaacttggatgagtgcattcggaatgtctcgtaagaaatgataagtacctgttaacgttagttaggtgataagtgcaattctcagagagtcagcaaaaaaatatgcacagctatacctgcaaagcgcttcttggtcgagtgaaactatctattccagacaaaacatcatctctggtgctctcacagagggctataagctgaatcctgtctccaacccatttcttaatttcagcttcccagttactgacaagactcgttggtgtaacaataatggcctttttaaccataggcgtcccatcaaatccttgacaaagaagtgtgtatagtaaagtaatggactgtaatgtcttccctaaactgccaaatcaatttagaaggaaataagaaaattacataggaaacaaaaaaagtccagatccaattttacataacggacaagatagattttaccccatgtcatcagccagaatgcaaccatttatatttgccgaaccatgtaatcctgaaacacaatcgaacatgaactggacaccctctctgcagtctcagaaaaaccacctcaccatgtaagtaaagttgtataaacatcttcgatgccaactagagataattttatactcattggcctgttgtattcaccagcagttcactgagggttatatgattttaaacgaagagcacattttgacgtggttcaacaagtaaactatgaatgccttaagaatttttaagatcacagcacagattggaatcaagttttgagatccttaaaaaaaactctgtacacgatgtcaattcttagatagaaatgaatacctttgatgagggcgaagaaatttgacaagcactgaatgcaccatgatagttgttacattgctcattccatcttcttcagattgccacaataccaaaggttcaatatcaggtggtagacaaacaacttcctcttcttcatctctctcaatattggttgatgcttccagcttagtaggtaaagcaaccacaaccggagttgaggaaccccaaggaacaaaccgttttcgagctgaaaggcgacgagaaagttgtcctgtggaatcataaccatgagaacagcggaggtttgaaaggcttcctacaaactgccgctccatctgacaccgaaagcacccgaggaaggagtggctgccgttgcacaactagattgcccctgtcaaccgtgcataagtatcaattccatttccataaaacaatggaatacgcgtttgatacagcttcagagactattcacaatcatcaatttgaacaagagaacactaaatctcctttaaaatccctaaattcgaaccactaaaactccaaatgatatgtagcagcaagcgaacgaagcatctatcaggtttagggttcagcttcaatttcaaattgaaatctaggaaattcaattacgcacctcagaagatcctttacgttcttagatttccgatctgcgtcggatgaaagagaaaccaccgcaaggtcttcgcactcagggttatcgttttctccttcagaatcttgagaatcatccttgtaactatcgctggaatcgtcgcaatcggaagacgataagatctcttcatcttcttcctccattttcgttacacctacgagcccagagctccgcttttgaccaatcctaaaactcttttggcggcaagaaataaaaccaaaaacaaaaacaaagaaaaaccaaattatttgaaataaaataaccttatcagaaaaggactaaaatattcttcagagtatatgggacgctacaatttttcctaacagttagtttcatgaagattgtaaatttgtaattttccccaagtttttaagtatttacacacaaaaacaaaaatatccgaatttttttaattcgtcgaggttgattacttcacccaatttcatggccgcacctgcaaacttctcgtctcaatgttccgattataccctaattgctctctgccttctcacagacctctcgttttccttcctcgtcttccttctcgctccctccgttgccgcgccgccgctgatattccccttggtgacggaatccgattacctcgagaagcggattcaacctctgacacggcgaggtctcgggatgtttccgtcgccgccggtgggaatggtgaaggtgctaagtggaggaagaggaggttgctctggtcgaaaagtggagagagttacttggtagatgatggcgacgcgcttcctcttcctatgacttatcctgatacatcccctgtgtcgccggatgtgattgaccggaggttgcaatgtgatcctgtagtcgaggttttttgctttgcttcaactttcatttactaattttgatgattgaataagactcaacatacttgcacttaatttagatgaacattttaattgctttagctgacgattggctgtttgatttgctctatagtttaatcttcgaaccaatcaatatgcacaaatatatgagttgatcttgtagcttgacgaatgacattaagtttaattggtctttcttatggagcgataagcttagattctggaaggtgaatgatgtttctgaaatgtgaaactcaacaatggacttattttataaaagcatgtgtgtcaaaaacatgaaaaatatagatgcaagctcttgtcgatataagataggaattaaattttgacatgaattatcctttttcggaaagatttgctccgagttactcttcaccccagttttgggtgtgtttaggcaatattttctttttgatgcagtatttgctttagaatgcctttttgggattgttttttctgatcacaatataacccgaccaatttttaggattgccgggaagtggtttatgaatggactggaaagtgtagaagttgccaaggatctggaactgtcagctattacaagaaaaggggtaaagaggttatatgcaaatgcataccctgccaagggataggtaagtttctgagtgtggctctttttccatgtttttcctatgatagttttaagattctagagtatctatgagttggtttcttgattggtatttgtgaaaaagtaaacaaagccacactttctgagttttgcagtttggtttagatttagtgttttacatgcaattgacttaagaagtttaaactaattgcaggatatgtgcagaagataacatctcggacggacattgaagtgatggaagatttggataatgaaccatcttgaccttgaatatggcccatttttgcatgtaagcttgggttcgttattgaagtgtatccgttgcacgtacaaaactataaccagaagagagataagtgcttctttgggatgtttggcccaaacaagctgatcggaggtatagacaaaaactactgattcttgctcagataatggcttcttctttcaccaatagtccccatataggcaatttctgttttatatgtatcagacctcgagacaccacgaactgcaggaattgtttgtgtttttaggctgtttcagtctgacttatgtacatcaagagaaaagatagctgtaacacgatccatttaattatctttgtgtgctttacctcttggttcaagttactctacgggttcaaaggtggttcgataacataaacagataaatacttaaattccatgatttggaaggatataatacggtcatctagaagaaactcacaaaagtagaagtgtcgttcccagatgcttccttgatcgaaccctttctccatgacatctgtgcacttcaattttcgaggccatgaaagatgaccgcgtagtttatagaatcggatttatcattaacgagcacttgaatcagctgttagcaacccgaaattggccggtattatttgtgcttggcatgttctcaggagacgccctccaacaagtaaggatattttttgacatcaaaatgcttatgaaaaatggtgtttctttttaaggtaccaacatggttatgattcttactggatagttaggccctttctctggaggagtacactaggaattgtacctttaagcttgttgttcttgatggacctgcagattaacaattaacatcaacaatgatgatgctagttatgatgatgttgcaatcgtgttacaggtcaaaactttagtttctcttataactatagtgaacacttttggtcaggctatcagattcgcatgtctaggcttgctgttaaatgcagagaggaggggaaagacaagtttacagtgtgcggagactagggagctttgcaagtgactcaggaattgctccagtgaactgattgtcctctaaatgtctgcctcatcccacaaaacaaaacggtaagtccaataatctaaatctcttgcacaacacttagaagtttggttgcaaaaaggcatacagagtttccaatctcgtcattggactcaaatctgggatcggtcctgtgagcttgttcttccccaaccatctgcaaatccggaagttgcagctgagtcttatttaacaaaaagaaaaaatctcagacaaaattttaggatgtgaagtccttacagatctttaagggcagtcatcttgtttatgcttggtggtagagacccagatagtccaagatttgtcaaatttctagcaagagaaccaggttcttggagatttagacttagtaattgacgacagctgcataaaaagcttcactagagtattgagttttgacttacagagaaatcactctggcgattttgtctttggagcaagttaggccagtccacgagttagcacgagggaggcatgggtcgccggaccaatccactggaggcttcatgatgctctctaacagatcttccatagcaattgctgcagaagagaatgtttttgttccagtggcttcagttattacaaaatagacaaaaacatgaagaagaaggaaacatttacagtaccatctttaatattagtggttccaccaagaggaagaatttgaaacacttctccggcgttaatgaaaggtccaaccggcgcatccttggccggagtcaatgtgatctgagtctgacccgataatggccactggccagagtaaaccataaccccattagtgctcacattgagcttccttaaaaaggaaagtccattgactgagacatcaaaagccctccagctcatggggcctggactccgattgtcctgaaaatacaaagctacatagtactttgtggccggaagaggaaaaggtggccattgaagctctagaggcttcccttgacttgctgtgaaaccttccacaaaggcttcagcaggtggaatgttccagaagtttgacgggttaattctgcttcgagaagtcaccgtcagatgcttctggtccgaaaacggttgccataaacggttgtatttgtcatctggatagctaggtttccaacatgtaacataccatcaaaagtcaggcaagaaaaagtgcttttcagatcaccaaactatggaatcaaaaagggcacctgatgatctccccatctcctccaaagctgttcctggctatgaggctgagcttgtaggacccgaggtctgtggaattgtacattgtatcttcaagagattggacatctaaagacgatataaaaggagaggaagaaagggtatgtgcattcttggctagacaaacacttagtctgttcccaggaacaccaacaatgatctcgtaataagaactctgacccttggcgtaatcctctgacgtattcacgacgctccattttgtgcctccaatgatctgatcaaacacaggtgggttgtttttaccgtcaaagttaccgtagtagtaagtggttcgaataaggtacttggaggtctttgcgacagggaaattataacagtgttttcgcgatgacttgtcgggaaagtaacgtagtgtggagaggatcggaacgaggtctttttgcttaatggtcgtcgtatttcccacggaaatgaatccttcgtccggtgtgtattctatctcgttgaggtttgttgaagaagatgatccacaatttaagaagaaacctttcacatggaatgaaactcgacgttttagggtagtctataacaattgtaagcatggattcaagagtgtttttggaaattctgtaaatggattatcaagattcgatcgaaaatgtaaaaaaaaaaatcagaaaaataataaataagaatcgcaaaaacgaaatttacctcgaggaggagggagagcgtgagagatggagaagcataataagagaaagaagaacagagacattattgtgacgtattttgttgaagaaacagacaaagaagaagaagaagaagatcagattctttccattgtccccaatggagttcataaaaacctcgaaagtagagaaaatg

SEQ ID NO: 73391 - DNA, 600 bp, Arabidopsis thaliana landsberg
gcgccctggcatctatgagatcactgcctaggtatggcaagttagagattttgatgctactaggcgcaatggcggcacttgatccctcccatccttcatcatgccttcctctagccatatcatctcgcacatcaatctcttttattcacctttcagcagaattatttatttgcaaacgcctagcaaatgaaacaggcgggatgctagttgtgcccctttccgagaaccacctcgtgtcttccctccgggcttatgcctcatctggaccttcttctgatccttcttccagcctctctcctacaggtgacaatgattcatcgtctacagcaagaatcttgacaatgggatttccaatacaggataccattgaaggacatcttgcgacttcactcggatcctcttcaattgtacccaatacgcataatcctagttctcaacatgatgatgtgaatactgcaaatgagttgtatcctttcaaaacaacgctttctccttatgcggcatctttgagcacgctattccaatcagattcgtcccaaaccctaccccaatattcttgtcctagatgttttcatctcctaccgcctgcatcatcactgg

SEQ ID NO: 73392 - DNA, 572 bp, Arabidopsis thaliana landsberg
aaaggcttctagcaaccttgcactcgatccttttatttataaagctagggtcagtgaatcacttgggctggtctcttattcagtagcacagtgaacagaaatttttaaaatagaaatagtcttcaatctcactatcattgtatttcttgctatcaatttcatgggaaatacatcacgcaggccatatttgcaaccaagcctcaaccaaacgtatttttcactctgtagaaacattttagaatcggccatcggtctcaagatatcaacacaagcagaatattgcatacctgattacccgagagatcacatgaagtcaaccagcatattatctggcgaagcggccagccagtctttgtatggaatggggacgagagcaacgcggcgggcattgtgatttgagtctcgaacaatcattatcgccagaaccacgtcaccaatgccttcatcaccttcgaagtgatcgcgaggtaccggtatccaattcttctgctcgtcctggatacattcgcgccaatgcaccaaaaagaataactcatgctcagagccggatggcccatacgttctgatatttc

SEQ ID NO: 73393 - DNA, 498 bp, Arabidopsis thaliana landsberg
atataggattagtatatcactcatcaatgatacttgttcctaatatattattactagatctagatgatactactgatgtttcattattactagtatcatttttaattgaatccaagatcattgcatactttacttggaaaatggtcatatattccgcttcaattaaacttagtgggagcatgttttgattcattatagtaaccatggaaatcgtaatgcgattattaatactagtatagtgaattactccaaattgtattttttctatataattatctcatttgtattttctattactattagcaactgcttttctcttatatgtaagactgtaaatactgagacatgaggatgtgtcatttaaacattccacatattgatgtagctagtagcacagtagtagtgaattaattgattccatgtgtctttgcaatgctttagaagcaaagctaagaaagaaatttttataaaaggtgatgctttattattgagcgaaac

SEQ ID NO: 73394 - DNA, 509 bp, Arabidopsis thaliana landsberg
caagatgtcgttgtccagagttaggtcctccagcaatattgatatggaaccctgacttgctcgttgattctgggggggttttccccaaaaccccaggatgtctgcagactctaggtaccatgaattttgcagaacccaaactacagtcgccagtaccaggaatgcttgcaacagatccaaccaagtcacattctccatccagtatcccagtacaagaaagtctttgtactatatcctttacaacatctacttcatggagaagggtatcaacatgagaccaccaacaaccctcagttatcttcttgtcgctcaaagcagaacggatcacattttggacatcaaccgcagctttggaaagaagaggtggtaggaagatacgttcatcaagatgaagagcaacaagtaaagaacataatggcggcaataaagaaggtaccaagtaagtaggaagcggagaagaaaatatatcactagctgctattcctgctcctctacgtgaacatgggggt

SEQ ID NO: 73395 - DNA, 698 bp, Arabidopsis thaliana landsberg
cggttggtggaagttgagacggcttaagacaacttcacactatcacttttgtgtgcgtttttatttgtctccttttcactctcttcttcctaagttcacattcttatccaactcacattcttttatcactcaaaactatgaatattaaagttaaatattagatcaaacatcaaaagaaatgtggtctagagaatatcttttagtatccacccatagactctttcatatctctttttttctataaattctttcgaatatccgtattatttataattaacaattcttgaaaagtttagtggttcgtatatataatcgaagaattcaatggatatcaacaaacggattgatgcctaattttatgttacgaaatgagagtttaaaaacgtataatataaaggagagagagactctcttttcttcatatgcatataaactttggttcagctttcaaatgtaaaagagttgtagaggacaaaaaatcaagagtgctattaaatatgaaagaaatacataatggtaaatggtggactttcatttttttgaaaaaggatttggtaaatggtaaatgttaaatggtggacttatttgtaaggaagtttctcttatgttttaatgatagaacatgtgaagtcttctttcacatcaacatgtccccacttatcttctaagtagaaaaaaatcaccttaaacttgttata

SEQ ID NO: 73396 - DNA, 671 bp, Arabidopsis thaliana landsberg
aagaccggccgcgctgctgcgggacatgcacggctttgaagacgaagacctgggtgcagggggcatcgagggcctggccggcgcgcactgacggcccgcacatccgagcacaggagaaagaggggacatgctcacagacacgcagcgggcggcgctgaccgcgcggctgcgccgtggccgggtgccgtcggtgaacgagatcccgcgccgccccgcggaccaagccgatcttccgctgtcctacggccaggagcagctgtggttcctggaccggttcgcgcccgggctggcggcctacaacatcccgctggcgctgagcctgaccggtccgctcggcgccgcggcgctgaaccgggcgctcgacgccctggtggccaggcacgaagcgctgcgcacccggctggtgcccgacgactcgggccgtccggtgcaggtgatcagcgcaccgggtccggtgcccctggacacggtggatctgtccggcctggactccggcaagcgcgagatccggctgcgggagttcatcgacgccgaggccattcagccgttctccctggccgacggcccgttgctgcaggcctgcctgctgcggctggacgcccaggaccacgttctgctggtggtggtgcaccacgccgtgtttgatggctggtcggtcggggtgttcgtgc

SEQ ID NO: 73397 - DNA, 483 bp, Arabidopsis thaliana landsberg
taacaatttgttgtccttagaacgtaacttagaccagttggcaaatgaatttagtaataatcatttcaaaatgtttcaatcaaaccaattatgaaacaatcataatatttgagcataaatatttggaagtcccattagcagtaatatagttatagtaataataaaataacgatccagatgcatagatatagttttttctacgttcttgtttatgcaaaaatttaaaaacagagaaaagagattgagatcggacactaacagttatggttggagtgagaggatcatatccagagccagctgaagcaaagctaactccacttattaactcatttattccaagatttgggtccaaatacggtggcacattctccttcacaccaatgtatgaagctgtacataaatatatatatgatgtttaggttattaggttcaatatatattgtgaatatatttcagttgtttatatgaacacttaaccgataa

SEQ ID NO: 73398 - DNA, 600 bp, Arabidopsis thaliana landsberg
  unsure (1)..(600): unsure at all n locations
cctgggactacattgtaccttctgctcttctcttttcaaccagtttttttaaattatttatttatgtgttttattattgggttctacattttcctttatcttttataaatttcatggtcttgaaataacaaattgtgaacaataagattggaaaatgtgacttttattattcagttatgttagttaagagttttataatctcgaccagatttattttcaaggtaccatgtaattgatattaacaaatttgtaaagtggttgttttcttttaattattgaaatttatatatggataaagtagtgataaggtccataaggatatcagaagatacgaaaaagtgtctaggagaacataggtttaccaccaattttaaatcacgtgatcaaagttgtatcctattgactgtatcatattaaaacgtcatttattacctcctttacanaaaaacanatatttcttaatgaaatttctgtggtgtatttttgcgatgataaatttaaaaatgtaggtaaataaataatttngaattttactcacttaattttaatttaaattaaataaacggtaattaaacataatttttgccaatttttagtatt

SEQ ID NO: 73399 - DNA, 559 bp, Arabidopsis thaliana landsberg
ttttgtccaagtcggatcatgatagtagttagctagttttaacaacactcattccataagtcgggggggggtttgtacaaatttttctaattctttcagatttcttttgaatgtattttatatgatatttaaattgaaaaaagaaaagaaaaacttttttcaaaattaatctctttgatatttttagctgtatgtgagaagatgtattagtgtaggtcaacagtttaattatatacacagcaaaaagaaaaaactttgatcaaattccaacaggatatttttcagttaaattcaatattttagataacttatcattatagataaacttgagataaaagttacaattttaaaattagaaatgcaaattcgaaaaacagaaaatagtaatatatttacctttttggacaccttgtaagataaacatgacgttcccaaaaaaatcaatcggtcgtttgaaagaaacagaaataatcgtacaaaatgaaatgacaacttaaaattattaggcctttgggttggaaggtttcttttttttaccaaatttgggggaaaaaacccc

SEQ ID NO: 73400 - DNA, 380 bp, Arabidopsis thaliana landsberg
actccaaatatctttaccaaataaatgtatcttaaattcctttttttaacatgaactatttgaatatagtttcaaagaatgtatttagaaaaaatatataatatgtaagacaaaaacccaaacttctgtctctttgtttatgctaagctaatttaaatttttaaagtgttattaacatttcagagtctagtgcatgtttattttctcctagaaaagatgagtgacaaaaataccaaaagagaaaggtacatctgtaaaattgataaagagttaagaaggaaaaaatgtttaaatcataaacttaatcgcatacacaacttagcttcaataaatttttgaaaattgtcaaaactcaaaaatggggagaagaggttattaaa

SEQ ID NO: 73401 - DNA, 556 bp, Arabidopsis thaliana landsberg
accgtgacttggtcacatctttcgttcgtacttctagtttttctagctttttcttttcctattctgtgggggacaagtgacacaaccatttattttcatttttctagtgtataacctcaatgttatcttcacttacatactagaataggaatggtataatatgcagttattttcctctcccttaaatacgaaagtatcaaataaaactgttcgaatttggaacttattctcaaaattcgaatcgtgatattctacacacaaaattctcaaaattcatgaggacacaatagaatctatgtatgtttatacactattttccagagtcaagcgatgagtagtggttaaataccttgatcaccgaaaatctatgaccacatgcgtagctaaaacagtttttttctatagtgagaaaatagttaagattcatggtcatgactcatgactctactacatcttcttaatggctttaccaaattttccaaattttcatttgggtccttcctctttcccttttttttttttccctcttttttaaaggttgaaaaaaaattaaaaa

SEQ ID NO: 73402 - DNA, 567 bp, Arabidopsis thaliana landsberg
  unsure (1)..(567): unsure at all n locations
gggaatcgcatacgttttctaacttatgaatgttgtattttacttctttaaaccttggttggatacgccgggtaaatataaagttcacacgaaaaaaannnnnnnnnnnnnnnnngaatattcaccactggatcaatactactatacaacaagggaaaaaaaaatatttaacttgggaaggtatatacttattttataaacaaaagcaagattcgccttgtaatgcgacggcccgacttctctctttcaaataatgatccttgagaaaccctatagagccatatatacgttgtctttataaagagacataactcatctcttcttgactaactttatagttaaagttatcaattattcgaaaacaaagctggatttttgttttgtcccttaaaccagcatgatcaagaacttaagtaatatgaagaatgacaatcagaaacgtgaaaaatgttgcgagtacattggaaggctcttcgaaagaagaaccgtcgcaagaatcaaatggttttttttcccaaaacccggcggggagggcctttttttccccctttttttttttttttgggg

SEQ ID NO: 73403 - DNA, 399 bp, Arabidopsis thaliana landsberg
  unsure (1)..(399): unsure at all n locations
nnnnnnnnnnnnnnnnnnnnnnnnnnnnnnnnnnnnnnnnnnnnnnnnnnnnnnnnnnnnnnnnnnnnnnnnnnnnnnnnnnnnnnnnnnnnnnnnnnnnnnnnnnnnnnnnnnnnnnnnnnnnnnnnnnnnnnnnnnnnnnnnnnnnnnnnnnnnnnnnnnnnnnnnnnnnnnnnnnnnnnnnnnnnnnnnnnnnnnnnnnnnnnnnnnnnnnnnnnnnnnnnnnnnnnnnnnnnnnnnatgacttgtttaaatgattgacaaccggaacaattacttacatcttattgcattataaaagatctaatgaatttgagttcaatacatccgttagcagaaaacggatttcttgtattatagacatactattcacaaactcgtgtgggctatagtttattt

SEQ ID NO: 73404 - DNA, 669 bp, Arabidopsis thaliana landsberg
cccgcctggaatggagtccggctcagtaggggcaggcgttatccgacatgtagtcgtgcaccttgatcttgccggagatgatgtccttcctcgcctggtcggcggccttctgcatttctggcgtgaccagcgacttgatgttgtcgtccatggcatagccgacgccatcctcggcaaggccgagattctcgacgccgaaagtgtacttgccgtccttcgcatccatgaaggcgttgtagacagcgacgtccacatgcttgaccattgaagtcagcacgtggccgggctgcaggccgttctggttggaatcgacgccgatggcgagcttgcccgcatccgccgccgcctgcaggacgccgacgccggtgccgccggccgcggcataaaccacgtcggcgccctggtcgatctgcgccttggagatctcgccgcccttggtcgggtcgttccatgccgccggcgtgtcgccggtcatgttctggatcactttgtcgcccggcttggtcgccttgacgccgccgacatagccgcaggcgaatttgcggatcagcggcacgtccatgccgccgacgaagccgaccgtgccggtcttggaggcgagcgccgccaacacgccgacgacataggagccttccgtttccttgaacaccatcgagcgcacgttcggca

SEQ ID NO: 73405 - DNA, 1246 bp, Arabidopsis thaliana landsberg
aggatttcttcacatgcttacaagctggacccacatgatctaccatgtggacctttattcttcatctctatacctttaaacaaattttggttttatatatctatgcctttaatttatctatgtatgaacttgcatatgaatctaattaatgtgtgcgtttgtgcttgtgtttgtgtttgtgtttgcgtcactatatcatgtgtttcatatccatctagagccacatgctcgtgaacgagcgagcttgtctctcatcctcgactcctcgtttaagtgattcatatttttacactgaaaaaggttataatatagttttgggcggtattaaaacatactcccgagacataacttatgaacacaagatcagaactatatggggaaatatgaacaaactaacactaatgaccaatcaaacgatcatactcgagccacttgtgacgacacaatgaagatgatacaaaatgaagtataatatttttatttcagaaaagagattagatataagaaataattgagatgatggcatattgatcagcggcaatcacgaaggaactaaaggattctcgcaagtggggatacgatacaaaggagacaattttattcagttagaagcgccgccagacaaagatttgaaaccagtttctattggttaaaccaagattcgttcccccatgaagccaatgatgttccgccacgtggatacattccaaatcgaccatacttggagaagaatgtgattatttgaggcgaccactttgatgaagaaacacggttttgtattaacctacctatgaatcttgaataaaacgacagtaagaatcagaatatgtgtaaggaaaaaacaaacttacgagagacaaattgggtatagccctactttttataacttttatattataagttccatatattatttgagggtggcatcatccctttcactttcctgccactatttttatatgaaattctgtctttctcttcttcatttataaccctatacccttcaagccctgaaaacacaaaacatttgtcttctctctgtttccttctttctctcgaggttttcgtatcatcattctccttctctctactacccaaccatacttataaaactatttatataaacaaaaacgatcggtcttgttggagtttatctcgtaaacaagaccgatcgataaagcttttggtatataatccgatattaaattgatagagaggtttcaatattgttgaagagtatatacat

SEQ ID NO: 73406 - DNA, 470 bp, Arabidopsis thaliana landsberg
  unsure (1)..(470): unsure at all n locations
tttcgttgatttcaacgatataattcactgttatcgtttttctctcagggccttatgctttctgagctgtggttcctgctttgacagcattcgctgctgcagtttccatgtcacggtcaaacaaataaagacctcctttatctccgtcaatcaaacgcaatttatccagaatactgcgccccagcgcttcttnnnnnnnnnnnnnnnnnncataccattgcatgaaattgtgtgtggaataatccttttcctgcaggcaaacatcaacgacattgttgatgctttcagaaacacccaattcatgctccagtaacaatttaaaaacgcgctccagggaatctaattctcttggcggctccggaattgaaggaacaacagctacaccttcgcgcttattcacaaatttgatcaaacttaacatgtggaaccgctcttcatctgaatgggagtgcataaatctttgctggacc

SEQ ID NO: 73407 - DNA, 222 bp, Arabidopsis thaliana landsberg
acttgccctcactgagtctatatatgtattaccaaaactttttcgagaaacactgtaccagggaaagctagtgctaatctctaaaaaactgtgcgaatcacatacataggctacttaacgaagatccattacatgccaactatacataacccgagtgccagtcagaccatgctacattactacatacacccacgaaagactctctcttccgaagacacaatc

SEQ ID NO: 73408 - DNA, 148 bp, Arabidopsis thaliana landsberg
gagagccactgaaagaaaaaactgtcaaaaccggaccgtcgcaaagagacaacagagacgaaccaccgggggggggcccaagaacgaaagcccggagaacccccggccgcgcggagcacggccccggagcaccaaacacccaaaaaca

SEQ ID NO: 73409 - DNA, 481 bp, Arabidopsis thaliana landsberg
cagcgtctttccggcgccgacatagtccatccactctttgctgtctgaccgagaagtcggcatcggtggggagggggcccataaggatgtcgaggacctcatctttctgtttttgctccatgcccttgttcgagtcgtcaaagagaccgtatgtgcgcatgagctcggcggcttgccaccagccgtcgctgttgtagtcgtggagggtgaagaaggagtcagggtcccaaccctgtacgtgatgctcctctgtagcatgttagtttgggttcctctaagcgtatggaataaatagtagcatacccgccatgtgcctcgtcatccagtctgcatttgcagccaccactggcttctgagaattggcaccgccgtgggcgagcaccgaggtcgcaaaagcgacgctgaagagggcacttgggcgcatcgtgagatgatgactggcgcgtcgaggacggaggttgcacaaaggctcgggacttgc

SEQ ID NO: 73410 - DNA, 413 bp, Arabidopsis thaliana landsberg
acgggccggcgacacgagcggcccctgagatcgttatcgatctctaggcttcgcgaccgaaatagaggtccggcgaagcgaccttgccgcccttgaagcggaagctttccatgttgcggaaggcggtgccgtcatgcttgacggcgcggtagcggacggccgcctcgtcaccgtctaccgagagatactcgatctcgatggcgctgaacggcggcttctcgggccagcagcgctcgaaataagcatcacggccgatatggtcgtcacgcgggctcgaaaaggtgaagtcattcgccagcatcggccgcaccagatccttgcggccctggacataggcggcgaacaggccacggatgatggcttcgtgctcgttgctgctgctcattgcaaccttcgttatctgattgcatttc

SEQ ID NO: 73411 - DNA, 648 bp, Arabidopsis thaliana landsberg
cgcatcacaattatctcaacacaaaagtatatagcaccatgattttctgggaaagagactctttactttttggttttcaaatttcgaatataaatttgaaggaaatattgaatatcaaaatgtcaacaaagaaaacaaaactcataaaaaggaatcaggcaccagtccactaagctctgaccagaaagcgacaaaaaaatgtcttagtagatgtataaacatgtgataatgggatgcttcaaggtttggttttaaagtgagtttggttttatttgcttctctcctttttaaatcactttttactttgtcattttttgagagaaaaagacgtcaaaatccaagtgcccgtgtaaattgaaactagtgttacagattctccactgttctgttccacagtatctttggcttgcactctgcccaattgtctaactcattattttatttcatagcccataataacaagaaaaaatagagtcttctttctgtagctaagcattaaatgctgacacatatttgagaagtttttgaatttcaaattgagatactttttctaagcttggaaaataaataagaggttttcttctcttgtactcttatctagtagtactatctagttaggcagagagatagatattttttctgggggag

SEQ ID NO: 73412 - DNA, 191 bp, Arabidopsis thaliana landsberg
acatgcatgcaaggaaacggattaaatgcctgaagcaaacttgagaacttgatgatgaatgcgttggatccacaaatgtgaccactgatacaaaaattcatatttaataaagccaatttgtcacttgattggcaacatattagggaataagcataatctctggcattgacaaaacctcttcaagtaccatt

SEQ ID NO: 73413 - DNA, 529 bp, Arabidopsis thaliana landsberg
gctgcatcatcactaaccaaattgatctgaaaatttcctttacttagaaacataatctcagaaaggggaagcatctataaacggaagcaatacctcatgagcatcagcatcaagacgagagcaattagcgaggaagaaaaaagaaccaggctctctagaaatcgcaggttgaatacgtgagataggttcagcgacagacctaaattcgagagtaccaacacaagtagaagcaagaagaggagtgaaaaccatatggtttctcggagaaacacaaacgacatcgtagagattcgtatcgatccctttcatgaatcgacaacccgcccaacccgacccgagaaccactactctcggcttctctccttctctcgtcggtggcaaacctgaatactgactccgatccacatcatttggaattttagctggagattgaatctgagtctcttgagctgtgcagatacgagaagcgagagtgtatgatgatgatgatgatgatccggagtttctgaatctggtgatgattgatgat

SEQ ID NO: 73414 - DNA, 370 bp, Arabidopsis thaliana landsberg
gggcagatttttagtgcttatgatcccgaaaaaagaaataaattttttatgctaacagacccagacaatagagggattgttgttcgcggtccatcgttccaaacgtatattttgagtgactttcataggaacaagccaaccatactgtctgttttacaccggaaaacacacctcaatgaatatatcgcatcttaactttgggcaaaacatcatcaacttaggttagaagggttgctagccaaggcctagaatataacaaaccgtggtcatctctgcgtgaataccaaaaacatcacacaatgaccgctctatgatgacacaactgttaaggaatactgttaccaaatgtaccattgagggatggccttaa

SEQ ID NO: 73415 - DNA, 420 bp, Arabidopsis thaliana landsberg
  unsure (1)..(420): unsure at all n locations
ggaaatagagcgagcacgagttcaacgctctgnctttggtttttgttaacagccatagcatagcatagggctagggtgaattgacctcttcgaagagcgaaaggatgctttgtgacaggtggggataaaattgtctgtggtagaacgacctttcaccagcatgtgcgcctgtgactatttggccctcaatcaatcggtttgccaaacgcgatatgattaatcgtgggccattgcgtttgcatacatcctccttttgattaaggcctgcgaagcaccattagcggagctcctactatcaaagtcaacttatagctccggtagtcctcgaaaatctagggaggttaaatactcagccgtgcataaggactcatcgtctgtatatgttgaggcagctctgcctatattgcctgagctaaaata

SEQ ID NO: 73416 - DNA, 405 bp, Arabidopsis thaliana landsberg
gacgatgaggacgacatacctgaatggcagccacacgtccctagccaccagcttccaccaccgccgcctccacctctcggcttcagacccgaggtatttagaccgcctcaagatggttggtatgataatcaaaacggaggatcagggcaacactatgagcggaaccagtcaagaaacagaggattttaatatctctgttgagtgttctctgtaattgtagttttttggtttcctagtctctctttagtttttcgttttcaaaaaatttgtagccatcgtagaatgcaaatgttcgaagagtcccaacttttcaaataaaacatttcagagtttcctcaagaaaacgaaaatcagtattgctctgcttttaaagacaagtttgattgtggaatcttgctaaaatgt

SEQ ID NO: 73417 - DNA, 540 bp, Arabidopsis thaliana landsberg
  unsure (1)..(540): unsure at all n locations
cgtgcgcgtccctctacgggactttgtttcgggcgtacgatcggcgtgatttggacggttctatggtcgcagcagtcgctctccaccggcgacttgccggcatcgacgatcgcgattccgggccaagatggtcgccccggatcgggcgagggcacggtgatgatggaaatcgtccatgacctcgcaccgggcgcgaacctcgtcttcgcgaccgcgttcaactctccggagagcttcgccgacaacattctgcggctgcgcttcgagtaccacgccgacgtgatcgtcgacgacatcatctactacttcgagtcgccgtannnnnnnnnnnnnnnnnngcaagcgggcgaggacgtcgtcgcggacggcgcggtctatgtctcgtccgcgggcaacgaatgccacgagaacgactgcacctctggtacgtgggaaggtgacttcaaggacgccggcacgctcgcgacgcttgcgtcgggctacacggtccacaactttcgcgacaagacgatctccgatcgcatccagaggcagggcggt

SEQ ID NO: 73418 - DNA, 562 bp, Arabidopsis thaliana landsberg
acacaatccccataaaaatgaatgtcgtgctctcttatgggccttaccatttgtgtgggttttgcagctctcaaatcacacttgaaaaagacgctcaacttcaactagaaccttttctccctttttgaaattaacactgacaatgatcgaaatccctttaactttggtccaatatctctatatgataagtcacaatgttacgatgaaatcttcagtcttcggacaataagttgattaatgtttcaaggtttctaatactagctaggtaagaaaaaaataaataacaagtgaagtgcataggaatgacacgagaagtgtacgtgaagagtgaaaacattcaataaatttgtgagtgaggataaatataagattctatctatctatctcgtgtatttaatgagcactgcaacatttcatgagacctattgttatactagtcgtcctctacgtatacactacgcatatcttgtttaccatctgaacatttatgatttttacctcatcattagtaatttattagactattgcggtagttattacaatgtctcacattgcttgggat

SEQ ID NO: 73419 - DNA, 298 bp, Arabidopsis thaliana landsberg
atccttcttcttacacaattataaggaaaatttccccttctgcttcgagaaatacctttttccccattttctgttatgttatgcaacgtgtgaggataacgagcggacaacacagcccttatccttattttattggtcaaccaaccccaaaacagattttaagactgagtgtatttcttttgtcaactgtttacatggttaaaaaaatcatgttcactataacttaataaaatattatgtcattttgtcatgttatatatgcctttaacattatatcctgatggaacttttcatatac

SEQ ID NO: 73420 - DNA, 513 bp, Arabidopsis thaliana landsberg
gcattgccgcctattgtattcagaacttatttcattatatattttaccattctagtgaagaaaaaaagagatatggttgatggaggtgctctaactcttctaatcctaatactaaaaacacgatcgttgaaaattaaaaagaataatccaattagaacaaaggtacatctttcttctttggatctaaagaaataatatactcccaaaagtagaatgtacacttggtgaatgggacatgaagcacatgtgtggaagctaatataggagtttttcttctcacgtgtcttttcctacaaagcttcatgatcagttgatcacctctccgcttacacttgtcttaaaaaaaaaaagccaacgcttagcgtaccacacagattatagacttctgaattttttgttggcatgaagttgctctgccaaaaaagggtcatcacccttctagcaaacaatataatctcaatctctttactgaccaagcctcccatttgtgatgatggggtcaatcaggatgac

SEQ ID NO: 73421 - DNA, 387 bp, Arabidopsis thaliana landsberg
aactgaacacaacaccacttttatatttataatgtttcactccacaaggctactctatcgccctttgtactttttaaaaccaaaccccctactccacaaccacacccaaaaatcccaccattttatataatatacacattacattataaaaaatcacaaccatcaaatgatacctccaatgaagtctcttttaatatctacttaaaaaaaattctaatatccaactctaacaaaaagaatattcttttttcaaaatccaacagataaagaacacaaccatcttgttcttctctacaatcttcattaatagatatagaaacaaagacaacgactaacaaagatactttctcttcattatttaacaaaaccagctgcaaaaactaatac

SEQ ID NO: 73422 - DNA, 171 bp, Arabidopsis thaliana landsberg
cattaggtatatataccgatatgagtgtcattggtcgttgtttaggttcggtatttgtttgtgtggtgtataattaagaatgggtcttacttactatacaacatatatagactaagaatgacagggaagtctgggttgggtgtggttatataaactggatgagttggggga

SEQ ID NO: 73423 - DNA, 265 bp, Arabidopsis thaliana landsberg
ttatgctatctcagaggatttatcatttagtggacagcgttgaataaaacggagattatcttcctattttcaggtataatatgtaatgtctcgtactgctgaaggagcagctgccgtgcaagatttagattttcattctttaggttctcaattgagtccattggctatggtaagaccatgtcgtcattattcttgtctctaaccatacaaatgctttatctgattctgtcaggattatcctgcaatcaatttgtcttacccacct

SEQ ID NO: 73424 - DNA, 495 bp, Arabidopsis thaliana landsberg
taaccggtttactttggttaatttttatttgcaaagatagtgacaatctttgtatttgtttgatcaatattaggttacttaacaactttggaattataatctaaatacctgggttactttaatggaaatccgaaatttgtttcaacattgggaatatgattgcatattagggattggttaggtatgattgagatgtacatggaactgtcaattttcaatcccgagggctcaagtgtttttaacgtatcgctttcaacttctacgcctcgggacaaaaacccttttctagttatgtctttgtagttgtacaacggtacacccaaaccatatcacgtgtcatctgccttggattgtcaccgcacagagtgggctacaatcttatgttaaccactacttagttaatagaagtgtcatgtctatgttttgcctttgaaccattaatatggaatattggaatctatacaacgtgaccttgccactttttttttagatatc

SEQ ID NO: 73425 - DNA, 514 bp, Arabidopsis thaliana landsberg
  unsure (1)..(514): unsure at all n locations
aaccacaacccaaatgtgaaaatcaagatatccagaatcaagcttgcacgattcaacngtaaatgtgttaatctaagcttaatctttccatgaaatcagagcccaatcaaatgacttgatatttgaaaaacacaaacccaattccatccaatatcaaaaccctaaaaccagatataaactaccaagaatcaaatagaagacctaaagatgatcggagggatcaacgaaacggtgaagagagatccgaaagttttagtacctaagaagaagtcaaccaatggtcagagaagaaagacttgaacaagttgcagcagaaatcccacaaaaataaacactttgatatcttcttcttcttcttcttcggagatttgtgatcccaatggtctgttcttttttattgagaaatgatactaaagaatttgggagatgtcagtaaacaagtgcgtgatcgagaggaactttccttcttctactcatttttaaagacatgtttcgattttttattttcttcttc

SEQ ID NO: 73426 - DNA, 492 bp, Arabidopsis thaliana landsberg
agcgaaccttcattatagttggctactcgagcatatctttcttttaagaatacttctaaacgtatatattcttgctattcttataggtattattgtgtaaattttattaactttctgaaatgaaataatatgcaaagaaatacaatcggttttgagtctgattagaaatcacccaattatagcgaaagtcaagttaaaaatcgacatcatgatcattacaacttgggggaaaatatttggttcctagctatagctacttctgcttctccgatcttgatacatatatatatgtatgttttagtttttccttgaatatcgattatgcatatgaagatagatttaacatatctattgttccacgttccacccttattcttgtgaaattttctcaaaaaacttacataacatgtttgatctagcacaattctaatatatatatatatatatgactaaagtaatataattaatatatgttcagtgtgcacaaaaagc

SEQ ID NO: 73427 - DNA, 561 bp, Arabidopsis thaliana landsberg
ggggatgatgactatgcttggatgctgcttagatccaatcttgtttccagcttttaaaaatagcagacactagggtgcccagggctgagctcaagagaagcagtcgcgagaagaaagaactggttggacattcaaacacaaacacccatccattattccctttcgagcctgaaacgccaatgcatgcaggacgtgagtgagatcgctcgtgtgtgacgtacgtgagtcatgatcgtgaggtagagtcgttcgccttgccgcgccgtcgagccggcgaccgcttaagcggcttcgcacgctgaactccgactttctaagctccagagaccttgcgagccgtcgaggccgctgttgccgacgtggcgtggctggcgctgcccactctgccgctggtcttgcggataccagcagtctcctttgctcggagaggagactcgccctggcgcttgctgccacggaccttggtcaaaacactgggggtgctagcaacccggtcaacgggcttggtccgtagcgagccgatgttctcggcatccttggacgagtcgttgtcgatcatgt

SEQ ID NO: 73428 - DNA, 194 bp, Arabidopsis thaliana landsberg
aaagcctatacatgaaagttttcagcaatgacgtcgttagtttcttttatataagtttccggaaaacagtagtgtttttgaaggttaacatacatcactgttttttatccataaaggaacatacatcatgttttttgcaaatgacaaaatcttctaacaacttcacaagttataacacttttatttttagtcta

SEQ ID NO: 73429 - DNA, 519 bp, Arabidopsis thaliana landsberg
tagtttttacggtttgattatggttggtgtgtattatttatccgtaaatggtaaaacctcgatcgggttatataactcatgtagacagcggattaaaatagctgtccttagacttaaaaaattctgttattggttatataaaaatattccaccattttctttaaattatgctgaaaaatgataaaaagagattgtacataaataaaacttccatatttttggtcggtataaaacttccataagagttttgtaggtttctgtccaaaagaaaagctatttatcaacttccattactaactagactacccaaaagaaaagtttataggttcctccagcctagaagtcaaagaacagcatcatcatgactagttttctggtgatagatcctatttcaatttaatagataaatcctagtaatgattatggatcatttaatgtcaaagattcattcaaatctaatcttttttcatgttacgtatgagctacaacccaaactccgcatacatttttcatgttacg

SEQ ID NO: 73430 - DNA, 488 bp, Arabidopsis thaliana landsberg
ggcagccggtcgccggccgccagcgcccggccggcgattcgttcgcggatggcagccatgacctcgctcggccggcctctcgcggcaggctccagcatgatgcgcctcgtgtatgggaattcgaaccagtacagttttgtgaaattgtatggatttgttcctgtcttggccagcccttcgcgcgtagcgggagtaaggaaagcgaggaaacatgaaaacatccatgaacggttggggcagcgggcttgccggtgtcgtcatcttcagcggctccctgccggcgacgcgcgtggcggtcacggatttctcgccgctgtttctcacctccgcccgggcggtgatcgccgcgctgctgggtgcggcgctgcttcttgcgctgcggcaggagaagccgtcgcgcggcgatctcctctcgctcgtcatcgttgcgctcggcgtcgtcgtcggctttccgcttctgacggccttcgccctgcaatatgtcacgg

SEQ ID NO: 73431 - DNA, 1016 bp, Arabidopsis thaliana landsberg
tataacttactgcatatttataaaatatattatacacttagaattgatctaaatatgcatggatatttagtcattcaagatattgttttatggatatatgaatttaaatgttggatctagactcgcatacctgcaatatcttggccatcgataattagtaccaaaaactaactttattacctactagttactatctttaacttctttcttttttattataggatgtgaagtatcaaacagaggatgctgtggaaccggattagtcgaagtactatttttatgcaacaaaatcaatccctttacatgcaaaaattcatcttcgtatattttttgggatagttaccatccaacagaaaaagcttaccaaataatagttgataagttgttaggaaattacattacgaaactagtctaattctatatttttataatatactaagtaattttttttcctatgtaaaaacgtaaaaaaaaaaaaaaaaaatttcaataataagaaatagtatttaaatgttcatttagattaaatagattcaatatagtttgttaaaaatgatttatcaattaaaaaaacaggttatattggattagactagtttcgtaatggctaaaaaaaagaataaaacatacgtacgagaacaagacgaagaaatagaaggcatccactacacaattgtacatgtcgacaacaaagtcaacgacataccgtttgagacaccgtggctttcgcttttctctcaaaaaaaaaaaatcaatcatgtttttttggtttttatgtttcgacagtatttggtaggttgttttaatattattaaaaacatacttattatttgtgtgaatatgtttaaaagcaaacttggtttgtttggaattgtaatatcaaatgtcaagatccatcaactttcataaaaattcgttaatttgtacgtgaacaattaataaatctgtgataccacacatattatcgctcaagtcaattcgtttcctttgctttcagtcattttcaggaatcaaat

SEQ ID NO: 73432 - DNA, 572 bp, Arabidopsis thaliana landsberg
  unsure (1)..(572): unsure at all n locations
cgccagttgacgggcgcttgaacagtctggatgnnnnnnnnnnnnnnnnnnnnnnnnnnnnnnnnnnnnnnnnnnnnnnnnnnnnnnnnnnnnnnnnnnnnnnnnnnnnnnnnnnnnnnnnnnnnnnnnnnnnnnnnnnnccaacctttcttcatgctcaatacgctctggctggctttctttattatcgcggcgctgtgcgggctgcaccaatggctattcctgcacgataccgaggtcttcgcccgcatcgtgcacagcctgttcgacatggccgagctctcggtcaagctcatggtgctgctcttcggcctgctgacgctgtggctgggcttcctgcgcatcgccgaagcggccggcctgatcaacgttcttgccaggctgctgagcccggtgttccgccgtctcatgcccgaggtgcccgcaggccacccggcgctcggactcatcaccctgaacttcgccgccaatgcgctgggcctggacaatgcggcgacccccatcggcctgcgcgccatgcacgcgctgcanagcctgaatcccgaccccaaaccgccaccaacgcacaaatc

SEQ ID NO: 73433 - DNA, 561 bp, Arabidopsis thaliana landsberg
gatcgacctgctggtcgtgaacctgtacccgttcgccaagactgtttccaaacccgattgcacgctcgacgacgccatggaaaacatcgacatcggcggcccggccatgctgcgcgctgcggccaagaaccacgaccgcgtgctggtgtgcaccgacccggccgactacgccgaactgatccagatgctgcgcgacaacggcggcaccacgctggagctgcgccgtcgcctggccgcgcgcgcctacgcgcacaccgcgcgctacgacggcatgatcgccgactggctgggcgcacgcgtggacgaggccgggcagacgccgttcgccccgacgctgcacctgggcttcgaccgcggcgccatcctgcgctacggcgaaaacccgcatcagggcggcgcgctgtacaccgaaaccgatgctccggcccaaggcatcgtcgccaccgccaaagtgctggccggcaagccgctcagctacaacaatctggccgacgccgacgccgcgctcgaatgcgtgaaggcgttccagagcgtgccggcgtgcgtcatcgtcaagcacgc

SEQ ID NO: 73434 - DNA, 396 bp, Arabidopsis thaliana landsberg
  unsure (1)..(396): unsure at all n locations
actacccacccatcccagggtttgttcttgaactgtacacctgctggggggcgacaagagctnacagcttgactataggtggtgcagcttcaccagacaacgagttggcccacgctttaatagcttaccactcatggagaccacacacaccaccataagccgactttctaaagcaactcatgcagcattaagtcatgtcttgggaggcgtggtcacacgggggaggaacacacggggcgctatactgaaaagcagaccacacatgaatatatcttggatgccacataacatgacattgatattcgagcgattagaaaatagacagctaacaacaaatgatctcgtacagcacttctgatattcgagctgactatccacaaacaaataacatgtaca

SEQ ID NO: 73435 - DNA, 512 bp, Arabidopsis thaliana landsberg
  unsure (1)..(512): unsure at all n locations
gtaacaaaagagacagctcatgctggcaaggagatgattcctttaaaacagtcctcattgctactaggagtgtggacttttacaaccactatgtaaatcactatggtgattcctcagaaagacagaaatcaatttacctcaagatccaccaataccactgttgggcatatacccaaaggatgcttctttctaccacagggcacttggtcaaccatatttgttgctgctgtactcatactaaccagaagtggcaaagaaccttaatatacttcaaaagaaaaatagatttaaaaaatgttgaacatttaaacaatggagcattactcagttgtttttaaaaagaactgaaaggctgtgctatcacatagttgtagaaggcccatgtgcaaaaattcctggactcacaatcttggctaccatccatgcccaggtccactacttagagttggtgcactccaatatctacttcatctatgagctgctgaannnnnnnnnnnnnnnnnnnnnncaaa

SEQ ID NO: 73436 - DNA, 542 bp, Arabidopsis thaliana landsberg
  unsure (1)..(542): unsure at all n locations
cttttgattgtttcatatttattggctcttgtcattgttgatttgtagtagggcacgaccaaaaggtaccaaagctggatattttttcatatcgaccttaaatcatggttctttgatttcctatactagtttttcctcggaattaatttgagttttatagttaggctgtgtggctaaaaaaataggagtattttatagctttgacatttttgtctgcatgatataaatttgatatttgactgttctacacaacaaccaatgtaatgtatagtctcattcgaggttttttctttttcttatacagtttaaagtaaataagggcacgtaaggtttatagaggtgatcaaacaccataaaggttttgctagatgcatcagatttgatgtatttttgtttgctgatcttacaatttttagctctcattttgctagatgcatcagatttgatgcatcagattctagcanaaagtgcaccttcacccctaactcatttcgttgttctcactttatttctacgatgggttttgttcgaacgtaactttg

SEQ ID NO: 73437 - DNA, 155 bp, Arabidopsis thaliana landsberg
aaaaaaaaattttaacttattagccctaaacactaacccaagggggaggggggaacaaaaataaagtaggaccccttacatactgggccctatttctagacggatagtgcctgagcacgaaggccaacctttatcatcacgtgttgacacactca

SEQ ID NO: 73438 - DNA, 449 bp, Arabidopsis thaliana landsberg
aaactttttaagatacaggactatcatagagcactttaacttttaacctttagttagacaattatgaggtacgagcactactagcaattgattcatattaaagtaagcaattctgttagtagttgctgtgcactataattatataacgttgtggttgttttcttttgaataaatctttctcatattgctaatttgaaacttttttaattccaactaatagtagcaacagcaatttaggtaaacaacatcaaaattgtattaaaaatatatccaatgactcttattgatgtggatattaaagctaatatcctacaatgattagctaatatgctatgttaagtaataaaaacatcaacgatattttggtgttttatgatgtgattttgactgataaaacgtaaaaagtcatgaattttggtgaatacggaatggaaagttaaaattttggt

SEQ ID NO: 73439 - DNA, 669 bp, Arabidopsis thaliana landsberg
taccattcaaactactattcaattactttataaatatctcttctgattttctgagaatttttgttggttttgaatttctctcaagaaagtttctctattctacgtagtagctatggaaacttgcttcggttttgttttttttaactttttaaaaaatttccagttttcaatctcgtaaatgaaatttacatatatattcaagtgaaagaaaactttaaggaccatttttagctaagaggttttcaaattaactttataatttaaagcactttgatacgtacgtttctattctactagaatctgatcctttcagtcgagcggatcatccaatagaaattattttttaaaaaaagaacaaaaacaattaacatacaagaacataaaaaatagttaaataacctcttttatgaaaaatgcgagtttatgaaaaaaaaaaaaaaaagataaagaagaaagtcaacaaaaagtatataaacaaagaagaagaaaataatactacgtgcatgcttcaccgtaatcgaaagagatgaaaggaaatggtcaaatgtctacaataaagacgacaactaccacagttttgatgcttattatttggtatttcagccacaaaatttgttgtgttgattatttttattaacaggaatcacgatgggattaatttttcttttc

SEQ ID NO: 73440 - DNA, 566 bp, Arabidopsis thaliana landsberg
gggcgcgcgacggtcgtcacgatgaccaccttgatcggcagttcgtggcgttgcacgcgctgggccagttccagcccggtcaggccgggcatttcgatgtcggtcaccagcacgtccggcttgagccgctcgagctcgcgccacgccatctcgccatcggcggcagcgcccagcacctcgatgtccgactccaggttcaacaacgccgacagcgcacccagcaccatcgactggtcttcggccagcaacacgcgaatcatgattggctcctggcctggggtcgcaatggcaatactttgtcttgtgggcagtcgggccgcaggtgtgccgagtccagcgcaggtttgtccgttcgtggcagcggaatatccaccaccagctcggtgccctgccccgaaagtgaatggatggccaaatgtccgctcatggtttcaacgcgctcgcgcatgcccttcaggccattgcctgccacatcgataccgccacggtcgtcatcgcacacgcgcatccgcgcatgggcatcaaccaccttcacgctgatgtcggcatggctggcacgcgcatgc

SEQ ID NO: 73441 - DNA, 849 bp, Arabidopsis thaliana landsberg
  unsure (1)..(849): unsure at all n locations
atatagtaatgtcaaaattttgaagaagaaacaaatacattcgtttttctgagtaaaataaaacatgttgagatcacttcacaatgtaagatgtgatcaccaaattaccccttcatcatcttcttcaacgtcatctagatcttcaaattcaagattctcattgccgtagcattcttcgtttcctctatacgcatcttcattactgtaatcctcattccagtctggttcttctgcttcttcttcttcttcttcagaatactgagatttcaaaaggctttcttcactgttttgctttgaatattctatttgggcaccaacaacaactggtttatctagcttcgccctcttgggagagttctcctacaaagatgtgaatacacataatacacataagagactaagcagagaaataagaggtccattctatcaccaaaaaccagatatctctgacactttgtattcttgcataaaagataatttacaaattggaaagaggggtaaacttacaggatcaaatagcttatccaagacattgtaattgatttccaaactcggtctctgcatgaaatgagacaagtaagagaatatgtcagataaatagatttaactacagatgaaaaataaggaagatccaaataaatccgaaaggaaagaaatgcagtagtctagacattgtttagcagagtgagctgaaggaatggtatcactgacctttttttttcagtttctgcattgcttttggttttggttgcagaagttttcttactaggagcaatcttatagcaggatccttcttttnctagtggtgactttctattaattccctgataacaatcgtatcaagacgtc

SEQ ID NO: 73442 - DNA, 333 bp, Arabidopsis thaliana landsberg
aactacttgaacatgacctatttattaaacatcctactgacataaaaaaggaatatgaggggtaataaactccccatatacataactaaaaaatagatgaaagaaaaaaattttaataagacttggatctaactaacttacatgctctttaatgtattttaaataaaatataaaaataaatttaaaagcatgaaggcttaaccttgcaaatcagtcaaattacgtatatactgcatgcacaatattaccaattaaaaaaaattgccaaagataaatcaggatcacaatatcttaaaactgattttttatatcacatgattaccggtcataatg

SEQ ID NO: 73443 - DNA, 525 bp, Arabidopsis thaliana landsberg
gacgacaccacactctcgacaacagtctccactacggtttctgtagttttgccatctgcggatttggtgacaagtttggaagttgtagagacctgtttcgttgtaaccttgggagctgcaaagaaagaagtgatgctaccgtcggccttcacctttttggcgtccgctagagtcacatttgcggcttttcgtttgagagacatgatacctgagcgatggagaatgagaaataaagacactttgaatgatcaggtcgacagcgaaagtcatggggttggcgatggtttatactcctgtcctcagccagcgccacatcgggggtggaaattagggggacgcgatctgcttcgtgttccatcgcgttatcacgcgctcaattaggcaccgatgcacgtgaaatatactgagagcacggaaataaattctactggataattatgtattatgtttatattttttaccgtataaatatgagttgaggtgcgaacaatatcgtattttacaaattagatgtcttaaaaaacg

SEQ ID NO: 73444 - DNA, 2408 bp, Arabidopsis thaliana landsberg
  unsure (1)..(2408): unsure at all n locations
ttggtacaaaaatatgagaaagtgaggcagcaagacaaaactttggtcatatataagtgtttgttctatgatgagtggctagaatgaggaacatttagcttcatctgaatctcattatctggattatctcttagctccttgagtcctttcaccacgttttgagctagatcttgataagcttttgacactatagaacccggtgaagaaacaactacaggaacaccttcatcagaaccttctctgatcgacatttccagtggaatctatatagacaaccaaatagtattattttatgtaaggccacggataagggtcttcaaagcattcaaaatcgcanaaaacagagggttctggctttgattatttacctcaccgataagtttcaaacccttctttgcagcagtgcggggtgctccttctttcccaaatatgaaagaaggctcattacagcgaggacaaacgaagcaactcatgttctctacaaggcccaaaatctagtatataaatgcagaaaggttaagaagctacagcaaaatatatgcttcgaagcagtcaactatcacaaagaagatgaccatacaggtactctaactttgtcgaacatggagattcctctattagcatcagcaagcgcaacatcctgtggagttgatacaattacagcacctagaaacaacaaagccacattctgataactacacaatatgtttctatcataaaaacaaaacgagatatgtatatatacctgagagtttcaggttttgggatatggagatttgagcatcaccggttccaggaggcatatcaacaacgagaatatcaagatctccccaatcaactccttttgtcatcttagcaagagcactcattacctgtagcaatacgacaaagcttgattaccgaacgaaatctttttgtggtcacataaactctagaaggaaggatgtaacaaattaacacaccataggacctctccagacaagtggtgcatctttttcaacaagaagtcccattgacatgcatttaactccatagttctcaactggaatcatcttcatatcttcaaaaacagaagtacttcaaatgatgcaaatagatacatgaaacgcctaatctaaaatgcaagaggcatctatctatgtatcttaccttggttaacttgaggcttttgattgatattcatcatgataggaacagatggtccatatacatccgcatcaagcaatccaatcttcagttcacatttgttggccaatgcaacagctaagtttactacatcattcacaaatttcacagattatctcacattatcaatttcaaattccgaagaccactgtttaggagagacataaaactgaggaaggttccaaaatgtaccagctgttgaagactttccaactccgcctttaccagacgcaacggcgatgatatctctaactccgtgtagtcggagctccgtcgtcctcccgccggcgctagcagaactctggaatatgacaaggcgagatcaaacctcaatttcaagctaacaatatgcgcacgaaaggaacgatctttaaggaccaattcttacaaatttaaacgcagagacggaagctgcgtggacctcacggcggcggagagatcgaagaagcgcgacggtggccataaggagagagagagagagtgaaagtggtgacgagtgcaatttaggaattgcgataaatttaagcgaaatccctaaaaccctgaacaagagcaaattggaggatcagatcactcaattgtaaattacagcaatcgacatgggcaaaactgtcaacgtcatcattaccctcccagccccagcatttgctctgtaactggattggtctcgttcaatgcagtgataaagtagggtacgtacgtcctcgcaaatctaaatcgtgttgtacatagagaaatacattatggagggttttataagacatagccaaacacaaaagagagtggaaagacgacgactcagttgattaattctggatgtcaaagtcctctcccattttgagattgtgcttcatgtaagatattggaatcttcttctccaatggtattggtagatacacttccactagatgtagtagtgttggactgccgttccttgtcggagttgaatcagatgatgataatgaaagatccatatctgagtttgtcttctggggttcatcagatgcatataccaatcttaacccacacttgagcacctcgagtcgagattccttatctgtcacaccaaattcaacgaaagcttcggttggagtacatgtacctgagtgctggtcttcaagacattttatgttatttgagcatctggtatagcagataaagacatgatctgattccgtcttctttagtttgttgcctttcttgtctagtttgttgccatgttt

SEQ ID NO: 73445 - DNA, 368 bp, Arabidopsis thaliana landsberg
cacgggacatacgcatagccaaggatcctatacttaagcgggtgggcagccactaaacccgaaatgatcaatttcgaggaggcaccagtgtcttcagatgattacgagtacggagccgagaactcatgtatgaccacggcaaatgaaaatattctgggaaggcatgatcttgcctctaaaggaagaagctcacacgacaaacagaatgtcaactctgagggaagaactcacagaagaagatggcgattcacctccaagcaaatctacaggatcgagtggttggtggacagagagattaaggctagcattcttgaggtccatgaaacagcacaccaaaggttggtttttatcacccctagacgcgattc

SEQ ID NO: 73446 - DNA, 539 bp, Arabidopsis thaliana landsberg
  unsure (1)..(539): unsure at all n locations
ccagagtcctatggaacatagcataacatttgtgcttccttacaagctctataggtatttggttgtggcagtctacgtcttcactgaattttcaacaacaaaaaaaaaaacaaacttgtgagaagccctagaaatcccaatcgctaaatctttgtaacaaaaccctaattcgaacaaaattagaaacacaaatccgatttcaaaaaagttttcaacgaagaagaagaaatcaccagcgagcgaaaatactgctatcctcagacgatgcgccggacatatcttactctcttctcggtctcgtaagatccacgaaaagagaaatgtttcctcactcgaggaatcgatttgatgacaagcaagggtttagagacttcccctctctctgctggggagaagaaaaagaaagtaaaaatggagactttggaaaaaggagtaaattttttacctttttcttaccattctgttattttattttattggcctttgtgaaaataacatttgcttttttataggacaaanatgccctcttgatttgatta

SEQ ID NO: 73447 - DNA, 537 bp, Arabidopsis thaliana landsberg
  unsure (1)..(537): unsure at all n locations
atgctagacaaaaacagaaatttgccttctaatggtctcaatattgctttttatgactggttaacttattttaaagaaaaaaaactaacgttnnnnnnnnnnnnnnnnnnnnnnnnnnnnnnnaggtaaagtattatacatacctaaagtctgtaaaacaaaggatatttgtacctttctgtaaaagaatattgaaaaaactgtacctacatctgtttttaaacaaagaatggcttataaatgaataatatatgttaatgttttgtttatattatcggtgaagactatataaatgggagtttgttgagaatcgaagactataaagttttaaacgggagttgcgttaactaactcacttaataacaagtaaagtcaagcatagcatagtgtaacgtgtttccaacataatgatgatgggtatgataatttattttgcgtcatatggttttgtatcgtcacgatcgttgacaattacatggattcgcttgggagatggggtggnggtaattagcatgaatgattactgaatttttaaag

SEQ ID NO: 73448 - DNA, 1223 bp, Arabidopsis thaliana landsberg
  unsure (1)..(1223): unsure at all n locations
aactggctagtggctaatagtcaactgatattgtggctatgtcaacggtcaacgtgacgattggaacagacaaaaggcatggttcactccaagcccaagtcaccgatttatttatttatacccaactcaattaccatacataactcaaaagagacatatgccattgccgactaggaaaaaaaacgactctaaactaaaacgatagaatttcgtttttcttgtataggtagacttttattcatcttcacaacaaccaaatttggctgcaaagtatttataacgtttaatttgttacgttgtactgctgcggtacaaatttgaagattctaagaatgtcttttcatgatgctgttgaaacacggattaatgttgaagctttattttaattgacataagagttttcatgatatgctactactactactactagtaggaggacaaaatgtaaatgtgttagattctcttttacaaataaggaaataacaaatttatgcttatccagacttatccaaaagccaaaaatatctacgcaatagatagtactaattttgtgtataataaacatgagatctttggacaagtaacttcttaagacataaatacactattttgcataaacaagaaacttggcttccgttttcttctcgtgaaaagcttatttgcttgcacagctcagctcagaagtcagaaccagaactcgtaagatacatccctctcgaagagcctaccatctttatcgcgttacaacaaaattaccaaaatctgccacttccaagaaacttctgagatcctcttctggaaacgtgttttttcctcaaaagtaacaacaaaataagaaagacacgaaagagcctcattatttatttaaacatattaagaatannnnnnnnnnnnnnnnnngcatacaaaagcaccaaccatgcccccttaccgcgtaaatctataaaaaaaacatacaaaatcaaatataaacaattaataagaatattattttggactcgacgattaaatgtttttaattattgtattgtgttggctttttttttcttttttcttttttaacttttacgccagaaattctacaatcccttggaagttatttttacttataacttcttagtccaaaacatgataaacgaaattaacgttctctccaacggctaattaaataaccattaaaagtttgaataactacttcaaattttaatgtgtagttggaaaaa

SEQ ID NO: 73449 - DNA, 503 bp, Arabidopsis thaliana landsberg
  unsure (1)..(503): unsure at all n locations
gcaagttgctgagggcgtataattatttatgttcgtattgaatttggcgccgtgccgctgatgatcgagggcacgctcgacccgttcgccgaacccttgtcacgcgcacccgtcgaagaggtgtacgcacaaatcgcggccgacttccaggaggcgataacaaaattaccggcaacaaatgcagcggatgaacggggcctgccgacgaaagacgctgcgnnnnnnnnnnnnnnnnnnnnnnnnnnnnnnnnnnnnnnnnnnnnnnnaaataaaagcgagtattatgcaaaggccgcggaagtcgcgcaagaggtgattgacgacggcaactactctcttgttccggacataaagaatgtttttagtgtcgccacgaaatacggaccggagatgatgtggagtttcaattccaacgaagtcgaccttggccccgatccgcggatatggtcggacatgagaggatttgggacaatttgtgcagagccttactggggagcagccta

SEQ ID NO: 73450 - DNA, 569 bp, Arabidopsis thaliana landsberg
gacacaactctcacctttcactgttgtgcttgcttctccgtttacaacatctccatcaactcaatcaacgtcactttcagcagcatcaacatcgtttcttttgctggaatttacaaaaaaatttgtcatcatcaccgtgaacccaatagatctaattaaaagagtttaatgaaagaaatataaaccctaagcggatagtatataggaaacccaagggtacaatcttaaatgcggattgaacaagtttaatcaccaactaaaattctaaaacaaaatcaaaatcaaattacatgtttaatattggttagtgtaggatatataataaactgaaatttgcagatcgagacgaagatcactaatttccgttgaacaccaacaacatagttatcaaattcgatgccaaaaattgcagacttagatcgaaaaaaaatatgatagctgggtttaattgaagaagaacagctccttcgcatatctcacattcccaccatttctcttgttcactttcagcagcatcaacaacgtcactttcagcagcatcagcatcaacgtcactttcttgactcgtt

SEQ ID NO: 73451 - DNA, 329 bp, Arabidopsis thaliana landsberg
ccatcctacaggggtatgggatataaatgcaaagtataactcgaataaaaagtctaaacttacattttggaataacaaccccaatatgagagaccatatggaatactcatgattgggaacatattggcaaagattgccgataccgaacattgatcacaaaaagtgatgtgataagataagactgacaagaacctgagaagtacactacatagaagcatgacttactgatttgataatcatgaagatctcaaaatgctggtaccttgacctcgggctgaaccaagacataatgcagcatgtcaaatatgatcggaaccgtgagtatcttt

SEQ ID NO: 73452 - DNA, 3013 bp, Arabidopsis thaliana landsberg
tcctcgtgagctgctccaagaagtggttgatgatgtaatggacaaactcgtttcgtggatcttatcattctaggctatggaccaatatggtgcagtcgacacgttcggggctttgtctgcattttgtggtctcgttattttgagttgtgatcatcattaataagtgagttgtaatgcattacaaaatcggtttgtagttattcatcctttccaaatcaaaagtgtcatattgacaattttgaggcaagctttttgtttttataataatactaattagattacataatcttcaatttatattatttttaaaattagaaaagagcattttttaagcaaaaattacattgaatcataaagaaatattggtttaatttatagagatgaacatgttgataattgaaacaaatttatttaattattttttgtatgcactcaactctgtttggcttcaatcatataagtataaaatataattaaaatgtttttattaaaatattagatttcatgattcttgttttagtatataaaaaaaattgatatctccatatcgctagtgaatagtgcagtatctctttacgcgctatttcaagaccaaaccttttctctcttctagagtgaaactgtggaagcaactctcacagagcagcaatggcggagaagtcgagcttcttcgttcatttcagctgtcttctgcttcttctaactatcataataacatgtggagagggagtgaggaatccggtgaggccaagatcatcggagagaagagcattgatggacggccaagatctctcgaggccattgaagctgacatttggtgggccttctcgtaattggactgacgctattcccatcggtaatggccgtctcggagccacgatctggggcggcgtctcctctgagattctcaacatcaatggtaaatgttaaaacggcgtcgttttttttggatttttgtccttttctctcccattctttgtgttgttttttattttggagatttggttaataaatgctatctgctgtgttctctaaaatctattgtcagagatcaatcaatgttcttgtttctgaacaggggattatgcttgagacttgaaataaattgtgtaaatgaaatacattgctacaaaagcataagcatttctgaatcttgtttccgctaagatgattttgtggattttgattgatagaggacacaatttggactggagtaccagcagactacacgaaccagaaggcccctgaagcattagcagaagtgaggaggcttgttgatgaaagaaactatgctgaagctacttcagaagctgtcaaattatcaggccagccttctgatgtatgttctattcttttggtgaaaatgttgctttcacttcttgttttttgtttattatgtgtaaagactaatccttttgtttgtggcctctaaaggtttaccagattgtgggagatttgaatttagagtttgacagttcgcatcggaagtacactcaagcctcttatcgccgtgaactcgacttggaaactgctgtagctaaagtaagttactcggttggggctgtggacttctcaagggagtttttcgcttctaatccggatcaagtaatagtagccaagatctatgcaagcaaaccgggatcattgtcttttaaggtgtcttttgacagcgagttgcaccatcattcagagacaaatcccaaggctaatcagattttgatgcggggaagttgtcgccccaagcgacttcctgtgaacttgaagaaaagtatcaacgcgacaaatataccctatgatgatcacaaaggattgcagtttgcttcgattcttgaagtgagagtcagcaacggtggctctgtgtcttccttaggtggcaagaaactaagtgttgaaaaggcagactgggcggttctgcttctggcggcttcatctaactttgatgggccatttactatgcctgttgattctaagatagaccctgcaaaggaatgcgttaacagaatcagctcagtccagaaatactcgtactctgatctttatgctcgtcatttgggtgactatcagaaacttttcaaccgggtctctttacacctttctggaagctcaacaaatgaaactgtgcaacaggcaacttcaactgctgaaagggtgcgatcatttaaaaccgatcaagacccttcattggtggaacttctattccaatatggtcgatacctgcttatatcttcttcaagacccgggactcaggtggctaacttgcagggtatatggaacagggacattcagccaccatgggagtgcgttttcgccttactatcttttcttggactttcatagcttttgttgtatcactaactccacttcttcttctgcggtattgcagtggtgctcctcacctgaacattaatctgcagatgaactattggcattctcttcctggtaatatccgggaatgtcaggaaccattgtttgattatatgtctgctttagcaattaatggccgcaagacagcacaagtaagtttctatccttttttctaatgatgacctttgcaatgcatttgtgctccatcactagagacattagtctaagtatcattttgttgcgctgtataggtgaactacggagcaagtggttgggtggcacatcaagtatcagacatatgggcaaaaacttcaccagatagaggtgaggcagtgtgggcactctggcccatgggtggagcttggctctgcactcatgcatgggagcattatacatacacaatggacaaggtatggacctcaattttctgattttcaaatcagtttctttaaccggtactatgtttaatcagcttttacttgttgattcatttctaggaatttcttaaaaagaaaggatatccattgttggaaggatgtacgtcgtttcttttggactggctgatcaaaggtaaagatggatttctccagaccaatgcatcgacttcccctgagcatatgtttaatgctcccccaggcaaccctgctag

SEQ ID NO: 73453 - DNA, 592 bp, Arabidopsis thaliana landsberg
  unsure (1)..(592): unsure at all n locations
caatcaaccataatcggaagcttgaatatcaaatgcctcatgaggtcttcgatgtcaagcccattgttcataaccccaatttcgaagacaagatcagtctctaccaatcatcggatcgtctagccagaagcactaacactctgacacttgagtatcagatcccggagttcctcgatgtcaatcccattggtcgtaagtccaaactcaaatatggcatattctccaagttggcgcgtcttttcagaaatctcttggattagatcttttttttttttcgnnnnnnnnnnnnnnnnnnnnnnnnnggtatgtatttgagtcccannnnnnnnnnnnnnnnnnnnnnnnnnnnnnnnnnnnnnnnnnnnnnnnnnnnnnnnatagcttaaataaagtagctttaatgaagcaatgtttgtttcatctttctatatatatcgcaactcttaagtaataaaaaaaaattatcaaaaaaaaaactcttaaataataaaatggtcccatttcttcctttattatttggtttcgatagttctgtgctccatgtgttttgatttaaaacgaaatctatgaatgacaaaatcttgtgtgaaaa

SEQ ID NO: 73454 - DNA, 359 bp, Arabidopsis thaliana landsberg
gggcgctatccctatatacggacttttatgattttgggcgattcccacattttgagggcgccgggcttgaaatcattctctacaatggtaacaagcacaaacggcacgatcatggctgcgcccacttctccttccacatcaaactgtacatacaggttattgctgaagcgaagctggttaatgcgtattacgttgccgacgtgttcctgcacatctttaaacagagctttctgatctttactgccttcattcagcgcatagcccataatatccgtaagacagatgacgccttcagacacctacgaactcaccggctatgcttttgcataaaaaaagttgagctgagttatgaaagaaat

SEQ ID NO: 73455 - DNA, 852 bp, Arabidopsis thaliana landsberg
agcagaccacaaacaagcaactcaatgctcaggtttctttatcaagcccttcgctttttcaagcaataaggtgtatgtcatcttctaagctctttattggaggtgagtctagttctataggcttttcatctgtttacttgtttatgctgttatgttactaactttatgattttgttttctcttttcttgttgtaaggtatggcttatagcatggatgaggatagcttaagagaagctttcaccaaatacggtgaagttgtcgatagtaagttactgatctatttagtattcttgtcaaaatgttattgcagtgtcttagtgaataaattaggcacttgtttcttgagtatggtttgtttagttgccttctgctaaccaagcctttgtgtttttacacagctagagttattttggatcgtgaaactggtaggtcaaggggatttggatttgttacattcacctcttcagaagcggcatctagtgctatccaggctttggatggccgggtaagttccattgctaatctatgaaacctttgaaagagttataatgtctgttaactttctcgtgtctcgttgggtttaactttcattgatactctccctgatccattaccttaatcctccctcaggatctccatggccgggttgttaaagtaaactatgcaaatgatagaacaagtggtggtggttttggaggtggtggctatggaggcggtggtggtggacatggaaatatagctctatatatgttattgagtggtaaagcgtctcctcagaaagaagcttcaagtaaatatggaggaagatgacctaaaacccgccggaaaacctttgtacaggctttacttca

SEQ ID NO: 73456 - DNA, 697 bp, Arabidopsis thaliana landsberg
ctttaaaaggttttctaggtttgatagagtttgtaaataaatacgtgtagagttttattaagtgtcaatttattgatctgtagtggaccttcagtttttttttgttagtttttgacaaagggtttactgatatttatttcttgatacgtgtatgattcgcacgatgaggccaacatcatgtaggcctacgtatacgcatacttagcgatatagatggacgacacaaaaaaattgatatatagataaattctgaataaaataaccaaaaccatccaaatatccgaagaggtacattttgtcttctgtacctacttttgttgtcatctaacttttttatttctcgaaattaaactcagtttctggagcaatgtatgtattattgtatatttgtattcgtaaaacccataatatgtacgtttcctttgaaacaaggaagggttaaatgcaaaagaatcagcttaaataaaagcgtgtatgatacatagaaaaacagtcagatgcatgtagaatcattctacaataaagtaatgtttagaggtaaaatcgttgttgtcaaattgacacgatatattgaatgattcaaaacgtattagcatttatgattgacacgattattttcctcacaaatttaggtcagtcataagatcatttggatcctatgatcattctacaagtttctaagtaaaaataatttggc

SEQ ID NO: 73457 - DNA, 495 bp, Arabidopsis thaliana landsberg
cctgggcgccgaggaggtgcgggccttgcccggcgaccgcttttgcaacaccccgctggaccgtttcccgcgggaactgttcccgcgcacccgtccggcgctgtactacccgttccccggcgatccgtccgacctgtcgggctggcagcacttcgagcggctgatgcggcacctgaagggcgggccgccggcctgacgccgggcgcggggcggacggctcatcggaccagcgcggtgccgcgcccggaggcaccggcggcaccggcggcaccggcggtgccggtgggaccgctgccgctgtcgctgtcgcccggccgcccgctgccccggccgtccgccgtcccggtcccggcggtgtcccggcggaaggcccagtccatccgcggctccacgacgcaccggaagacgccgcgcaccggtcgggtgcacagcagcgtgaccccgcccgccgcgaccacggtgaccacgagcgcgccgagcggtcggtgcagccac

SEQ ID NO: 73458 - DNA, 119 bp, Arabidopsis thaliana landsberg
tattgaacagggtatctatgagtcggatccgcgacggcctggatactcgaacgcgtttcttgggtttgatactcgtagaatcctgacggggatggacgactgatggggttctggtccat

SEQ ID NO: 73459 - DNA, 549 bp, Arabidopsis thaliana landsberg
gtctgggcaagccacaaggttgagccgcccatggacaaaccatacgcagccgtgggattttacttttggatactgtattacacttcgtcaaccatattcaggactgagagtcgacgttttatcctcatttcaggcaaaagctttaaacgcactatctccgtactaaattttgtgttggcgatatgaacttttttttgtctattctctctgatcatctgcaaactcgtaagctcgatcggatatcgattcgatctatgcggcgacagcattatgacttggatctacaactatcatgaccatgatccggacgaccggactgcactagtcgttgctaccagccttgtgttcccgattctcgcgcttctggctgtcttgctgcgattttatgtccgaagatttactaatcgcccactatgggtggatgattatgcagccttatccagtgcgatattgataatagctcgggcaggcattctcatttatcgtacgttcattcacttttcttcttgcaagcattggtgggtaccctggctaattggaatgggaaca

SEQ ID NO: 73460 - DNA, 697 bp, Arabidopsis thaliana landsberg
aattgtcaccacctctcggtggtttttttgatatactaatgtgtatgtggctctttctctctgtgggtagtttctactaattattttgcaagctcttataccataaattgaaaaacaaactacatgaatactgaataatcattatcaactccattggtaatgattactgttaaagaaacaattttgaaattccctactttttttttttggatataataaatcaatcaacttcattggtaagctaatgcaaatcatgtgtttgtgtatgaaacatttgatttgcataacccacgcataggcatagcgtgagctactttctagtttttaatggatcatgtatatgcaaataccaagttggacaagcgaagaatgtttggtgaatgtatctgataaacacgaaaacaaatgagaacttatcatatatgattctaagtccaataatgcatgttaacactatctcctagctagtttttgaaatgatcaccattcaataaacacacaataccttgatctttgccgtctaacccaccgtcactaactttactttttccctcaaacttatcaccaccgtcaattgatctatctatgccatatatgttgttgtggttctcgtacactttttcacaattctccggccaccatggtttgggcttggtgcacttggggttaccttttcggcttctaaggtacaaacaac

SEQ ID NO: 73461 - DNA, 103 bp, Arabidopsis thaliana landsberg
aaaaaccccgaagaggattgaatcgatggggagaaaaagactattaaatttacaatgcataagctaagaatgcctaatttatgagggataagggggggggggg

SEQ ID NO: 73462 - DNA, 397 bp, Arabidopsis thaliana landsberg
ggagataccgagcttaacttatgattaaatttgttctttttagggttcggtgtattgggatttagaggatataccaactccaagtgctccacctataatggaaagtggacaagaagatagcatcagcttagagattgaaaaggacattgagaagattgaggatgagatttgtggagaagaaggagtatacagtagtaagcaagaaagcatgagaagcagttcacatttgtatagagttgaagaatttggtgacaggtatcttccgaatttaacgagattttttgtaattccgttctgcggactagttttgatgtgtataatcatggtttggtgtagtgtgaaggacataaaaactgtggaagatatcaaaaatctcgaaatttgctcagatgaatta

SEQ ID NO: 73463 - DNA, 442 bp, Arabidopsis thaliana landsberg
  unsure (1)..(442): unsure at all n locations
gggggggggcgctgcgcgcggncgacctcctcgctctactttatatgtcgcgcccggccttgaggctcgtcacgtggatcttcaggtcccgtgacgcccctcggccatcacccggaactcgtcggcgacccgggcgtagaggtcgcgctcggccgtgaacgcggcgagggcggcggcatgctgacggcgcgcccgctccagcagctccccggcccgctgcttcgccgtgctgaccggccagtcgccgcccggttccccgtgctccgtctcggccgcgtcggcgtcaccggccggctcgcccaccgcttcccgccgctgccaggcccaccggttccgcgcgttgtgcaccggcccgccacccgctttcggacggtccgccttgaggcagtactcccgctgccggcccgacccggtgggcctgcccggcgcccgccggcgcgtg

SEQ ID NO: 73464 - DNA, 515 bp, Arabidopsis thaliana landsberg
  unsure (1)..(515): unsure at all n locations
agccgggggggatccagcaggcggccgcccagttgcagctgctgtacttgcgcggactgcacgaccggntggaaagcctgggcggaccttacgacgtgatctgtgccgggcgttcgcctcgctgccggacttcgtgagctggtcggcgggcgcactggcggccgatggcgtctggctggccatgaagggcaagcggccggaggcggagatgcaggccttgcccgctgcggcggccgaagtgtttcacgtggaacagctgcgggtgcccggcctcgatgcggagcgctgcatcgtctggatgcgccagcccgcccgtgccgaaaccgccacagccgcggcgcagggctgacgtaaactcggccgtcacctggaggggccatgttcggcattgcagactacggcgcgttcgtcgccgccatcctgatcttcctggccattcccggccccggcaacctggccctgatcacgtccaccggcaagggcggcatccggggcgggctggccgcacgctcgga

SEQ ID NO: 73465 - DNA, 352 bp, Arabidopsis thaliana landsberg
  unsure (1)..(352): unsure at all n locations
ttttgaaggctgatggtggtcctccacggtggtttagtcccgttgattgtggtcgacctgnttattatgctcctacgttactcttcttacctggtaaaacaaaatcagtgatttataagaatcaatggtttttgagctttgattgttgaaattgcttgacctatgtgaggtttgtgtgtgcttcatgagctaaaaatttactattcttccaaagtttgaaactttgtattcattttctcacttctttgtgtgtttcatggaggaaaggttgaatctgtaggctgttttgttgaattactgttgtcttatctcatgtatctgattttaaatcttcggttcaaagtttcaagct

SEQ ID NO: 73466 - DNA, 616 bp, Arabidopsis thaliana landsberg
  unsure (1)..(616): unsure at all n locations
aggcactgacacatgtgagattgtactatacacatgtggtattgcctctttttccatgattgtataataataatgggtacatacggtaaataatttgatttcacatcatctagttgattgagttttgattctgataattgggcctatagatttcataataaaatctccagggttctcataatcgagcaacgatatcattataattggatctgcatttatggttagatttgcaatttaatcatcatactaattaattaatcaacgatatatatttgattgagtaaatttcatgttagatgaaagatggtttcgtattaacggtcatctagctagctagtggcaaataaaatataaaaaattattgttaaatttggtcaacttaattcttaaaaaccatagatgatagatggtaaaagattacaagaagggtttctcatcaacgtaatttccaagtaaatatataatgctcttgtggatccggtagaccatgttgattgatattcaacattagcttgcattacttggttctttaatcctttttaatcttatctggntaagctttttgtaaacctaaacttcatttatatacaaaatccagggaatagtgattagaaac

SEQ ID NO: 73467 - DNA, 658 bp, Arabidopsis thaliana landsberg
gacagctcgtatgcatttaagatactatgcatgcgcccagtgctttcggctttttaccttgctgttctttttcgtcccccaaggacgtgcaacgacgtggccacgttctgtactgccgccatcgtcgtctctggctttggtattccgctggtgttgctgcacgagggcacggtcagtcaaagcgtctctagaattcggatttgcagctgaccactcctttgagataagcctatcctgaaacgttcctgtcattagattgagaccggcgcgtgctggttgacgtttgcaggcaacggcgtcatatttctctgcattgctgcatgtcagttgtcgccatcacacctctacgtccttgacctgtacccagcctttcatttcttgttttctctcttcatttccaattttctctcttcatttccaatagatttccacctcttcaccgaagacaccggcctgtagccgcacttgtgttcttttgtttcacctgcacgtacttttggcagagccttttcctttttgtatgtgtctgtcctgccttgtcgtaacaagggacctgctcacttcatgagcgaatgagtgatttggctgtactttgcatgcaactgtccaaagtacacgtgtgttgctgctgaagaattggtatatatgggccctggca

SEQ ID NO: 73468 - DNA, 734 bp, Arabidopsis thaliana landsberg
  unsure (1)..(734): unsure at all n locations
ggcctgggcagcagcagggctgagcgaagagcagagggctgcgccggtaggggtcggttatcgaggatcgtgtcgtcacaggaaccagaaaagcgggtggtgtgttccgcgatagccgtgctaacttggtcacgtcggaaaaggcagacttggtttggtaagcccaagtcctttcggtaacgaaagctctggtctttggcttcgtgcttgagatccccacgacgaatatcggacgccgctggcgtcctttcattcgtccgtgaggttctcgaacccgagaaacgctccggtcgaacattcatcgacattggagccattcatgcacagccattccgccccctatgacgttgtcattgccggtgccggtcccgtcggtctgtttctcgcgtgtgagctcaggctcttcggcctgtcggtcgtggtgctggagcaagccgaggatccacgttcaccgttgaagcgactcccattcggcatgcgtggtctttcagcgcccaccctggaagctttctatcgtcgtggattgttggacgacgtgaccgaagcacaacaggcaaatgccacctcgggtgccaccaaggcggcagctcactggatgcaacaggcccggcgntccgtgggtcacttcgcgggcattccgttcttccaggaccatgtcgatactgagcgatggtcctatcgccggccgagccctgcgggtaccagcctgatggtgaaatggagtcgctcgaaac

SEQ ID NO: 73469 - DNA, 498 bp, Arabidopsis thaliana landsberg
gcgggcggcccgcgaggacggccggttcaagagccgcgtcgacctcgaggcgatctacctgaccgagcaggggttgaagtccgacgacgatgtggtcgtctactgccgcatcggcgagcgctcctcgcacacctggttcgtgctcacgcagctgctcggcttcggcaatgtgcacaactacgacggctcgtggaccgagtggggcaactcggtgcgagtcccggtcgagctcggagcgccggccgagtgagtgcaggcgaccttcccgcgccgctggcggagctgatcgacgagttcggctcggtcggccccaaggatcggttgcagttgttgctggagctgaacgaggacctacctgatctgccggcacggtacgccgaccatcctgagcagctggagcaggtgcacgagtgccagaccccgttgttcctggcggtcgaggtgaccgacgggatcgtgcacctctttttaacgcgccccggaggcaccgacaacgcg

SEQ ID NO: 73470 - DNA, 514 bp, Arabidopsis thaliana landsberg
  unsure (1)..(514): unsure at all n locations
agatgttatattaaatcttaactacactagtttttttttttcttctatcttcacttgtggtccagaccggccccatatatcaaaagatgtatcccagctctcaaaactcggattttcttatgcacgcacactacaagcccaccaacaaacatcaatagcaatatcttcaaaatcacaaaagagatataactaaggggtcatcaagatctcctaaaacaaaaggaaaaagaaaaaggagtcacctgaaagtgtaaaaaggtgagatgtctttaaagtgtcatatgttagaagcaaatatattgtttttttctttttggttggtaaaagaatgcccccaacatttgcaactctattattctgtaaagtcctcttattacaaaaaaaaaaagagaaagataaaaggaggcagaaagattatggcgcctaagcctgatatattaacatcctataatgattataaacatccacatatatgatacacanttgngcatttatatattaataatatgatgaa

SEQ ID NO: 73471 - DNA, 549 bp, Arabidopsis thaliana landsberg
tccgtattttgaatgaaaattacctgctgttcatttttgagagcagccgcagaatttcaatgtagagccatgcgatggtaactgtcagcgcgaaggcgccgtaccattccatgtatttgggggcgccacccataacgcccttgtcaatcatatcaaaatccagcagcaggttcagggccgccacacccaccacgatcagcgaaaaaatgatgctgaaggttgaaccgtttgtaaggctcatgaaaggaatatttatgctgaaaaagcccaggatccaggtcagaatataaaagatgaagatacccatggtggcgcccacgattaccatcgtcagctttttagtcactttgatgatacgaaaacggtacaacgcccacatagccagtactacgccaaaagtcagcagcactgcctgcatcacgatgaaaggggctttctccgcgacatggtgctgaccatggcggaaatagcgcccaggaacaagccttcacaaattccataagcaggcgccaggtacttagcccattgcatcttgaagctgatgacaat

SEQ ID NO: 73472 - DNA, 437 bp, Arabidopsis thaliana landsberg
gatggtagtttgattcttttaagacacaaaataaaagcataataatcgaaagagccatgggaagagtgtaacctagagccattgtcaccaagaccatgaagccagactagagtggcttgatgctttcctttaggcctcacaacataagtccttccaaattcatatccccttgcatttctactaccttcaaagattgtaccaaatacagtgtcataaacaagtttcaagcaaaaagaatttctttattttttcaaataacaaaagaaacttcaggccaaaacccaaattaatccgtggaatctatctaaattatcatacggtaaaaaaatttgatcataacaagtacaaataacattaacatgaacaatcaagaaggggaaaagaaacaaaccagaacccatgctttgatgagagtaactcattttttgttgaaagtg

SEQ ID NO: 73473 - DNA, 533 bp, Arabidopsis thaliana landsberg
cgccggcggctacaaggcggcttcggccgtcgatctggtgttcaactcgccatttgccgaataggtgagcgcatggcggaaacaaagcgtcaggagagtatcatgcaagttcacacgctacatccagcactatcgacccgcttgatagtggccgacatcaattccgagctgcgcgctgcagcactgcttctatccaatccccgcatcggcctggtggtcgtttgcgagagcgatgggcaggcggcaggcgtgctcagcaaatccgacctggtccgtcatctcgccacttccacgacgaacgatgcagtcgtggcatcgctgatgagccagccgatcgtgttctgcggtcccgacgaggatcttcattccgtctgggagctgatggccgcacgcaacctgcagaacattcccgtcttgggtcccgattcaggccgatcggcgtgctcgatatacgcgatgcgatgaagggcgctttcgagcaggaagaggtccaggagcatatgctcacgaattacattgcgggggtcgggtat

SEQ ID NO: 73474 - DNA, 548 bp, Arabidopsis thaliana landsberg
agaccggaatttaccagccacgtacgcaggtcacgctcgttcgttttcgcccggccgcgtcgtcgtcaaggtggagggcctgcaccgcgccagcgccggccccggcccgggggccgccgcctcggccgcgcgcgactggctgccgttcaccgtgcgtctttattttcaggccggctccgccgaggtgcgcctcgtgcacacctttattttcgacggtgacgcgcaccgcgatttcatcaagggtctcggcctcgcgttcaccgttccgttcaaggaggaactgcaaaaccgccatcttcgcttcgtcggcgacggcaccggtgtctgggcgcaacctgtccggatgcttcccggctaccgttcccaggccggccaggaaatcggcgatctctacgccgcccacctcggcggacaacgcgttcccaatctcgccgatctcgatccgcgttcgcgtgccgcgctgctcaccgtcccgatctggggcgacgccaaactcacccaaaccggacccaacggctggtcgatccacatacgcaccaccgacgcca

SEQ ID NO: 73475 - DNA, 532 bp, Arabidopsis thaliana landsberg
  unsure (1)..(532): unsure at all n locations
atccttttccatcatacgaacacgttttagaatcgttatctacctcctgttcttttcataagggcaaaatctgcgcgagtcatgagttttgccaaatcgctgaatgtggtccgagcctgccagccaagtttctctctggctttagacggatcaccgagaagaagatccacttcagtaggacggaagagtcgtggattgatacggatgatgctcttaccggtggcagtatctataccgacctcatctgatccttctccatgccactcaaggacgatgttgagttcttcgcatgctgcttccacgaattcccggacggtatgtgtttcnnnnnnnnnnnnnnnnnnnnnnnnnnnnnnnnnnnnnnnnnnnnnnnnnnnnnnnnnnnnnnnnnnnnnnnnnnnnnnnnnnnnnnnnnnnnnnnnnnnnagattaccgagctcgagtagttcctgttgtccaagctttattttggataagccgatcgtgatcttacgagtcacgaagttatttncgcgtcgttcgctctcatgat

SEQ ID NO: 73476 - DNA, 552 bp, Arabidopsis thaliana landsberg
  unsure (1)..(552): unsure at all n locations
cggggcagcgcgcacgttctataattgaccaatttacttgnnnnnnnnnnnnnnnnnncattcttgccgaggctttgacatacgaggacgtttaccttgtccccgcctactcccgcgtcctgccgcacgaagtgcagttgcagacacggttgacgcgcaacctcaagctcaacatccccatcatttccgccgccatggacacggtgaccgaagcgcgtctggccatcaccatggcccagtgcggcgggctcggcgtcatccacaagaacatgaccgccgccgagcaggccgcgcaagtgcgccaggtgaagaagttcgaggccggggtcatccgcaacccgttcaccgtcggcccggacacgccgatccgcgaagtgctggacattacccacgcgcacaacatttccggcgtgccggtggtggacggcgaacagctggtcggcatcgtcacttcgcgcgacatggcgtttgaaaagaagctggacgatccggtgcgccacatcatgacgcgcaagggacagctggtcaccgtgcgcgagggcgccatgccga

SEQ ID NO: 73477 - DNA, 507 bp, Arabidopsis thaliana landsberg
  unsure (1)..(507): unsure at all n locations
gatccgattcgagatcgagttctcgcaacagtgttcgaagctantggcgaggcaaacatcaccagtgatgaagctcggttgcacttggccgaagctaagagcgcgggaggctcctttccgaacaataagccgttctcactaagaactgagtgggttgactcagatcgtcattggctgcagcacgagggcgtcgatatccaagcgccagccgccgccgccgttctccagcccagtgaagcggttaagcacgcgcaagcagccttgaagaaggatgaaacacgagagaatttcgacgtgctctttcgactgtcgatttcgctcgatgaggcgatcggtacaatgggcgacaacctgtctccccacgttgatcaggaggtgtcggatcgattggccgaggcactgggtgtattggtcgcgagccccttattgcgaggagcagcgtggttttgggatcgcccgccttttggagctgacccatcatccctgccncgaggtgcgcaacgatac

SEQ ID NO: 73478 - DNA, 499 bp, Arabidopsis thaliana landsberg
cactttcttcaactctgtaatttcacaattggcatcctcaagcctctgaagaagcttaccactctctcttatttaagattctcctaatcagtaaaccaaatagcatcatttcgtttctcatctcacactgtttctcatctcttatggacatggtggttgctcttacaaaaaaaaacaaagggcaacaacacaatcaatcttagcagagatgactaaatctgaatctcaagaagcgttttgcctactatcatccatctgataggaaaaccaaaaatcaaagtgaaatagaaagcaaagaatcagcaaaacatccaaggcaaaagccaaaatggttcaagatggtaccaaaaaaaaaaaaaaaaaacagaggatgcctgagatcttaagcaagcattaaaaaaaggttgagtgaaattgcaagtctaagcacaagacaactgcaaagtacatgtggtatagcatgttatatttgtgagtgggaagtacatgaactttttat

SEQ ID NO: 73479 - DNA, 550 bp, Arabidopsis thaliana landsberg
  unsure (1)..(550): unsure at all n locations
agcatacacggcgcaacgcgccgccttcccgaacgtcaactatggacttctccacgcactggtgtgccctagcggaccctgcgctcgacccctccgccaaagagtgtggcggaagcctgccgcgtcacacggcctacgttaaacgtcgaccattctgcgcatgaaaaaggcgaagcacaacaacatccttgaggccaaacgcatcgtggcccttgacccattaacagtctctgcgctgagggatcaggcgtcatcaagtgtcaagtaatctattgtgcgagaactcggagtttttaacggatgagcggcattgccgagccttgaggtcaggacgcgtttatgatgactatagatatggctggcccgggctcggttaagtctgacggctgctctattctctaaagatcccccagggaacgatgatcgccggaggtatgcctcggcggcacggccccgggcggctaagatggtgatagcanatngacgccgctcgaaacgacgaacacccaggtgccatcatgactgccccactccgagccattcccagcga

SEQ ID NO: 73480 - DNA, 457 bp, Arabidopsis thaliana landsberg
atcgcgccacgttcgcgccgccctgctcagcgtacacgatgttcgttttggtggggtggatctgcacgaaataggggtcggcgccgcccacgagatacgcgtcgccgcgcgagatgcccttgatgtccttcgtcgcgctcggcgtgcaccacgatccgttgtcctgcaatccgccgcagacgtgataggggtcgcgcatgtcgagcgacacgtggtagaactgcgccgtgggaagattgtcgacaaacttccacgtcttcccggcgctgtgagagaagaagacgccgccgtcgttgcccgacacgagatggttcgaatcgtccgggtcgatccacagcgcatgctggtcgggatgcaggctctgtccaccgtagcccgggtccgtgaacgtgcggccgccgtcggtcgacgtgttgaagttggacccgccgtaatagatgcgctgcggatcgttggg

SEQ ID NO: 73481 - DNA, 508 bp, Arabidopsis thaliana landsberg
  unsure (1)..(508): unsure at all n locations
gccgagctgtatcgctggctggcgctgctggccgggcaggctggccgcatgcaccattggggccgcgacaagccggcgctggacgcacgctttgctgcagcgctacccggccttgcgcccccgctatcggcggttggtcgaggcgcatctgcgcctgcgcccggagccggccgcattgcggcgcgacgaggccgcgctggaacacgccgtgcggcaggcgttgcacgagcccggcagccttgtcgatttcccgcgcagtgagcgcgcgccgtggcccgtgccgttgtggctgtacccgccccagcaggccggcctgccgcaagcggccgagctcgacagcgggcctgaagacgggcagcagcccgccgccgatgcgcgcacggcggcgcgcaagcgcgccacgcgggtcgatgaccattccggcaaagacggcctgttgctgatacgcctggaanacctgttcagctggtccgagcacgtcgacctggaccggcgcggcgacgacagc

SEQ ID NO: 73482 - DNA, 395 bp, Arabidopsis thaliana landsberg
  unsure (1)..(395): unsure at all n locations
nnnnnnnnnnnnnnnnnnnnnnnnnnnnnnnnnnnnnnnnnnnnnnnnnnnnnnnnnnnnnnnnnnnnnnnnnnnnnnnnnnnnnnnnnnnnnnnnnnnnnnnnnnnnnnnnnnnnnnnnnnnnnnnnnnnnnnnnnnnnnnnnnnnnnnnnnnnnnnnnnnnnnnnnnnnnnnnnnnnnnnnnnnnnnnnnnnnnnnnnnnnnnnnnnnnnnnnnnnnnnnnnnnnnnnnnnnnnnnnnnnnnnnnnnnnnnnnnnnnaccctgcatgaaggaatcaaaacagccgcacggagagaggcagtgtgcgtattgtgcgctcttacggttgctttctgactgtctcgctgggcttggcctgccaggtgcggccagccggattagctgactcagaggc

SEQ ID NO: 73483 - DNA, 487 bp, Arabidopsis thaliana landsberg
  unsure (1)..(487): unsure at all n locations
tccaaaacctgaataatagaatggcctctactgttccaattttatngattttcacattttgatttatgttccacctctgattcttctggttattttcgaactcactaccagaaattctggagcatctggttcaactctaccgtattgcagggaaaacagctgtcaacttcagaaccagtctacatgttttcctgaagattcaggttgtttcttctttggcttctgataccgattgttctcaaatttagctttcacaataagagcatatagaaattctgcttctgcggaacaatcgtaaggtttgtccacgacgctggagttaggacgataagtgagtattcacaatcacagataatttctcaaggagggtaaagagaagcatatacctgtcaagtaactcttctagaataattctctgtgatggtgtgacattatgtatacaatttctcggacactgattaactgcagactgtacacggtaatcttc

SEQ ID NO: 73484 - DNA, 485 bp, Arabidopsis thaliana landsberg
gttgataaatatttattggttgaaaaattttaaggttttatgcttgtgtagtaaatcaatctttcaagcagttccatgattttcttaatatatagtgtttccgattagtcatggggtttatagtaatgttagaacatcacaaaattttcggaaagcactactataatcaaatatttaaaaaagggttcgtatttctgtagaaaaatggtctgcaatatgatctattttttgtttttttttcgggttttcactaatccaaaatgctttagaaaatagttggttcctctcaataaatatttgatcttttaaacattggatagatgaaagtatatatatgaaaaaatgaaaataagttagatatatatgagctataacgagctttttgttttgttttgacatcagctctgacgtaatgaatctcaaacttttactcgatgaaatttatatagttccttcgtattagtccacacaagactctttcctag

SEQ ID NO: 73485 - DNA, 462 bp, Arabidopsis thaliana landsberg
  unsure (1)..(462): unsure at all n locations
cactccttgtggagatgtgtaacaggagcactagcaacaaatacacgactgcgttcaagaaacattgatgcggacccaatatgtcaacggtgctgtattgaagaagaaacgatccatcacataatgtttaactgtccatatacccagtcggtatggcgcagtgcaaacattattattggcaaccaatggggaccaccaagctcctttgaagacaatctaaatcgtttgatccagctgagcaaaacacaaacaacaaactctcttgaccggtttcttcccttttggattatggggcgactttggaaatcgaaaacgtgttcttatttcaacagaagtgtcaatcgccggactatgaagcaaggaaaggaattcaagatgcaacagaatggctcaatgccaatgagacaacggaaaacanaaatgtgcatgtggcgacaaatcctatacaaacctcaagacgag

SEQ ID NO: 73486 - DNA, 138 bp, Arabidopsis thaliana landsberg
cgcaaagcggagccgacacggacaattttagagggatttaaccagctaaccccgcaaccccccaagcaaggacacagaaaccctcacacgggcgtcctgaccaaggcattagacagaagaactgaaaagcctcgacat

SEQ ID NO: 73487 - DNA, 361 bp, Arabidopsis thaliana landsberg
  unsure (1)..(361): unsure at all n locations
acaagccggaacagcatncgggatttttttaaacattgccccacctttatgctctgtaccccaagtatttattcttgaccgagagggagaggtggggtcattacctgcctgctgggaattgaacgtaacacgcagcctctcttttgggtgccaaggtgcacacccttgggagtgtgtcctgtgtgaaaatctaatctgccatgtctgttatctgattggagaaggttatagaagtgctgaaccaacacaaaccccattgtttacacttgagaacacggtggtccatagagtagcaaaactttgtctggatcttcaaaaggaagatagtcggagctaatatccaggtgttctgtcccccatc

SEQ ID NO: 73488 - DNA, 534 bp, Arabidopsis thaliana landsberg
acatatttaattattgtacctgtcaaaaatttataatatatttctaagactcaatttccacaattctagtattgtataacctttagcttttattctttgaactcaaatagttatttttttttttttcagtttaagctattacgcaaactttaaaaagaaagaaaaaaactagcacatgcgtgacaaagacataatgagcacttcagcacggctgaggaagagaatcaagtgcatgtattcgatggaccaatgattagagtcagaaccggttctcaaattttaggggctgcgagcacggaaaagctttttattttttggtgaaaaggaaaagccttgattagcaagctattgtgttattggtttatcaaaaaaaaaaatcatttgcatgggttggactgatattttctaatacgtgcgggtccaccagaccctatatgtgaagtagtaacctcattattacttttaactttttttttgaaaactatctttagatacactgaagaaaattatccaacgttttaattattattactt

SEQ ID NO: 73489 - DNA, 5729 bp, Arabidopsis thaliana landsberg
tataataatgaaaccagaagaagccaagtcaactgacaaggtaaaaacagcacatcttgaaagccagctctgaatgcaccaatgtggaacctacaaacattagatgcacaaagccttgcaactacttatgtttctatttcaaacattagttaaacacaggttgacgaagtgatgattgtaaatttaaacaacttttttttttgtcaaacaaacaacttttttttattacctatattcaaggaaacaattatcattgtacagcaataacaaacgatagacatatagaaccaattgtatttatatcaacgatccaacattctcgtccagattgacaagagaatcaaccctcggggaacagcataccattaagcttagcatattcatgacaaaagaataaagatagaatataaattcaaaacatatgttcagacttatgtctattgaattaatgactgtatatttaagaaaatgaacgttcagattgacaatattcaagttagaaaaaagtttaccctcttcaaaagtttccgaccaaaagaagggatacaagtaaaaaatctcattcagattggcaaaattcaagccttacgtatggttaagcttagcatcttctagttttgaatatacaatgcctccaagataataagaaaatatagtcttggcagtaaaggagagtgtcaacaaataactcatgaaacctagggaagctgcaatattacctgtatattgcagtctgaaccagactccagaagtaggctaacacaggagtttgcgcctctggccaaagccatatgaagaggaattgtattgtgaacattgcggatgttcgcattcacaccagcatctagaatgacctatcaaattataatgaatgatatgagtgaaatgtatgcaactctatcaactctcaagatacttggcacactattccctcaataactaccagtataattttcaattcacaccatataatatctaattctttgatagggaaggcattgaacccttggatttaagatgtatggtgctacacaacagcatatctatcaacacggacaaaacataatagtatccttctcgtttaaacatcaatggtaatacattcttggtaggaaagcatcttactctcacaagttccacattgttagccatagcagcagtatgcaacgctgttcgcccgtgctgagcatcttgcgcagtcggatctgccccagctgcaagcaatatctgaaccagctctctaccttctgcagcagtatacatgttaagtaaactgattcatatggtaagacgaataatgacataacatccaataaattcaactttgatacaatactcttgtaagaaatagcaggaaaaagttcaaataacatccttttttggtaatgtgcaaaactacaagtaactgatcttttagatgtactacataaaataccattggaaatgtgcttgaaaaaattcttatcttatagagatgaccataatcatcgtgtcatcaaataaagataaaacttcgtaaagatcctcataaaatatatcagatatagtcatacttctaccaagcaattcaccaaacgaaagatactacgatttcatcattacccttttcatgatctttccttatagaagcagccatacacagagcagtgccaactgggcttgggatattaattgcctgagaaatttcttctggactggaaacttcaacccatctctcgataacagcaacattccatgttgctacacacatatgtaacggtctgaaacaaacataaaagtataaagatctgtagcataaaacatcagaaacataggtttacaaactttcctaagaaagaaaagaaccaaggtacacattaaatggttcagctacctcattgtgacttatccaaacaggttaatgtagtagacatttttaagcacatacaatgctcaaaataagttataatgtagatgcaaataggagtataagaactacaaaataaaaccaaacagaaattgctttaaaatggcccagtagtaatctatccgtgccaaattttatggtcccgtctacctagcatagaaagaggtcatttctgtacttacgtcaggcacttcgcatttgaaacagtcattgatctagatcccccattttccaatataacaatggcacaatctgtgtatttcttggcaacagctcgatgaagcacagtttcaccttcatcatccactgcatttggatcggctccagctaccagcaattcctattgatagtaccaattagcagagaatagttattaacatgataatagatataagacaagcataatatctgatacacttcacataagtggaagatttgcgatcatgttgtggaagctttaaagtgactgatagcttcctcgggagcagagacttacacgcatacaatcaggttggccatggtacgaacacacgtgagctacagatgggccagatccttcccgcagtctggacctcacattagccccctttttaatgagaacgtgaacacattgtggagatccagctgctaaagcaaagacaagaggaggatccccatctttgtccacgatatctacattagcctccccatactccagtatagcctcgacaagttcagcactgccacgtctgcaagctaagtgaagagccgattgaccatcagcgttttgcgcctctaatagagatcgcacagagcttccaccgcctccagctgcagcctttgcaagtatatttctactccaaaacaaaaatcaaaccaatgtagttgagaacaggttgtttatagctagtgcgaacaaaaggattaactagaattcctaacagatactaaccttacaccctcaaagtctccctccaaaacaacccgatgtaggttgttagggttatcctgaaagacccctatgttagtcgcgcgaggtgcttgtacaatgtttacttcacatattttggcaatcccactacatcatacatggtttatattattgttaggcgaaggaatatagccatgatgacaaaaataatcttaggtgttggtgctaatattaatcttaacacaagtgaaagggtcttctttactgacaagtaacgaaaacagggactccataaaacaaagtaatcttagggacttaaaactcttacttatcagggcttgctgaagggctacgtggtatctcttgtagatgacgaagaaatgtagcaagcattgcattaaaggttggtcttttcgacggtttaaactgaagcattcaccaatcattttccataattcccgaggaattcccacacccactatgcgttcatactgtggtggtacttttcgggctttcacaacagcttgaaaaatttcttctctactaagaccatcccacctgtaaaattaagtgacagttagtacaatggcagacacaaaacacaactgaaatatcaactaggaagaggcttcacatacggagtggatccagtgcacatctctactaacgtacagccaaaactccatgcatctgattctggagatacaccacttgcatcctcccaaaaaagttttttcaccggtccccaagcctctggggcagtgtagtgtggactgagtgttacacagtccgtgtatagagtgacttttgaggaatcaaactctggtcgagttttctggcatgttggcttctttaggatgggagcgagcccataatcagaaaccacagcattgccgcttgcatccaaaagaagattggaaggttttatattcatacagataacacctgctgcatggagttctgcaacccctcgagcaacatcagccccatatctacagttggtaaaatttaatatcacaacaagagcaatggaataatacatatgttggtcactgaaggaatattctaagttgtaaacttaaaacaacatgagcacgatatgaaaggagaatacaaaacactcatttacgcattagtgcttacatttaatagtcccaaatgacgcaattcagttaaaaacagaaaataggaggaaatacaaacaagtgaattgaaggtaatattagaaccaggacaacaaaataaggatcatctttagatgatgcgtcctttgataaattaatgtataacaattcgtacaattttttgcatgatttgatatgtcagttcgttgaaaaatgatttctggtcatatactttagaaggaagcatactaatgtaaagggctttctcaaagatatcttgcaaacgtaggttcaaggatccactactaaaaaggaaaggactagtccaaaaaatgtttgtctattgaggcattgacagatgaaaagtagctgcagctggtaatgacaaagagagatgacaactactataattcgtgcctagctttttaagaacatctaaactaaagttatcttacaagttgcccttttggcaaatgacaccaggttttagttgcttgtttcactaaaatctgaaaaactgtgcacttccaatatatatttctaatagcaatcacaaaaaaccaagtcgggtctagtccagtaatttctaattagggaacaggctatcaaagtttgagactttaagcacagaaacgatcacagtaaaagccagatactaggcaaaaaaaaagaataagagaagcaaaagaggaaccttagaatctgctccaaagtaagtctgccttcattgcgttgcatctcagactgaacagacccaaagcacctgtccatcaaaagacaaagagatccatccatcttcacaaccccatggaaagtacaaacattcctacaccacatggatgctctccgcaagctctcaagctgtccctgcatccactcaacatccatgtcctccgtcaaagtcatctttttcaccgccacacggtgcttacaccgtccaccaccgcctgcaacagttgcatcccacatctccacacctccaaaaccaccactactactctcttccccaatctgcctcaccagcttcatctccgggtgagctccgacctcgatcactggaccacacaagctattaatcgagcttgaggcatgaaatccacgagcggcacgagctccatcttcatcactaccatcttcttcatcgtcgtcatcctcatcatccgtgtaatcgcaatcgaagttagcgccgccggatgcggcgtgaatgagagcaagcatagcgtagttcttcctgagaccctgaacagagttcccaacaacagacacgtggcgacaccggggacaagtgagggttgtgtcggaagaagtagagaacatcttggaaagacaatctttgcagaagccatggccgcattgaagcaataaaggaactctctcatcttcattataccgcgtgtggcacacggaacaacaagggaccttgactctcccaaccatgagagctccgaaaagagaaagccctaaattaatttaggtcgcgagatcaaagagtaagaagggagtgaaagaccaatcaattcagtagagagagttcctcagaacatatctgggggggggggggggggggggaaggaaactcagtaaagtcgatccagatcaaggagagaagaacagatccatggagaagaaagaaaaaggtggaatttttgaaaggtagatcaaaattggctgggaaaaatcagacacgagcaagcaagaataaaaattgtaagaaaaatgtgaaaaaggttcttattcaaggttttatatcatcatttttatttttattttcatttttctccaattttat

SEQ ID NO: 73490 - DNA, 507 bp, Arabidopsis thaliana landsberg
caccctgacactcgggcacatttcccaatcgcctgggtgcggtgtgttacgcaacctgtgggacccatggtgctgtgtactgcgcagcatgagtgccgctggtgcaggcaccgtgcaggagcccgtcgtgatgttgcaatgatggtgtcgccttactggcaacgattgacatacatggtagctgccaacaaccctgcgaagcgcagtttggtcggatctatctgcccccaattgcagtaacctcccttgctttcatacgccgcactgcgatattaggatgtatgtgagtacctgcgcccgtcccagcgccaccaccggcagcagcaccctccctgccgctgtcacggtgtcgtgtatcttttgcaggaaccgccgctcccgatcctcacgagggggatgacgtgacacgccgtatgtgctctccacgatgacttgcatgggcggcaatagcaagtctgagagaataacatatcaacttatccgtaagcaagtacggaatgcgacaca

SEQ ID NO: 73491 - DNA, 378 bp, Arabidopsis thaliana landsberg
tgagagaatgtacatatttgtattgatgaacaagttatctttagagccaataaaacagtgagagaaccttaaaatattctgatggccaagacactacctagaagacggcgacatcatctatgtggcttatacctgagcatttgcacttatggtaagtcaactacttacaccagatcacattgatctccttttaaagaattgatcaactacttagattaaatcacattagtttagaagaataatgaaactataattgaggaggggtataatatacatttcttatcatctgcattagctttagacgatccgatccatgtgagtttttgactttacttctctgttcaagacattttgaaacaatggagaggataattgtac

SEQ ID NO: 73492 - DNA, 264 bp, Arabidopsis thaliana landsberg
aaaaaaaaacactaccgccaccaacacccaaatccaaaagaacataccgaatcaaaacaaccaaatcaaaaaccaactcaatgaacatcgcgagaaccataccaacctcaagaaaccaaacgctaagacccaaaaccaaagacaaccctatcaaaaataggaggaaccgacaaccgaatccaactctgcccaatatgctcatcccaaacaaataaaaagggcgaaagaaaaaccctacaacaatccaaatacaacaaaaatagc

SEQ ID NO: 73493 - DNA, 332 bp, Arabidopsis thaliana landsberg
attttgagttaatttctactgtgtgaattttctagctcttttcaaagctatatttatatgactcttcgtcagaaaaagtttcaatctaatacctttttgtttttttaccataaatagttcctccatatttttcctgacaatcttatttttgggtaatgaatctttataatttgtagtgcgaattcattgaaattcattacatatagtcaaagatctttacatagaaaaatatatcatctttacatagaaaaatatttattttctcaatatatatcttgtagttttatggtaatcatttaattctattgttggatattttaaattttggaaat

SEQ ID NO: 73494 - DNA, 575 bp, Arabidopsis thaliana landsberg
  unsure (1)..(575): unsure at all n locations
ggaaccacgtgtttggcctgctcgacccttatattgtttgggaaatgatttaccggttcacatccatgggtacacttggctgaaccgtaccttcttccgctgaattcatcaacatggtactcttttttgtcggcctggccattggggccgccatggtctcccgcattgccaaaaatttccaggattactatgtgaatgtgatcacccaaagggttggtaccgacatttataccgagggtatcaaacataccctgggcatgccttaccaacttttcgaagannnnnnnnnnnnnnnnnnnnnnggccgtttgcaaaaagtaaaaaccgacaccgaacgcctcatttccgcttttgtcaatatcatgttcacctctgttgtgggccttattttcgtaatggtaattgcctttacggtgaactggaaaattgccctgttttacctggcggccattcccattatcgggatcctcagctcctttatgagcagaaaaatcaaagtggtgcaaaaaagaatcgtgggagaaacaaccgcgctggctggttccactaccgaaagcttgcgcaatatcgaattg

SEQ ID NO: 73495 - DNA, 510 bp, Arabidopsis thaliana landsberg
aattcagtttgattaggacgtaccagatacaccacattataacttttaccaacgataattctacttttggtgaaggcggagtacagtttgttttaaacccttacgatgagattgcgctttccagagcaattgaattgaccgaaaacggcaacggaacggtaacggtaattaatgttggcgaagccggtacagaacctaccattagaaaagcattggccattggcgcaacggatgcggttagaattaacgcaagccctaaagacgcttactttgtagccaaacaaattgcaaattatgcaaaagatcaatcgtatgatttaattttaaccggacgagaatctattgattacaacggtgcaaaagtagcggctatgctaggcgagttgttggatattccttccgtttctatcattaaaaaattagatgtaaatggtgcttctgcaacggtggaaagagaaattgaaggtggaaaagaaattataagcattccttttccttttgtgacgggta

SEQ ID NO: 73496 - DNA, 427 bp, Arabidopsis thaliana landsberg
caactaccacagcccgcgggccagggtggcgtatgtctggccggacgtacacgccgtcgaagttgctggcccagcggacccgggtggcgaactgcttctaggtcaggtgcgggggcgggccgaacggctggagctgccggagggcgcgccggtttccgcgctgtcgagccgagcacagcgcgaagacgtacgcacaggtcccggcggaggcgccattcacgaacatgcccactgtgaccagtgccgtgactaggtgcggacgccgcgctggagcatgcgccccgagtgtcgcccagaaggagaaccctgcgaccgagaccttctggtcgaaccgggcggtcagacgatcaagcatggacacggtgtcggcgaccagacgatacaggctgatgccgggccagtcctggcactggcgcagctagcggac

SEQ ID NO: 73497 - DNA, 753 bp, Arabidopsis thaliana landsberg
gatcatcgccgtttgcgttagcttgtttgcttttttcatcgccattctcttcaaaaaggatttgtcttgtgtgtggtttgagttctcacaatgaagggtgagtgtgaattagagtgagggaggaggtttcatagacttatggttgggggtatttattgaggactagagcgagtggaaaatctttttatttattttaaaatgaatatacggattacagaattatgaaaaatgtacatatacgagtttatacaccaccacaacatgtgtatacagagagagagggggatggtaatatcgaggcgttgaggagattatgatgtgtttgttgtcttgaatatgaatttgcgtgtttgctacgggtagccatttgttgtgcatttagatgataaaaaatatttaatttgttgcagaattgatagaatgtagaaactcgaaagcgaccgcttgggtcatctggtttggctcgaagagagaatctgatgaattaaattttcttataaaaacggaaaaagaaaatggcggtgtgagtttggattgtaatatagatattaaccgtttcgaaaaatgtgaaaggtattttcaaagcatgtgaagatgcggggtcctagtttgagacgagtatgtgtggaatttgatagacggacggtttgatgcatattgatcttactttcactttttgtggtgcggaatatattcgaatatctatctaattactgcatttttttgggtcatgcatgctcaccggttatgtta

SEQ ID NO: 73498 - DNA, 758 bp, Arabidopsis thaliana landsberg
gttcgcaatcgtggttcaccacctgtcctatcaaacatatgtgcaggataagaaaaacatattaatattaaactaaaaagatgattgaataaatctttcgtaatcatggatgatggattggtgacctagattgagctccatttaattatggtaatgcacacatatgtctataattttaattactcaaagcattattatctcgcgatgtttttatttttggggtgcctttatatacattgcatatgtccaaatgaagttgaaatgacatttatgctcttaattagtagggtcggagctgtggaaataataagaagtggaggcgtttgggaagcttccaagaaaccacaaatagcttcttatcttgtttttttttttccttatttgagggtcggagaaccgtgagaaaacatttcaacattccttctatcatgttggttgtgacgatgaaaatcttgctttcatgtagacaacttatacgatgaaaaatctgaaacaaatagatttgtagattttgtttgattataggaatagtactataaatggtttagacatttttttaatgatttttctttaattcttaatacttgtttaaaaacaaaattcttaataccaatgacaggaatattctctctttttaatatataaggtgtaaaaggaatctgacaaaaaaaaatgtaaaatgactaaccctaactaaagtcccttacttccgatgtaaaattcaatttcagattcaatctttcctttcgaaaattttg

SEQ ID NO: 73499 - DNA, 512 bp, Arabidopsis thaliana landsberg
  unsure (1)..(512): unsure at all n locations
ctaaccttactagatacggcgacatgttagactcgcttacttacacagtaaagagcggtaagttatatgtaggcgttgcaggtcagaacaatgtaaaaaaggcaatctatacctcagtagacagaccttgggtaaatcttacgcgagctgacgcgacggcgattcaaaaactcgttaaagatatgcttgagaaagaactataaacaaatttggggctttgtgagtccctcggagagtgattatgtcagttaacgttagtgacgttaaagacagcggcgatgaaggtactagtggtaccgaagagaacgaagttgttagtagggcggcacatgaacggctattgaatcagcgtaaagctgaccgcgatagagcacgtaaagctgaacaagagcgtgatgaactntcccagaagtttgaagaacaagaggctcaacgtttagcttgacaaaacagttcaacaactttacgatcagaaaaaagagcgagaagaattgaaagcagctaagtgaaat

SEQ ID NO: 73500 - DNA, 372 bp, Arabidopsis thaliana landsberg
gaaaccacgaagaactctttcccaacgagtctgctctttaagaagaacagtttgttctttagggcttaaattgagacaaagagaagctagagttgtttcaatatcagtggaagagtcaagagaacgcaaaatggaagggattacgccgccatatttgcgttttcgagagcttgggttaggtttagagcatcgaggtggagaaactgaagaagaggaagaagcggcgcagtgaagttgaagcttaaaagaaaccctagaggagaagttacagggaagtgaaagcggaaaaaccctaactttagaactcagagctagatgattatgacgatgatgaggatgtatctgtctttagctgcttctcttttcttcttt

SEQ ID NO: 73501 - DNA, 572 bp, Arabidopsis thaliana landsberg
caccacgcatgaacgcatatgcctgaatatctttgaacgcctcgtatctgaaggcatcgaattcgccttcccggccgggaccatttacctggataaggcaggtgccaataacgctaaggaaggttttatttaaccagctgcagcgtcatcagcaccggcttatgatcagaagcgtctgctttgatcacttttacgtcttttactttccagacatttccctggctgaggaaaatataatcgaggcggtatttggggccggtgaacgggaatgtgagttcgggggaaccaaatacctgggcagcatcggccagcctggatacgatctcctgagaaggtttggatccggcaacgatattgaaatctccgccaatcactaccggcatttttttatccgccagtatcctggacacatctgcggcctgggctatcctgttctcttcaaatacatggcagaaatgtgtgccggcaaagaccataatcctgccgttggcaaatgtgtgctctatcgcaatcatggcgcggggttctcctccttttggcgtgggcaaatgatatacaaccggcacagcggg

SEQ ID NO: 73502 - DNA, 515 bp, Arabidopsis thaliana landsberg
  unsure (1)..(515): unsure at all n locations
agccagaagccgatcgtgcggcgagatttcggccgatttcagttcccgcacactggccatcagccaggggccatcttcctgccgggcatgcgtcgcggtgtagcgcgtcgatgccgtcgggccttcgccctccgactggaacgtcgtcacgccatcctcaacgacgatgccctccgcaacggggcgaatggagatgatttcgatgctgagcgttcctggcggttcgacctcgagggacgcggcaaattccgcttcgatcgcctcgcgaccgtgaaacacaagaccggtcgcgtcgacgtactccgcctnnnnnnnnnnnnnnnnnnnnnnnnnnnnnnnnnnnnnnnnnnnnnnnnnnnnnnnnnnnnttcagccgattccacaagcgattctggagtgccgcaggatcgacatcggcggccatcagcatacctgacgcccagcaacaacaccccacgggcaacagntcnacgcgtcgcaacatgggcagacctcagaacgagattcatgagatg

SEQ ID NO: 73503 - DNA, 306 bp, Arabidopsis thaliana landsberg
gggaagaaaaaaaggaaaagagagaaaagagggaaaggaggggagcaaaaaaggatagggaaaaggaataagaaaaagacgtaaaaagaacagaagatgatagcgaagaaatgagaaacgaaatctacagagggaagatagcggagggggggagaaggaaagaaaagcagctgaagcaagaaaagaaaaaaaaagtggggagaggagagaagatgagaaaaaaagagggagggaaaaggaagggagagaaacggaaggaaaaaaggggagggaggaaagaagaaccaggaaaaccaggaaagggga

SEQ ID NO: 73504 - DNA, 569 bp, Arabidopsis thaliana landsberg
gacttatacattcaatttccgaccaattcaaaacgaaattcatcaatactttaatttcttcctttttaaatctctaattggtgaaatttttgtttctagaaatcaactaatccgtcaaagatggtttattcccttaatgatgaaggaaaatgggttctcttgttgctaataaaataatggtatttattttgtttcttagaaagaaaaaaaagactaatttaatttggttggtcacacacaaccgttttcatcggaagaagaacaagttggattgattttgctttggatctcacatctgagatcagattaatctctctgtgaagtcgaagaacgaaaccctagttcccatggatctctcttcacgcttctcatcgatccttatgcttctcttgatctccatctccatagcttcggctgagattcgtaaatcagagatccgatccgatgatcgaccaatcatccctttagacgaattcggtttcactcacagcggtcgtcttgagcttgacgcttccaagatctggcttttcaacagcaatcccgatctcgatctctgcaaagtgggcttc

SEQ ID NO: 73505 - DNA, 591 bp, Arabidopsis thaliana landsberg
  unsure (1)..(591): unsure at all n locations
gaggaaggagcttttaggacagagaatcttggttgttgttttgtttgtttttcaattaaatgaaatgaaagaaaagaaaaaagagtcggtaataattttgtcgcttagttcacaagttctccagataataaaaaatgatggatccacgtgacaaagcaaatatagtaataagtattttgatttgttttaagattataaaattagatattaatttgcggtatactacggacatatatttttattaaaagattaaatttttattttaaagataagatttaaatatatattattatttatttaatttaaatgtatgatatattgtgaaacgatattttttaactaaaaatttgaaatttaaaattatattcaatttgtaatatatattatatttaaaatgcaaagcaaatatttttttaatatttataatatttttttttttataaaagaatcgagatgcgtttgtaaaataaataaattttaaatcgtatttgctgtgttaactttatttgttntgtttagtttttaaaatatataattatattatttcattcgaatatatccgcttggatagtatcgactaactcatcattt

SEQ ID NO: 73506 - DNA, 609 bp, Arabidopsis thaliana landsberg
  unsure (1)..(609): unsure at all n locations
tggtaaaacccgactacggcangttcaaatcgaaacatttttgtgaaaatcattcatgttataccaagcttctacagtttaattccgtttcgtataatttaatttcaacaaatttattgatatccatctagaaattggtccaaagttctttcacccttgagtcatttagtgataaagatgacatgatttttggtgataaattttccatcgttgctatatgtcgttatattattctcctatatgtatattatactatttacatcagaaaataatccaaagtttagagattcttttttacaataataaaatttccnnnnnnnnnnnnnnnnnnnnnnnnnnnnnnnnnnnnncctaaacctttattcccaaagttcattgagttagagcattttcagcgaatcacataagagatgctctcttcttcatcactaattgacatctcattgttttaaaggttgcacttgtacctgttgatctgattctcaatccacttaagttaaaccaaatagacacgagaaaaaagcacatttatttgttgctaagtatgcatatttttcagcgtttacttcttaattaatgtatatcataagataatatctaaaagagaat

SEQ ID NO: 73507 - DNA, 570 bp, Arabidopsis thaliana landsberg
attgatacccattaagtgtgttttggtcaatagctagtttttttggggtttttaaagattatatatccatgaccatgagttctgtagttcaactctcactcacgagaaagacaaatgaaagaacatactgtactagtttttgtctaaaagtactctttgattaacctttagaaaattgatgttatcattaaacaaaaaaaatagtttcactatctcttcctataaccttttttacgggctcattgaataattacatatcttttagtacattttgtaccaagacgatataacattaccaatcatcttgaattagccagaaacaacaaactaaaactgtttaagtttcagaaactaatccatatataatgttgagattagttagtattcataacctatggagtattaatcttcaaaattttcctcatgaaatctgtatttagtcatcactcttttaacacagatgaatcactagtccaatatttctccaaaaaaagacacaagagtctcgaaattgtaatccatatctgtaattttgcacccctataatatgcctagaggaaaatagaagaa

SEQ ID NO: 73508 - DNA, 409 bp, Arabidopsis thaliana landsberg
  unsure (1)..(409): unsure at all n locations
tcaacccccaccgacgtgccacaacacacccgataacccccgaccaagcaacaaaacacatgccgtaagactcaacagaggcgcaccgacgaaatacaattacccacacgaaggcaaaacgctccgacaaaagccaagacacaagccgacgaggacccacccaacaacaggcaagaggagacgacacaaaaggaacacggagcctacaaaggagcaaacagagacgaaacactgcaggccaaaaaaagaaacaagacttcaaaaaaagacgaccaaaacaacaagtcacaggggaatggaaacaaatttcaaaatccaaacaaaaaatccactaaccagncaaacccagttccataacaagaattagctaacaaggaaagagaaagactctcgggagaataaacctgaa

SEQ ID NO: 73509 - DNA, 570 bp, Arabidopsis thaliana landsberg
  unsure (1)..(570): unsure at all n locations
aagcaaaagaagcatatacacttgaattaatggcgaaacttcacaattgtggaaagggtgggtgataataaagcggaatcatgtgccacttatttaatttaaaatagatatttagacattcatcacaaaaaccacactatgaggggtttgattttatttgaagtcaatttactaaataatatttgcatattatttcaatcaaatgagttttgctcctcttttatttatttcacttgccaattgtttcccactaattttctttctgttcccaattcgtagggtttactgattgattaccctgtctaaacacttctttcgttctgttaaaacacaatctatatacttaagtaatttgtagtatactagtatacatcaaccttgatatggtcatgacatgtgaactttttagtggatgtagatgatgcatggcgtggatgacgtgtgatacatgtaccgatttgnggattaagggtcaatgcanaaaaagtcaacttggaaaagcacattaccaaaagaaacaaggtccatgttcaacttcgtaccctcttgttttttctcacacattctcaa

SEQ ID NO: 73510 - DNA, 607 bp, Arabidopsis thaliana landsberg
atctcttggatcgtccaaagagcttcctcaactctatttgccttacaccaaccatgaatgaagatattaaacgtatgagcatttggtgtaatatgtgacttcagctgtagcaaaactactcgggcctgctccactcttttctccttgcaaagcgtatcgagcagtaagttcatcgactccgtgttcttctccaatccaaattcacccaacctatcaaatattcccacagcttcttcccactcccctgcaccagcaaatctcctgatgatcttagcaactgtattcaaagtaacaagtttatctcctctcattctctccacaaactccttcatccgatcccatttcttcgccttgccgagaatatccacagccatatcataagcatcactcgaatgtttatgccctttacaagactcagcccatttcaaaataccaagcgcagatctccagtcatctctaaacctatgaagcagcttatgaaccaaaccatcagaaagattgactcttttacagatttcatcgctagatagacgtttaaaaacatcatcttcactatctctatcaccgtctctacctacaataacattccatatctcctcagactgtg

SEQ ID NO: 73511 - DNA, 479 bp, Arabidopsis thaliana landsberg
cacagtaaacaaattattgttatttcttttttttttaaacttattattcaaatctgacccaagcatgaacaagattttctgattcagctttttcacatctcatcctgcaacacaaaaaataaaaaaattgccttttacaataagtcattttaaattattttgaagtaccaataatacgatgtgtctttaatttaaatctaaaaatatacgtacaaaaaaagtctacacgagctaagttctttaatgatgtaaaaaagcattcaaaagggttttgagaagagacaagaagacacagaacaagtagccactctatcatctcaccacccctctttctctctacttgctctctatctctctctgcgtctctccactttctcttcttcttcttcttcttgctctagagatctctctatctccatgctattctctatgtgtttctagaaagacatcagtgacattttgtcttgacgcatctatgg

SEQ ID NO: 73512 - DNA, 519 bp, Arabidopsis thaliana landsberg
gacactaagaacacgacgcgaggatgaagatgagagacgacgccggcagaagatatagccatggcttttatcatcaaaactgtttgctgttttcagcagcagtgagaaaaataatcggatttttatatgaatctttgtaaacgacgtcgtttatcccttaaagatctaaacactgactccgttttgtgtttacagtgtagcaaagcgtgtcgtttataaagtatttattttgttcttcgtcgttatcgtctggtaacaacgggtccactctgcatctctctctctctctagatttgatttctttgcgggcttgttaatggcgaacccagggcaatcaaagggatggataaagaaatggacgtctatggcttcatcggtttacttcgtcttgatcttattccagatccctctcttcaagtaaattcatactaaaacaaactctcagctgcgtaattcgaaccctatatttcgttatctagtgatgcgtctatgaatccgatatgtggacgacgcttagtc

SEQ ID NO: 73513 - DNA, 391 bp, Arabidopsis thaliana landsberg
  unsure (1)..(391): unsure at all n locations
cttctggggatgcggtctactaacccgttttatgcttccgtcgcctgacgagtctggctgcatacaagcgtgggtttctattcatggaagacaatgtttaataagataatcggttctcacgactctcagacgaactgtttcacacatgctaacagctccgacaagactcgggcgtgggaaagtcgatattaaaagcgcacgatctgaaatnnnnnnnnnnnnnnnnnataattgatgatagctgtgccgctagcttgcactctgagcgatgctatgaggtatacggggtgcaccttggaccggcttcggaatgtaccaaagcattgcagtcttgctttgatcgacatctggcgacgatccaccattaaggaacctttgtttcgctgtgctt

SEQ ID NO: 73514 - DNA, 552 bp, Arabidopsis thaliana landsberg
catcgccgagcgagaaacgattgtttgggctatacctgtcaaagttattgacaaatgaagagcttagggtgacacgtgtattccggttcagcggaaaaccgatcttcaggcctgctttcctgtctgcctgttcgatataggtcgggcgcgggttttcaatgaaaattgaactggtattgtagtagtcgaaatgattgtaggtggcttcgacagccaggaacaggggcagccgggagggaaagtcgacccggccgttgagctgtaccgattcatagaaccggccggaatacaggtttgcaccaaaggtataggatttccggtcgaggtaatgatattgcaggcccagaaatacattgctgatgggccggctggctatattgccgccgaagtctattttaaagcttttctgcggacgcgctgcaatttcaaaattatagctgtctgaggccggattgtaaacgattttagggtataccgcctcaaaggtttcatcggccaccagtttgtaataaccttgtttgatatcgctgaggtcaaagacggctttgtcgg

SEQ ID NO: 73515 - DNA, 140 bp, Arabidopsis thaliana landsberg
caaggttcatatgtatgtatgaatacagtatatatcctaccacctggaactatagtaacaaccgacggtcgcgtgctagcctctgaccacgacttaattcctcgagcctagactgtgcgatataaagaagcctttcttaa

SEQ ID NO: 73516 - DNA, 495 bp, Arabidopsis thaliana landsberg
  unsure (1)..(495): unsure at all n locations
caagcgtagctcataagctccaaatcatatgatattggtctttcctttcttattgntcctagcanagtttagaataagaaaaacatatatagtacttttaattgtttgtgcaatccattctttcccaatagtgcaattttcagtgtggaatttatatcccatatataaaattcatattcacgaaattcgttttatcttttttcttgaattgcggtgttacgtaaccatccttcgcatcataataaattattaatatttataacgattttaaggaagaaaaaaaagcttttaaaatcggagaattaatttcggttagttcagatttatgagtgaaagagcaaaattgcaaaaaaaaaaagtcactgaagatttattagactctcttcttcttcttcctccttggcgcaatttcgcaatttcgcaatcgcatcagtcaattatcgaatcgtcctcccagagataccggagaaaatgaggattgatagaacaagtgtc

SEQ ID NO: 73517 - DNA, 536 bp, Arabidopsis thaliana landsberg
acacaaaacccaaaccaaaaaaagaacaaaaaaccagggtaacaaacattcgacaaaaaattatcgaacatgcaaacccatagcagaagacagaactagaatagatatctgatgtaaactacacacccgaacccaaaaccatgcaacctaaacacaacaaaaggctaacccgcctaccaaaacaaataaaaaaaagccggcatagaccaaaagcccagaatgatccaattaaaactgaaaaaacaaaaccacgactttaccagagaagaaagaacacaaaacgctcaaattccgataactataaaagggcccagacagacaaataagccaaagtaaaaaaaggaaacacaaaattctcacaaattcacaaacggacataaaaagtaacccaccgaaacaaaatgggtcggaagaaagtaatagtgaatgaagagacgccatctgaaaattcattaacagagaaaacgagctattatcggtccacaaaaactagaaagaaaataaagcaaacactagcaagacaaaagataagccga

SEQ ID NO: 73518 - DNA, 321 bp, Arabidopsis thaliana landsberg
tatagttgatacatgtggacatacaatatatttaattcgtgatcctgtgtatttagtgatgaaacaaagttacacaggccaaagctctcaataaaaatttataaaagaaagtataagtagtcatttcactccttggagaaaatacaaagccaaaataactaaaatgaaacaaatttaagtcgtcagaaagaaggaccactcgatctctatgtatcttttctcgccatttctcgaccgaacaagtccataagcgtcaagctcaagcacacacatatcatcttaaaacctggacaagactcatggtacataccagaaagacac

SEQ ID NO: 73519 - DNA, 237 bp, Arabidopsis thaliana landsberg
agaatctaacacagataaagagtatccattatctattttccagacactacatcataacaaagggtaatgccctacatgaatacaacccccttctgactggcgatctaaaccatagcctaaccaccctaacacctgagcatatgacgtgtataactaattgacaatggccatacctaccacgatagccatatcttaaagcaccacgttcacagcctcttgccgatgctacaaatatat

SEQ ID NO: 73520 - DNA, 520 bp, Arabidopsis thaliana landsberg
aattttgagattttattgattctatttcgaagttgtttttttttttccttaccctaatttttctttctgggtgtgaaatttggtgtaatttactgcaaattttgacctattttgaaggctatgaaaccctagatttcaatttggattcgttaagtttatatctctcgacattgtttcacgtttttgatatatatagagtctaatgttttgcgatattagttctcattttcacgtttttgttgccaatacctatatgtatatgattatggcctgcgcatttggagattgacgttgtttaaaaactgttgaactttatttggcattcacgagataaggttttgttggtcttttcaatttttgataaaaagattagtcttttgtttttttcctgattagtgaaagctttaggcttgtgaatctctctctgtctcgtttatgtaaaactttcttgtttctgagtattattttactttttcttcgcagtataggttgctgctggactctttagatggcagacttc

SEQ ID NO: 73521 - DNA, 514 bp, Arabidopsis thaliana landsberg
  unsure (1)..(514): unsure at all n locations
attgcatgatgcttcctcgcctgattattactggaggtttcttatggctcaggttttttaggtcatcacccctgacgacaagccgatctggctgtgcctgcgtcaggaggctggcgatgcgatcgccgaagaacccggcctggcctcgatgctgcactccactatcctgtcccatgacgatctggccagcgccctgtcgtacnnnnnnnnnnnnnnnnnnnnnnnngataccctgcgcggcatgaccttgcgtgaactggtaaccaaggcctatgccggcgatccgtcgctggtcgaatatgcccaggctgatttgcaggccgtctacgaacgcgacccggccgccaagggctatctgcaaacnnnnnnnnnnnnnnnnnncttcctgtccctgcaaatccatcgcgtggcccaccgcctgtggaaggacggccgccagaccatggcgcatttcctccagagccgggtgtccgaactgttccagatcgacatcnnnnnnnnnnnnnnnnnnnnn

SEQ ID NO: 73522 - DNA, 472 bp, Arabidopsis thaliana landsberg
accatctggccgagctggtggtgctccaggttgttttttttgtgttgatctcgcctcgaggagggttgggggaccgggatctcgaccagctcgagcagcttgtccagcacgcgctcctgggcctgcgtggcctggtcgtactgcttcatgctctccaggcgcttgcggctgtcggcccggacctcgtcgagggtgtcgaactccgaggcgagctgcgcgaagtcgtcgtccagcgcgggcagttcgcgggcggcgacctgggtgaccttgacggtgacctcggcctccttgcccgccgcggagccgcccttcagctcggaggtgaaggtggcctcgccaccggccttcacgcccttcacggtgtcgtcgatgccggccagcagctcaccggagccgatggtgtatgagacgccgtcggcgatgccgttcttcagcacctcggcgtcgaccttggcctccaggtcgatggtga

SEQ ID NO: 73523 - DNA, 642 bp, Arabidopsis thaliana landsberg
gaacttctttcgttctgtgcttaaataggtagctatattggttctcttctcgcttagattttagattcaaactagttatattactaaatactgagactgttagctaactattcagatgatggagtctgttgtttctcagaaaaatgtcatacaagttgcttggagctaactatcttggcacagtaggttatttgcataggtagcatgacgtatgctctcagtttcgacattgtaaactaacaaattggatcatgttgcattaccaagcacgaaataactctactgttatttttatttttttccctccgtttcctggcgtcttgtgtcattactgactaactttagttttgtttgtttctctgatgttacattgaatctctacagagagagcgaatccggcaggagcgtgaagccgcagctgcatccttaaactcaacacaaaaagctactcaagcatctgttggatgatgaactcttctctacatcttctcagtctcttaaatcagaattcctctttgtaagaaactagttaccctctgattactgaatatctgagaaggcatgttcacatttctgctctgagcttagattcattgtagcaaatcttgaaagtttctggggatttttcaaacacgtgttatt

SEQ ID NO: 73524 - DNA, 2976 bp, Arabidopsis thaliana landsberg
ttggatgttcttgaacaagctaaagcgaaaaacacgattgctttccttgagaccggtgctggaaagactcttatcgcgattcttcttattaaaagtgttcataaggatctgatgagccagaacagaaaaatgctctcggtgttcttggttcccaaagtgcctttggtttatcaggtaccgcctaataagaaacatgtttgtattcttttttaaaaaattggttacctattggttttggttggttgatttatcttacgttatcagcaagcagaagtgatccgtaatcaaacttgttttcaagttggacattattgtggtgagatgggacaggacttttgggattctcgaaggtggcaacgagagtttgagtctaagcaggttgctttttgatgcttctttttcataccagctttgatcttttatatgaatcagttcttgaagttaacgagtttttttctattttcttctacgcaggttctagttatgacagcacaaattctgttgaatatactgagacacagtatcattagaatggaaacaattgatcttcttattctcgacgagtgtcaccacgctgtcaagaaacatccatactctttagtgatgtcagagttttaccatacaactcctaaagataaaagacctgccatctttggaatgactgcttcgcctgttaatttaaagggtactgattgtttcttgtatacagttctctaagcttgccaatgttcttgaaagtgacactttttgtttgtaaacgtaggtgtttcaagccaagtagattgtgcgataaagatacgtaacctcgagaccaagttggattctacggtttgtactataaaagatcgaaaagaattagagaaacatgtgcctatgccttcagagatagtcgtcgagtatgacaaagctgctactatgtggtctcttcatgagacaataaagcaaatgattgcagctgttgaagaagcggcacaagcaagttcaaggaaaagcaagtggcaatttatgggggctagggatgctggagcaaaggatgaattgagacaggtttatggcgtctctgaaagaacggagagcgatggtgctgccaatttgattcataaacttagagctatcaattatactcttgctgaattgggtcaatggtgtgcttacaaggtaaaaaaacaacttagtaaatagttttcgataatttgaaatggatatgttattttcatatgatataatttttgtgtcttctttcaaggtgggacaatcattcttgtctgctttgcaaagtgatgagagggtgaatttccaagtcgacgtgaagtttcaagaatcatacctcagtgaggtggtgtcactcttgcaatgtgagcttctggaaggcgctgctgctgaaaaagtcgcggcggaagttggcaaaccagaaaatggtaatgcacatgacgagatggaggagggagagctccctgatgatcctggtaagtattaatcacattctttgtctaatcgctttttaccggttttagaaatccaatattaacagagctctatggttttagtggtctcgggaggggagcacgttgatgaagtaataggcgccgcagtggctgatgggaaagttactccaaaagtacaatcattgatcaaactactcctcaaatatcagcacacagctgattttcgagctattgttttcgttgagagggtggttgctgctttggttcttcctaaggttaggattaaagtgaaaaaaacaatttattttcttgtgtataatttttctgcctatgtctctctgagcctggaaattttcaggtttttgcggagctgccttcgcttagttttatacggtgtgccagcatgattggacacaataacagccaggagatgaaatcatctcaaatgcaggatacaatttccaaattccgagatgggcatgtatgattttttttgtctttcattaagacatattttttttttatcttatactgaaatgtcttactatttcctctttctactgtgataggtgacactgttagttgccacaagcgttgctgaggaaggacttgatattaggcaatgtaacgttgttatgcgtttcgaccttgcaaagacggtgctggcatacattcagtctcgtggccgggcaagaaagcctggatcagactacatactcatggttgagaggtacataaaaagctttaagaactacattttgatttttgtaactactggtcaccaaatcagtactgatatgtcaacttgtgttacttgcagaggaaatgtatctcacgcagcgttcctaaggaatgctaggaacagtgaggagacacttcgaaaagaagcaatagaaaggactgatcttagtcatctcaaagatacatcgagattaatctcaattgatgctgtgcctggtacagtttataaggtggaggcaactggtgccatggttagcttgaattccgcggttggtcttgtacatttctactgctctcagcttcctggtgacaggtaagtttgccgataatttttattgtcctaatgacctctccttttcctgtatgagatgatggattgcttctctctcgtgtctcaggtatgcaatccttcgtcctgagtttagcatggagaagcatgaaaagcctgggggccacacggaatattcatgtaggcttcagcttccttgcaatgcaccgtttgaaatacttgagggtcctgtttgcagttcaatgcgtcttgcacaacaggtggacataatagtttgtttgtttatcttacttgttattttctttcagtgttccatgtcttgaagtattgcgtgtttgatatgtaggctgtatgtttagctgcttgcaagaaactgcatgagatgggtgcatttaccgatatgctattaccggacaaaggaagtggtcaagacgctgagaaggctgaccaagatgatgaaggtgagcctgttcctggaactgctagacatagagagttcat

SEQ ID NO: 73525 - DNA, 368 bp, Arabidopsis thaliana landsberg
gggacggcaaaccttacaaaacaataaaaaccataagaatatcattagagtttttttgtaatgggagagttatatctcagccgacacagaccaggataaacgttggctcatatacacactggtaggaggaatgccatacagttcacgtctaccaatgtgtgagatgccaattactcatattgcatatagaaatatagattaagaacgagacagtgagagagagatgacatttgtgtattatgattacccaaagggaccgtgatctaaacacgaggacattctttagtacctctcatcgcacttggtcggggatgcaatatggaatattatatcaatcgccctacgcatgcagggggtgggagaaacag

SEQ ID NO: 73526 - DNA, 422 bp, Arabidopsis thaliana landsberg
  unsure (1)..(422): unsure at all n locations
gnnnnnnnnnnnnnnnnnnnnnnnnnnnnnnnnnnnnnnnnnnnnnnnnnnnnnnnnnnnnnnnnnnnnnnnnnnnnnnnnnnnnnnnnnnnnnnnnnnnnnnnnnnnnnnnnnnnnnnnnnnnnnnnnnnnnnnnnnnnnnnnnnnnnnnnnnnnnnnnnnnnnnnnnnnnnnnnnntgcaaatttcgacctttaaccacttagtcccgcattgtgcagattcgtgctatgtgccggaccccagatcactctttcatgcattgagcttggatatttaacatgcttcaaacctcattaatactagaaagtgtatccctacatcgtacatgggacccacggccaacggttcatcgttacttaagaaagaaatatatactatctgctcgggtattctaactgcagcgaacattccatcgctcat

SEQ ID NO: 73527 - DNA, 497 bp, Arabidopsis thaliana landsberg
aatttttgataatttttttgatatttgagtacgttcttttatttaatgttttcgagctaataaagcaatggctttgtaccccatcatacctgttgagtcataaaaacaaactacagtacatatttttctcttagatgatttgaaaaatatcttccaataatggtatggtatatgattttttttttaaatgtgaattttgatgtagtaaacactattcacttttctgaatctcaacgatactgtaatgtggatcctaaaatggaacatcaattattttaatttaccaaaaatatatattgtcatatttctatatgctttattagttacaaggctccataaattattgtcatgttgcaacgactacatcattttaatatatgaattggactaataattttgtcagcagcttaaagttcggtttatatattaactaacgcattgttagaaagaaataaacatagttacacagagacaaacaaaaaacttgattgaatgat

SEQ ID NO: 73528 - DNA, 599 bp, Arabidopsis thaliana landsberg
ttgttatttttcatgccaacagcagatataatatttgggtttttgtgaagcaatttgctttcaagttaattaataaaacatgtaatcaagaacacacacacacacaaaccaacacttatattgtcgtagactcataagaaagacatataaacatctatttagaataaccccagaaatccatctcactacgcaatgtaagctggttcgtcgcgggaactggctgaacaacagaggaagaattgttgttaccatcctcatacgtaatccctctagaggaatcttcatttcccatgtgacaagtcacaagtctatccatcattgcccattcacctagaccttgttgatgattatgactagccactgtctcacatgtaccaacgtctaaacccggctcacacgcttgctggtattgtaacccttcactagccgcactctcactgtctcttgcaagtcctgaagagtagtcaaatccaagtgaagctggcttgtggaagattggtgggtattgatgaagagcaaggtcaggcttgttgagttcgaatgtcgtggctccgtggttacgtactagctggtatggactggctccgtgcataaagcta

SEQ ID NO: 73529 - DNA, 459 bp, Arabidopsis thaliana landsberg
acttttgaagggccttctctttaccccgaggtaacacatcccttataccgagtatggtttttcttcattattctctgattccactattcatttccctctctaggatcatgcaaaaagagagtttggcgacgagttgctcaagtatactgatactttcgttaaaactatgtatgtgtcactcaaaggagacccctctaaagaaaccggtgagactttaaactctttaactgttttcaggggtgaaaaggcgacaaaattatgaccaaaaatttcatgttcttgtttcagcacctgtgttagattatctggaaaacgctctgtataagttcgatgacaggccgttcttcctcggtcagttaagcttggtataagcctcactaaccttctttgagatcatacatttcgccttttgtttgtcttaatccttatatggacgggttgaattcttttgtttttttc

SEQ ID NO: 73530 - DNA, 387 bp, Arabidopsis thaliana landsberg
ccttttggcgttcagggctgacgccggtaagtccaaagatttgcgccttgaagacatttggcgtttcggtggtgttcaactcgagatcgtacgtttccttgttccactttactttaactttagaaaagaaagaagaatcacccggcgacagctgttagcacatgaagggaagagtcaacagaatttaacatgagcattaccattgaaggtagtcatcgttgcaagagttgggaaacgcgaaagcgccgcagaatgtaacgttggaattcaaaatgaagagctgattagtgaaggttgagagaattgatgcgtcagtttaatcggatttttggcaaaagtgatgtttgcggtaaacaaaacagactgggtgcataaagtggtgaatgc

SEQ ID NO: 73531 - DNA, 618 bp, Arabidopsis thaliana landsberg
  unsure (1)..(618): unsure at all n locations
ctatatatcggttgacgtcaaaaaacaaaaaaaaactatacagtatatcagttactttcattccaaattattaggaaataaaactgaataattaatttatcttttctatttttataaatgtctatgacgttattaatgaaccaattgtaatatgacagtttttataaatgtctatgaagttttaagttaagtttccgttacaccacggtcgaattttactcgtaaacattccctggtctcgtttttaacagtttgatttgcctcttgaattgggatttgtcgacccctacaacaagttaactggtgtcagtgctctgtgaagaaaaaaattcgacaattttttttgttcgttatatattaacaataaaacttttgaatcgttgattctactcaatctaaagaaaacgtagacatagatggtctttaccaattaccatttttgttaacgttggtctaggtattagctaaaagaattgttatgcataaaaatagccatttcgttgtatcttggacgtacctaaatagattgaaccaaattaaaacttacacaaaaggcagctctctgtttacatattcngtatttttnctagatttcgtttatatattaactcaaataga

SEQ ID NO: 73532 - DNA, 572 bp, Arabidopsis thaliana landsberg
ggaattgtttaaagcagaaaaattatttgcacgactagtgaaaaaagtacaggatcaattgccacctcataacagttatccaacctcaaaacttcctttccccaccaaaatctatgagatggtggacgatccttcatcggatgctattatctcatggagccaaagtggcaagagtttcatcatttggaatccacaagaattttgcaaagaacatcttcgtagactcttcaataccctccatatatattttttcttctataaacttaaaatatttgtaagtttcttatatgttagttttgtaagatgtaatcatattcttttagctagtttttgttttgcttattaactttgaatcttcttttttctatagggtttcaaaaaaattaatccaaagaaatgggaatttgcaaatgataattttgtccggggtcaacgtcaccttgtggaaatcattataagcaatgataaaaagaagaatgatcaactacgtaaacaggatgccagagagaaaaaaaatggcggaggcaggagaattgttcagttgcaaattgaggaaatgtcggatatgagaa

SEQ ID NO: 73533 - DNA, 571 bp, Arabidopsis thaliana landsberg
gttttaagaaaaaaaaaactttatatataaaattatatataaacactcgtcatagatcagccacaaagattttgtaattcgtctcaaagttgcctccgaaaaataatcatatcagtaatacattttatttttctatttgatctaataagtaattgcaaattttatacatgattttagcaccaatttgctacagacggaaataatgtagatattatgtggttagtcaaatggacgatggaagtaaatgtggtatatatacacattatccatttcctcttttacgcatatatactaccagaaatttgaatatcgtagtttgattaaatattgcatttgaagtcacctagatcacacacatcctaggagatgcactattcatttcgaaacactcagagaaagttgtgtagtcagacagttgtcaaacatctatctggacttaaactagtgttatcaaaagtcccatgtataaatgcataaatgctgtaatgaaattcagcagaaattctgtaaagagacaaaagatatgttttcttcaaaatgtatgagatatacgtcagttcatggtacgtat

SEQ ID NO: 73534 - DNA, 4032 bp, Arabidopsis thaliana landsberg
catttgggcgcgcctattcccacaaagatatgaaaaacgtgtggatcagcttgctccagatttattgatagtggttcctttgatagagagtactaatccctcttttgactataattttttcgccgtttcttgctttatttttgaagttctctttattgcgtataatttatttatttcttttgtcaggtgaactgtagaagggctcgtgccgctgctttccaagagaatgttggaagacaaggaaattaccctcatgggattgacatagtgagcatagctgattatttttccctatcttctcgggtgaactcttaccttcaggttgctgtttccattgctcaatatgaaggatatctatatccttttgtggatgaattgctatacaacaagatctgccactgggtatgcttatcttaaacactgtttgatatttggtttatctctgatttatctgcaaatctaatatctctttaatgccctgcttgtatttactgtgggaacggtttaagtgttcaacaactaatttcaaaattcaacaacccatgaactagagccaatagcttgattgggaactgtatcatataacttttataatatgttaattattcaatattgtgatatcaggataaaagcttgagagaacttgctgcagaagctcttgctcctcttgttaagtacgagcctaagcactttgccaactatgtgctggagaaactaattccttgtaccctttcaactgatttgtgcatgcgccatggtgcaacattggcagctggagaggttgtgttagctctgcaccagtgtggctatgtcctttctgctggttagtaccatctattttttcagctttggcttttgtggcacctttgcatatggaaagtcaaaaatatgggcaccatcttggaatctagactttgtaagcggatttttaatcagatgaaaaattaacagagtttgatggttggcatcgttatcccttatatttaaggttcatgttgcactcaatttttacagatagccaaaagcgtatggctggtattgttccttccattgagaaagcacgcctttaccgtggaaaaggtggagaaataatgcgactggctgtctcacgatttatcgagtgtatttcgttatcgcatgtgactttagctgaaagaacagaacggatcttgcttgatactctcactgagaatttaagacatcccaattctcaaatacaggtacctatctttctaaaagtcatgaagttattctcatcctattagcagaattcaatagttgacaagtttcacttattatacagaatgcagctgtcagtgctgttaaacagcttgtgcaatcttatctcgttggcaatgataagaaatctgttgatttaatattaaaacacctaaaacatctaacggacccaaatgtagctgtccgaagaggttctgcacttgcactaggtgtcttgccatatgaactattgactgcaaaatggaaggatatagttttgaagctctgcagtgcgtgtaagatagaggtaatgaagactatatttgacttcattacagaatgatataattaactttggaaaacagaatgaaataattgatttgatggatgtttttcttccaagcaggtgaaccctgaagacagagatgcagaggctgtgaatgctgtaaaaggactcacatccgtgtgtgagactcttactcagaaaagggctagcgatcctggaaatgatgacctgtctctttttcttcttatcaagactgaagtgatggatactttactgaaagctcttgatgactattcagttgataaccgaggtgatgtaggttcttgggttcgtgaagctgcagtccatggtcttgagaagtgtacatatatcctctgtaagaaaatggaaacatattcagagggtgattataacgatgatacgtcctcacttttcgattcgaatcttgcgacccgtctaattggaggtatgctgaagcaaggagtggagaaaatggataaattaagagaaacagctgcaaaggttcttcaaaggattttgtatcacaaatctgtttccgtccctcatgtaccttatagagaaaaactggaagaaattcttcccaacaaggcaaacttacaatgggcggtaagctgatcctggagacttggttgcttcatcgattatttgatggaatttcttatctgactataaattatatatcttcctttataggttccggctttctctttcccacggtttgtgcagcttttgaaactccgttgttacagcaaagaggtgatgtctggattagtaatttcaattggaggattacaagattcacttagaaaggcttctctcgttgcattgttggagtatatgagggaaggtgaagctaaagaccctaaagaacaacaatccagagagtctgccctgggagatgacattctctggatacttcaagagtacaagaaatgtgacagagttatggtaccctgtctacaggtaaaaactccccgtcttaacctctacttccatgttgttatgtcttaacctctctcttttacacagacaattgagatcctcttcagcagcaagatctttctgaatcaagaggttggtttaaaattgccaaaggttatagattgattctaaacacattccatacaaagctaatctgtcatcattttatttcagtcgtatacgtttagtttctacgcgggtgtcatggattctctagccatcgaactaagagcttctaaggatttcacaaagttaaaagcaggccttgcaatacttggatatattgcttcagtctcgcatttcatcagcacaaaagcattctctcaacttctatcattccttggccaccgatacccaatggttcttgtcacttcaatatgaaacacaattctacctaaatcttaaaagcattttggtttactcgacattttgttttcacatgatccagatccgaaaggcggcagcggaacaagtctatcttgcgctacttcaaaacggaatcttagtgacagaggaaaagatggagaaagtgatagagataatttcagaatcttgttgggaagcagacatggaaacgactaagactcagaggttagaattgtgcgagttggctggtttagaccatgaagtagtgttcaagaccagaaacagattggtgattaaggatatagccggaaataaatcggctgctgacgaaaatgcgtcttactcttcattggtcgactcctctggcttctgattttacgcattgtcctggagtcagtttttgtctcttgttcttcgtagtacacttatatgtgctaaattattatccatcatacttctagttttgctagggtttggtaatattcttaaatatgttatattatgttgatgatttattcattcaaaagtgactcaaaccccagctgaaaacggcacaccggtgatagggatccaagaatctccttgtatgaatcggctgacggtaaacggagaagcctcttcctcaccgcgtaggacgtgaaatcccggccagttcacccttctaccagtccctgctccagctccggtgttcataaactcgccgtaatacaacgtcgacaaagcataactgccactccattctctccaccctctcgggtcaatcaactcgtcgatatctgttttgagaaacactgtccgtgagtacttcttccatggccggcccaagtagctcttaaaccggcctttaactgcttcgaattctggtgcggccctgatccgtgagtgttggatcgaaatgcctaatccagtaaggtaaacaaaaaattcatggttaacactaaccatgggtatctattaacgatagaaggagttttcaatatgaattccggtttgggtttggttaaaaattggtttccaattcgatttctgttcaagtttgattattttatttttttggtaatttgttcaagtttgattattatcaagtcaaacttacacttaaattttaattcgattttcctccctttcgcatgcattagtttttggattgaggggatcct

SEQ ID NO: 73535 - DNA, 502 bp, Arabidopsis thaliana landsberg
  unsure (1)..(502): unsure at all n locations
taattagctgaggtaagttcgttagctaagtcttttttagttttataagtctagtctactgtatgatcacagtatacaaggggttttgtagtagattgtannnnnnnnnnnnnnnnnnnnnnnnnnnnnnaagttcgttagctgagtcagcattcggttataaaaggatttggtttgcaaaattggttagagagaagagattttagtcgtgaaccggtttgggtcttttttcaaatcggtatcagagagttcgtctttctctattaatagtgacttttggaaggatctcggaggagttggtgcgtcctaattcggagtgtcagaagaagatttcgaaactcacagcactagaacggagcacctgtgagacttagtgtgaaatgggactgagaatgtgaaaaagcttaacacttgtgtcaagattaaagacaccctccaagtgctcgatgaaatctcccgaagacaatatagtgaagaagaggagacagaaaagaaagaactt

SEQ ID NO: 73536 - DNA, 369 bp, Arabidopsis thaliana landsberg
  unsure (1)..(369): unsure at all n locations
atcgacgagaacggcccatggacggggcactttctttttttggatgcctagcactatgagaaggggtcaggggtgcaataaatgtttgccgatacagcaggttcatcaacagagaaattaactgcggtgatacaacaccgtaagccgagctcgcccagactaacttccagtcacgggacatgactatgcagggaattggaactgactgatgatgacnnnnnnnnnnnnnnnnnnnnnnnnnnttgtgatagggaccaatgtctgaagcactaggggatcaggcatttcatccatcaccttgtgggggcgggcatgcgtgggatcctataggaggagcttctgaagaaatctgcagtggacacaacttgt

SEQ ID NO: 73537 - DNA, 474 bp, Arabidopsis thaliana landsberg
ccaggcgctcagagtccggcagcgcacggatggcgtccggttcgacgctgttcagcgcgttgctcaggccggcgtacagcttgtcccacacccgcgggatgcccatgatcccggtcgggtggacctggcccgcgtactcgatgatcttggtgacctcgggacagtacgtcagggatacccggcgcgccatcgccgaccagtggtcgacgctgcgccccgtgacgtgcgccatcggcaggtaggagaccagccggacactgccgtcgtcgtcggtctgctcctccgccgggaggatccggttgtacgccccctggtagaaccgcacattgtgatgggtgatcatcacgcccttcggcgtgccggtggtgccagacgtgtaaatcagcgtggcgaggtcctccggcgtcacccggcgccacatcgcctcgaaccgggccggcgttcccgggtcctgcgcagacgccgcagcgccct

SEQ ID NO: 73538 - DNA, 121 bp, Arabidopsis thaliana landsberg
ctgcctgtaaaaaacctaaactcacagcaatttttgttttaacccttgccaaaatgaaatctgagactgtaactgatgcatgggagccggtctcacccactcagtgaggagagacatcggc

SEQ ID NO: 73539 - DNA, 565 bp, Arabidopsis thaliana landsberg
  unsure (1)..(565): unsure at all n locations
aaaagctccctcaaaatcgccatccgcaacctctggaagcacaagttgttttctttcatcaacattaccggcctgggcctggcgatggctttctgctttatgcagctcatacaggtgcaaagcagttttgaaaaggattccttccacccctatccggagcgcacgttccgcgttctcaccgacgctaccgataatgtcggcgaaaagcattcgctcgcttcgacgccgtttcccctgggccaaaagctggccgatgggcagagtgtaatcgaaaagatcgtgcgcattaaccgctcgttcggttcgaatctcagcaacggcatcaaaacgctccgcacctatgggctttacgtggaaccggcttactttgaaatcttcggattcccgctggaaaaaggaaaaccagccgtcgaaccctggacggccgtgctcacgcacgacatggccgaacgttatttcggcgatgccaacccgattggcaagacactcacgaacagcgaaataggcacattcaccattaccggcgttnttaaaacccattaaaaattcaggacgcatctggatg

SEQ ID NO: 73540 - DNA, 400 bp, Arabidopsis thaliana landsberg
  unsure (1)..(400): unsure at all n locations
cttcattgtataagtttagcttatctgcctgtctaaaaaaggttaagaatgtgatataactagtcaacactactatcttgaaatctcacacttannnnnnnnnnnnnnnnnnnnnaggccttgcaaattgtaactgacaaatttggccaagtcagcatctgaccaaattttatgggttttgtttttgtaattaggccaaagctctaactcatgtagctttcggcttaatttaaatatattataaaactatttcaaactaatcatcaatttgccaacctcttatgctattgctttaggcagatactntgcattcttcatgtttatgatacgcanaacaaaatcttttaagaactacactttaatatttaatattaaaaactacattcacattcttggaatg

SEQ ID NO: 73541 - DNA, 141 bp, Arabidopsis thaliana landsberg
tgagacaatatccaatttttatgtttgttctttccccttgaactccataactgtctcttttatgatttaaacatcatgcacatttgatagttagttgcttatggtccctccactatgaacctgttttctaagattggtgtc

SEQ ID NO: 73542 - DNA, 567 bp, Arabidopsis thaliana landsberg
  unsure (1)..(567): unsure at all n locations
ctaaaagaatacatacatttctctagtaagcatcagtatatatattggttgtttttgtaagtgaataattcaaactcaccggttgagacatggagaagcaattgtcctttaacacactttttggcgaagttgagaacattcagggctccaaatgtgttgatgccaagaccaatatcatatcttttatttttattaaaaacagaacaatgaaaatcaagttacatttgtatattattattatacaaagtaaatgtgatatatcatcaattattttcgtaaatacctttcatcgaaatttgttgtggctgcgatgttgattatgatatcaatctccctccacatacgttgtatgagatcggtgtctttcaatcccaaattatcgatcgatatatcacctggaaccggcacaattttttcccgcaccaaggcattcaaattgtcttcacctagattgttcctcaacactttaaaaaggtcgatctccataacctgttgatcattgtaaaaagggaaacaaaacctattggtgatattntgagataattaattaatggatcacctctagat

SEQ ID NO: 73543 - DNA, 543 bp, Arabidopsis thaliana landsberg
tgcttggatcaaaggcacgtgccaccaccactgtctggctcaagcagttattaatttggattctaccataggtagaattctttctttaactttgttgagatttatatattcttatcttatgtgtatgggtgttttgcctcatgtatgtttgtgtaccatatatgtgcctggtgccctcagaggccagaagtgaagattgaatctctttgaactagagttatagacagttgagagctgccatataggtgatgggaaccagacccagattctctggaagagcagtcagtctattaacctctgagctacctctccagcccctggagttatgtcttaatttcatttttaattctttattgatattatatagaatatcaagtctagcttcttatactgatcctgtatattatgagcattctaaatttgcttatcagctttggtagtggttttgtaacgtcattcagatatttttaagtagggcatcacccttgtcacctttgaatatgaacagttttcttccttttctgataactggtttaatttcct

SEQ ID NO: 73544 - DNA, 535 bp, Arabidopsis thaliana landsberg
gcaaacgagaaaacaaatgaaaaaggattgaagaaagaagaatttgagattcgttggtgttgtagacattgatggtgttaggtgaaaatcttcggatcagaatcggtgcggagagaagagagagctcttctgataggaggaggatatagagagagggagatgagagtggaaaggagagggagagagagcggctttttctctgttctacaaataataaaactctttacaaaagtttttttcaaattaaatactttttagggtaacttattttatttatattaatcattttcctctaaacttatttaataaataatcattgagtattaattgctgtgggtatagattcccatttttagtttgaatatgtgataggtttccatttatagattcccagtttaagtttgattggtactgttttccaaagccaacgcttatacatgtaatagtttggaaaagagtaccaatttggtttttttttttttaacaaagatgttttgataaatatttaaaccaagaaatttggtagaaattggat

SEQ ID NO: 73545 - DNA, 669 bp, Arabidopsis thaliana landsberg
cgtcacaaataaaacaggagcatgagcataacttggagacaacctgaaactgtaatacttcaagatcgtagccagaacagttttagcctcattcacagcaagattctgtcccacacaagtcctaggccctaacccaaacggtacaagcagagctgattgtttcttaggatcttcaaacctacgcggattaaactcctctgcgtcgtctccccatgtttctttatcgtggtgcatcgcgactactgataaatagagttgagttcctgcagggatgtcaaggtctcctagcttagctcttttaagagtgtcacggtttaatgtcattgctggagggtagagccggagagtctcattgattatcatacttagctgttaacaaaaacaagaaattgctaagaaacagtgtttcctgaaaccatttttgagtggggcttgaggacttacagtcttgaggtcttgtaagatgtctagagtaggaagcccggtttgtccgagaacgcatatgacttcttcccgagcaatgttttgccattcttggttcatagctaagaggactaaaacaaacgtcataaggttagcagttgtttccttagctgcaaagtagaacgttttgcattcatctgtaacttcttctatcccaagcttctcttcttgaccattctgaattgt

SEQ ID NO: 73546 - DNA, 691 bp, Arabidopsis thaliana landsberg
ctgttcccaagagcgaagatttactccgttttctgactatgcctttcatagaatcagacgacgctttcttgtccaccaagctatcttgcgagcccttggtttctttgaagctatcattgtgttttttcaaagaccctagagatgcctcgctgcctcttgatttcacagactcacttctcttcagcatcacagttttctcttccacatcgattgttgcctcgtatatctcagtcttgtcctcacagagtaccggagtattctctaccgattcatcgcgtctttcttcgattcttaggccatgatcaaagctaggagctggcatctcaaatctagcttctttactgccttcagtcatcgcttcaatagtctcttgcgttttgttgcttcctacgcaaggaacaggcagagctgcagacgtgttagctttctctaaacccatcttgtttcttacgggaaacgcaacctctgaaaccaaatgttgaacaagcgaatctccaataactctactattctggctcactgggagtgatctacatcgatacatgcgtcttagactcgcttctcttttctccttctcttctttataaactccaagaccagtgtcttgatttgcatttgactcttgcgaacaaggtttagaagtggagaatcgcttatcggcttttcctttgtctgtaacttcttcatcatg

SEQ ID NO: 73547 - DNA, 672 bp, Arabidopsis thaliana landsberg
gttcatcaagcccaccccgatgggcgtgccgctgaccctgcgcgcgcacgtggaaggcgagctggggcgcaagagccggatcatctgcgaggtgtatgccggcgacgtgctgaccgccatcggcgactccattttcgtccgcgtcgatgccgctcagctgggcgcccaggcccacggccgcgagggctgaggacccgccgcgagggcgtgcggccaggcgccgcgcgccctggcgcggcatcggcgggtggagaaggtttccacggacgccgcccttatatcagaaagttctcgccatatactcaaacttcacttttacgcatattccctaactggtatcttgcccgccactccgcgtggagcgcgttgccgtgcgcgcttggaagcgtagtacgcccgagcgctatagcctgacagcaggatttttcatgtacgtatacgacgaatacgatcagaggatcgtagaggatcgcgtcaagcagttccgcgatcagacccgccgctacctggcgggcgaactgaccggcgaggaattccgcccgctgcgtctgcagaacggcctgtacatccagcgctacgcgccgatgctgcgtatcgccgtgccctatggcctgctcgcctccccgcagctgcgcaagctggcgcagatcgcccccgactaccaccaggggc

SEQ ID NO: 73548 - DNA, 112 bp, Arabidopsis thaliana landsberg
gtgggattttgcaagctttttgggcaaggcctcaaatgggaaccgggacgggtccaaaaccgttgggttcgaaagacttaagatttgtgacaggggccggggattaccatta

SEQ ID NO: 73549 - DNA, 2636 bp, Arabidopsis thaliana landsberg
tcttcatggcaggagccatgtctagctgatctcgatctccgatcaaaataaaataaaaacttgggagagagagtagagagatcagtaacagttgttgttgctgcctaaggaagaaaaagagaggagcttgagagttgagagagatttgggtggagaaaaaacgtcagaggagtttcttctcagagatcttctcttctctttaaaaaaacaaaggcctttttctttcttctttcccttcctttttgttttaattattttttgaatatccgtcatggactctttttctctttttactttctttttggaaaaatattcatcttgtcagagtaaattaaggtactaattacaaagggaaccaaacagaaaaaaaaaaacaaattgttttgtaattagctcaaaacgaaattcaaagggaaaagattttaagtgcaaactgtaaatttcttgtaattttatataaccaagaaggtgtttctctcctgaattattcgtttttcttgatatttctattgttaaataaacagataaatcgagttcatataaattagttatctaaataatttagtttgtcttgatagttatcaaatgaagaacatttaaaccggccggtacgatgacatttagaatttacaatcaaactcctctacttaactgttctatttgtttgtttgacatactagacaagtcaaaatacatcgtggggatctgaattctgctcaaaatacttttgaaaccattatattttacataatgcgacatatattaatttatgatttttgattagttgagcaaaaagagctgtcgtatatcatatagttttaatgaatcactcaaaaattggcacaatagaaacagtaaaagaattattgaatttagaggataaaaaagactataatatcgaccgtccgatatatcccagaaagattttaacagcaactctttgtctcttcttcttcttcttcttcttcttctctccgatttgctcagtcgattgcgtcatgtcgtcgtttgatccgccgaatcaccgatattcagccttagtacttattcttctcctgcttggtttttcggtagcggcggccgacgatgtatcgtggaccgaagattccagcctcgagtctcctggctgtaccaataagtttcaaatggtgcattcaatttcttatctttacttcgtatctaatcactctctggttcagtggagttgattgatctagttttccttctctctctctctttgttaatgagattctatatttggtggaaatgatcttcatataggtaaaggtcttaaattgggttgatggtgttgaaggagacttccttactggcttaactgctcaatttggagctgccttgccttctgttcctgatcaagctcttagatttcctgctgcttttgtagatcctttggactcttgttcccatctctgttccagggtcagtttctcttttcttcttgcttttagaatgaagtcaatggcttccaccatgtaatttggaagtgcaagctgacttttttttttggcaatgttcattgatatcttgtattgacattgtttgttccagttagatggacatattgccttgtcgatccgtggcaattgtgctttcactgagaaggccaaacatgctgaggcagctggtgcttctgctctcttagtcattaatgacaaagaaggtgtttttttcttttcaatacggtttcggattgatgtttttcgtgtttcgtagctttggatcatatgatttactcatgatctgttatcagatcttgatgagatgggatgtatggaaaaggacacatctctaaatgtgagcatacctgtcttaatgatctctaagtcaagcggagatgctctcaacaagtctatggttgacaataagaatggtgagcctttgtgatttcgcacttcagtttttctcttgttggtcctgtagctctacaatttgaaccatctggtattcgtataaatctcttttaggctaagtccagtttctttatgatgcagttgagcttttgttgtatgctccaaagcgtcctgccgtggacctcacagctggattgttattgctcatggctgtgggaactgttgtcgttgcatcactgtggtcagagcttacagatcctgaccaagctaatgaatcttacagcatactagcaaaggtgtaccagagaattgtggttaagcacttttgcatgctatggtttctacaattaactgcctttgatatcctatacacgtagtttacatttcccagatactttgcgtagcagcctcttgttattctgtagacttggtgatcaaaacttcagtttatgtagctgaattaacaatgtctttttaaagaaaaaaaaataatttactgaattttttccaggatgtttctagtgctgggaccagaaaagatgacccagagaaggaaatccttgatataagtgtcactggtgctgtattttttattgtaacagcctccatatttctgctgctccttttctacttcatgtcatcatggtttgtatgggtgctcaccatatttttctgcattggcggcatgcaggtaatttcattaacatccggcggttttgaacctgtctagaatttagattaaatgtatatgtgcgttttcggtca

SEQ ID NO: 73550 - DNA, 3315 bp, Arabidopsis thaliana landsberg
cagcatactgtgaaacgcgtaagaacacgttatcaatagcagcaacacttaaaaatgatgcttgaactgttgaagcttttcttgaattacatgtaaagtattgagctgaacgcaaagcatagcggttgccggaacatcaatgttaatcgaccttctctcatcaaggtgttttgagtcgaatagttccttcttaacaaaaaccttgattgctgtttccttcttgtaacgagtaagaacaggtacaggtggaaccaaatcatccttgctagctgaaatggataaaatccgataccagaattttccagtagacaaaaaacaatgcccaggttacggaagataaaagctcataaaaatataagttggagtttagaacttcaaagctcggaagcagagttcagtcagattgtacatacctagcttctccatgacatggttagtatatacttgaaatgcattgtcaatgccacgaaataaagcacttagttcaatggatctcattggaactttcagcgcaaaaaattgatcaacagtctgcatcaaagtgtattcaaaacactaattagacaagctcttataagtggagactgtggacttaattagacaagctcttataagtggagactgtggagtcatattgcttactgagatcaaaatatgcttctacaagaaacaaagatatcacagctccgttcaatacagttttgacacagacacagcttcattcaagtctaataatctttctcatgtagaataactgggaactaagtaaactttattttcaacaagggtcacagcaaattgaacaacctatctaaggaagctcaacaaagataaacctatgccttaagcaactgatgagactcagaggatctagtaaaacatgtgctccaaaccaataaaatatacatatgctactacgaaaaagatacagaaaaagtggatcataggacccctacctcttctacaatcctgaaaacttcgacaattgagctcccataccgctgttgaggtgatattgggtcccaatgctatacagaaaagttaagaagcgttatggtttgaaaaaaaaaaagttgtatcaaaagacagataaagcaattcttcgaaagatcagtaaaggaacaccaaatctcacctcttgtttataagctcgctccacccagcttaaaattctccccagttgtgaattgatccatctcaaaaccaatgtgccagagagggattcgacctaaattattgagaaatattatagccaacgtgattgtcgctgaatttgaacctgtttataaggtggcttaacccatgcgtcttagatttcaaagtaaaacatctgacctcatatggaattaattttttgaagtaaggtccacttgtatcctctccgcagacagaagtcattaactccagtaaatattgctcaaggctatcagccgcaggaaaaacagagacagcgtcctcagtcaagtgttcagcaccatcaagaaaaggtttctgaaataaaatacaaattcaagatgtcattaatgactgagatgtagtaaccaaaaagtaataagatgggacgctagcatcaagcttaccaacttgttcccataaagcttgtgaataagggatgcagaaaacgcaattgcctgtgggtgcctctgagataaaattggcataaagatggtagagtcctttttcataagtttcttagtctcctcagcaagcaatgccaaatggtgctcattatttctgtctgatctatcaatggcaagtgacatctgtaaatttgcaaaaatcagccccattaaccactccagaaaattatgcgtcaaattgttcacaatggaatcagaatttgctcaattcttagaatgggcataaataagaactgatatgttatcgttggtcgaacatctagaagattggtataacacttacccttgtgaacgtattcttgatggaagataaaacgtaggattcaatttgctctcgatctgaagagttagaatgcatcgcctgtagagaaaaatgacaatcattctcagttacaagtacaaaagtcatgttggggaaactatgtcaccatcgctccattaaaaagcaggtaacatactcgatcagattcctccaacaagagcctccaagttatcattgcaactgtgactgtatcctccatgacaagtgaaccctgaaatgtagataaaaataacaaaatatctaacttcaatggtataaatagagaaaaagaaattgcttgcaatagaaatgtatttagaagtaagatagatatagggagcctgaggtggacatactcttatttggatttatgtatgatatataaatttaagtgtgatatattcatgtgtgacatacatatggaatagttggacatattaaacaatgcgtcaattttctggacactactgagactaatgtgtccatttgatgtaaaaaacacaatatcacataaagcaagagtacagctcactagacaaagtaaaagaagatggctaatcctatatacgaattactgtaattgaattgaaagcaactaatgtgtctgaacgcatttgttttagataaaacctcggcaaaatgcagatggtagtcgcccagctgcttatcggcccaactccgtataggtgacaagaaggactccaggaaggatatctcttcattatcaaccctacactgcaaggttttcaagtgtaaacgctcttgaggccctcgttgttcttttagtgggatcttcttcagctgctgaatagcatgtcgcagaagtcctcgttcactagtaatgacatactgcaaccacacaacacactcataagctaccgtaaaacttcccagctgaagcatcaatatcgttacaataaagaaaatatctaatccatcattacctgtcgaaacaaaacccaagcatagcatgtgtaatggatggtctctgtaattccgagaacacgccatgttgacttcaaaagctcaagaatttcttcaacttcctaaaataaaataacaaaggttactttatgaacatttcatagtaacagaaacaataaactgtaaggcaacttgtcaagaatttctttctggtaatgtatatgggaattataatatgatggaaaaacaaaacagaggaatctaagcagctcaaagagtgtcagctgataaaaagaacaaaaacctttcaaatcaatatgatttttaaatgaccaagaatattgcttctggaaaatgtattcaataaaattttgacagaattcacagacctctgtgagcttcccatcattcaatatgtcaaagacacagagaagcaatttttcatatagt

SEQ ID NO: 73551 - DNA, 443 bp, Arabidopsis thaliana landsberg
agtcacagttaacacctacatctatatagtaacacctcttaagacccaacaaagatcaaataccttcggcacatcacaataccccagagactcccaaaccaaacaagaagagaacaaacaaaacgaagaaacacgaccttccacaaaaaacagcagacggggaccacaagaatcctgaaccgcaaccctgccaaagcagaacacagaaaaacgcatactcaatgaagcacaactctcacaaaacacaactcactccgagtctgggaaacgccatctcaaaaaaaaccaaggcaactcccaacgatgctgctgcacagacccccagcccgcaaaaaccaacaaggaaagtcaagcacaagtatactaaaacacacagacataagaacaacaacaaccccaaaaagcacagcctccgcaacccaaaaggaaccaactgaaaaaaa

SEQ ID NO: 73552 - DNA, 516 bp, Arabidopsis thaliana landsberg
  unsure (1)..(516): unsure at all n locations
tagtcggcccgtgcccgggccagttgttcggcttcgccagcttcagaaaatctttaattcgtcgcgcagcgcgcggtggcgcgccagcgccgactcgatggcctggcccagcttggggtcgctggcggcaaagcgttcaatcgtggcgtcannnnnnnnnnnnnnnnnnnnnnnnnnnnnnnnnnnnnnnnnnnnnnnnnnnnnnnnnnnnggtcccatggcgtcctccaacatttcgggtggcacgtaccgggaatggttttgtgccgtaagtgtttatctgtaaagggaaaacactttcgatattagcacgaggcataacgcggcgtaaccccctgcgggagtgacgattgtcacatccgcggcgtgatggacgggactgaaaatcgttgttcgacgcgccgatcatgggcatcaaggaggagtcatccatgaacccgtcgattgattgcatggccgcgttgcgccgcgtcagcaagcgttacggcaagctcaccgcgctggatcggatcgatc

SEQ ID NO: 73553 - DNA, 571 bp, Arabidopsis thaliana landsberg
  unsure (1)..(571): unsure at all n locations
aatctcatcgctaaggttctggagacaaaaaatatgtattagatgagcaatttaggttttaagaatttagatcaaacaaaaaaaatacttagtaatctgtacaaactaaacataaatatagatatacaaagaagcaatccatgacaagtctctctatgttcatgtttcatgcaaagcatataacacacacacacacactgacacacatatatgtatatatattgatattagtatatgtaaaagcatacacagatatacatgcacaaatactactaggcagtgacttaaatggtataaaagcctctgtatgcttattaccctatagagatatatctcatttgtgagaactaaacctacatttgtcagagctaattaataatacatataatatttgcatcaaaatttaatttaaaaaggatactcaaaactcaaaagcaattttcaagttttcaattagttttgaaagccagaaacgtaaaaccagtgtactaatcagaaattctcattcccagatacatttcacatcccagatttttctctcaattaataactccatanactacngatctga

SEQ ID NO: 73554 - DNA, 1157 bp, Arabidopsis thaliana landsberg
actattaagtaattgtgacagaatgcgatcatcagtactgccaatggatgagatgcagagcaagacagatgacatatataagtgttaattctgatcgtaacatataagctccatagtgtggctatccgtctcatggtatcctcctcatgagtcatctgtcatgtatcacgtcaagagttaatggctaccgagctgcaatggcattcataacccacgcagaatcagatgcaagggttgctgcaaagcctcggtagaatgcgttcatgtccatgacattgcggacagttggagatttcagcttcaagttaagagaatccctgtaataagcaacgcgtcttgcccaccgccttgcatctgcttcaaacacatccaatccgtttttcatgacaatggccctagaaggaactttagtaagcctctccggccacttggatatagttcccaaagcgtgttctcctttgacggatgatggcctggtaacacacctcttcaatttaaaatacctgaaaaaggcaaaaaaaacaaaaacttcaattttgtcttttacatggtttcaatacagttcaaaagtcacatgcacataattatacaacaagaaaaacgcaccatgcatcacttggcggaacagactcatcacacaactcaagcccaaactcattctggctaggtagacatgaatctccaacaggcttcttccagatgacagtgtttccatcaaccgcaattagctcatagcacaaagctctagccaccgcctgaagatcagcccattctttgtcttgtttaggccattgtacaggtgggccagagattacaagatatcctccagggcgcagtaacctatctacttcgatgaagtaagttgcatctgcagacaaatcaccaaacacaataagaataattgctgctaaaaaccgcaacacacgtacataagtagaggtatataacccaagggactcactgtaagccgtaaaaggaatcaaacatcgggaacagtgcatcaggtcaaaggagtatgcaggaaaggggagtctacgagtgccaagcatggcaacaaatgcaggcactcctctttccaaagcgaactgaatttgagatttatgtgaatctcttggagcaaatgagagggctagaatgccttgagatagtagagtacc

SEQ ID NO: 73555 - DNA, 729 bp, Arabidopsis thaliana landsberg
cgatgtaactatagcattgagcactacgacgacactgatcacattaaagtattaaacaataaatgaataaaagatgcatgcttttttgtaaaaaaaaatatagtatgaattatttggccaaccaacgtgaatgtgaagataaggttttgtatgctttttacaaagtcaaaaagtgccttgaccatacgttaggtttaaaatcaagagttgaataattcactcacaaattcatcgtgacctttaaaagcctatcaataaatgtgtgttagttacactatttgattatgaacattgaccaggattaatgtttggttctagctagatcattcgcatttcataaatagtacaattttttcattattgttatcaatagtattaattatagcattatttcttgtatacgttacataaacaaaattcttgtataaatatttaactagttgttgaatacaataacaaaaatctaactattcataatatacaaaaataatcactattagtattaatgtatcttattaatatggagaagtaattatttttgtatgttatgaatatatatttagatttttcttaagatgtttctaatagtaattatttttcataagatgtttcttattaatgaatttttaggattttcacacatcttaaaaaacatattaaaagttgattagaaatatattattcttcttgaagtttacacatcaataataactagtaataaatattgca

SEQ ID NO: 73556 - DNA, 556 bp, Arabidopsis thaliana landsberg
agaaagccctgtgtatagtgccgcacatccctcggcttgctcagtttgaacctggcactcaggaaccattccacatgcatatctgcacgttccttcggaagtacggatttggcgatcatttcattataccgtgtattctccgatttgatcacattgccgatgctccggtagatcgttctgtcggccccgaaaaaataaataaaggatagcgctatcgataatatgaaccccagtatgaagccgcagatcagcaggacaatctgcatattgttcagcaattgctggtggtggttataatccactgccctgaacaggtagaagaacaggaacagcaacggaagcatggcattgttgatacagtatttcaggaagggctgggccgtggtggccaaaaaaagtacattcctgccattgaggatgaatgtggtgatattccagctcatcacaaaaatgccaatggcaaatcctacgatggctgtacttaaagcggacacatgcccataatattccggtgcaagatagagcgagttggcgccgaatgtgaacatgaaatctc

SEQ ID NO: 73557 - DNA, 302 bp, Arabidopsis thaliana landsberg
taataaataaaaaatagatataggattttacaccaattctattataaatcattgggtggacatttttcaggccccttcagaattcacagggccatatataaaacaaccccatcattaattgtaaattaaagagggaaaataaataaaattattactgatttatctcacgataatctaagcgagttaatttggaaaacccaaaaaaaaaaatagagatgaggatcctaaaattagaaccatgtgattaaagcaaatacttcagaagaaattatgtgtttcattccataaaatatcaccaatct

SEQ ID NO: 73558 - DNA, 604 bp, Arabidopsis thaliana landsberg
  unsure (1)..(604): unsure at all n locations
ggtgccatccccggccgcgccgaggccggccgcgaagttcatcgcgtcgtcccttgtgtttaagacgtcgttcatcacggtcaggccgtcgctctggttgaactcgatgccgtccgcgttgttcacgtcgtaggtggtgatcttgacgtcgttgaccgtgacgtcctggtcgtgcaggttgacgatggtgtgctgggccgggttcagcgcggtgaagtccccgtagtacacgccgcgcaccccgcgcagcatgatcaggttggacctggcgccgtacgggttgaggttgccnnnnnnnnnnnnnnnnnnnnnnnnnnnnnnnnnnnnnnnnnnnnnnnnnnnnnnnnnnnnnnnnnnnnnnnnnnnngagaccgggaagccctcgctgtcggtgccggcctgcttccagccgttgccgtcgatgctgcccggcccgacgatcctgatgttccgcagcgggtgcgcgtagtcgttgttccgggcgttgatcagcgcgtagtaccgcaggttggtctcgtagtcgtagaacgggtcgccgtaggcgtagtcggcggcgttcgccgagccgcgcagggtgccgccctgggcgaccttgagcgtcatg

SEQ ID NO: 73559 - DNA, 527 bp, Arabidopsis thaliana landsberg
  unsure (1)..(527): unsure at all n locations
aagcccgctgtaccatgccatacttcaaaatgtcattgaccactctttctgtccagattcgagggaatggcataggcatagccggcgaaggatcccgtgggtgtggctnnnnnnnnnnnnnnnnnnnnnnnnnnnnnnnnnnnnnnnnnnnnnnnnnnnnnnnnnnnnnnnnnnnnnnnnnnnnnnnnnnnnnnnnnnnnnnnnnnnnnnnnnnnnnnnnnnnnnnnnnnnnnnnnnnnnnnnnnnnnnnnnnnnnnnnnnnnnnnnnnnnnnnnnnnnnnnnnnnnnnnnnnnnnnnnnnnnnnnnnnnnnnnnnnnnnnnnnnnnnnnnnnnnnnnnnnnnnnnnnnnnnnnnnnnnnnnnnnnnnnnnnnnnnnnnnnnnnnnnnnnnnnnnnnnnnnnnnnnnnnnnnnnnnnnnnnnnnnnnnnnnnnnnnnnnnnnnnnnnnnnnnnnnnnnnnnnnnnnnnnnnnnnnnnnnnnnnnnnnnnnnnnnnnnnnnnnnnnnnnnnnnnnnnnnnnnnnncac

SEQ ID NO: 73560 - DNA, 555 bp, Arabidopsis thaliana landsberg
acagtgtcttttatcaacgattttctttcaagtctgcaaatgattatcctgggatcacgccctccgaggcaggaatacatgcaatagacttgttagggggaaacatatgtcatatgtttgtacattatacattttgcagtcggacaatttttaacatctgtgttttgactttgtatggaataaaagattccagcataaagtcaatcacaaaactcgaatcatttgtgcttgatctaagagaactgagggaaatggggccttaaatcatataagagattgtgaaacagattctggaccttataacttaagatagaagaggcccaaaattagcataacaaatactaaaagatgaagacaacagatttaaaaaagaaatggtacatttcaattcagaagtgtgtatataaaaaaatgaacccttaggagaggaaacacatcatcaacaaaggatttgagagtggcattagagcaaagcttaaatatgtttctgccacaatattcgaacaaaaaccaacacctaacaacatttttgacaaaaaaaacaaggttggctta

SEQ ID NO: 73561 - DNA, 567 bp, Arabidopsis thaliana landsberg
gcattggttacactaatagttggaatggttattcaaataaattaagggttacattatatataataaacaaaatattacaatggttcgtaagtaaaccaaatgttgcaatggtttcattaagcagttataagaatttattaaatattttaataatgaaaaataaaatacaatatactttgaagagttacgatcaaaatcgtgaccgtggaaatgattataaagacatatgttcttattgttattattattagatttattaaattatttcaaattttttattataattttactaaaagaaatatgtgtactattcaaacacgaattcataaacaatgcatcaatctcatacccgcccatcgtgatccttatctattatagtataattcattactttttatatagctaaatactaaaattgttctttccattgtccctctagtttcttaattattaacctacaaaaatgtttaatttgtttttttagatgactatagatgggctgcatgttgaagattaaataagtcccgggcttttttacctcatattgttgggcttctctgttctact

SEQ ID NO: 73562 - DNA, 513 bp, Arabidopsis thaliana landsberg
cggccagatcggcgtcggtcagcgtgacgacgaagtcggcgtgtcccttcgtagttgccgcgcagcgcggcgattaccgcgtcggcgttgctcatgacttctccctgcgtcgtgatccagcggtcatggcccgactataggccgtgcggtcggcgcgtgccgtgcgccggagaacaacggcggcggaggacaataggggatgtgccgcttatcgccgtcaatgacattcagctgtattacgaaacgcacgggaccggggctccgctgctgatcatcggcggcctcggcctcgatgtgtcggagatgacgaacttcaccgtcccgctcgcggaacgcttgcaggtcatcgcgatcgacaaccgcggcaccggccgcaccgacaagcccgaggtgccgtactccatcgagcagatggcggacgacgccgccgcggcactgggcaagctcgggatcgcccgcgcgcacgtgctggggatctcgatgggcgggcggatcgcgatgaccctggcgctg

SEQ ID NO: 73563 - DNA, 531 bp, Arabidopsis thaliana landsberg
  unsure (1)..(531): unsure at all n locations
tacgcgctnctctggatccccacgctcgtgtacctcgtcgtcgtcgcgcactaccgcatcgacttaggcggctgggatggcccgagcatcatcacgggctacctcggcgcgatcgcgatcggtgccgcgctcctcgcttggacggtcgcggccagtgccgccacttcgacgacgctgctcgcgggtgcgttcggcttcgcgatgctcatcggcctattcctcgtcggagagctgcccgcgtcgttccccgacctcgcgatcgatcatccaacgctctcacacgcgctctccgcgctctcgctgcgcggcgagctgacgacgttcgcacgcggtgagctgtcgctccagtccgtcgtgttcgtgctcgggctcgccatcacgggcctgtcactcgcgatcgcgttcgcatgtgcgggccggcgcagggtcggtgaaatccgccggcgcttcctgtcgacgctcctcgtcgccgtgatcgccctcctggcgggcgtgctgttcacgcgccacccggtgcgcgttgacgtcagc

SEQ ID NO: 73564 - DNA, 541 bp, Arabidopsis thaliana landsberg
catatctatgatttattcggttttttgattcgggtacactaaaattaggttcggttcagatttggttttgattttctattttggtgttaccgtttctgctaagatcgttgattgtctgcttcatttgcttttacttcgtccacaaagttttacgagaaaggttggcacgggacttacgggtccccattgacctggttcatatgtggttcctagttcaagtcgtttgatcttaatttcggctactttttataattaattatttgggtttgggctgggccatgtaagcccaatataaaaacaaaaaaaacacacagtttcactaacgacgtagaaccatggaaaaatttactcatgggcctatttgcttcaatcatctttcttttttgtcacttcttgatgccttgtctcttatttggaccacaaaatatctgttgcagcaacaaaggaaaaaaagttggaaacgtttaatttggtttctgtttataatgtaaatgtaacaaaatctcaagaaaagtaatactgaaacattcgtttctcaata

SEQ ID NO: 73565 - DNA, 516 bp, Arabidopsis thaliana landsberg
  unsure (1)..(516): unsure at all n locations
ggcgtcgtgctgtcgcccgaggcattgctggctgaaatcgccgaactcgagcaggccggcctcgatgtgcgctccaggctgcagatctcgcccgcctgcccgctcatcctgccgtatcacgtggcgctggaccaggcccgcgaggcgcgcaagggtcccggcaagatcggcaccacggggcggggcatcgggcccgcgtacgaagacaaggtggcgcgtcgcgcgctgcggcttcaggacctgtacgatccggccattnnnnnnnnnnnnnnnnncgaggtcctggactaccacaatttcgtcctgaccaaataccacggcggcaaggccctgagcgccagcgaggtgcgcgacgcggccatggcgctggccccgcagatcgagcccatggtcgccgacgtctcgannnnnnnnnnnnnnnnnnnnnnnnccggacacaaccttctgttcgaaggcgcccagggcgcgcttctcgatgtggaccacggcacctatccctacgtcaccagcagcaac

SEQ ID NO: 73566 - DNA, 594 bp, Arabidopsis thaliana landsberg
  unsure (1)..(594): unsure at all n locations
tgcgcgggccagcgccgcagggccgcgcttgacctgctgttttagttgaagcacatcgccgccgattatccggtgccggtgcggatcgtcagcgaaggtgaagccctcgctatttcgctgatcgagaacaacgaaagagaaggactcgacccgttcgacgtgctgcgcgcgtaccggatgctgacagaggaaggccgcagcgtcgattacatcgcagcactgttctccgcctcgccgcttacggtcaagcggcgcatgaagctcgccaacgtgtcgccgaagctgctcgccctgctgcgcgatgacgcgatcacgctcgaccagcttgctgcactcgccctcgcggacgaccacgagacgcaggagcatatctggttcgaggcgaacgagtggcaacgccagcctaactacctgcggagggcgatcacgcgcgcggaaatcgacgcgagccgcagccgnctcgtacgcttcgtcggacttgcggcctacgaggcagcaggcggctatgtgcgccgtgacttgttcagtgacgacgcgaacgctggctacattgccgacgcagaactgctgcaaaagctcgtcgcggaaaaactc

SEQ ID NO: 73567 - DNA, 432 bp, Arabidopsis thaliana landsberg
  unsure (1)..(432): unsure at all n locations
nnnnnnnnnnnnnnnnnnnnnnnnnnnnnnnnnnnnnnnnnnnnnnnnnnnnnnnnnnnnnnnnnnnnnnnnnnnnnnnnnnnnnnnnnnnnnnnnnnnnnnnnnnnnnnnnnnnnnnnnnnnnnnnnnnnnnnnnnnnnnnnnnnnnnnnnnnnnnnnnnnnnnnnnnnnnnnnnnnnnnnnnnnnnnnnnnnnnnnnnnnnnnnnnnnnnnnnnnnnnnnnnnnnnnnnnnnnnnaaagatcagcccttatatcagagccttcaaacttacctccaagtcttttctttatacattttaccttaagattaggctaatcataccaccaatcatgatggtctaagatccattatcgtacatgtcgggcttaagccgccctaagttcatcaaagcgtaaaggacaccgatgtaatatacaaagacgctattact

SEQ ID NO: 73568 - DNA, 622 bp, Arabidopsis thaliana landsberg
  unsure (1)..(622): unsure at all n locations
ttctggaattatatttttcttctcctagaaaatgtgaaggtcctgataagctaaaaattctcttcatgaaattgttgttacagtcagactgtgatattgaaatttgacagcaagatatagtcctttaagccaagtcaatatattgcaaatatacatggattatattatgataactaaatctttcacagtctagctaagcttctattaggaaagctaatattttaaatgtgaaaagaatgtttagtcctgccacccggtatattggaaagtcagagaatatttgttgtcattatagaactagtttatcttaggttggtgaatatttttgctagaatgaaaaagccacaatcaaacattactttgagccagaaatattttcatgctctaggctttgttgtttatcagtacatgtcttttgaggccttgacatgtcatttatctaaattgagagatggtataagtgtaagatgcacagtagatctcaatgagttcatttgaaataaccttgtcatatttaaaaagtttcatattgactatatattgaaattataatattntgggtctattggtttacatccactatatcaaggcatgctcaaccagggagtacatagatctgaag

SEQ ID NO: 73569 - DNA, 605 bp, Arabidopsis thaliana landsberg
tgtggagtagcaaaagagtttttacgagagagtaagtacgtcgaaaaaaaaattagagagtaagtacaaaggggattcttctctgtggagactagttcatccccaaagtggaaagatctacggaaatgggaagtcatcatccttggtcatagattgatatgcactgttaattaaaaacaaaagaaacagcattagtaggatggtatcgcgtaattataaataataataaaatgcgtaagccattttaggccaaaagcatagcttattggtcccacgtattcttcctttaaatgtatactatatagtatacggtctattaatctttagactagtcactaaagtcataactaatcaaataaatgttaactactacattaaaaaaactttggcaagcactaccaactgtgaaaaaaaaaaagttctttcaagttatagaacgacataaacacggaatcaagaataaacaaggagaatttttttgtttatgccattgtattaaatatttaaaggtatgcgtagttttaatcatataatgaaacagcttttgattctaaaaaacaaccttaatataaattgttgtagttatgaaatgaggaaatcggaaa

SEQ ID NO: 73570 - DNA, 478 bp, Arabidopsis thaliana landsberg
cccggggacgcctctgcacattttaactgacatattaattttatttattaattatcttaaaagataatttataatcggggttaaaagggggtaaaatatttttttgtcaaattattttaatccaaacaaattttgacctcatatattaattcaaatatctcgtaaattttagttgtgatctactgaaagatattttttatgcaaaattgacgacataattaaataatatgactacatctaaataattataggaataaaaacaaacaagtttagacatataccaaaagattttgaaaatataaaaaacgaagaaacaacaatgaaattttaacatctttttttaatataaaaaacatcatacaaattaaaacgttcttatataaattcggtctcttaagcaatgttgggatacaaatttgttctcttaagaaacaaaaaaaaaagccacacaaaggcctgtttttaccaaagaaacatg

SEQ ID NO: 73571 - DNA, 433 bp, Arabidopsis thaliana landsberg
caaaccctgacatattatcaaagagcgatttagagagatagattgagaaatggaaaagaagggtgcttcacaatggggacttgtggtgtttcttctagtgtttcttttggtcccaacacatacggagtcttccctgccttctcaacaagaatcactcccagtgatcggttagtgtttctctcacatattcatatatacattaacaaatcaatatccgtaaaaatgattatctaatctagaactcgaaaggaaattaaaactattgaagaaggtctttttggttaactatccatgttttctagaagaaaaaaccaaactaatttcaggagtacatacaattaccaattgaattcgaagtggtgaaattaatatggcttctattaaaattactaaatgggtttttactttttacgattaaaaaaatactattcgt

SEQ ID NO: 73572 - DNA, 457 bp, Arabidopsis thaliana landsberg
  unsure (1)..(457): unsure at all n locations
aagatcacttatgcaaaggctggatttgacctgtcgaacatattttaattgcggttcatatagtccgcgtgatcatatattatagtctaataagattgaatctaaactacaaacacttgtatttttgaataaatctttgtagaaccgactcgatcaaaacataccggacccattacaacatctctaccagactaccactaattaattatatatatgcttatcttaagaattgaaaaacattattagaatgttctagtacctgcatggaatcaactgcatctgtctctgagttaaagtcataaaacgaacttgctgcagtgagtttcatcgagaggaactgaaatccacaaaaaacatgaaacaaaattgagtaatttataaaattaaagcttgtgtttggaaggtntttaaagtgtgtggtaaaatttcggttttttttttggaattttcgaatatt

SEQ ID NO: 73573 - DNA, 142 bp, Arabidopsis thaliana landsberg
ttaaccggctggggtactttccgggggacttaatggatccaccaccatttcacaaacctacatccatagcggcaaagccacaacctatacgctatcgtggtgcatcacatcactatatacggcaatccacctgccccaaaac

SEQ ID NO: 73574 - DNA, 606 bp, Arabidopsis thaliana landsberg
caaacaacaagcttctttggtttctaacataaatgttcttttttaatcattgattggtttcattcacgggtaattatgtggggtatacaatcatttcccaccgttctttaaaaaaaaaaaaaaatgaacacattctcgatttatcggaagacttctcgaagataccaaatcaaccaacgtaccaaagttttattcgaggtttcgagctaacaaaattggaattgagttcctttttctatttttcttcgaaaacaaattctaagaaacttccttgaacatttatatactatgaaaacgtctttttatagtgaaagaagaattgaccacaaatggtacgtaggtgagacaaactatatacgtttcacaagaaaataaacggaaatgtatcaacgtgacctatctttttcattgattacatgtgtgtgtttttaacgaattgcatggaaaactaccacattgtatttgattaaatgtgtatcttcgatcaattcacttcaaattaataacatacttaatacgtgaaacccgaaagaatgtttatataaccatatatatgattatagttattaacatcgagaagttgaaagaagaagaaatccctttttt

SEQ ID NO: 73575 - DNA, 304 bp, Arabidopsis thaliana landsberg
  unsure (1)..(304): unsure at all n locations
tttcactcgtaagcagctcgggtacggtgatggatctttccgagccctcgcccagttttgcaaggatagtggtctccatcaacgnnnnnnnnnnnnnnnnnnnnntcactccccacgtaagtatctctttcgtctcaaggactcaaaaccatccagttgatagctaacgttgcttgtccggggctccacctggaggttaccgcacctatcgggcccagcattgtcaaggcaaacaatcccgcgtctgctatgcatggacttgctctggcccaggtcgccaaccgccaacagagagctggaggct

SEQ ID NO: 73576 - DNA, 493 bp, Arabidopsis thaliana landsberg
ctccaccaggcccgcaccaatggatgggtggtacgcactaattctttttaaggcggctcggaccatacgccctggctcgaagccaaactgccgggattgctgatgtggcacttcaccgatgttttctaccacacggatagcgacaggctggagaatgtatcgccatgggaaatgaagaatgtgggcgtatcaggccttgtagccgccatgacgctcacatccatgaacgaggcaaccgcattataccttgtgaacgaactgagagaaaccgctttcaaacggctggatacggaagcggcgctgagccgcgccgaaatagcaaaaggcggtaaccccgaaacagaatcccatatccttgaagtatggggcaattactaccgcgatgcactcggcaaaatggacaacctgcaaaccggcggtaacactcaaaaagtgaccgcggcgattgcggcagcacaaacagcggtagatgaaaggaccggccaggtgagag

SEQ ID NO: 73577 - DNA, 309 bp, Arabidopsis thaliana landsberg
ggtaaggcatatacagtttccagcacaaaccgagagagaacgggggggggtgaaaccaatgatgctcggctcaacagtagacgtagggtgcaagccctacttaaatggaaacgacacactctatatatccctaactacgaggacactgaacttccctgacgaaccaggacgtgcacacagaagcttcatctacttcaataatggagactctgcgatacaaaacgaaacacgctagactcgatcccaaaagcaaaccaactacatcggacactttatataagtgaaatcatttgcagaaactcctcaatc

SEQ ID NO: 73578 - DNA, 741 bp, Arabidopsis thaliana landsberg
aggtccttctccattattcagagacttcgattttaatttggttctagaaataagtttgtgtttgatactgtataaaaatatgggtgctggaaccaaattaaaatgtgtggttttaatggaaaaatggactgtcaaagagagccaggctggcattttctctccgatgattgcttgtgggtcccgttgtcttcactgtcttaagcacatgcgcttctgcttacgtgtcctattcgcatttaacacttaatcatcatataaacctacctttttttttgttcaccatgtataaaaacagacctcttttaatctgtaacattactacatctcacatttacgaaatggatactatatcttagtgtataatgttatttgaatagtatcttgcgtgtatatctttcttttacatgagtaatcctttaaaagcaatagataaacatggtttcgtaatgtagtggtagtaaactaatacgtcgtcttagattatccctatatagtaatcactttgacaaaatcattaatatattttagtgacttctttttgtttttaaaacagtaaatccaaacggctgctagctcaaatcaaaacagaccacatgagcaccatgtgtcgtttttttaacacatcatattcttcttctctcctatctctatctatctactatcaatgtaattatcttctagttttagttatcttttcccaattgatcttagagttgttataatttgtatagccagtgaaat

SEQ ID NO: 73579 - DNA, 734 bp, Arabidopsis thaliana landsberg
  unsure (1)..(734): unsure at all n locations
atatcctaaagattactatttctagtagttcatttaataatccaattcattcaaatttttttaaatcatttgaatgtatatgtgttgtaagaattgtctagagatccgtggttttgcatgtatttcctgattatactatacagttccattttgcaaggggtgcttcgacataaacgtagtcataaatattgtttccaaagtcgttaatttagacattctttgtgattgattaagttaataaaaggacgacaaaaagataagaagattctctttcttgatgggctctaatatcctgagtgttgtcactataaagtgtttggtaaaatggattttcaataataagatcaaattggaatattagtcaaacgactcaaacctaattaataataaagggacccttaaaattcaaatggtgcaaaatgaggcaaacacagtggatgacaacaagagagagttggttaaggataagtgttactcttctacactagcccacaccacgtacattgttttctttttgttataaaagtttttcacataccacgtatattatatgggttatatcgctatacttttatttatttttatatctatattaagctgataaaaaaaaatcaaactaatatgttatttaatttctatcaaagatnaaatatcaatacaaagctcagtctcacaaatattgtaaggacattagcaaatgcagaatgtagaaattatggaaattgcattctgta

SEQ ID NO: 73580 - DNA, 752 bp, Arabidopsis thaliana landsberg
  unsure (1)..(752): unsure at all n locations
aaaatctcacagaagatctcagttttacgatttaataaattcaaatcgcaatttagttgtgttttctgttaatttgtgattggcttatcaagtatgaatacgacttcgttttatatatagggacagttttccaaagtatattctatagttcttctaaatagatatatttgtagttaatgagctttaggagtgtgtaatctaaatgtagattagacagatataagtaaaatactaaaatcagatttaaaaaacttggttatggaaattaagtaactttgtagtttgtatgaaccatatttacttaatcaaagctttattcttttgggacaaaattctttaagagaaataaaaataaattttatcatcacttgagtcaaacaattaaaaccttataagattaatttatactatttttggaaaacttaaattttttatttataaggcaacacttatagaataagaaacaacctatactaatttttttaaatttactttataatactattttgtaacttacatttttgtttccttttttaagaacactataggataagaaaaaacatatattgcactgaacacttgttgatgtgtggctaattnttaatctaggtataatatattcataatcatagacaaaaaaaatcagtaattatcataatattatctattaagctgccacgtggttagcttaatggtttttttttctttctttttttgctggttaataaataaactccctaactccttgccct

SEQ ID NO: 73581 - DNA, 366 bp, Arabidopsis thaliana landsberg
aaaaacgggacggcattgtatataaggcataaattgtgatttgataagggcgtggatatcggaacgcacatgtattacaataaggactatgccagctaaatgggcaaacatatatatatgatgcgctagaacatatactcgcggatagagacaagtggactctgttaactatgatggggacatacctttgacacagaaaagattaatgaagatgaaccctaatggatggaagcaacgactaaagctattatgattagtgggatgcgcttgaataatgatcggaagggagaaatatactgatggatgctctaccataagaactattatctaaactggaacaagggccctttcattatgaacagcgaa

SEQ ID NO: 73582 - DNA, 554 bp, Arabidopsis thaliana landsberg
  unsure (1)..(554): unsure at all n locations
aggcttacaatagcagagcagatcagtatcgatacggtaggtttttcaaactttttgtgtttcctgttcagtccggtatgcatcaggtcgtcacctgccataacctggggcacgcgtgacacggataaaagtacagctgcataaatccccaggctgctggccatccctgcaaaagcgatcaggccgcccagccatttgccgcttataatttcagcaactgccgggaagcccttttcttccaatatttcagtaccaatgccggtttgctgggttaccagtatcaccatcacatataataaaataaccagcacaaaggatgtgaagaccgaaaccaggtacgattttaccggtttctctacctcctcggcataggtggttacgttgtcccagcccaggcaggtccacattactgtatataaggccatgcccaatgatgagaaaggaatgccttttactgatggcgactgtatgctgaccggccctgtgtgatgcgcgaagatntagcccaacatcatgatatacggtgtgaacacaatcgctcctaaaatcaggga

SEQ ID NO: 73583 - DNA, 612 bp, Arabidopsis thaliana landsberg
  unsure (1)..(612): unsure at all n locations
aattttaaagcaaatactaatcgttttccaatagttgccaattattttatactttgaatgtgaataatatcaataaaataaaaataaaaatgcatttataaattgattgatatttcactattatatcattaactttgaatttttaaaacaagatctactaattaaatgaaagaacaaaatgggattaaatnnnnnnnnnnnnnnnnnnngagctgaagattcttattcttaagaatgcgaatgatgtcaccctttcggatgttgagaaccgatggctcgtcgttgctgtagtttcttaggacacgaacgaagtctatttgactctgaataagaaatggtcgccaaaacagatttgggatcagttatctcaagattattatacaatatatttgatatgatttttttcatacctcttgtgtctctaaagcaaacttttctatcaaactcttaatttgtatcgccttttggataaaaattaaaattaatatattataaagatattgtccacaaaaaaaatgttataaagtattcatactttangtgatatcaatgttatccatcctccgccactcaacagtatctgaagagtacagtcttcggggatatcagttc

SEQ ID NO: 73584 - DNA, 503 bp, Arabidopsis thaliana landsberg
acggcaccgtcccgctcggccgcctcgcgccgtttcgtggagccgtctttgtcttgtccggcgacgatctgcttgcacaggcggcgcagccgggcgggcgtcatgtcgtcacggagccgcccgtccccggtgaggattcgcttgagcagcttgatctcggcgaggcggacggtctcgtcgtccagcacggagaactcgtcggccacgatcttgctcttctgccagctcaggacacctgaatcgagcagcttccccactcgggggagcctcgcctccaggtcgtaggcgaacccgacgagcggctcggccgcctgccacgacaggcccagcgccgcggcaacctcgtgagcgaccccgatgtcccactgccgcggaagatcatgagccgaggtacccgagggctctccatgaccctcgcggcggatgatctcgcggatcgcggcgagcttcccggcgcaggcgtgggcctcggcggcggcccacgagacggtcatcccgtcacc

SEQ ID NO: 73585 - DNA, 204 bp, Arabidopsis thaliana landsberg
taacgccccaccaagacaacaactcaggtcctggagagccctcatatgtttatccattttgataccgccgccaatcaaaagcacgtcagatgtgcccttttccttcatttggccaatgatctcggggaaaaccgtcatatgagcgccggagaggatactcacgccaatggcatccacatcttcctgcaacgcggcatttaccac

SEQ ID NO: 73586 - DNA, 589 bp, Arabidopsis thaliana landsberg
  unsure (1)..(589): unsure at all n locations
cgacgacaaaaaatggagtaatcataaattacacaaataatgtataacgtaattgtcatctagccaacaaaaaaaaagagatcaagacaacaatataaacatctatgtatatactttctccgttacatcaatattgattttctaaaaatgtatgtatgggtttagtttataattattggtttagtgtttagaacagaacatttgtaaaaattactgaaaacagtcctggtcattcttgagaattttcttttaatttgtgaaaggatcttaaaattaacttgctgagtttccaaaagctgttttatatttcttaaaaggtttgaaaaaatgtctgaaaattcgaaccggaaaatagtgtggtaaactatctacacttacacaaacaaattcatatcaattcaaaaataatttgtgttaacacaaataagattgtttcaacaaaataaaaagcttaaggatgtgatcttacaaattaagtacccatttaaaaatgaagaanaagacattaatgttgttaaataggatgtggtgttaacttgtcagttgctcctccccacgttttcttggtctccttatcattatgcaagct

SEQ ID NO: 73587 - DNA, 625 bp, Arabidopsis thaliana landsberg
gactattcatgtttacaatatttacatgcgtagaaaaaatttgttttttgaaaccgacgctcaaattattaagtagcttggttaacagagaaacaacaacaaaaaatgttaaatgaaatagagaatatgtcagaaacaagagaacacatgttatcatttatgtggagaatctacaagagtagacagaaacaaatgtgtaaagggcaaaagggacataagcaagtcttgtgaatcctcaataatgatatctacatgactaatctttgtcctttttcttcttcacttttataattatatatatcgttaataaattttctagaagcacaatctattttaatccttcaccggagttagtcgcaagcgaatttagaagaaacacaatacaaaataactagaataattcacttttatttatgtgaaattagtagaatataagctaactaaaacaacagtagacgaatatctaggtaaaatcttgtacgaaacataaatttgtggttcttgaaattatagcagaaaagaagtccttcttgaaagtttcaccaacttaccaaaaaaaacacgaacgaaaaagaaggaaatctatcttttaaattttattttagaaccgataataaagagtttt

SEQ ID NO: 73588 - DNA, 344 bp, Arabidopsis thaliana landsberg
  unsure (1)..(344): unsure at all n locations
gatatcccgctttttggggatgccggtcggatttgcttagaatttataccgggtgcttctcaacctgacgtaacggcggtcagctgtgctcggcaaaagcctcgagctccggatcgaaatcgacgtcgacaacattgttgaagacggcannnnnnnnnnnnnnnnnnnnnnnnnnnnnnnnnnnnnnnnnnnnnnnnnnnnnnnnnnnnnnnnnnnacgcctcccagatctcggcagggatggcattggaatcggcgacgatcgcgggttccgaacgggccgagcagctgttcgttatcgaccagggcagggcattggggtcgaacccggcattgatcagcgcc

SEQ ID NO: 73589 - DNA, 234 bp, Arabidopsis thaliana landsberg
  unsure (1)..(234): unsure at all n locations
cggactcttaatattcgcatacacaaaaaatcctctgaaaggccggtaaaaccatctcaaaagttctaagaagttgcagtggactattgttggaggtcgcggtaatcgaagtcgagtaagtggtcgtggagatcctggctaatattcccaaagtgagctaatcttcaatatttcttctcttcctcttctactttgttgttcactagcatctataactaagtangttgcccaaaa

SEQ ID NO: 73590 - DNA, 412 bp, Arabidopsis thaliana landsberg
  unsure (1)..(412): unsure at all n locations
caaacgggccgggctcgataccggcttctggttggctgaatcttttctcactgaccgcccagaccgcttgcggtgcacgtccttccgtgcnnnnnnnnnnnnnnnnnnnnnnnnnnnnnnnttgtgacgttgcctgctttagcttcccaactggcaggggcgtaccgaacgttgctgacttcaacacatgggctaggaaactcatgtcgggcaatctgccctcgcccgtcgcctcaagctatagtgccctgatgggcgaaattggacgactggatttaacaaggcgccgcatccttgcgagagcttttcagctagccactctcggtcccgaacttcctcggtagccaccattccctgtctacacaccctagccggagggaaggaccagctacgggaattcagcgcgcaaaaa

SEQ ID NO: 73591 - DNA, 225 bp, Arabidopsis thaliana landsberg
catcgccgatacgaaaatcattagccaccacaatctttacccagccgtcagtgattctccgatcagacaacttcacttcccaagatttgtctgaaaagtccaatttcagctctgcgacgcttcttccttcgatatactctgagaagaagtcttcagggattatctacaccaccccaaaaccaccattgaaacagaagaaaattttttaaattaatcttttccccc

SEQ ID NO: 73592 - DNA, 228 bp, Arabidopsis thaliana landsberg
  unsure (1)..(228): unsure at all n locations
tttatattaatgacacaaagctcttgtactctaagtttatacatcaatcttgttttcatttactttaaactttactaagaagaatcaagatataatagatgaataatattgttatataccttttagttgtcagatttttgatcttaataattgtcttattttgatgtctagaacatcccttgagacttggctgaaaaacttgatataatcagtgaacctaannagcca

SEQ ID NO: 73593 - DNA, 553 bp, Arabidopsis thaliana landsberg
cgggcttgtagctctccaacagccaatgcgcgcagttttctttctccgcgagcaattccgcgtaggtccagcgccggttcgtggcgtcagccccgaccagcgaggccatgccatccggcacgacctcgaccagcgcggtgcgatcgggtgcgtcactcgctgcttcgcgcaatgcatctccggcggtgagatccagaaccggacgcgtagtatcggcgggccaataggagagcgacatcatcagacctccgggatcggaccgccgccgttcggcatcggcttgccggagtcacgccactcgaccgcggcatggaagccgcgctgctcggcgaactccttgaaccagcgcccttcggcggaatggcgcgtaatgccgtcgaacagcgtcgccagggtctgtgtcgaccgcaatcccatgttgtcgagcgcctgattgatcatcaacttctgcatggcgaggtgattggtcggaacggaagccatgcgatcggcatgcgcctcgacacgggcgtcaagctgatcggccggaaccgattcagcaccagccccactc

SEQ ID NO: 73594 - DNA, 211 bp, Arabidopsis thaliana landsberg
tatacaatgactatatattaagaccgactcaaattatttaaaggttatgtgcaaattttcattgtacatgtgaatatctaaacttttttcacttgtgtgtttatatatcttatcttctgtattccattatttcttatttactaaagaaattatggaaaatgatggcaaagttgacaaagaggcaacaattttatacatacacactgacgtc

SEQ ID NO: 73595 - DNA, 525 bp, Arabidopsis thaliana landsberg
caaggcatcaaccttttaccctttccataaaatattttactctttcgattaccttgctcaccttgctggggacatccctatcgatttaattgccagcgcggcagccttaacagtgacaccaataattcacactaccatctcaaaatcaattgactataaataaataattgaaaccaaaatatttcaatttttgaaagaagtgatttaaagaatgtttgctgacaatgaaaaactaccaaatcgacaggtatactctcataaatcgtctgattctggtaaatattgttggaatccacaatactctcataaatcgtctgattgaaacgtttaagatttggagttatcaaaactagacttctgttgaagttatgtccatttctatgattcaaatttagttttgataaagtattattatttttcgcagagtgtacaatatttgaagtctgcattatggtagcaatcaatttggtaaaccaaacaaacaaattgaaatggggtcaaaaaattcacctcgttgcttaatcg

SEQ ID NO: 73596 - DNA, 224 bp, Arabidopsis thaliana landsberg
gagaataaattgggtatgagtgggaaggagtggagatggagaagcagagagtgaagtggatgatatatatgttcaacaaagagagagagatggagaaggctaagcttgacaatcagagacggaggcttgagacggagaggatgattctcatgttacggcggagtgaaattgagttgaatgagttacagtcttcgggtacacgggttgacccgagttccgactaa

SEQ ID NO: 73597 - DNA, 492 bp, Arabidopsis thaliana landsberg
atgcgtatacttccaccttttcggatttggatggtagtcggtcgcggatgggtgcgggagcacacgcaacggcttgaacatcaattcttttcctgtcatgttcagagtgagatgagatagctgccagccgcactctgccgttttggcctgctcgatgcggatggtccctccgggatagagcgtgcccagaattccccagccgttatcaacctgccggaataggtgtccttcaattcgaaccacacgcaagtctgttgggtcgatccatatttcgccgccaatgcccgtcaagattcgagattccaatggtgggcgaaaaaaatgccgaatccggttcaatggtatgcggatcgcgactccgtccgacgtctggacggagccttcaaactgattgaataacgcgtcaggcaacaggcgcatcacgccggtaattcgcatcgcgtcgcggtcttcgttttggcgaccgtgttgttgcgcacccggatcggaccc

SEQ ID NO: 73598 - DNA, 530 bp, Arabidopsis thaliana landsberg
  unsure (1)..(530): unsure at all n locations
acaaagtttgaaataaaccaaagtcacctaacaaattacaattaagaaatactgttcaattataatgggatttggggtcaaccattttaaaaaaatgtacaagaaaatactgaaaccacgcgcttgaattccgagagtgaggaatatctttgttctcaaagaatttcagtcaaagaagccaacagaatcgacggttgagatcgatggagcaaccgctagtacgttgatcaatacacaaaacaagccacgtcgtaagatctagacacgtggtatgacttacatcctctatgacttcactgtcccatggagtcatggacctaagcattccagtcacttacctcaccatcccttctctaatagtgaacctataacaagcccttttattgcatctatggtctaacatttgtattgcactgaatatatatttatacatgtttcgtagattactagaatctgattggtttggttactcgtaatatgatcagtagtctaattatctacgaatttttcccaaccagacaaaanaaaaa

SEQ ID NO: 73599 - DNA, 598 bp, Arabidopsis thaliana landsberg
  unsure (1)..(598): unsure at all n locations
ccgccacatttgtgggtgccgcgcagcacatgtcttggtttggcgttggccatttccttgatgggggcgggggcggtaaagccttgtcgttgccggtcagcacgatgcagcgcaccgtgtcgtcatcggtcatttcggtcaggtactggccgatcagtttccgcacttccaggttcagcgcgttgcgcgcttccggacgattgattcggatcaggccgacgccctcggcggggcgttcggtgatgacgacgggtgctgtcatgaaaaactcctggatgccttgatgatgtgggtggttactgcttggcgagaccgatatcgaccagcacggccttgatgtcgttgtagtccttggcgatatccttgctgaactgctcgtggccgacaaaatcatcggaccagtaattcttgtcgagatcggctttccattccggngtggaagtcaccttgcgcagtacgccttcccagtacgcaatctgcgtcggcgtgatgcctttgggcgccatgatcgcgcgccagccgccgtagaccaggttcgcaccctgttccttcccagtcggcacctgcgcgaatgcgccggggaatcgttgttccaaat

SEQ ID NO: 73600 - DNA, 450 bp, Arabidopsis thaliana landsberg
  unsure (1)..(450): unsure at all n locations
aacccgagtcccggggcgaagtcccggtcggaggtctctcncgagttctaggcgcacgggcggctgcggggctcgggttcctcgggcaggctcccgtccgtgaccgagttctgcgactgggtgggcagcgggtcccgccgcccgatgtaggcgtcgcatgaccgggtgcccggcggtcagcgggtcgccctctagggcgatcctgtcgtcgtgctgggtcacgcccttgacctgcgcaacagcggctaccttgccctggccggtgatcagggcgaaccgctcggagcttgcccgggtccggttcatattccacacgccgcgcccggcttgccacgcctcgggctcggtcatgcgcgggaagtagccgatgtggtcgcggccgagcgggtcatcggcgacggtctggtagtcgccgagtttgatgcggatcgccacgttgtcctcctgctg

SEQ ID NO: 73601 - DNA, 607 bp, Arabidopsis thaliana landsberg
ctagtttatgcgcatggttttcattgattagtcacggacttatccattatcaatctcaagatcctcgggtttcttatttgcgcgtctctccttcaatgtctccaactttataccgtcaagaggccacaactccctaaattgaaggcataatcctaactttatccttaacaacgtttctctaaaggtaatcaaaataatcattcatcattacaaaactacgaaccgtgggcgctgacctctcctgaaagccacaaaacaaaacttctcatcctcaaacccacgtaggggaacaccctttgtacgctacaaaagcaaagttttgggtttggaatcatcagcaaacatagagcagactaaaatgtatatatatttgctgaagacaactccaagcaaaagtaaggaaccttgtaggaacgctgagacgaagttctctgcaaccgctgaacaaaatgacagtactttccagtgttttccagcggacactttccatcatgagggcactgcatttacaagccccttctttgtgttacaatacattcacgtaatcatattcataaaatctgtacatcaagttcatgacctagtgtttgacaactggatgagagtt

SEQ ID NO: 73602 - DNA, 309 bp, Arabidopsis thaliana landsberg
atattggttttgattaatttctagtgggactaatgataatgatactattttgttgtttttgtctttaaacatttcaatcatacttattcaaagaacatctaccaaaataaataaacaatattaattcaagtgggtttaaaccggtcccatcatccaggaccattatgttttcatcttataagtcttcatagtaattctctccaaaatatttataaatgtaaatcagatttaaacttctatctgcttgacatatgacaaatataaacttctagttgcctaccatgttctattattgtcaaactgtccaat

SEQ ID NO: 73603 - DNA, 405 bp, Arabidopsis thaliana landsberg
cagctagcttctcgacctccttacatgtgttatggttcatgttctatgcccacaaaaaaaaaatatatggatatatatatatgagatatatacgatatatacatatatatgtggtatatatatatgatatatacatatatatgtggtatgtatatcgtatatattatacatataagatatatataatatataataacaaattacaaggcatggtgagcggagcacttgggaggtgttggcagctgatccactttcatggtatttaggtgtctcctttatgagcttctgtatgtttggaaatgcgttacaattaaacattgcaatgttaaaagaagcaatacctgggaaggcatgagcccaaccccaccgaggccactgggccaagctcttggcttccttcccatg

SEQ ID NO: 73604 - DNA, 510 bp, Arabidopsis thaliana landsberg
gttttacagtagtaactgtagagaagtccatcattttatttcagaagcccaattgaaaagcccatttggagacggactgaattaaataataatcgaattcggcggagactccaactattgtcggcccatcaaacagtttctccggtggtttgagaactaactgaaatgtacgaaattaacctccgtggcttacgtgttctgatcggggaatctttccgccgaatctgagtttacgtttttttttggtgtcagtctcatagttttctggttttaaaacggaaaatatatgcgttagggtattgctggataacgaggaaggagtcaacgaaggaagaagagggagatgaaggcgttggggtattggttaatggtggttggttcactgagactagcttctgtttggtttggtttcttcaacatttgggctcttcgtcttgctgtcttctctcagaccaccagttcagttctccctttttaatctctattttaaactgttcttgatttgatagt

SEQ ID NO: 73605 - DNA, 493 bp, Arabidopsis thaliana landsberg
gacgaccggcccggacggtccgcacgcgacgcccttgtggttctactgggttggccagcacttctggctgtactcgatcacgttcgcgcagcggtgggccgacctgatgcgcgatccgcgcatcggcatcaccgtcgacgcggggggcgactacttcgacctgcacggcgtcgagatcaccggcaccgtcgaggtgatcggcgaggtcccgcgcaccggcgagccgaacgagcagctggccgcgatcgagccggcgttcgtgaagaagaacttcgggctggacgagatgttccacgaccagaagcacgcctggctgcgggtcaccccgtccaagatcgccagctgggacttccgaaagatcgctgcgggcgcctcctcctgaacttgttgtcgcggtgtgatcttgttgcgctctcggtgtcatgacgcttcatgtgcaccaagatcgtgaccagcgcgccgtgcaacaagatcggggcaacatgatcgggac

SEQ ID NO: 73606 - DNA, 127 bp, Arabidopsis thaliana landsberg
caacataatggtgacgacggcgcgtgaagagccatgtctggtttaaacggggaggagaggaggtcgtggggtgtacgacacgactttggtaaatgagtgggatcaggagaagcttctcggcacatga

SEQ ID NO: 73607 - DNA, 584 bp, Arabidopsis thaliana landsberg
atgagtatctctctttagacatttcttaatcaattttcaactcttttatgtgttcattatacaagaattaaattaaactcatgaatggtggggagtaatgttccaagcagtctcacgacacacatatatttaatatgacatttcattgctttcggtaatatctattttaaactatattagaaaacaatatgtgtcgatatttttgaatcaatttcaattgtgtagcgtcccatcaaacaaatataaagatatccatttttttgtttccatattcgatcatctatcttgttctatatgatcattttttattgacgtcagaaaagatgaagaagaagaagataatctcttattatatttctaatttagcatcttcgtataatgttatctttctttagttcattttaaataccgatatatcagttgaagtacgggaacatttaagataaaatcattaaataagctatatactatcaaatttattttaaatggtctgactaaaatatatttttcgttagattgtgaaaactaaaagtaaaacacttacgctaaacattgtttatatatccataattaaaagtaatatt

SEQ ID NO: 73608 - DNA, 580 bp, Arabidopsis thaliana landsberg
cacccggttgcccgccgcgagcaccaccgccggcgccgctttaacgtttccttggccagcggccgggagaagggggtggcgaccagcggctcgaccgtcacgccatcggaacgggcgtccaccagcagccactgctcaccggccggcagcagcagcagtccgtcgccggtggcgcccagcacgcgttcggcggtgcccgacacctggccggccgcggcatcgaagtccaggtcggcatcgatggccaccccggccacccgttcgccgccagccagggcctcggccagtggcggatcggtgacgaccagggtggccagcgcggtgctggccaccggcccgggcaccagtgccttggcggcctcgtcaaccatcgcgcacagatcttcgagccgcccgccggtgccgccgtactcctcggcaacagccactccgaacaggcccagttcggccagccgggcgaaaaccggcttccaggcgttggtttcgcccagttcgacggcgcgaatcgcctcggctgcacccgccgtggcggcccagtcgcggaccagctcacgggcggcgagctgttcgtcggtgatcg

SEQ ID NO: 73609 - DNA, 564 bp, Arabidopsis thaliana landsberg
tagcaagtaacattgcttctttgactccaaacactcatctataatcttccctcgaaccgagtctttatattcaggccgtggagcacccgcaaaggtgaatagatactcgcgttttcgagaccgcattagctcctgccactccacaatttcatccactgatcttggatggaaacaagtcggatacggaatagcgtaatcattcttccaagaactcgattcgatagacaacatcgacatgttccgcgactccggtaagaacctaagcttgcttccccaatcagattcattatcagtctgtctcctgaaatcccaagcaatccttcctgaaaccaagaaatggtctctaccagacattcgaccccactctttctgtaccacaagccaatccatcagctcatgagacgaagaatctcttaccgtaatgttgaaaccccaaagatacctactcatatcaagacctgcgtaaaacggcacgaaaaccgcagacgctagtgacgaatcattggtcaaacatctgtaattcatcatcttggtgtggaatatcacctcgagcataaactgatt

SEQ ID NO: 73610 - DNA, 348 bp, Arabidopsis thaliana landsberg
ctctgcaggacgcgcacacaaggagctttctcccagatctgtgtcttgcaccccatatccctggatggcccagagcagacttccttcacaccaacccgactatatcacgagggctggggagtaaggctacataaccccttcgtgtctgctattctggaacactcatgcttagtcacatgccccacatagaacctgccttagtgctcacatactacgtagatacacttacgctgtgaaatgttgagtaaaggataatacttgaggactgccaacttacacaaaccgttacatgctccagagaaccgaataggaatgatagacctcggaaggatcaaacctaaggtcgat

SEQ ID NO: 73611 - DNA, 575 bp, Arabidopsis thaliana landsberg
cttgttattactccaacccgttttaccctggcccgattcgcggttaccgatatcttccggaatgtaataatacatgggttcatgtttgggataacagtcctgagtctgatctgcgccttcattgtaatcaaggaaacggaaatcagttacgcaatcacgcttactgaagacaagaaggtttttccattcattgaaagtcactggatgatcaagaaattgataatccatcacgattttttttcccgatgtcgttgtgtacatcggagcaacgtggaaccaccatttgaaacgagtacgaatgatgtatgaatttgtgaggagaagaaatgctttttgagatttcgttccagttttctggaactcatccgaagtccaaacgtgagcacgatctgaacattcagacttacgcttgatataagggttcattctgttccagatattctgaagctcgctgtcagcaacaggcgtaggaacatagtcttcctcttcattgacatcatttgtgccgtcaaccgagccgttgtggaattgagtttgcttataagagcagcaatgtctgccctgtcgagattact

SEQ ID NO: 73612 - DNA, 398 bp, Arabidopsis thaliana landsberg
atagctgcttatgctgaccgcgcgtagatcatctcaaggcggtactgctaggcatacgcaagtatatgttcacgatggatcggacctgtctcacccgagtcagtggacacgcttgttctaagaatcacggttgagctctatagctacatccaatacatgacactgggctcttactgagctcaattcatctcatgtccatgctagcttaacagaggccctcattggcaattgtgaatgatcaagaatgtcaagactctgtgctgaggaacataactggttctgttcatgaccctaacactgctggccccaatcccttcccagcctaataaggcgtcattgatcatgttatgaccgtaaccattagccagatgtcgataaacatcatgtacacttgtcca

SEQ ID NO: 73613 - DNA, 299 bp, Arabidopsis thaliana landsberg
aagtctaccttattgttggggtaacttaacgtttcttctttttcttgatctatcgaacaaccaggtgaatgggaacctgtcttcctttgtgcctggtctaccatcagtgcttgagtacttgccgctgcttgataataacttccacggttcgttcttgtacaacccactggtcaatcaaacaagactcacagtattcaaattgtcatcaaaagttagtgtgatccaagttcagactgagagttcatgggctccattgcttcaaattgaagatgttatttttatcgaattgcagttttggc

SEQ ID NO: 73614 - DNA, 482 bp, Arabidopsis thaliana landsberg
acagacttgacttttttctgtctcatgattgttttgtttttatttatcattgtaggagtaattggaagaactggtgccgggaggtcctcgatcttgaatgcgcttttccggcttactcctgtttgtagtggagagatattggtggatggaataaacataagccatcttccgataagagaactccgttcttgcctcgctgttgttcctcagagcccttttctgtttcaaggatcactgaggtgagaacttaactccttcaattcactaaccaaaggtgttgcctgcagtttcataatgaaaaaaagttgtggttctcgtagggataaccttgatcctcttgggttgagtgaggattggagaatctgggagatcctagacaagtgtaaagttaaggcagcggtagaaagtgtaggagggttagattcatatgtaaaggaatctggttgttccttttctgtggacagaaacagcttttgtgcctt

SEQ ID NO: 73615 - DNA, 466 bp, Arabidopsis thaliana landsberg
  unsure (1)..(466): unsure at all n locations
gaccgccatataagtcgaattgccgagtgtagcatccactttctcaagtagctccctgggcaaccgttgnnnnnnnnnnnnnnnnnncaaatgcatacagagnnnnnnnnnnnnnnnnnnnnnnnnnnnnnnnnnnnnnnnnnnnnnnnnnnnnnnnnnnnnnnngcatggttgccgtcatcaagaaatatatatagaagtgtacgagtgtcacatagccatccatgcgctcatagttgctccagaagctcttcatcgcatgctctcccaagagatccgcaaagaacatgaccccaaggagcatcgcgccagtaaccaaaagccaggagaaccgcggtcggtactgcgcgtcatataaggcaaggagtacccacgccgccaagcgacctctaccaggatgcggaatgcgaaattcttcccagtgatatagggaaagaacaaattacccganacgatgagcaccaca

SEQ ID NO: 73616 - DNA, 588 bp, Arabidopsis thaliana landsberg
catcatcatcatcatcatcatcctcctctttttaaagtagttttttttcacacttatttttccttttttctgcaatttacacagcccccacagcgcccaactccgcctcggccttcatcgccccgaacatcaccttcatcctgctcgaccttgatcggtggacgacctttggcggcttctgtccgatcagtcacttcgccatacggtaccgcgtcaaggactttagctctacaagcaatcgagcttctgaatcacaacaacagcagccttggacgaccgtctcctcgcacatcaagcccgagtacggcgccatgtacgtcattcgtgagctgctccccggcacctggtacgagctggcggtgacggccactaacgaggcgggcgacaccgaggcgcggtacctctttgcgacgttgacggtgctgggcgccaccatggagccgctccatcatcaccacctcgaaggatacaatcgaagacatttaataggaggaggaggaggagttaatggaggaggggggggggggaccacctggagagcgcctctctagattccgtgatttcaattcggccccctgccccattttg

SEQ ID NO: 73617 - DNA, 685 bp, Arabidopsis thaliana landsberg
ctgacactggcatatctttaacctccataactctgcaaattaaagattcagagagtaagtaagtacaaccaaaaaaatctttatttttcttctccaaaagagttattataaaaagaaaaaaaaaagataagaacatttatatatattcccctcaaatctctctctgtctcaaactgtttgtctacagacgacaagtagattccttttcctttgctttctcagcatccaataattgtcatattatttctccattaagattcttgtttctttatttcccgagattattttcttgatttcctcctctgcttcctcttcccggagcttgttttttcaaaggtatgaaactgaatttagagtctttcttacttgtaaaaaatcttgctttgctttttttggattcattagatatgatttctgggtcttaaaaatttatggaattttatgaatcttatggaatcggtttctacttttgttgagatttatctcactataggtgaaggctacttatagaatcatcagctattacttggtctctctttctatctatatatagatctctttttatcctgaaaacgtgtttgacgttttgtccgaaattgagggttcttgaaatgtaactgaaattaaaaagaatttaatcttcgctttgtgtgttacttgaaagtgagatcaagattatagacag

SEQ ID NO: 73618 - DNA, 461 bp, Arabidopsis thaliana landsberg
  unsure (1)..(461): unsure at all n locations
tctcgacccataacattgttccatcaagattttttcgctgtttattatgcccgttattgctggatattataagagcatgtacgcctgcttttgtaatcttttcaggtactagagagctttcacctaacaaatctagcattattatctaagatgatttccttgattcatctcaatatgttttcaaagcttaacgtaaatccaaatttttactcgtgtgatttaataaattaatagtgattaacttagtatcattttgaatattcaagcaaacttctacgagatcaaattgaaccaataaaactctctacataggtcggaatcaaaaccaaatttgagtttctatctcatcgattttctcgtttgtaacaannnnnnnnnnnnnnnnnnnnnnnnnnnnnnnnnnnnnnnnnnnnnnnnnnnnnnnnnnnntttttcatgtgagaaattcttctgacacttta

SEQ ID NO: 73619 - DNA, 323 bp, Arabidopsis thaliana landsberg
gaaaaccctaatctttgtgtttaacaaccagtgtgaatcttcatctgaattcaaaatttcataaaagtggcgggttttccgggctttacccttcccatcatcattatgtctccttggtcgcaacattctatcatcagtgtcatctgagacacatttagaactaagcaactcggaccgaggatcaactgaattcttaccagaaggcaatggatgcaatctactcgcagatggtgaaccaggagtaacagaatttgaaggaaactgggtacagtttggatcaaacccgggaagacaggatttttgggcgggatttggcttaaaaa

SEQ ID NO: 73620 - DNA, 345 bp, Arabidopsis thaliana landsberg
ttaatgttgtgaacaaagaccccaacccaaaataaagatcagatcgtgtctggtgcgtctattattaaaaaacaatgtaatcgaatcttttataagcataactggatgattagaacctatttcctttcctggaggtgggaccactctcatgatcagactcattaggagtatagcgcaacagagctgactccatgtacaactctgcttgaacatatcacccgtgcatcactaccaggctactgataaagagaagaccggcctagtggtataaagccatcaaatagttagaggagctatgcgatcctgtatcatcctagaatgaagggagaggttcttgcatacatt

SEQ ID NO: 73621 - DNA, 550 bp, Arabidopsis thaliana landsberg
acttcaccgacactagcggttgcggcgctagccgctccggcagttgcgccaacaccaccaacgggcgatatcgcgctgaccgctgttctggccacgtcggcagttgggcttgcgattagctccaaagctggaatcttcgcagagaccgtagcgctagcgacgcccgcactggcattcactgcggtaataagcaccttgagagcaaccgtagtcgcaaccgtatcgcttatgttcgacgttgtttgcgccgtgatagaaagacctgagattgaccctgggtctacctctgtcctctcgtacatcgccgcacaatagctaacagcggcgccgttatgtccgtcgaaccgctcctgtccggagccagccgaaaaagacgtggaaccagacgaacagcgcaccgcgcggtgagccagagtcagcgcgcggttagaggtcgttaccgttggggacgtctgtggcgaactcgatgaacttggagagggtatggccggaagctccatcgggttggccggatcaacgccccctgtatgctgagatagttgcccacatg

SEQ ID NO: 73622 - DNA, 556 bp, Arabidopsis thaliana landsberg
agtcgctcgactgtcatgtttgtgggaggcattttgatggtgcggagcagggaagtggttggctttggtaacagccctgagtgacagagacaaaggcggagctttggagagaaccttgctgtgggtggtaacttagtggcgctatctggacccgtgcacggagcccgtatgtcctgaacgactaaagttaccgggcagggtgaaaaatgaaatacagtgaagaccaaaaactttggataatattggccctacacctgcacgccggaaattttacgttacaatgaggattttagttggagagagtgtgaacgctagttcaggctagaccttttctgccatcaggatggaacccttttttgagttaaaacgatggcggaaaccgggtacggtgaacgacagcggccgccttggcaagtggccgttttcattcacacaataatcattatgctactcaatactctcacttcatccttcacgtcttatttttaccttaatttagctcatgatagttactaaatttcactttgattttatcttttctcgggacacgatctaa

SEQ ID NO: 73623 - DNA, 481 bp, Arabidopsis thaliana landsberg
aagacccgacagagttttatgcgtggcatatgcgcgtcagattgcatgttttttggatgaatattttacgtctgggcgcggggttgatcagcagcttgatttatagttgcaaaagccggcgccgcttgaagcttgtaaagttccggcgaaggaggccgagaattctccgggcaccgtgatcgaagatgcgcgcaacaatggaaagctgtttggagtgctgctcgcgcatgccctctcgtgtggccagacgagagtcgtgaatatcaacacggcgtctcttggcttaaggcgggcggtaaacccggccacgttccatacctatacgcatgaagagccgattgatccgaaaatgggttattagcttgaagtgacctactttcagaaccagttgctggcagcctttaaggatttttcttgttgccttggacggtataaaggagggtgatcagaccctattggatcgaaccgctgtgcattgggc

SEQ ID NO: 73624 - DNA, 442 bp, Arabidopsis thaliana landsberg
aggaagcgctatatgcggggctatgataacaatcttcacatattcttaggatagcaaacaccaggggttcagggccgtggcgcccattacctcgcgcacgcctattttccgggtgcgcagatcagctatatatgcggtcagagcattcattcctaaacagctgaagaaaatagccgccaagggtaaaaaggcgggcaactggcccatagttttctcatgccggaacttagcctggaaatcatcatgtgcagaagctgtctcaaagggcgtggcattgtggtattgttttaaaatacgcgctgtctcctgcatggctttaccggcgcttatggcatggttaacgcgcacgatggtgaattttgcgcggtgaaatacattcatgtaaaaacaggggtggtttcgcaggggtcgacttagattgcataaccctatcctttaccat

SEQ ID NO: 73625 - DNA, 5378 bp, Arabidopsis thaliana landsberg
cctgctgaaaaagaaaacttgggtttgtgtacattgactaaacgggcctcccccctacttgtttttgaattaccaagttttacttaggtgtttgcatagtgtattgatcatattctatatacaggtcttataatctgtacttatgttggagtactcttatgcctgttctgctcttatgttagatctaggttttttatctcatggtctctaattctggaatctataaattttgctttatatcttagatttatgagatagtcaacctagcgaatgagctcctccctccattgccagaaggagttatctctcttcctactagcacaaacgctcttgtgaaaggttcatgccaaaagaaatttagtccaagtacttcaggaaaacaagaagatattctaaaaatttcaccaagagaaaaattacttggtgatcaacctgaacttctgcagcagtttggattggatcttcttccagttttagtgcaggtaatttttctctgcgttggctacaagataatgctcatactacctgctgttttgtctaattattcttgttttcttttgcaacagatctatggttctagtgtcaatggtacgattcgccataaatgtctctcagtcattggaaagttgatgtatttcagcagttcagaaatgattcaatctctaattggtgacgcaaatatttcgaggtatgctgtttacgatataaattaagtttgacacgacagtgtgtgcaacttcttacatttttttcttcttatgtagcttcttggctggtgtcttggcatggaaagacccacaggtcttggttcctgctctacaagttgcagagattttgatggaaaagcttcctgaaacattctcgaaagtgtttgtgagggaaggggtggtccatgctgtacatcaacttgtcttggttggtaaaccatcccatgcctacctactgataaggacaatgactgtgtacccggatctgcacgatctaggcgttatagacggcgcagtagtaatgccaattccgatggaaaccagtcggaagagcctaagaatcctgcgtcccttaccataggggcaaaccataattcccttgatactcctacagctagcttcatgctaagggaaacagttagttcctgcgccaaagcattcaaagacaagtacttcccgtctgatggtggggatgttgatgttggagttacagatgatcttttacatctgaagaatctttgcacgaagctaactgctggtatagatgatcataaagtgaaaggaaagggaaaatctaaagcctctgggccattccttggcgatttctctgctagcaaggaagagtacttgattggtgtcatttctgagatacttggcgagataagtaaaggggatggtgtctcaacttttgagtttattggcagtggtgtggttgcagcattgcttaactatttttcttgtggatacttttccaaagagaagatctccgaacttaatttgcccaaacttcgccaggagggactcagaaggtttaaagcttttctagaagtcgctcttccttttgatggtaatgagggaaaggtccctcctatgacagttttgattcagaaacttcaaaatgctttatcgtcactggagcgctttcctgttgtccttagccatccctcaaggtcactaagtggaagtgcccggctctcctcgggtttgagtgctttggcacatcctttaaagttgcgattatgccgagcatctggagagaaaacactacgtgattactcctccaatattgtacttatagatccattggcaagcttagcagcagtggaggaatttctgtggccccgagttcaacggagtgaatctgctctgaagccggcagcgcctattggcaatacagagccaggcacgttacctagcggtgctggtgtttcatcaccatcttcgtcaactccagcttcaaccactcgtcgtcattcttctagatctcgatcggcaattaacatcggtgatacttcaaagaaagatcctgtgcatgagaaaggtaccagctcatcgaaaggaaaaggtaaaggcgttatgaaaccggctcaggcggataaggggcctcaaacaaggagcaatgctcaaaagagagctgttcttgacaaagatactcaaatgaaaccagctagcggagactccagttctgaggcatgttacagtgctaagtttttgataacataaatgttttacttcgttacatcatgatcttgtggtgtgatttacttactcaacacaatcttacttgtatgccttgcaggatgaggaattggaaatatccccagtcgacattgatgatgccttggtgattgaagaggatgacatttctgatgatgaagatgatgataatgaagatgtaagttgtcctttggttttcttctccgcgattgttgtttttgctaacaccgtaatagatattgcatttggcaataaagcttgacagctttcatattttcgaattatcttgccttggtgagtctgttttgttgataagccgaactcacttggaaccttttctttttagaatagaccaagtagatttactagcttatgcccctatttctcatatttatctcgctgctatcaataactttggctttgtaccttacttgtgctcttgattttctttcaataccttcacaatcatatatactttcatgtccaggttttggatgacagtcttcccatgtgcacgcctgataaagtccatgatgtgaaattggtggactcagtggatgatgatggtctagcaaccagcggccgacaaatgaatccagcttctggaggcactagtggagccgcagcagcaagggcatctgattctattgatactggcattgggaattcctatggttctagaggtgcactctcctttgctgctgcagcgatggctgggcttggagctgccagtggtagaggtatcaggggaagtagggacttgcatggacgtaccctaaatcgaagttcagatgagccctctaagttgatatttactgcggcaggaaaacaacttagtaggcatttgacgatttatcaggctgtacagcgacaacttatgctagatgaagatgatgatgacaggtttggtggcagtgatctagtctcaagtgatggaagcagattcaatgatatttacaccatcatgtaccagaggccagacagccaagtgaataggttgtctgttggtggagcaagttctaccacaccgtcaaaatccacgaaatctgctactaccaattccagtgtagaatctcagtcacatagggcatctcttttggatagtatcttacaaggggagcttccatgcgaccttgagaagtcgaattctacatataatgttctggcactgttacgtgtattagagggtttaaatcagctttgccctcgtttaagagcccaaactctttccgatcgttttgcagagggtaaaattacaagtctagatgatctgagtacaactgctgctaaggttcctcttgatgaatttgtcaatagcaaacttacacccaaattggctcgacaaatccaggatgcgcttgctttgtgcagtggaagtcttccctcttggtgctaccagttgactagagcatgcccatttttgtttccgtttcaaacccggagacagtatttctactcgactgcttttgggttgtctcgtgcattgaatcgtttgcagcagcagcaaggtgctgacggcagtgggtctacaaatgaacgagagatgagaatagggagattgcagcgccagaaagtccgtgtatcccgaaataggatattagattctgctgcaaaagttatggagatgtattctagccagaaagctgtgcttgaagtagaatattttggtgaagttggtactggtctaggccctacccttgagttttacacacttctaagccatgatctgcaaaaggcttccctagggatgtggagatcaagttctggtgacaaggtatctatgcaaattgatagagatgagattgaagacggaaaaccatctgcagctaacagagatatagttctggcaccacttgggttgtttcctcgaccttggccctcaacagctgacatatctgaaggtggtcagtttcataaagtcattgaatatttccgccttttagggcgtgtgatggccaaagcacttcaagatggacggctattggacgtcccattgagtacagcgttttataaacttattcttggtcaagtgagtttttttttttactactagtgtttgtttagttaaaagtgaaatagtggtttctactttttcacttctgtcggcctttgctaataagttcgtcctctttcattgactaagcaggagcttgatttgcatgatattgtattatttgacgctgaacttggcaagaccttgcaagagctgcgtgttgttgttgcccgcaagcactatctggagggagtaggtggtgacaatagcagcacgatttctgatttatgtttacgtggatgccgaatagaagatctctccttggaattcacgctacctggctatcctgagtacatcctgagatcaggagatgaaattgtactgtcttagcttacaccccacctcttactattcttttagaacatgtccatgattgctgatgacgtgctgttttgttacaggttgatattactaatcttgaggagtatatatcccttgtcgttgatgctactgtcaagagaggagtcactcggcagatcgaagccttcagatctggattcaatcaggttaacagtctcgcagactttctgtctctttctttgtctattgcctttggcttctaaacataatatagaaaattctgtagattagagacttgcattttttctttttagggcggaccttaaacttttaccttcatttgttaacttacaaaacctttctgtttctgcacataattatcaggtgtttgacataacatctctacaaatattcaccccttctgagctggactatttgctgtgtggtcgtagagagttgtgggaggtgaatttttcacttttcaatttccataaccaagagacttgaatcccttagatgtaagaaaatatcatttctaaaactttcttttcttgcaggtggagactcttgctgaacatatcaaatttgatcatgggtataatgccaaaagtccggcaatcattaacgtatgttatccatcaagttgttagatatcatatctttatttattcttacctttccttttgtttctgaaccgttgattactttctgattctgattttcaccccaccctgtagttactggagatcatgggagaacttacagcagatcagcagagggctttctgccaatttgttactggagcttctaggcttccttct

SEQ ID NO: 73626 - DNA, 232 bp, Arabidopsis thaliana landsberg
ctctgaaaaagccaagggacgaaaagggaaactcaaaagcgagtaaatgagctttgcaattttagaaagaaagaatacaacagtaggaagaatgacataccaccagagcatgcgacaaagaggacagcaaatgaaaactacaggtgcgtacacagccaaaaccgcatggcaatttgacactacacacaggaaccaaaacccaaaaaacaaaacatcgcataacgataatgta

SEQ ID NO: 73627 - DNA, 383 bp, Arabidopsis thaliana landsberg
tatctccttttttgtatttgtttttctatgttgtttcggggagataatcatgattcttctcttgcgttcctgtcaatattatttaaaatatgagaaaaatactctgttttttccaaggaagttcattgacatcattacttttgatgttttagttagttatttattaccttggatgttaattaactaatacaattgcttaatgtctgtcctaggatccttgtgttgttcttgttggactactggtagttttgtctacatttcaacataaccatgaggcaaggtattatgaggtatggattttctcacggtcttttagtctctctgttgcctagtgtgtttttgtgatgcttgccaaactaattatttttttacccacactaggc

SEQ ID NO: 73628 - DNA, 126 bp, Arabidopsis thaliana landsberg
tgtatatttttccccggggcccaccctttccccagaaaacgccctcctaaaagctaacacagatctctataacgggcggggatcgggtgtgagtgttagggagatgagccatcggggaaaagagtt

SEQ ID NO: 73629 - DNA, 507 bp, Arabidopsis thaliana landsberg
atccgcctggccaaagagaatctcattgccaagctgatcgaaatccaggaagagatttatattctttggatcgcatgaacgccatcaaagaggccatcgacaacacccagattcactgaccggaccccttaaaaatttacgatgatacgggaagccggcgcgaaatgccggcttctttgtttcgggcttacttgaggtcggcctgcgtgagcgtgccgatcagattctgcaactgctcaaacacgctttcgttcgcgggcaggctgttttttgagttcggtggtcagtaccggagtgtggcgctccacccacatgtagcggtccaggctgcccggaaaattacccaggcttatacacggcaggtagtccgtagcggacttttttattgagtttggggccatcaaaatccatcacatgcaatggcgtgtgaattgacaccacgaagtctggcgcgtaatcggcccgatggcgcatcaagcacttggtcttcaactcgtcgccggcacc

SEQ ID NO: 73630 - DNA, 616 bp, Arabidopsis thaliana landsberg
cgaaacagagcaccaaccgtatttcaccttttttcttctgtgtccaccgtgtttcatctgcaggggctggtgaaaaacctggaaagtcttgagcttcgcacgagatccaacgttcctgaatccgtttctaagaacagagagaatctgacattgatcaccaagaccagatttacaattacgaaagatcaaatcatgagctttatctccttcaagcaactccataagcccaagctcgtcagcaaaagatcgatcagaagaagaatcgcagcttccagattcagagatggttgatccatcttgctcagaatcatcaaaaacagcttcgacttgggttctcacgtaatccattgaaaaataggaactttagaaccgaatgagaaaagaaactttataaagcttttgaattagtattttgttacttgagagaggaaaagaacttgaggtccaagttcatatttatagctatgacttaaggaaataattacacatatggaaaaaagaaccgccttttgtttctgttacccgtcgttttgcaatttttataaatatcaaaaactcagagtttcttgttttttctccgtggagaagacgtaacaacattaacagctaatttttt

SEQ ID NO: 73631 - DNA, 467 bp, Arabidopsis thaliana landsberg
  unsure (1)..(467): unsure at all n locations
tgggaaggagatttttggccttggcgacatcgagctttttcgtgttctcgtcgagttcgccgagcacgcggtggggaaggaacgtctggtggatttcgccnnnnnnnnnnnnnnnnnnnnntccgatcgcatcgtaatcgacgagatatttgaacgcttcccgcacctcgggcttggccagatcagggttcttctggttgaggctgatataatagaccgtgcccttgggggcactggtggtggccagttcggcattcttcttgatcgagtcgagatcgttgggttcgaggttgcgcgcaacatcgatatcgaccgtctcgagcgccaaccgctggccggagctttccttcatgtggcgatagacaacgcgcgcgagcttggccttttcgccatagtaattgtcgttgcgttcgaggacgacggcttcattggcacgccattcgcgcatcttgaacggaccggagccg

SEQ ID NO: 73632 - DNA, 519 bp, Arabidopsis thaliana landsberg
ctgaggatggaataccagatcgattccatgaactccatctggtttacctcctcggtcagttacaccaccaacaacgggtccacgacgagcgattacgccgcccaggacgcgggacattcgccggtcaacgacgggcacaacctgtacacgacctcgaacacttccccgaacctgagcgggaacctgttgtatcgccggcgtttcgccaaggaaggacggaccttctcgctgaacctgaacggcggttactccaccaatgacgggagcggcgtgaacaactcctacaccaattattacgacgggggcgtgctgagctcaaccgacacggtggaccagcggttcacccaggacgccaccacgaaaagctggggcgtgcgggcgacctacaccgaaccgctcttcgtcgggtacgtgctggaggtgcatctggcccactcgaacaacctgaatctttccgacaggtatacctacaaccaggacccttacaacggaaaggtcaacgtgatcgattcgacttac

SEQ ID NO: 73633 - DNA, 635 bp, Arabidopsis thaliana landsberg
ctactaaggtagctctcggttacgagcaactgtcatgactctttcacttgtttttgtgcctaagattgatgctgagaacagctgggatgaactcaaagagataccaatggaggagttttccgatctgctggaatgctcaactcaatggcgctcaccaccagactcactaagccatcaccattcttcgttaccttcatcgcctttgccatggcattttgaaactgtagaattcaagctcaaggaggatgaagacaccacttgaggtccagttttactttagttgtgttttttttgttggaacaatatcagtaacttcttagtttctaatgtgatgatgtatctacaaatctgctcgaaatccaattactcagcattgtttctagggggtaaaaacactgtatgttttataggatttacagaatgatttaaccacaatgaatttacaactttatcacaaacaacaccacacaaatcccaaactacaatgaaagcacttaaaaacatctaatttctctctatatatatctgcggtgatatcccgagattctgcactcacctgactcgggcataggaaaaaaatagacaactggttggtgttaaagagtttcagcgaggcaagtcctcactggctttgt

SEQ ID NO: 73634 - DNA, 742 bp, Arabidopsis thaliana landsberg
cggaatatccggcgcgggcagtgcccgcacggtgaacggcgaggtgtatgttacgttcgcgcataacccgggcggggcgtcctctttcgcaacgttgaacggcgacttggatgtcacctttcagcccgatttatccgccgatgtgcaggtgaaaaccatgcgtggggacgtatttacggattttcaggtgaacgcgctgccccgtctggtctcggcgccacagcgcaagaatggccattttatctatcggagcgatgacagctcccgcttccggatcggccgcggagggccggagttccggttcgaaacgctcaacggaagcataaaaatcagaagccgggtgtagatgcgaggttaggaacaattatgaagcggtatgtaagtttctctctctttttgattgccggactggcgtacgggcaggatgccgatcgcgtgacggtgccgttcagcgacgcggcgcgtccgaagatggtgagcgtcaatttgatcaacgggggcattgacgtgaagggctacgccgggaaggacgtgattgtcgaagcccgatcgcgaggcggggaacggaatacgcacgttcccgagcgcgccaagggcatgcaccgcatcggcgcttcgggcaccggcctcagcgtggaggaggcggataacgtggtggaaatcaagaccacaagctggagttcaggctccgacgtctccgttcaggttcctttttcgacatcgctaaaactcaagaccatga

SEQ ID NO: 73635 - DNA, 499 bp, Arabidopsis thaliana landsberg
  unsure (1)..(499): unsure at all n locations
tgatctatatgaattggaggaactgcatttgcagccactttgtttacagcattgcgtgacaactaataccgggagggcattatgtaagtataccacactcttgtgatcatatatatataatatatctaaaaaannnnnnnnnnnnnnnnnnnnnnnntatatctacgagcatattagatcggatcgaaaaatcttaaatctgtaaaaaacgaatgtttatctaaaaactccaaatatcatactttcttggagcgcaatatattcaatctcggagttgattttaaatgttttttttatcaacagtttctaattaaaggggaaacaatcattttaaagcgatgttctttacatatatgattttaaatgttgataatatgtcttgctgcgtaaggtaattgaaaagttacatctgcgtgtttattactagacataagcttatttataaagaaaatcacctttgtatataagctttgttagaaagaaaacgagtgaaatatat

SEQ ID NO: 73636 - DNA, 483 bp, Arabidopsis thaliana landsberg
  unsure (1)..(483): unsure at all n locations
tgtggataaagacgataacctgggacttgccggcaaaatcggcgtacaggtatatattgatggaaggccggcgccgctggcgggacaggaccttgccaattacctgaaaacacttcagtcgagccagatagaatccattgaactgatcaccaacccttctgcccgttatgaagcggccggtaatggtggtatcatcaatatcaagctgaagaaaaataaatcattaggcactaacggatctgtgaacgcaggctggagcataggcacttttgccaaatacaacgccggtctttcactgaactaccgcgatgcgaagatgaatatatatggcaactacagctacaatactggattgaacgaacagaacatatcgtcncgccgttcactggcagattcgctgtttgaccagaagaacctgctcatcatagatatgcanacacataacctgaaagcaggtatcgattataccctgagcaagaaagc

SEQ ID NO: 73637 - DNA, 431 bp, Arabidopsis thaliana landsberg
cactgtggctactcatctttaatcgtgggctcaataactgtgacaccaaaggagcgggctttctggtcctatccatctagggagaggtcctatatatgctggcactgcccacaccggatgtggcccgccctggcgctcgaggttctgaacacatttcacgtacccattcaaaggccgaacttatcaacccttggaacatactacattcttacttgtaaaaaagcctacattcaagatccaaaactatcttgactaggaaactattgtggaaaatcatcctgttgtgcctatagttacaatgaacccatgcgcgaacgcccttcgacttggaaccttgggatcactaccgacgactttagttcatgctggagtgaggggtcatgcagtcatattcctttatgcctctgcactggatggccagatgatcctct

SEQ ID NO: 73638 - DNA, 521 bp, Arabidopsis thaliana landsberg
ataccagcaatttgaaccagtaatagcaacatatgatcacattttttcttcttaagagaccaaagacgggatcagggcctcttacttagacattatcgaacagaaaagcaagccatactcaagaaaaagaaggaaccctagagatgagcttacccctcctttcgatgaattaggtgaaataagtgggatgagaatcagtaaaacaactacagctagatcctgtgaagaaaaaataacaaactgatgagaaatgcccagcatagttgtcgtatataattaactttttcctgaacaaacctggaaaagcaagacggaaaatgaagcccttccatgtctagatgtactctcgcctcgttcttgtagaacctgaaaaccaagtgcattgtttctgctcaaccaactggtagcgtaattgcattaaaaaaaaaattaaggggatgctacaaaattcttttaattaagatcccttttttgatacaaccaaaaatgttacctgcaggacaacagcagtggacgacaga

SEQ ID NO: 73639 - DNA, 1079 bp, Arabidopsis thaliana landsberg
atattaaattcatacttttaagttaattactcattaaagcctattattatttacagatataatgaatgatttaaatatagggagttgaatttccatcttaatcatagttggattttcttttagtttaggtgagtttatgagttttttttttttttttttgtctttcagttggttgttaaattgttaattatgatgaaaaccttttcattattatctaaatagattatttattatactatattggatgtatgacctcacttcttaaattaatccaattgctacacggcaagaatcaaacaaaaataatatgtgaaaaacttattgttgtgagatcatacttaactatatagaaaagaaaaggttagaatcaaataatttaagaggataaatagagtagttgaaataattgattgtcgatatgcgaccattacctaaaaatattagaattatgcatgcttaatattgtctgacttgaaggttattagtagtaatagattgtatgtgatatgtttgcttaaaacattatcattaataagaattaaaatcatgaaaagggtaacgtttgccacgctaatggcagacacgtagaattaaaccgtacaagcaaaaatccttgtattagtctcaaaaccatccggataaacataataaaagttcattttcttgccatttctacaagcaattgacaccattattacctagaatagtatttaatatgagagtttaaaagacctggaattttaaatttttatgtacggcattaatgcattgaatcgcaaagtatattactcttgattattaaactaaaagtgagtcatttggtatcttaatgacgagagagatttaactaatctcacattaaactaagcttaaggatcaagtgggggcaagcgaatggcataacagtaaatcaaacgaaacacgagggctttatttgacaaagcttctttaccttagcttcaaaactgagctcgttcttcatcattttctgaaaactagaaaacacagtttaaaggaacataaaaagcaactcttttgagagatcacagaaaccctaatttgctaagaaccctaatctc

SEQ ID NO: 73640 - DNA, 624 bp, Arabidopsis thaliana landsberg
ctgggaaatactattacaatgagagcacatcgaattaaaaagcaactgcaaattaaaaaaaaaaaatatctgtcaaatatttttgtaaaattgtaagaaaatatttaatataacaattaacaaataacaatattctcccaaacaaaaatgaaataaaataaaagcaaagaatagacacttgaatcagtaaaataattagatttggttagacatcaagctaaagaggttttgttccaaaacatgagataacagacagtaaaatacatctaactttatagccagttggcataacaacaacaaaagggggaacaactttaggcatgtgcaaatagatgtgtaatcaatcatttacgtcatatgacatatataattgggttttacagtttatctttgagcccacaagataatttcattaaatcagcttaacgattatgattagtagcctattattatcatttgtgtaattgttttttaatcacactttacagatatatacgatctcgtagcctattgttagcatttgtataattgtttttaatcacactctattattattattttcaacttctacatgtaaatatgttattatgtacgtagggcatatggttggcagagttcacatta

SEQ ID NO: 73641 - DNA, 332 bp, Arabidopsis thaliana landsberg
  unsure (1)..(332): unsure at all n locations
cggggcgagcagacgatcgagctggcggcgatcctcgttcttgcgctcagccatggctgacttcgggggtgggtgcgatttcattgcctccttgatctgctcggcaatgattcccttgatcgccaggtcctcgctatcggccagaataccctgttcctcgagaaattcatcgacggtctacttcgatgatacgtgcattgcccgctttcatcggtccaattactttctgcnnnnnnnnnnnnnnnnnnnnnnnnnnggcggtgtcttatgggtcttcttcacgaatacgactgtccatgcccatcttctgactgccccataccggatccgaa

SEQ ID NO: 73642 - DNA, 520 bp, Arabidopsis thaliana landsberg
cgagcttgggctgtcatcccgaacgcaggtgaggggttacctgatctgtacaactagcggtgaaccaagtctttttgagaactggggcagatactcgtcccactctgcagcagatctgaaatggccgctcttctgccaggcatagccggcataaaagaccgccttctgctctgcgggtctgagcataatatacagatgactctgatcacgggcttctgtcctgtgatccttaaaatcactgatcccagaagggtctgccaggagagcggttcccagccaggaatcgtccataggctcccagtagcggaaccatccctgtcttgcattggtttttacttcccctttcttgtcatggagggtaatgcctgccgtgatattcggcaggggtttatctgagacaagtgtttcttctatacggctgagatggctgccgaggtcgagactgatccttttggtttctgtgaccgtctgtccgccagcgttccagggagcatagctaagctcgaaatagttcttaaag

SEQ ID NO: 73643 - DNA, 269 bp, Arabidopsis thaliana landsberg
  unsure (1)..(269): unsure at all n locations
caaagaaagcgctgaactatggggatgaggagaaactgcactggagagaaaacagcacccttctctgtaggatccggacattacaagagtataccatgaagatacatannnnnnnnnnnnnnnnnnnnnnnnnnnnnnnnnnnacgctcaaggaaagagctataggacacacctacctacacttaccaagaggaccatccgtatccagtcaggcataatatcgtatcatatccttatggtatatggaaaaaagaccatgggctactagt

SEQ ID NO: 73644 - DNA, 553 bp, Arabidopsis thaliana landsberg
tcgttagcgaactattacggacgaaatcgaccagtttcacgtttaaaacgagaagtagtcttgcttagaccgggttgttggctcatggtgatttggtcggcagccgatgtaacgggcgctgacgccgagggtggccagagtgccctagccccaatcataaggaggacgcgatgtcttccaccaaacgacaatatctcacatccagtgacctgaaactgttagacggagttctcgccgccgcaggcatgcacgatcagcacgcagatccggccaagcggctgatccgaagaaaagctgcaagatatcttatctcgcgttttcaggagggcgcacggtcgccggaagcgcttgcaaatgagcttgacgaacgcccacgcgctctgccgatggaacggcacatcctgtcgggcggtgcattcgtcagctaccagtatggcaagcgcgtagagcccgatcggagctggaccattattcatgttatcacaggccgggcggcccgtgccgggtcatggatcatgaaaggcttgaccaaagacggtgccgaacgggtgct

SEQ ID NO: 73645 - DNA, 2427 bp, Arabidopsis thaliana landsberg
cgttctcaggtatatcatagggggccagaacagcctctgttgctcccaagctatgtccagtcaacacaatgctcggtttctcgtccttatacttcaacagaagctccttgatcttggctaacaactgtgaccgtagactcagcttagtgaatttcgattcggggtgattagaagtatagattgtgagccacccgagcatcaccttacacccttcttcatcttcactgtcactatcaaaagtcgtaccttcaactacaccaccagaaccatcctgctcgggtccgtgcagcaaggggtcagctgaagttggcctagcacccaaaacattgacccactcatagttcctgctcgttcctctcaaagctatatagatctcacggcgtcctaaagccttagaccgttcatcagacgtgacagcaatgtagccaaaccagttagactcacggtcccaagaatctcttgattgtgattggagaagcaaaccttcggggagagaaacacgagctgtggcgtagaggaagtttacaacctcgtagtcggaagcgttttcgagcatgaccttgtcgaagaaagaagatttgccgtagcggctggctccacagtacttggagttttggtcgttgacgaaggcatcgtaggtggcttgacaaaagtcgccacaacgtaagatgagttccctaagtgattggtctaatgggtctaagatagtgtcccaattctttgagcctaagagttcttcccatgatgtggttgttgtagccattagagagaaatggtgtgtgtaaggagataataagtgactcttgactcttaagttgtttaactttatacaaatggttgtggactggtgatgatgctgtctgacccacttatgtccaaagcgataaaaggttatcactggtgtgggaatattattggcatatagaattatccacaaacttgcacatcattctcaaccatacaaaaaagagtaaaaataaacccaatcaaatagagagaagaaaattcaaccaaatcaatcgatacacacgaaaagagacttattgtttgtttgcaactaatcaaacgcgacgacaggcttgtcttcgtcgtccggaatggccatgacccaatcaccagcctcggtcttgagcatgcctttgtttttcgcgaccccaccaacacccatccttcaatagtgcaaatgatttgttaaccaatgttatgtttcagttaatcactttcatctccaatatatccccctttgataacattgcatcctagacccgttaactaatatatgatgggccataataaatcaaagataattcaaagcccaaaaagtgtaaaaaagcccaacaaagtgacgatcatacgacgaacgatatcaagttaagctatcatgttcgtcgtcggtgagatttcccggcgaagcgaaagcagtgtttctccggtggttcaggcatcagtctgatttcagacaacacatctcatagtaatttgattctaactggcgatttcactctagctcgaccaattgtatccaattctcgtagctgagagcaatggctctgatcgatgtcgcgatatcttgtctcaattcgatccgcgaagtaagaaatccgaattctctttttttttttttttttttttttttcatctggtctcatcttgttacacgttttgatctgctgcacctgaatcattacgatttctccatgatctcgttttgctcgtttttgtgtgttcttgggaaatgtaaaagtaccttactgtaatcctgaacaagtaaggtttagatattttggaaatgttttgttttgtagatagaagaggatgtaaaagatgcgattgtgtatatcgatgctggctgcacagaaagttttcaatttgtaggagctttccctttgttcttggaactaggtgctcgagctgtctgcagtcttgaaaacatgacttccttagatgcggtaagcttgttaccgtttctttttttcctgcacaatgttggctaaggaatatcctatcaatcaacggttagtgttggtaattgaggatctagataaagaacaggaagattgttatcctcatacttttggtatgaaggggatctttttacctagaaagtgagaaatcttctgatttaatttatatgatgtgacttttgatgccttgtgctctaggtggctgattggaattcaaagtctgattgtgccaagagaattgtgattatgacatctcgacttctcaatgatgctcatcggtatatgctacggtgtctaagcacccatgaaggtgttcagcgctgcactgtattcacatctatttcagaggtgctcttctttaacgttatccttggtctcattctttatttaatctcttttttttctctggatatatataaaggcttaattattttctagaacaatcaccagctatttgacttat

SEQ ID NO: 73646 - DNA, 532 bp, Arabidopsis thaliana landsberg
  unsure (1)..(532): unsure at all n locations
taaccccgagtgccttccattggcgacatttgcattgtgcttgcacctgcttaaggctgcaagaatgaaaaccccaataaaggcgattatacgtatttgcgcatcagcaaccaaaacaagcttgtggcacgcttcaacttcaattcgccttcaccaggatggaggattgacgacctgatttacgatgttgcctccaccgatgtttattactatggaccttcggttgaaggaaaagataaattccagagcgaaattgtacctactgcgaaaaagttcaaagctgtacagctcatgaaagtccataacaatgccctggattacattacttctaccaaccttgatgaatttgaatcgaaattaaaaacacctccttcgcaaagaaaannnnnnnnnnnnnnnnnnnnnnnnnnnnnnnnnnnnnnnnnnnnnnnnnnnnnnnnnnnnnnnnttatcgtaacaggtcagaattttgatccgggtaaggagggaatcaaatacaaagatgtggtggctttccatttcgacaataaag

SEQ ID NO: 73647 - DNA, 492 bp, Arabidopsis thaliana landsberg
gagggaagaacaactctcatgaaccgtccgcagcaaatgtatttatatggaatctccctctgattctatcatatgggtaatctctggtttcttcgaatagaagccatgatcaagatccgagacttgagttttatcaggatttgctccatattcagcaggaataaacctctgcaacagtaattaatccatgttctgctctagttagatatctatcctctcaatctcatcatcagccaaaagtaaattcaagaacaatattaaacaatactacaatgtgatctatacttaagacatgatcgaattggtgtaacagaaaaaaatccatgattaagatataagaagagaccttgatggaaccagcttgtttgataactctgacgaggagttttctgatcaagaacatgctttgatggaattgcagagatcaccacatccacctttactcactgcttgtgctaagcttccttcattctccaatgaacccctagaacc

SEQ ID NO: 73648 - DNA, 596 bp, Arabidopsis thaliana landsberg
  unsure (1)..(596): unsure at all n locations
ttgccgggcgatgtcgtcatgataaaaattatgacaggacgcgcaatgttttttataataaccgttgtccctctgctattgtcgtggaatcggtagcgtatgccgtttgagtgtcgccgcaagcgcaagcgaaggcaacccataagagcgttccaaggagtgacagtcctacggaaaaatctctggccaacatcgccggcacatttttaaatagaattttggtcgatttgatcatcagcgaaacgttactttgtccattttcggcacgatccaatgaatcatcaaccaggcaaaaaggaaagaagtgccgcaaataataaaaatgatgttgtagccgtcgatgaggtgattgaccgctttgtaatgatccaaaatatagcctaccaaaatgggcaacaatacacttcctgcggctcctgccattccttcgatgcccaccactgtactgaccgcattttttgtaaacatgntcggtacaatggcaaagattgttgcacttcatgcctggttggccgncacttgaatactgatcagtgcaacgaccgccacatgttcgaatgaatctttgtccatgatcgacatacgacaaccgcgaa

SEQ ID NO: 73649 - DNA, 617 bp, Arabidopsis thaliana landsberg
gatgattttttacacaaaaactaacagctgttataagtttttgttggaaaaatattacccaatagctgattaacaatctaaataattcaattgaatatactcccaaaatatgtatattgaatcgtaaaatatatatataaaatagtactttcgtgtaaataactgatttgatttgttataagcttacaactatcctatttttattttttttcgatcacttacaactattctatttagaaataggaaacttggatatataaatgctttatattgaatttcaacagatttcaaatcatatacttttctgcatctcccgtccgataaatagatgcaacataactattaatatggtaaaagaacatatgtgatatccaccttattatatacgattcaatatccgacaaaatactataaatatataccactcaataaccgcgaccgacacacaaagtaaataaaagtaattgattttcagataattacagaatgaatcggatctcaattgtctttaactatagtcactgatcaccttgcattagcttacaccattaccaccttgtttttaactttcgtcttttcaataacatcattctgcttttggattaaaaaaaatatta

SEQ ID NO: 73650 - DNA, 359 bp, Arabidopsis thaliana landsberg
tcattcttgacacgtgcaccgaagctttttcccacgtgccatagagtttcttctttgttcattttttaccaagatgggtggtatcgaaggtacggaggaccctaaagcactaggctgtatcacatagatgaaatggtgtatgcgcttacatggatttgatgtatggtagggttaagactaagtctattgtgtagaacaattaaaacgaatactttataaaaagagcggggggaacatatttagagtgttctaaccaatataatagaggaaatatggtgaggtctaatgaaaaacgagagaatacttagtcaccaacaaaatgtttttagaagatttaaccatgtgaatgggaggataaa

SEQ ID NO: 73651 - DNA, 740 bp, Arabidopsis thaliana landsberg
tgaactaagtgtgattttgggagaaaatggagtaaattatccctgcaagaaatccatcggtgagttaactactatgttgatgaatcgcattgcgttagtgatgattgcatctcttgagtcaatcaagattgattatttattgagatatgtccgtcttttctttgccttttttttgactttatatggcttctcatcaaaattacttaaacatgtctttgtaaccaaatcgttgccaatataactactttcaggtgctaatgatttttctctggaatttcattgactcttcaaactttgaaaatggttagggaatcctcaaatttgtgggagaaatataatacaatcgttgcaaagaatcatatcgcacgattctttatttctctacatattttgtagtttacactttacataaccacacagacttacctggtttaggaagaatatacttctttttgaggttttgcttcgctgattagattgtttatcatgttgtgtactacacaggttctcaaagaggaaaaagaagacggttatgagcaacattacttatactgcgagtcaatcttgaatccttctgtttagctgcattattagctcgagaggctatgaactctatatttattattattatcgcttacatcacgagtgtctcttatctgagtttatcttatttaaaaaacaaagttctagttttccaattttcacctttttccaaaaaaagcattttttaaacggatccc

SEQ ID NO: 73652 - DNA, 392 bp, Arabidopsis thaliana landsberg
tgccagcagcgaccttgatgcatttgcttacaacattcaaagaagtgaggtcataatataagacaatttaagtgaacagcttgttactatctttttttgcaggaatctgcagcagaaatggaagacaaatttgcgatggatatcataaattatatgtccatggattcaggtcatgctgctgcaccagcatgtcttatactctttgcggggaactctacttctctggcttccttttctgatttacttttggactatattcagttttatgactagttccttgcctattcatgcttcattggtgaatttgtaggaggatactcatgccacagaacctgtctttcacaaactgggtatgagcactgccttatggtacatttttttaaatgatactt

SEQ ID NO: 73653 - DNA, 3267 bp, Arabidopsis thaliana landsberg
  unsure (1)..(3267): unsure at all n locations
acgtgtctctggattttgattaatctaatcttcaaaaatctttacatgaataactttgctgaaattgtaaaccttagtctctagaaatggaggaaaagatcagcatcttcaagtctctctttttctcgagattcatatcttgaataaaatatgtgattcaaaagttgtgtttgtcgatttcgataaaatttatctctttttttagatgtcaaatgtttagttttttaccattttttttttttttttaatcataccatatcttgtaaacatacacaatttaagagtatagaatgttatagtatattatatgtaatatatatatatatatatatatttttgtaagtgtatatttgagtatatgattattaatttatatatacgggcaacgatgataaataatttttcaattaaaaaacgagaaaatatcattaaaaacttcaaaatgtattttcgttgaaaaaaagctcaattatagaaattggcaaagttgagacttttctccaacggaaaagcacaattgaggcttttatgatatgtatatgtcaattataagcaaactctcttttttcctttctcttatttctcaatttcctttaaacaaaactatgaaaataccacattttaagtttttatacatgaattaggatcatcttcgacaagtctaggtcctgtgaataatttctcttcttttatacctccaacagatgatatttttagctgaatctaaatgtggactgagaaacacacaaaatatgtaggaaagttaaaacccaacacatagtctacagaaattcaagataaagatcaactcttaaactgtaatataaagcatatgacaaatagtttgctggaaatcaaaacagtatagttaaacaacatgcatcatcctgctaaatagaagaagcattttaaatccacagtttggttttgttttgtttgttttttcacctccaagaggaaccaccaagctttatcacttcttctgaacttgaatctttccttgttccaaatccttcatcccttttctgactacttgcgtctccatacaaatcttttagctttgcgagattgctgttcactgtcaccgccgatttctctttgttgctactatctcttttaggagtcggttcacgctcaatctgcacactcctgctcctacttctgcttctgctcctgcttctccggtcatgtctacttctgtcgtcctcataatcattgcgcctgcttctactatcatagtcgcgccttgatctcctatcattaccataatccctctccctttctctgtatctatccctccccctctctctttcgcggtctttctccctctctctttcccgttgtctatctgagtctctgtcagaataatagtctcggctctggcttctacgtggggaccgctgttgtacttcatcgcctccatttctgtcataaccagtcggtggaggacggcgaacaggagaagagcctctggtggaagcacgatgaggtgcacgctgaccaaatgaaacagagagagatgcttttactgatggtggacgacgggcagtgtcttctgagccacgggtcatgtctccggttgaaccagaaggtttagttggtaaattcatcttctcaaggtttgatacaatctggcgcatgacaggaacaggtatacgaggaaacaaagtatcaaagtagtactgcaaaaaaaccaacaacagtaagtcagattcaggaattggcatcatggagacattaaagtattatgataaatgactaataaacacatttatagcaaaagctaacggatgtttactaaaacgaacagaaaataaaaaaaatatcgaatacatagcttaggtatcaaagaccattatcaatggtaactagcttagaatctaagctatttattagattggtttgcattgctacatttcactcgtaacatagcttagaatcatcttaagggataaaggtcgcagggcaaaccaatctaatgaattgttcacactaccacaccttaggtatcaaagaccattatcaaatggtaactaagaacaattttaaacaagcaactgtcattaaaagagtgtttgtactttcctgacaaaacatagcccagtgtaaagtcacacagcatcttaccaacgaataaaagttcttgtgttaatatcacttcaaattctcagtatcataaaatatatttatagaccccatggacaacccagatgcatccaagtctgcccagccaaaaatcagttttccatggagaattcacagaagacaggaaaatttgaccatctaatataaagacttgtgactcaccagtccaagcagcaaatcacgtacataaacacccattgtcgtcatccgtccatttgatcctggtgaaaactcnctgaagacaaaaaaacataattcacgttgaactgtataccagtgcagagccatgttcaaagaagttggagtgcatgttatgaatttctgataactaggtgaacccacaagtccacaacacataattttctaagcagtaggccacatgatctcatacatactaaaaagggtccagggatctccaagacagtaagagtctaaaagataagatccggtataattgtagccattcaggtcagtgacatactctattctattgttccaaacttcattgtgcgattatctcagtaagaatcctaacaagagcttctccattaataaaccatattagggaacgaaagaaaagcgtgatgctaactgacacagcaactttaatgaacccagatgcacgaataggcaattgcatacggtttttcacgagagcttgataataataaaatggtattcataattgtatactactctcagaacttgataaaaactgcttacctcatcatctttaatgtatggttcataccatgtccacaacgtctttgcatctgcaacatatcttaaatataggaatccaacctgcacattcagtaccctgtggttagatcaaaagcaatggacatgtaaaacagatcaaacaagttgttgtaacatgaaaaaaacgcaaagcaaaacaaacattgatataaaatgcaagacaaacataacttcccatacaccaaggaagcatgtatgcactgtctcattaaaaagaaaacacttcagatatatcctgaactttatctggaacaccgggtatcataaacagattatttgtcagtagctacgttctatactgttaaatgggcagaaaggtgatcctagagagatagagtagctaaaatagaaaagacacct

SEQ ID NO: 73654 - DNA, 132 bp, Arabidopsis thaliana landsberg
ggaatactctctcgggtcattcgcgtgtatctatcaattcttataaagcatattcacgttggctttgttttgttgatgatctcaatcatacacagagtccccgtacttgcatatcatgcggccatctaaacc

SEQ ID NO: 73655 - DNA, 545 bp, Arabidopsis thaliana landsberg
  unsure (1)..(545): unsure at all n locations
ctaattnatccggaaaactgcattgtgaatacaaataagcagtgaaggctcagaaggatccattgttaaattttctaatcagagaattactcataaaataggtagtttttaatcatcactgccttcactctagaccctaatctagccgaaatcgaattgaaaacaaaaatggattcaaatcttcagagaaaatcaaaaattgaaaaccatcgaaccaaatcaagctacgaaaaaagaagagaaaaaccgaaacatgaaagaactactttgtggaataatcgatcattagaatgagttgattgagaaaagtaatcacaggcggcaatatataagacaatggaggaagctagggtttacgttttcggaagaatcgngtcggtcccgttaacccgatgcgtttgggctttgtgaattacatcaaactcggcccattatctagtttcgggtttgacccgttatacatgatgccacgtagaccgatacgaacaaaaaaagcccagaaagaagaagtttcagagaaattttccgggaaaaggcgagaaaat

SEQ ID NO: 73656 - DNA, 658 bp, Arabidopsis thaliana landsberg
  unsure (1)..(658): unsure at all n locations
tagaataatatttactagctagttatttcatatttaccatttttgttaaactctttgaaaactaaattttctcaagattctggtagaactaattgtttggttatcaatatcaagaattttcatattcaacataacattccctttccttaattttgtgttccaatttttccatacctcacattacaccattactatgaacaagtagttatcatcctatataagttttaattagaaactaaaatgttcaagtgtccagctcatatgtacaaaaataacaaaacacaaagaccaaagatttgtttacaatgtcaggaatatactcaaattgtttttagattcagattcaatactactctcaatatttcactcatccaccaccaattcaatcaaaactctccatttggaccgcacatctaaaacatacaaataacctattttcttacatataaatccaattacatatcccgaaaaaaacatatatacatacaaattaaaataatcactcacattcactatacttactttgtntcaagttgttaaacttttatagaaaaagacagaaaagtttcagagaatccaaaactcaggacccagttaaaaagaaagggaatatagtactacatatctcttttccttcaaaaatttaacgcccaaaaca

SEQ ID NO: 73657 - DNA, 535 bp, Arabidopsis thaliana landsberg
  unsure (1)..(535): unsure at all n locations
agattaattcgccaatgtggaaggcacgtctctcccccacaatcagatcggattgccattattcgtcggagacaatcataacttaatttttggtcattaaataataactnnnnnnnnnnnnnnnnnnnnnnnnnnnnntaatctttgtcacgttcatcagagccagaggagccaacaacgaaagagaagaacttgaaactcaccaaaaacattgatcattatacacaatcgtgatggagagttcttcgaattccgaccaaaatgagggaactccgacgagctctgtttcttcgccgtaccggagaacatactcagatatctccggattatctcaccggttcgacgttcagagcttttataaccggccgtcaaacactaacgctgttgtcttgagtggccatgaagaagatgtctccgaagacgccgaggaaccaaaagatgatgtcgtcaacgacgttcacggagatggagacgaagatacagcgcattgattcttcagaaatgcaggtaaagtgttaaagaatgaactttcttc

SEQ ID NO: 73658 - DNA, 542 bp, Arabidopsis thaliana landsberg
  unsure (1)..(542): unsure at all n locations
tatattgatgcatagngcctcagtattgattgttggatcgctggttgtgaaaccctaattagtaaatgtattgactcattttgcagaggaagacgccaagaactccaagtttgtccaacaacacaggcggtaatgtctttctctttcgatcatatcaatgttaaatttcgatttggaagctgaattcaaatctgtatgtgatttctctgcatctgttaattgaatcttattaagtcacctacttcattcagatggcttagaattttattgtaattcatgattttgatatctggttttctccaatagcctgtacaaaatctcaatgtgtaatgtttgatttgtcttgcatctgtttcttgagccagcttggttctgtatatattttgtaatgcttgatgcatggtgagccatacatgaagtttcaacatcattcagattaactaagtgtgttttgatcagactcttgtaataacaagatttgaatccttgatagatttaggatttcacaggattccaacacacttaccattctctatgtttgg

SEQ ID NO: 73659 - DNA, 352 bp, Arabidopsis thaliana landsberg
agacacaaaatgagggctggagacaccactttcgttcttggtttgaaggaacatattaccgctgaaaaagtgagggcagacaaaattctgagtcaaaaccttatacaacctatgtaccactgaacatcgcaaatgatctgggtaacaccaaggtgctggtacatacaaatggcactgaacactgaatggtgaatggataccaactaaactcactctgaacccataggttatatatactagggatgtcacgagtggttacgacttcatctggagaactaactcatgacaaaagttgaatgggaagttggtatgctttggcatatttgcaaagcatccacataatcttggctga

SEQ ID NO: 73660 - DNA, 2705 bp, Arabidopsis thaliana landsberg
tgtgaccacagtctcagatttctaaagatttgatgattcgctcccttattttggacatgtgagtgtcttttgttggacagtgaatgactttgtctttccactttccgtaaagaagtcccaagaattttgctttagctttcttttctctcttcactttttcttttggcttttttcccacgactttctcggaaatattgcagacacagtaagaagatgatgtttatatcttcaaagattctcatcaactaaattttcatcacattacagtacattgcaaactatatagactgttcaatcttcttatagctaagaaactgataaaagaattgcaattgctgagataatttgaccagtttctctcttctgataagattggaaagaagataacagtataaagcgttggtgaagtgttagagaagctcatcgcttggaaagcttacatataacatcggcgactgcaaaaagatattgagatttcaaaagactagtttgagaccatggcgaatcaggctgtgtagttaggcattgctttcttgaggaaggttattggctgagattcttcaggggctaaccggtcaaaaggaatgtagttctcctctttgtcatagacatgacacacagtcattatcgtcttcatcaatcgccagttccatgtagccaagtttgtatactgcaacaacaccccaaaagaagtagcccaggaaacttttagtgtcttattaacttcccaaaggaacacttattatgttgtggttcaaattactgtcatgttattcacaacaaatttacgagataagaaagtggttagtacctttccccagttctcttgtatagactcatgagctgcacggagattgtagctcggtattcttgggctaatatgatgcgggatgtgaacgttgatatcatggcagagaatttcaatcctgtcgtaacacacaaatattagtacatatgaaaccaaacgatagctctcagcaacttaaccatctgagcaagtggtatgcattaccaactagggtagtcacaatgaacagttccattcagctgggcctgagccgcgttccactcatccgcaggcttgaaaggtatatgcggagccgtatgatgaaccattgtgaatgtgctcatctatagagaaacaataatgcgaaaccaacttagcttctggtgctatatcgaaaaagagagaatagggaaaaagcataaaatagaagcatttacccagaagtgatagcccaaccatggcattaaccagaattttacccatcccaatataccaactttgtatacgatcagtggccacccaacggccatgaaggcgaaaacacaagccaaacttatcttcaccctattcacctcgctcgctctgaactttttcagattgaagtgccagttcaccctattagaacgcttattatagttgagtaaagagatatataaagagagaaaaaaaattgaaaaaaattgatcactgcgtaagagttaatctatatataccagtgagctatggacaaccaaggtctaattgggccatatccaaaaatgattgcctttctcatcacgggtgatgactcaaactcctctggcggaactggctgccaagctgtgtcatgaactaacctatagagagaacaaaacggaaacatgagttcctatctctcattctattgcggatatctttaacagtctaagaaagacttacatgttggttttggcgtgatggcggtcgtgcttaaaccgccatggctcatatgggtagacaagtggtaggaaggcgagagtacccacaatgtcttccaccaatttgttctttgaaaatgacttatgtgcacaatcatgacctatcacaaagaactaagaaagaaaaatctggttagacaacagtaacaagctgacacacagaagaggacagtggaggagagcttaccccggtaattgcagttcctgtccatgcccaagccaacggtagcagataccacggcgattttgcaatcatgaagagccccaaagtgtatgaagtcacagatatcaacacagacttcaaagctttcagatcatcaatctcaaacacctgaagacaatttgtattccaaaaatgagtaagaagttccataaaaatcacacataaggcttattgaaaaaggcatacctctttgggaagtgtatccatgatatcttttaaggtgacattctcaggaagatcttctccaatttgtctgaatccatagctttctgctaactgttccctgtcttctgcactgtcagctgaaggcggtgcaactggagcagccaccgctttgatacatccaattctccttttcacaggagctacacatcttctacttcgatgagttcgtccttttaacagaagatcaatcggcttcacagcatatacacctgtatccatccaaccaacacaaccacaatagaatgattcattcactacattagcaacaagaactaacagcattcatcattattgcaatccgaaaaacacaaacaaaacccctataagaaagacaagaactttgctcaaaaattcactctttttattgcttatcattgaatacttctattgaaactagataactcgaagctcccatttccaaatcccctgtaattagtttgagaaaaaaaagaggagttttgaggagaaaggagaagagtaccaggagaaacacgagcagaagaagcagcaagct

SEQ ID NO: 73661 - DNA, 522 bp, Arabidopsis thaliana landsberg
accaagccttctactagccgatcttgttcacagtgtcgttacttgggaaccatataggttgtccaacggcgatatcatcttctaactctacaattgtagtatctgtcactttaacccaggatgttccaaaactcttctccagaacccatatattggatctttctccccaacttgaatggatcacacctagcttcccttcgtagttgactaaaagcagactatgttcgcatgtgaaatcgtccggaaccgggaagatagaccaagtttcggttctcatacagaaccgcatcacattgttctcccttgttagccaatgcacgcaaccgtaggcggataccggtttaactgctcccggaaaaaactctgacgataccaacttatttagtcgcttccatgcatccgaatcagaatcataaacttcacaaaaaagattatagacaccatccctacccactcttgcccatgtatcaaaaaccgggacgatcttataccgaaacgggttcgacgaaatccccattaaac

SEQ ID NO: 73662 - DNA, 418 bp, Arabidopsis thaliana landsberg
cgtcaatatatagtatcagataagccctgcaagtaccattactacaacttccactccagcttcccgaaaccgcaacaattccaaagcatagctggataacaaaagtatttgagtactcttctgattaacaagaagataaaatatagtgtgttaagactcacggtttagcaatctccgttatatcaaatcgggggtcaagacctttgccgatgccatccaatactgcagaagaaagtaaccattagtatattttttgagttttgaacacaaaaaatacaaattcgaatgacattgcaaacctgaaaaggctctaacaacaaatgtgaatgtggcggggaaccggaaaggctgatcagccgcaatggctaataagtcttctcccattgcaaccaacctttgcttcattttcttttgcttt

SEQ ID NO: 73663 - DNA, 302 bp, Arabidopsis thaliana landsberg
gaatagaaaatagaactttatttaaatctgaagaaagatttatataaaaaaaaaaaaaagaagaagcaggctgcgcagttttgatgggagaagaaaagagagctggcaacagctattcactgatagaccgatcactctcttctgtcccgcactcttttcttcttttgtttctttcttttcgacagctttcatttttcctccatttttaaatttgaattattttacagtcataaaagtacttcaaacgtatatgtaaataacgagcaacaaaacatttaactacaacaaaactagttctagct

SEQ ID NO: 73664 - DNA, 762 bp, Arabidopsis thaliana landsberg
  unsure (1)..(762): unsure at all n locations
ctagcactttatggattnctcatgattgttttcaggttcacgctatgaccagatgctttacaagtttatttccttaacccgtatgggttggcatgatgataaattgataattagggctagttaatggtgatgatgacacaaaggaattactaccttttattatcagtaaacaatttttaggccctttaatctatgcctagaaggtccatttagaatgaaaaacaatttgactgattaaaaaaagaatatcgtttacctgccaaagtaaaaaagtacttagtagtcacaaaagcacaaacacaaatcatgtgattgagaagactgccacaatcttagttacaattttcaaatcctcattctattccaactttcacggctcttcaaaataaatatttctgaataataaaacttttcattcttactatatagaaacagttatacgtagatatatatgatgtaactcgagtcatgttcgaacagatggaaaagccaaagattatccttgtctggtatgaaattgaatacctcccttatgtagaatagactctccatgtgcactgatttattatagattctttgttttcccacctatatataaataaattatttgattttaaacaagaaaatatttgaaaatttaatcttatagagggaaacacagtaggccacatgctcatgctctttttctctcctttttcttctcctggccaagccaagcagtgatgacatgtttaaagattgctcacgttttggaaatttttg

SEQ ID NO: 73665 - DNA, 327 bp, Arabidopsis thaliana landsberg
ggtgtctttatggggccccaaagcagattcagattatcatacactctaatccaactcatggagccgcggggtcagatacagccggcgaatctaattctattcccatcagagcaacatccggtggaggatcagaaagccaccagtcgcaggaacgttggctgactccacccgagcatacgccttgccaaccctgacccagccaacatcttgctcatcctttggcgacagaagagaagatttgacgtacagccaacatggcagcacatgcactagcgactggctcactcacctgccctgtgcacacaacgagaccgattgggggatgaa

SEQ ID NO: 73666 - DNA, 448 bp, Arabidopsis thaliana landsberg
aaaaaaaattctcaacgaaatgtcaggtttgtttatttatattatgtctccaagttctaaaagaataattataaaacaaaatttactagataacagaatatgaaaagtcataatattttggatgtttactccaataactatatgttttagaagaaaagaactccaaattttaaagttttactattatatgttttttcaattaaactgttttggatacatctaattaactaattaataacacggttcaatcattgaatgaaaagcattagagcagttttgactacgtagtattggtcttctacaagtaacttaaagtagccttcatacttttgaaaaccaattatttatcataacaaaccctggatcttcgggagtcaaatcctttaatgtaatgtaatgtcaacctttttttttttcttttgtcaacttaaaacagtttttttttttt

SEQ ID NO: 73667 - DNA, 351 bp, Arabidopsis thaliana landsberg
  unsure (1)..(351): unsure at all n locations
nnnnnnnnnnnnnnnnnnnnnnnnnnnnnnnnnnnnnnnnnnnnnnnnnnnnnnnnnnnnnnnnnnnnnnnnnnnnnnnnnnnnnnnnnnnnnnnnnnnnnnnnnnnnnnnnnnnnnnnnnnnnnnnnnnnnnnnnnnnnnnnnnnnnnnnnnnnnnnnnnnnnnnnnnnnnnnnnnnnnnnnnnnnnnnnnnnnnnnnnnnnnnnnnnnnnnnnnnnnnnnnnnnnntctggagctatcttttctattacagatgctccacccaaacctggatgaggataacgttttaagaaaattgttataccatcctgaatctttcttatgccggttgagtggggccaacctctttct

SEQ ID NO: 73668 - DNA, 215 bp, Arabidopsis thaliana landsberg
  unsure (1)..(215): unsure at all n locations
ttcgtatcgacttggaccacacccttggccaggttagtggcttccgtcgaagttcccgtagtcgcagcgggtggtgagactccaatttgttccatcaaacttcaacacatcgcctgatgaaggtgaagccgatgacatcnccaccaggttattcacctgcgcgggcgagagtgtcgtgtaagaagattcaggatcaatctttaaaaccttacttg

SEQ ID NO: 73669 - DNA, 1484 bp, Arabidopsis thaliana landsberg
cttcagtagccaaaactcacataggatccttaaggctcaagggctggataacattgaccgagtggaaatcattccaagctcaaagcaagccattcaaaaagcaactaataatacgcggcaaatgaagtatcaaagagcgacacacaagtttccacgtcgaaatactcaagcagcgaaagcacagccttttagcactggaggcacttctatacaaggatgctcacagaaagctattgccttctcgcaagggcaaatgcgtgatttccaaaatgttgcagctaggctcacaaaagagctgaaatcgatgagacaaatcacaaagagatgtctgcaagctgaaagcaacacctccaacatgtctgactgtaacttagatgaggtacttttgtctattatcagcaattgaaatttggtttgtcaatttctaaatgttggctttctttctcttttcaggtgaaaactgtgattggaaatgcagaaaaaactgaagagagttgcaagaaatggctttcgatcattgaacgtgactgtaatcggttttgcaaactcatggtatgtttaacactcttaacattcacaaacacgactaagagatatttgtcttccttcaatctctaactcttcttcattcccttccttcacagggtatggtcagagaagattctccagctactgagaacattgttcataagaaaaagaaggttagatttgcagatgatgcaggaggagatctatgccatgtcaaggtttttgagattgatttggaatctgaatcataagtcataaccaaagactgtaaaatttagtgtaatgtaaactcttcacaccatttgtacattcatgtctggagttataacgatatttttctagattcaatcccaaccttgagacaaaaccaagaagctgattcagtttctgtaattgagtcataaacctgattgggccgagttttaattaggcccataatttgaaatatgctcgaatcaagtggtcttattgtatactatccagacgccctataaggactaaggagacataaaaaaactcgtaaataatttcagtttttacaaagaaaatacgaagaatggaatctttttgagaaaggaaaaagactaaaagagtggagagggaagcttgggcgacaagagtgggcagagtattgggaatgacgaagaaacatttaggcgcaatgcataatacacgaccgcttcttcaagtcaacaacattctcacgtgccatctcccttttcttttttacttttactttttacttcttttttatcacttgtattaataataagaatcataaaaaccaaaaatgacgcggtatcgtcatgatagtgtcatgattacatggtttaaaaagatgacgttatcgctggcgtctcttgactttgttcctcccactagattctttttttttttttgtcaggatccaaaaattttaattagatcatgctgcatttttcttatgacaatcagaa

SEQ ID NO: 73670 - DNA, 414 bp, Arabidopsis thaliana landsberg
  unsure (1)..(414): unsure at all n locations
gccgccagaggcccctttctnnnnnnnnnnnnnnnnnnnnnnnnnnnnnnnnnnnnnnnnnnnctggccgcctatgttcctcttggcgatactggcaaccaaatttccgctaactacaaagtcacaaattttaacctgacctcgtgtgttaacaagaatgttcgtgggtttcacatctctgtggatgatgttatgatcatccttgagagactttaaccccataacagtagaaagcgccactttgcgaagaatgttctcgggtataccatcgccgtaaagcttgtcaacggagccgccatccatgaattcaacgcaaatgtacacagcaccttcctggaagaaggcaccgtataagtcgataatgaacggcgaaacacatcggtggaggatgtccaactccatgatgatttgcgc

SEQ ID NO: 73671 - DNA, 535 bp, Arabidopsis thaliana landsberg
ggggaaagaggtacaggcgacaacaattacattacaatatgtttaattggatccacaacaatttaaaagtagaatgtttatactatttctacatgatttatgatccttaaagattatagtatattttagaaaaaacggattgcttctttagagaatattgaaaatttatcaattatctacatatatctatttcgaaatatttttaatcagttaaggcacatataaccataaattcaacaattacccatcaattgcgaaaataaatcttatagtacaatgcagaagatagaagctagacacaaataagcggatgaatgattcatttgaattttccacgtagaacgaatgaaaaagctaaggcatttatattctttgagatcaacttacttttttgaatcgtcaaagagtatgtggacatcgaagtcactcttgcattaggaggatttggataatacaccattacctctgtacttttacttatattactcctttcttacaatctttcatgagcatatggatgaaccctcagcttctt

SEQ ID NO: 73672 - DNA, 560 bp, Arabidopsis thaliana landsberg
  unsure (1)..(560): unsure at all n locations
ggaggactaaggggacgggcacaacaagnaancatatactctctatcatctcagcaacaagacatacctgtntggtttcatttatcatcccgatccatatttccatagaaaccaagtattacaactgcgaacatgtggcaatttagactggatttgaagaacacgtctattgctttctgtctgatgcttcaaggcagagtttaagctgcaagataacaagttcaaaacatttgttaagcaaaattgcaggtgctatgaaatacaacaagttaattcgctttttatgtcattacctacacatttctaaccgaccggaccattagcgatgttgcttcgtttcggaatagttatccnnnnnnnnnnnnnnnnnnnnnnnnnnnnnnnnnnnnnnnnnnnnnnnnnnnnnnnnnnnnnnnnnnnnnnnnnnccccatccgattcactcgtgcacagcaaattgctgacactttaccatatttgtcttgagcactcattgctcacggagctcaactttttggcttctctgtctggaggattttttcccacattctccacccccat

SEQ ID NO: 73673 - DNA, 602 bp, Arabidopsis thaliana landsberg
  unsure (1)..(602): unsure at all n locations
aatgctaatcttcttaaggaaaaagtcgaattaaattgtttttggagtataattttgtcagtttatgggggaaagcttatgctaatgagcacacgtaaacatgtgaatatatacatgtggggaccaccctgacataaaccattcccgcgccccttcctcgataatctcaaccgcatgatttaaccctttccttcattctccaccgtccgatcatcttctctcccagggcacaatctctctctctgtagcttttatgtgaatcgatcacttctctgtttttttttttggatcttcacttttgctgattcactctccttagtatttttgaatctctgtttctcactctctgtatcttcgtcttctccgtcgccgagtggttggngtcggttctgcattttcttttcgctgtttgaggtaattttactcttttcttttcccacgattctcgggaaagtttcttcgctttgggtttggntgaaacgttgccgtttcgttaagctgataaaccacttcaatgccgttcttctaggttttatcacgctttcgttttgttatatatgtacaatctaactaaacctagattaaatttatgtttcgattcg

SEQ ID NO: 73674 - DNA, 709 bp, Arabidopsis thaliana landsberg
gtttcctaaaacatcaaataaaaagaatagaggatattaaattaacaaaacttatctactttaaggtcaaactgattggttttgttatatatgtttccatgtatttgaaaaaaatccaaaaaatccaaattaattaattagaatgtttaaggcacattttcatttttttgtagtcgaccacatagatgttatgaatgaggtacatacatgagtttgtttagtaatgatagactgtcttataattagaactatcattatcctatccataaatatctatattattagtaaaacctgataacatcaactaataaaccaaattactagcaatgcttatttcagtaattaacaaagtcaataagaaaagaccacaacctattcgatttcagtatacattcgattttttttttttcaagtatctactagctttagatatcagaataatcgaccatgaatccaagcaaacaaagttttaacttgaagctttaacatagattaaattgaggggcatgcgactatttcaaagagaaattcagtgcagtctattatatttaatattgttttctacattcttacgttctttaattttgtattacttttttgcacatttttttgggctgatgagccacaatagtttttaagtaaataaaaaacaacactttaaacaaattattgcatcttgtattacttaaaaataataaatatttctttt

SEQ ID NO: 73675 - DNA, 631 bp, Arabidopsis thaliana landsberg
tcccattaggtggatagaaaatcatcagaatttgagtgggtgcaaggacacttaaaaatcgcttttggaatctagacagataaaaattgtgagaaatgtcaaagcaaaacaaagttattgtagaagtttttgtcaatacaacaaaaataaaccactcttctcctcaaagcattcggtcgtgatcatcctcaaggatcaaaagagttgagcggatccttaaagatgatctcttgcttgttaggacttaggacttaatcatacacaaagatgaggaacatcacctctccccgattacacaatattaattatgcctatgacatcagttaaccgaatcaagttttttggtggttacttgtcaatcgagttatttcaaagggtattattaaaaattaactttggtttggttggttcaaaactgaaattaaccgaatacttttcataaaagtttttaaacaattcagttaaatttgaaaaaaaaaaatttataaattttcaccgataatatttgaattccaaatagtaaatagaaattcttattttttaatatttaatttaataaatttgttttaaatcagatttcaatcttacaattttctatttttgctatacactttcactatcctatgttttt

SEQ ID NO: 73676 - DNA, 586 bp, Arabidopsis thaliana landsberg
  unsure (1)..(586): unsure at all n locations
atctgcgttggttggaattgaagggagatatatttcaattaaaagattccatgggaaggaggattgtatagctttccaagttgatccatcaatggatttggcactacaggtaagtagtactcaacacaataacttttggttcctatcccaaacatttttatcatgatggtctacagtagtcaactgcaaaaaatctgtgatttctaaccatgcttgatctgttctttcttagagctaccggaattagtgcatatgtatcatgtatgtacaaagtctttcacatattgagactgttacagtgatgtttgcaaagtgtatatttatgtttatgaaacttgatgcatttcattggtgttctgacttcttgaaagttcaattatctccgaagtccaataaaatggacacatgcattactatgttatgtctaggatggctctctcttttgaataggatttttagagatgttataacggattaacattgtaattctttatttaattggctcttctcatatatatngaccgttgcanataattntgcaggaattgggcgaaagaatatttctttatgtgaatatatctgctga

SEQ ID NO: 73677 - DNA, 2603 bp, Arabidopsis thaliana landsberg
tcgctgcttccttggaaagtctcacttcttctaatttatgttccttctctgctttccacttgagtaactcgttagcctgagaaagaaatgtattggattataagtttggtgagaatctgacagaaaaattagcttttgattgttgaaaactcatacataccgctttctttgcagagattgcttccttgcaggcactgttatacatttccattgtatgctttagctccatcttcagccttctcatctcggtttcaagctcatcctgtcagattttagaattaaacaaatgaaaaaaacatttctcatgtgcacatatctggtcttagagtagtaaaatacttggccctgtagtgaaaatgattgtctcccactttcaaatgaggttgaagagtttggtgcatatggtgagccaagatctatggactgctttgagtatgttgtagcaaaactcaatcgattttctccatactcagaggtgactgagagccgtggaacatccacatcgtcatacaaggaaggaaacatctgatccacactcggtcttccactactcacaaatgatatatcagagtctgttattgagggctggtaaacgccttcgtatcctcttctcgaaaagggagacctactcaacatgtgtgtttaccataagtaaaatgtaacttatggaaaaaaataaaacaacttatgtaggtaagaaacatacttgatctctatcttgatctcatcatgtgttctttgcattgtttgttgcctcctttcaactgcaacatgaaagacatttgatcagttaaggaaaagctattttagcttatatgatgtccttgaaaaaacttggtcatatataccattcatattgctcgtctgagcgtgtgaatgatgtcgcatagatggcatattggaatggggaggtgaacttgtagctgatctcagagacgagattttccctttagagataacatatactgtacagaaactcggtgcctttttcatgacagtgcttgaaacatccgctgctttgaaccttctatcaaataaaacatatatataaggatgctcagatttagtcttaagtaaggagaaaagcgtttgcctaatcaccttaaaagagtcatcttcgaagaaccgagtattaaagtctcgattgcattctgttgcacgtagtcaactattcctttagccgcactaacgtcctccacaaccacatcttggcagttgatctgccacagtaacaagataatgtcagtcaaatgaaatgaaatgcttgacaagataaaaaaagtgaagcgaaaagccgaaaacgcacatcttttctagcacagtagcaacgaaaaggaagaaacaattctgacggatcatcgcctggcttactaaagttagatcctgcattgaatcaaccttatgttaatatgaatattaagcctcaaacaaagaagttaactaatgttaaaatataggctttgtcgtcataccagaatagggaagagaggagggttgtttgagtttaacatgaagaagagtaagagtctgtcctcggctaagaagattgctaaccgcccatttcaacgcgttttggctctctttgtctctgtcaatggcaagagtaatattttcttctcttttctcggaggttctcaccattttcactactttcttctctcggtttcggtttcgttctgcaacaaacaaatattcaatgagtttatatataaatgaaacagattttgagaaacgcgtttgactaagctaatattagcaaatgcatcccaccaaaaacctttttgactctctttcttattgtctccttatagatgtaactgacttcataaacatccagacttttctattttcttttgttggtatagttatctaatagttgtgtaagtcaaaacaaaaatggtagcttcctctgcttttgaccagataacaaagaatatatctgaaacttgttgtttagttcaacagaagtaccaagtttgggtttagggtttaccaatatagataatggggttgttgaattgatgagatagaaaataaaacagagaattgtgtattggtgctgtctgatgtaatcttaaaggacattacaggtcagcaattagagatttaagtttcaccacaaacctattattggaatgcttttgatgcaaagccttctctttaccattcatctttcttttcttttttctctgttgtgtcaatccaactgtagctgtaaacatcacattgtccccttctcaaaggtttctcaagaggacgggcctcatgcctcccatgcaggcgcgtaccctcagcgtatacaacgtcatggtaccactagtatgtctcctccttttcttctccacacccactcatggtctttcagattttgaggctatcctcaagttcaaggaatctttagttgttgggcaggaaaacgcgttggcctcatggaatgctaaaactcctccttgcacttggtctggtgtcttgtgcaatgggggctccatctggggactgcaaatggagaacttggagctttctggttctatagacatcgaggcattgtcgggtttgacatccttgaggactctaagcttcatgaacaacaagtttgaagggcc

SEQ ID NO: 73678 - DNA, 571 bp, Arabidopsis thaliana landsberg
ttggcttcagaacaactcaacggtgcattcatcattgtattgtatctgtatctaattaatgttaacctgttgctctaatcatgattaagtgcgtaggtcttgtctcttatggaaaataggttatttagtccttctaacttcattttagtataattataagataataatagttaaaaatgttaaacactatacgtccaaaattaaagtgtagcgctagaactgaacgaacttatagaataatcattgcatatattaaaatagtcagccatctgataaatcaaattatgaaaacagattattatatagctgactttattttccaagtcaaaagaggggaaaaaaaggtgacttttatttcgactaaggtttgttatcgatttcatagtcaacgacttgaacatccgatccatttaatgtagaaaattaaaaactggactaagctggtacaactggtctaaataagtactagtcaaagatcgaataatgacatttacgatctacatatgcttaaattttgtttgaactctgaaatgagattgatatatcgcccttaagcccaaaaaaccaaaac

SEQ ID NO: 73679 - DNA, 1012 bp, Arabidopsis thaliana landsberg
aaaactttcaatgtgctcatttaagatagtcactcatgttagacataaatgtgtaggacccggttgtatcaatccaaattagatgagggctatataatattgtaatgctcttcgaaatagtactacaagttgtttatatcacattgtctcttagataaagaaaaaacaaaagaaggatgtgaaaacacatagagcttcttgatctataacatcatttccacgtaactagccattgaatatcctcaatgtgacatatctttgcaactgtcttttacattgttcgattgtcatttcattgtttgttatcttcttcatatcaaaacatagttacttatagtaagaaaatcatacatgcatctatagctcggtgactagttagtaatctaaggagattttcaaatcacgatttcaaacattgaagacgagaaatagactaatttacatgtccgagtatcaaaacacgaaactaagaattatgtgtcttctccttcttgaattttgatgctcgtgttttagttttctgtcttgacaccgcaaatggaattgagttattgtgatctctactgtttattaaagattaaaagtaaccattaaagtaaaacatgtatatatgattatgcatgtagacacataatacacatagataccgataccaaactcttctccaaaccaaaacaaaagcaactaaacaaaattcaccatatctaacgttttattaatcatagtcattatcataactttttttttatatatagctcaaataaaaacttatttcatttagtatcattttcctctgacatcatcatctctatggacctgcattcactgctacagaaagctctatctcccctgcaaattaaaatcaaaacaaaaattacttatttatttatttttgaaaaattattaatcaaaaaattaaattaattagcccttcctaaattttaaatttcctcactaattaataattaaatttccccattggtgaaatggtcacccttttaaattggaaaat

SEQ ID NO: 73680 - DNA, 592 bp, Arabidopsis thaliana landsberg
  unsure (1)..(592): unsure at all n locations
ctcaagcttctgttccttggacaacaagttacaaccacaaactagtgttcgcaaacatatacaatctatttattcagtataaaggctagtacaaaatgtcaaatagatattcgaagaacccatcgaaccagtaaaactcttaatctcttccatttcgtgttaattttctgtgaaatatgtattaaacctaatgttaatcgtttgtagaaattcaaagtcacaagatcttgacctctatgtgaaaggcgttcattttcatcttaacaaagtaagcttttgaatccgatttcgctgagatttgtctctttttgtggtttcttctgatttcgagggtttcgatatttggtgttggtgtttggttaggagactttagctaagagatcggcgaaagtgacgacattactcgagagtaacaagctccatgaactgcgttggatcatcagagacatggacatcaacccaagtatcttccacctcgtgactagattctgttatggatacaaaatcgaattatcagctgacaatatcngctctggtgtatgcattgcttattacctagagatgagcgatgatcatagctctaacaaacttg

SEQ ID NO: 73681 - DNA, 183 bp, Arabidopsis thaliana landsberg
tcattgcataaatgcccaaaagggccaaaggagcagtgggctcaatagaaataagcaaatttatctttttccgaacaggaaccggaagaatgaaggggagggtacattagaaaacggaattagtgaacggcaaaaaaatattgaggagggatagttgcccaataaaataccattgggtgatga

SEQ ID NO: 73682 - DNA, 2343 bp, Arabidopsis thaliana landsberg
acttttgaatcctcacattcttgtctccctccatcttttgtagttttccctgggtgctataagctctgaaactcttttaggaaggtacattttactgtatttcgaaaacatataacagtgtgccacactatcctcttcttgactgtcattggtgagatttttgaacagattcatccgtgagagaaaagagagatatcccggagctgaggtttcggttgcaaccaagtttgctgcattgccatggcgatttggtcgtgaaagtgttgtcactgcccttaaagattctctttcccggcttgagctttcatctgttgatctctatcaactgcattggtatgcacccctaattcatgttggagtaaacaacactagaaggtaacaatctcactattttcttaattatatttcaggccaggactatggggaaatgaaggttttttcttaagagcagcactgaatctacttttaactagagttcttgtcacttttggtgattatatcaaatccattgacattgtgagttatgtttttaggatatcttgatggtcttggggatgctgttgaacaaggacttgtcaaggctgttggtgtttctaactacagcggtatcatttcaatctgttttttccttctcacggatgcatatcttatgaactttcaaattcattatacttactgttgtgcgatttttcagagaagcggcttcgtgatgcttatgaaagactcaaaaagagaggaattcctctggcctcaaatcaagtcaactacagtctgatatacagagctccagagcagactggtgttaaggctgcttgtgatgagcttggagttactttaattgcatattcccccatcgctcaaggtaatctgcctttatctcctttgcgttgtgttcatgtctatcgttctctagaaaagttgcatcaggctcttatagtattgacgcaaaacaacctggctaatgaacacatacattttccgttatttgctcttttgtcttttttccaggtgctctaactggtaaatacaccccagagaacccaccctcaggtcctcggggtcgcatttatacgcgtgagttcttaacaaaggtaatagctttcgctgcatatatctaagttatttaacacaggcgtgtatgtctgcaaaaccatagttacatctgaataaccctcgagtcttctaagaaacagatttttggattttgataacttgtatatctcactgttataaacctgccgattttctcctctaatcctgcttttttcttagtaagttctgttttgagacaaagtatacacttttatacaaaacacaacaccaatcaatgtacctatacagaaattatcaaaaggtagcataatagtgccaggtttcttcactaactttgacttgtgacgttacagcttcaacccctgttgaatagaatcaaacaaattggggaaaactacagcaaaactcccacacaggttctttcccttttccttatgcactctgtttttctttttccctgtccaaaaacgttaagaaaaatacaaaagagtaattgtgtgatccatattaagctatccaagtgtacaccctcgattttgcatcaaatcatatgccttcttgttttgttgtgttgtgctgtgcagatagcattgaactggttggtggcacaagggaacgtgatacccatcccaggagccaagaacgcagaacaagccaaagagtttgctggagcgataggttggagtctgacagacaatgaagtgagtgagctacggtccctggcctctgagataaaacccgtcgttggtttccctgttgagtatctctgaactcttaacactctgtttgtagcatttgtaaagctcaaaagttacaatatgaactaaaagtagtatatagatgatggtaaagtgttgtaatacatatgcaaataaaatctttttgcctctttgagaactttacagtagccaaaaagaaagaggagggcctttggcatatgcttcaatagatctagttagagtcagacgtcaaaattcatctgcgttttaacctttctgttgactagaagaaccatttgatgcttacctcttttcatatcagcttcaagcaggctttcttctcactatctttgtgctttcaaggatttagatttagtctatagcttctttctgagtcaatatcttattaatttgagaaaatatctattgaatatagttgttttttaagaaaacttggaaaacgagtctgttatcataggtacacaagtgatgccgaaaaggtaacatcatcttgatagttctcaaaagctcagtttcattttccattttttacaagagacaaatgaagaaa

SEQ ID NO: 73683 - DNA, 456 bp, Arabidopsis thaliana landsberg
cttcaagtgtggtcgtcccggtcattggtctcgtgattgtccatcatcggctccggtcgccggcaataattccgtttcttcttcttccgctccatctcaaatccctaataatgaatttcagagatcctccagtaaaagtggaacctcaatagctcctgctcctaaagtgacgaagacgagagttcaaaggcccaagctaactcctgaattgttactctctgaggatggtctcggctatgatcttcgctatttccctaaatccttcaagtatcgtggacgaggcaaagaggcaagtctttttttcacccgcagattcgtttaacagcggttttacatgttacagtgtgataatttggataatatgaataatttttataggtgagcgatttggggaatttgataccgttgtacagagagtggcacactcatttgctaccttactattgctttgatcac

SEQ ID NO: 73684 - DNA, 532 bp, Arabidopsis thaliana landsberg
ggggtcttcgccctcaactccacggccggggcgtcgagtgtcaagtgatcacggcgacagctccccgcaggcggcgtgggagtacgcggtggtccgtgatcgactcagcgccgaacgcctcggcccctacctgctcgcgaccgatcaagacctggcagcagcgttcgcgctctacgagtggaacatcaccgcggccgcgagcgtgctgtccacggtcgccatggccgaggtcgtggtccgcaacgcgatggacacccacctacgtcgctgggcgactgcccgccgcggcggcacatcgtggctcgacgctgcgccgctggacgcgcagggcagggccgacgtgaccaaggcccgcgggtacgcgcagcgcacccaccgcgggggcggtccgctgccgcacggcaaggtcgtcgccgagctaaacctcgggttctggcgctacctgaccgcctcccggtacttcaccggcctctggacacccgcccttcacgaggctttccccgccgggccgggaaagccccagagtcggcga

SEQ ID NO: 73685 - DNA, 492 bp, Arabidopsis thaliana landsberg
  unsure (1)..(492): unsure at all n locations
tcttnttttctttagggtcttcattcaagtgctttgcagttacagtacactgcctctttacgccatcgtctcacaggtaacaagctaatttttactaagaaagcttgagaatcttttggtttggtttttcggattctttctgaaaagttgacccttttcttatattacaacagatgggaagtagnnnnnnnnnnnnnnnnnnnnnnnagaatgtgcaggttggtcttgttggttgggcacagaaagtgaaacaaaagagagacctaaaagctgcagctagtaatggaaacgaaggaagctctcaggctggtcctggtcctgattctggttctggttctgctcctgctgctggtcctggtgcaggttttgcaggaattcagctcagcagagtaacaagaaacaacgcaggggacacaaacaatgagattacacctgatcataacaactgagcagagatattatcttttccatttagaggatcatcatcagatt

SEQ ID NO: 73686 - DNA, 837 bp, Arabidopsis thaliana landsberg
caaaacgacagctcaatctcgtcacattatgtaatgagaatgaggtgtccttctctcgtcactagcttacttactttatgtttcatcattaaatatttggacatgtgatttaatgaattaattagttataaaatataatagagaaaaaaatagcgttggagaacattcaagtcaacttgtatttgtttggtggtttcatctgaaaatccaaaataactcaatttgtatttcatttatttaattgtgatatcttactaatttttgcaatctggtacagatcagaatgaatggatccatactgtttaaaaaatatatatatagatgtttttagtaagaatgattgaatgttatatatatagaatcgagttcacgcttttgtggagattttctatggtgacatcctaactcacacatattttatattcttttctgattcgaagaagttttctatgccattaaatatagttccaaaatcaacccatttgcttttgttagaaataatttttgcgttatgacttattaaacatatatgagatttctataagtcattggtatgtcacttagctaggaggttgcacgttcaattttcttctcagtttggtcatagtcgtcgagacaatgcatacccggcccatttctttagaccatatccgaaaatgaaccctctaaatattcaaattcttgtatattcttaaagctaaacaactcacttctgaaaactgcttccaagattattagcttttgaaacataaatatataaatttatcggagagaaagagtaactatgaatctatgatcacgcatggcttataagggagatttgtagtagcgatttcg

SEQ ID NO: 73687 - DNA, 826 bp, Arabidopsis thaliana landsberg
attgacaagcagaaaccgataatagacgagagtagtggaatatggacaagtatctaatctgaaactgatctctactaagaaggagaagaaaagatgtgaaatgtgaacaaaagctctgcgagatgacattagataacaatctgaatataaactaaaaatgctctaaagctctataatgagagaaggagaacaaatacacaaagcctcactacacattgctgtacctttagaacaaaaaccatacaagaatcagagttccctccacacacactgacaatcaaatatctccctaaacccatctaaccgaatcaaccaacttcccgattcctcatccaaccaaactctccaaaaacctgtttaaaatacaaagataaatcatcagcatctgagtttttctttagacgaaacaaaacttcgaattcggttgtttcgggaaaactaacctccaactgattccttcgccacataccaataggatttgaactaccatttacttcttaagacctacacaaatttaaagcccgcattggtgtgaaatccaggatttaaacgatcataacataaggtgttgagaacaaggagctttaccgttttttaaacttagacatcgccttttgatttcttcccagtgacaatctgcatgatgcgaagtcctctgctaaaagcttcattgaataatatcctcgtttgcattgactggaatccaggcatccatgacaagaacgctactggaaccattatgagtatcccaaacaatatgtcatacatgcgagcaacagagacaacagcattccagaaaatagtgtaattcttcagccacttcctt

SEQ ID NO: 73688 - DNA, 285 bp, Arabidopsis thaliana landsberg
  unsure (1)..(285): unsure at all n locations
agccaatcctgggaacgaatttccaacgctttgatcgtttgttnnnnnnnnnnnnnnnnnnnnactgccctttttttgttccgtttcagtacacccaccagagccccaagctcctgaaggcgagaaaccacctttcgtttcttagctcagacgaatcgcagctcgcggcactgaacctgatgcataaaccccacacgaagaaaaaaacgaaacgtcccaacctaccacaacaaaaccaaaagacatgctaaaccgaactcaccccgctaacaaacctctaagcac

SEQ ID NO: 73689 - DNA, 439 bp, Arabidopsis thaliana landsberg
  unsure (1)..(439): unsure at all n locations
cctttgctcgcgtaggttctggatcattttatttttaacagttttggaaaagcggcctgcttgctttgggtcagtggctgttagcactgaatgatggatattccgcttaaaaagccaaaagcaaattgccaatacctaacagatatctttaccccatgaaaataaccggctttaccttcattaaaaacacggtactgtttggctacccggtggaggatgcgatacgttccatccttcccttgtgtgatgaaatggtagtggcnnnnnnnnnnnnnnnnnnnnnnnnnnggggcctgatcgcagacattgatccgaaggtgcgtcttattgataccgtgtgggatccatccctgcgcgaatgcgaggcagtgctgaccgatgaaaccaataaagctatctccgccatcaccgggaatcccgactggtgcatatatataca

SEQ ID NO: 73690 - DNA, 514 bp, Arabidopsis thaliana landsberg
agactgccgtcctgcagcatgtgaccgattccttcttcttgtactcgacagggatgcatgacgatcgggagcgggggcacttctttcatcgcgggcggcttcaccggtcccaccgacgagacgagcacgccgcccgggcgcaacaccgaccaggaccgcgcttgcgtctcgccgccgatcacatcgagcacgccatcgacgtcgtgcacgatctcttcgaagcgctcgttcttgtagtcgatcacgcgcagcgcgccgagctcgtgcacgtacgccgcgtcactgccggaagcggacgcgacgacgcgaatgccccgcagcgttgcgagctgcaccgcgatcgagccgacggcccccgcggccccgtgaacgaggatcgtatcgcccggcaagagaccgaacgtatcgagcgcctgccatgccgcgagcccgggcgtgatcacgctcgcggcgtggatgtgatcgaccgacgacggctatcgcacgagaacgatgccggggaccgtcgcgtact

SEQ ID NO: 73691 - DNA, 538 bp, Arabidopsis thaliana landsberg
ctgccgccctgccctgagggagacaggcccttgtcctgcagctgccatttcgactttcacgcgcccacgggccagggtcagacgcagcgagttgttatccaggcgcctgacattgaacagcgtaccgagcacctcgactttcgccaggccagcggacaccacgaaggggcggtacacggccgaggacacatcgaaaagggcctgccctgcgcgcaggtcgacttcgcggctgagcagacgccaactgatatcgacatgcgtgccactgtcgagcagcagcttgctgccatcgctcaacagcacagcgcgccgctcgccaatggcggtagcgaaacgctcgctcttgtaggccgggttcagccaggccagggctgcaaaggcgatcgcgaccgctagcgtgatacctgcggtctttaccgttttcgaaggcgctgacctggacggcggcatggggaacagctgctagagttcgtcacgatggcgccccagagcctcgtacaatggcgcccgttcgggctgcttggtcatggatgcaccc

SEQ ID NO: 73692 - DNA, 484 bp, Arabidopsis thaliana landsberg
aatgagaacatgaccataccatctccccctgcagtgtattttcattagatcacgaggtgccgacttaggaggggtaatgaaagagctcgtgccacgcctcgctaacataattagaccaccgacagaaacaatatagacataaagcctccacctaaccacgaaatacttcagcttgagccaaatgaatgttcataatcataacgaatgacatgagacgaaagaggaaaacagaccttgattaagggatgaaagatgaatcttgatccacctctgagagacgctggctacgtgaaaaccatctgagaatgactatgagcaagagaagattctctgtctataacgaagaacatcaccatcactgctgatgcaagcatgaatcgaaagcgcagaactagatcagctgactctgatcagatcgcacaaggcagagcctatcagattatgaacgtgaaagagcagataacctgatctgtaatctaggctg

SEQ ID NO: 73693 - DNA, 627 bp, Arabidopsis thaliana landsberg
  unsure (1)..(627): unsure at all n locations
gatgaagttgagttcaaagggtctcagcagccaagtatttctttttttgcnntacttatctannttatcacttaggtttgggtctttatctctttgctctgcatcgacgtttcgcttttttctctttttggaggggttataccctgtnntttgagttattatnnccgccagaataccnnntcgtctcctgttnggccttttttttaatggggttcttnngacttatgtttctcgcagaatggggaaaaaatnttatcttcatggtgcacccgctattgtnntccttcacttcnncaatgctacnnctcanncataaatgtggcntnntttggagggtattgnccttaaaccacattttcnccttctttatgtatttgtgtnntattcaagccgtttttaacaaagactnnntatttgcttcttctcttatctgcnnagctgttggcagaatatgctttgacaantcgctgttgatgaaggtgcgttcctttcttcctgatgtgctttatgttnttgatctgactacctgcttgttcattactgcaaattatttgaataagactccttagaaccttgtttctacaaatcttaatgtccttgcttaagcagaaatgttttgaatcttaa

SEQ ID NO: 73694 - DNA, 137 bp, Arabidopsis thaliana landsberg
gcccacgcgtattcatcgcggggcggctttgtaataagccatagcctaaccaatacaacattgttaaggagacgatagaaaatctcaacgtgaccatagatacaaacgttttgtatgcggacggacacaactggatg

SEQ ID NO: 73695 - DNA, 436 bp, Arabidopsis thaliana landsberg
  unsure (1)..(436): unsure at all n locations
ctaccgatggtggcatactatggaagcctgatctttcttttatgccaaaccttcactatgatgagcactnnnnnnnnnnnnnnnnnnnnnnnnnnnnnnnnnnnnnnnnnnnnnnnntaagtttaatacttgtagaggatcacggatttattttgcacacggatctcaatgctaaatagaacaaattctactctgatggtgaaagattccagtaacactctttgcttgaatggatgcataaatggtttaaacctggccaaacaaatatcgatctacaaatcgcttctacttgcagatgaagattcaactggagtgtaaatccactatctatagagatctctgacaactagatgttaggaactcttaaaatacattttcaccatattgccgacggctatgcatcatgcgatgtgggtcttaccctcttaagactact

SEQ ID NO: 73696 - DNA, 529 bp, Arabidopsis thaliana landsberg
cctcctattccctgggcgccaacgtcgaaaatcttttactcgtctgagcggcagccatcaacggcgggggcaggggcctgtacaaccagatcatcggcaacagcgccgacaatgttctctccggcggggccggcaacgatgtgctcaacggcatgggcggcgtcgacaagatgactggcggcgccggcaacgacatctatttcgtcgacgatgccggtgggccggtggtgttggcaaacgcacgcatcgtcgggcccgattttccggtgatctggtggggcgacaaggtgatcgaggacgccgatggcggctatgacacggtcaattcctccatcagctatgcgctgaccgacaatgtcgaacgccttttcctgaccggcaccgccgccatcaacggcacgggcaatagcctcgacaattccatctccggcaatgaaggcgctaacgttctcaacggcggcggaggcaatgacgagatctatggcggagacggggccgattcgctcatcggcggcgttggcgacgatta

SEQ ID NO: 73697 - DNA, 219 bp, Arabidopsis thaliana landsberg
ggaaggcattcaaagcaaaagacaattatatatttttcataggcaatccaaaacacggtgggccggggcaaattcatgacccgtagatcggcctccttgagcaggaaacaaaacatatcttgaccattgcgcgtaaaatcaagctagacaactgacaagcctcaaaggtaaacctaaacgcacaccagggggtcatgaattggtgatgtaagcacctga

SEQ ID NO: 73698 - DNA, 946 bp, Arabidopsis thaliana landsberg
ttatatgagttgatgaatagcaaaaaacttgtgggttttcttaaatttttaaatgggttaaaccattatcaaagttctggctgatttcaaatggttgaaatgtgtagttgttgccaccctgatcatgtttatagcttaaccaatgtagggtctttggtagttcctgtattctctaatctgttaatgggttaatatctttctcaaaattctctctgatttcaaatggttgaggtgtgtagtttggacacactgtgactatgcttagcttaatcaaatttggtttctttggtatggtagctccagtatcataccacattgattctcattgttctttggggaattgatggttgaattctatatgtgaagttttctatagtgatgtcaagaagtatcagtttctaatgcatggtgcttttgattatgaatgcaggggggttgctgtgaaatctttctctgcttgatggtgacgacgactcaagaattgtgtcttattgtttcgttttcttgaattttcctggataatgttgacctaaaggaaaacctttctttcgaattacactccatgatagtcaataattgaagcatcatgatgatatccatgaataatgaaactttttttttgttccgtgaagttgtgaattcagcaattgttttatcatatttgatcgattcaatgcttggttgaagatgatgcatacttaaatacaactatctaaaaaactgaaccgttcgaacattattttcgatggaaatcttgtcttgatcgtcctctattcattttcctacgaatcaaagacttttatgataagaaataatggattcctaattcaaaataattgggcagtagtaaaacagtagttaacccaaaataaaaagataaatagtgaaacatccaaaagtccaaactcttttacctgtcatctattggaccaaagtagacgtcctc

SEQ ID NO: 73699 - DNA, 439 bp, Arabidopsis thaliana landsberg
ataaaagttcagagtcataaaaaaaaattaatttttctcccattacaaatcactaccaagaggggtatattttcatctaacaacaaagaatattctgtaaatgcaaaaaaattgaacactctctatagaacaacatctatctataccagaattatcaatacatattcaatcaacggaggaaaatgaactctttttcgtttgtataccctaattcgaactttccccccaaaaaaatatcacttttcagcttgccagaaataagattcctgtaatactaaacataaaatatattcttcaaaaaatatgaatagtaaaaaaaatgcattatccttggccctagattaattataaaaaactaaccggtccatcatatttattcaccactcaaatgaaaaaaatcatggatcttaaataactcgctcataacacctttgaaaac

SEQ ID NO: 73700 - DNA, 557 bp, Arabidopsis thaliana landsberg
  unsure (1)..(557): unsure at all n locations
ctaattccagaacacctgggaatcgatctaccgcacacctaatcccgctgattttgtcatcgaggaatgacccgctacatcggcagtctttgcgcgcttcatagcccacgttgctgccaatgacactcgcttatgcggtttataatcgacaatcaactttcctcctcgctcaccccgcattgcccgtgaaattagtgttggactcgttgctgtgggcacagagatataaggcagaaacttactcccactttgtacttttttcggtctagtactcgaagttttacaaaaatctccgcatcccctaaatcgatattgttctcatccaaacgccctaaagctggagcattaatattttcccacaaaaatacaggcagtctaaaacccacgttcatccaatccaaaactccgtaagaagcaagcacgtctgcaatcaaaacattatccgcaatgccggacactcggtcgaagctttcggccgtacccacttcataagggcgacgcgcgtagtctaaccacaagcccnaagtgaaacttgcgctgtgcaaggtgggagaact

SEQ ID NO: 73701 - DNA, 402 bp, Arabidopsis thaliana landsberg
catgaccaaccattgaatagcaaggtttgttttaaagatacctactttagcagctgcgggggagcagcatggggggatgatacaccaacccgttcactttttatcgatgaaagaataacttttactttttgatcctaaactactaaattaggagacagcactcatcaaaaacacgacatatattcgatctacttttcatcagtaaaaccggaccctctgcaatcactcaatgaatgataaccactgccccaaggcctgttatggaagaacatctataactccggtaaggctcaaattacacggattaaccgaatcctgtataccaaccttttatgacggtgccccttgaaccgctcacgatactaccaacggctgtgactataaacgctagaggaatccttc

SEQ ID NO: 73702 - DNA, 680 bp, Arabidopsis thaliana landsberg
tctgcattaaggattacacgactatatttgcgattgtgtgttggttaatatataatttaggattgtctttaactacatttaggattatatgactatatttggttaaatataaaatctagctgtgattattagtattcaaaaataagtagcctaaccaattaaaacaacggctattggggcaaattagaacattttagtgtgtccaaaatataatggtcattaggtcatattcctcctagcttcatcgcagcataattgaatgattgccttatttagaagagcttttccactttcccaaaatctatgtgggatctttttgttttgaccttcatttttcttgtttaccatttttagctaaattatttacgattacaaaagatatcaaaagttggatcataatacaatttgtagacttactgtagaaaattcgtatgtacaagtacaacaaattcttcataataaattttgaaaattctattacaaatgttgtaagaaatagaatttgaaatatatataaactaaggagaaaaaaaaagagaacatgcattgctctagtcagagtggaccaacatcaacgagataagataacataaaaaccaactcaccataactaaaaacatcccaagagatccaacgattcatatcaaacacaaaaacatcgaacgatcagatttaaacca

SEQ ID NO: 73703 - DNA, 522 bp, Arabidopsis thaliana landsberg
actcggggttccgggttccagattcgctccctaacttctttccacagtgcagacgagaatattgtggtgagtgttctgcccaccgaaaattgaagaacctggagttgaagatccccatgagacagaagagggcgtgtggacattgtggtgggaaccaaagaggctactgctctgggaaggcgaaggggtgaaaattccctcagacgagggacctggtgagaaggtgaatttgtaatcagactcgtatctcattttgtacaatgcagtcagtgtatgcttgtttgatcgcggaatactcataagtgggacgggccgacccgtcttataagcacgttctgtccctacctgcccagaggagcatgctggggcgcagcgctcgctgcggagaagccgatgggactaggaatgcatactactgtctggaagtggaatgttagtctgccttgtcacgcgcacttgtttcaatttagcatcgtagacgcccgtgttagcggcgcttagttattgggtctctaatactct

SEQ ID NO: 73704 - DNA, 114 bp, Arabidopsis thaliana landsberg
aacaccgtcattccacacgagttatcaaaataacctatatgaagcttaacctagcaataagaaactcagctaacatcccaaatccaactattattttcatgacacaaacttcat

SEQ ID NO: 73705 - DNA, 468 bp, Arabidopsis thaliana landsberg
  unsure (1)..(468): unsure at all n locations
actcccggtgccggcttcggcaacattggtgcccgttacgcttctcaaactcctggcgccggctttgatgtcccgaccggcggcagtgacggcggcgactctcccgctttcccaacccagaccggcggtttcggtggcttccctggtagcggcagcgacggtgaggctcccattcagactcccggcgccggattcggcggcttccccagcggcgatgctcctgctttcccttctcagagcggtggtttcggtggcttctttggcggtcgtcacggtcgtcacggtcaccacagcggctccgaaactgaggctgcccaaactcccggtgctggcttcggcggnnnnnnnnnnnnnnnnnnnnctgacgctcccgcgcccacacttgtccccacccccggcgccggccagggtggcttccccggcactgctcctggaggcagcatccccaccttcatcgctactcccggt

SEQ ID NO: 73706 - DNA, 549 bp, Arabidopsis thaliana landsberg
  unsure (1)..(549): unsure at all n locations
gggcgtatgccggatcctggtttttgtcgctcgtttagttcntccagatcaaaagccaccgacgtcagggccggcttgtttgttgttggaaattaccggcgcaaccatcccgcgcgtcgacgctgacaggcaacggcgtcatgtccgcattggcaggcaggcaggtgccatacgcgctgccgcccactttggaattcaccgtgtaagcagcgcccatcatcgccgaataatcggggctgatcctcctgagattatagttgatggaaaagttcatgatcttggcaggattggcgttgcccgttattccagacccttccggcgcgtcgatgatgtggccgacatcgagcgcatgccccatttcatgcagcagcaccgnnnnnnnnnnnnnnnnnnnnnnnnnnnnnnnnnncggcgagcatggtcccgacgtgaagttcacgcttcccgacgaatagcctttcattctcacgatcacgtcgaagccatttttgaagtacagcttcgatgtgtcaccgcaatatccgaggccggagtagcacgtggcgagta

SEQ ID NO: 73707 - DNA, 560 bp, Arabidopsis thaliana landsberg
  unsure (1)..(560): unsure at all n locations
acaagaagtcacgacaaaatgagatcattgtgaagatatttttggtttactataaatttcatgtaagaaatgagtatgcgtatttgtaggatatctaaattatgtgatccgttttacacttttacttaagagaaagttgaattcctagaaaagtttcaaatatccaattttctcctctaaaagactaaaaacgaaaaaaaccataagtttttaagaaacgaaaaaaaaaaagtattttcattatgaactattcagtgaattcatctattgttttttccttcaaatagtaaaaagtgaaaaatgaagacggtggtaataatagtaaaaatgataacaataactaataacacttcacttcatatgttggtcttttagtaactagttgaatctagaaactaatttgtccagccttaatttacacaaaactagtagcaaacttattcgttaacacagtttcaattntggtgatatttttcaataaaagcctaaggacccaagcgatgtgaagtaaaagcatggaactctctatttaaagccttaagccgagtgtggacactatt

SEQ ID NO: 73708 - DNA, 748 bp, Arabidopsis thaliana landsberg
gtggattcaaagcttatcattgttgtattctgttaatgatcatttacgtaaatatattctcaaactcagacggatttccttctcggattgggatgacggagttgtctattgtcgtggtacgtatatgtaaaaatattcatactgtgatcgacgattcgattataaaatggaccggcattgatcatttacacttttgacttctaaatttcttcaactcgattatgaaatgggatttgatcatgataggtaccaaaagctatattgggtctgatacttgtggaacgatggggaagaagaccgcctcttatggttatataacttttatctattgctatagtgcttcattgtgtgagttgattaattacgtgtatagaaacgcatacgaatttgaatgtaccaatttgccggcatcacgcatatggtttatgattaggctggatctctcatgcattagcgactggattgaaaggtgtccctggcgttcatgtaactgatactcccactatggcatcaataggaataatggtaagtcagaaccaactcagtaattcatattactcccgaaatacagaatcatgcttttctgttctttgtaaacgtcatatttaagtaatagctcgattctatagaacctcaaaccttgattagatagagtaaatctatgatccaaacacactttcttaatgatgtacgcagctggattaggagccctaccatggatcataacggatgaggcatatatgcttac

SEQ ID NO: 73709 - DNA, 571 bp, Arabidopsis thaliana landsberg
ttaatagatacgttttcagcgcttaaagaactttattaaaacttcccatattatttttcactacagccgaagcatcaatattgtgtctgtcagtatgtaccagaatacatgttttcactaggaaacccaccttcagactccaaatcactttcattatcactatctggtttccactttgccatctttcttactctccctctaattgaaacaccaggtgaagctgaatgcctcttcctctgaagttctttaacactatcatcctctgtaaaagttcaaaagaggcatactatgaacatgaaataaaaaccaccagggatttaaaagcaaaacctcttacagagagtaagttacctgacagaggttcaggctgctcgggtaagggataattctcttccacaaatttcaacaagagctctcgaggtcccgagacaaaatcatcaagctcaagaccctatgccaagaaaaaaggggggaaagattatcaatacgtagacattagttagatggaatcaaaaaaggatacttaatattttttccaaaagtagtatgaagagaaacacacatatttatt

SEQ ID NO: 73710 - DNA, 378 bp, Arabidopsis thaliana landsberg
aagtcatcgaactaaaaataccatgactacaaactttttatgctacaaaccctagaatgattcttaagactttctaatttaatagttggggcttaggcttagtattttgggcttatctttttagggtctatatttagctacttaaaattcaggtacagttctgaggcattcccagaaaaaaaaaaattgttttatttttgaaaaagaaacatagtgatgcgatttatggaacaaaaactcatctcactagtattttaacaatgaaccatatctatatatgtctagagagagaaatataaattagaccaccacataggactacaaaaggaaagatttctttttcgagatagacctgtacgatacatgtttatcatataa

SEQ ID NO: 73711 - DNA, 594 bp, Arabidopsis thaliana landsberg
  unsure (1)..(594): unsure at all n locations
acaaacatcatgatggttttgaaagaagagaaagctcgagattatgttttcacccatgagatctaatcgaagtaggcctggtagtgttccgacacagaaaataatgttgaaactccatcaaagattcccaaacttggtgacattgctcatagctccaagactaacgcaagtacgcctnnnnnnnnnnnnnnnnnnnnnnnnnnttccgcaaggactccaggatcatttccaccaaagcatcatgtactttctcagtccctcactctaatttctaacttttgtggatattctaaggatttcatatgacaacttcatgtttgcagatgccagtgattgactcggctccaaaacttaagcctagaaacgacagaatttcaccttctcctgctgctaaacatgaggctgaagaggcgatgtcagttaagcgtaggcaaagaacacctcctactttgccaagaagaacgtctttgatagcgcaccagtcgagacaactaggagcagatatttcaaatatggcagcaaaggaaaccgcgaagctacatccatctgtgccatcagagtctgaaactaattctcatcaatctcgtgttcatg

SEQ ID NO: 73712 - DNA, 619 bp, Arabidopsis thaliana landsberg
agaacaataggtcaatagctaaattatttttattgattaaaatccaaaaaaaaagaaaatgaagtctcaaaatcaatcacaagtctgaaaacaagtaatctaaattccaaaaaaaggatagaaaatcttcatacgtcttgtataagaaatttccagaaaagggtacatgtcactcccttttacctgcggtgaaaaaaatagaggtcagcactcagcagtgacagtataaaaaaatattcaaagtctaatcaaataatatgccaaatgacttatatttttattttgtgtgggtaaattgacatatgatttatcttttaaaaacaattgaaagctacgtattttgtttggcagccaaaatatctttaacttttggcatcagttgccataaaaataatagtactgtatatctagatgtagagagtaaccaaactcactacatgcagaaaaacctacaaacatcactgtgacatttgttttgttgattattttcttccttgattaggtgaaaaactaatcccattggttaaatatggttagtgatattatagtgaatgatcattttttgatttgtgccattttctgaacactagaaaagtggccacgacttgttttttttttt

SEQ ID NO: 73713 - DNA, 456 bp, Arabidopsis thaliana landsberg
gcaaaaccatttttagtatagttaccgacaatcactcattatttttccaaaagaaaacaaatagagttaaaggcagagaaaaacgtttatttttattttgaaataatttaacattaaattcaaaaagataaaaggtagttgtgtccagaacttgacttgagatcaatttgattgaggtactaattttcgagagggatagaaaatgcgattattatgaagaagacatcaagttcagaaaggcaaaaaaaaacattgtaaggaaaaaataagaaattattgaaagacacatctatcgtccaatttgttctttgtatacgctaataactataaagacacatctatacatgccctatcttgttcaacttgcaaactaattagccacattatagatttggaaaataacaccatattacgaattaagatacatagcgtttatatcaccatattaccaatgtt

SEQ ID NO: 73714 - DNA, 481 bp, Arabidopsis thaliana landsberg
  unsure (1)..(481): unsure at all n locations
cctgtgcacgccacagcaacccccgccatccaactttttttttttgaaaatgcataaaacaacgccgtttcagagggcgtgtgaagtcctctacttctgttcaggcttagtttctgcgagcaagagaacagcggaagcctacttctcggcgggcttctcaccagcagcctcagcagcacggagagcgagcttcttctgcttcttcttatccttggcagccttctttggcgcggtcttttccgcactcgagggccttctgcttcttgatctcctcaccaccaaaagcctcacgccactcgtagagtttggactcagtaatctgagtgaagaggagcttgggctaccnnnnnnnnnnnnnnnnnnnnnnnaggacacccgtccaagtttcagggatagaaatgaggcctgtgctgccnnnnnnnnnnnnnnnnnnnnnnnnnnaagagggcatgtaagggtggacgatgctggcaaggagctt

SEQ ID NO: 73715 - DNA, 202 bp, Arabidopsis thaliana landsberg
  unsure (1)..(202): unsure at all n locations
aaccctacctcgtgaaggggaacgagtttattatntccctgattgccacatggagcaggttggttattgggttgaatcatttaacattatcatttgctaaagccggttatgttaatcggactgttattactgtgtcaactgtcacttcaaaataccttgttggtgctttctagtttaaaagtaaaatcacaaaacatgtatt

SEQ ID NO: 73716 - DNA, 752 bp, Arabidopsis thaliana landsberg
  unsure (1)..(752): unsure at all n locations
ctgtctagcataaaaccttattgtcagaattgtgatttgattgttggcacacaccgatcttaatttttaagtatagttgaacgagtatatgagaacatgcagtaattctagtttattaatttcttgattgtttgtggataaataaaccttaccttggatacactcgatttttcctaattgaaaacagtgtttgaaattttctgatggattggtgttctttgacttcaaataggtgtcagcaggaccgctcctaagctttttgtggcctaaaacatagtaaaataatataatgttttatataaaaattaacgtaattttttttatcatttaaatactaaaatatctatagaaaatttcagttttgtttgaagaaataagaacataataataaggcttattttgccaagttaaataaaatatttagagattttattggttaaaaaaaaagattaattaaagtaaaatttaagacgaaaaaaaaaattaaagtaaaacttaataaacgacaactgacaaaaaaaatggaaaaaaagagtaacaaaaattgtattaccaaagactcgaactctttaactgattacaactaggaggtacatcataaccaagagactaaagtgaacttatcaaacatgtggcctaacgtttagtatatattttccattaggtggcctaaagcagatgctttagggccctggatgtcagttaagttttatgaatctcaaatattgtggntttatttttggtttgaaatt

SEQ ID NO: 73717 - DNA, 357 bp, Arabidopsis thaliana landsberg
atgggtctcgactaggacaggctacacatttttatattttgaaattttcagatcctatagcagacgcgcttgcactttctacattgaaatcatcgaaacggacaatgactcatgactataagcatggaatacatccattgcgttgaatacaaaagaacaaatggattcttgcacaaaggagaatggtgactgagagagaaagaagcattgtacataacttactaataaacgaggaatggaaccatcgaagggacgactactcctagcattgaacacatatgaggttgacaaacgaaccgcaggaactggatggaacccctttactttttctcgtagtaagatataacggtcccacac

SEQ ID NO: 73718 - DNA, 230 bp, Arabidopsis thaliana landsberg
ctgtggcatttgtcaattaaaaagctacattactatttattatttctaaacttgcattcacacattattcttgctgacttaacgttaaaaaatcatttttaatcaatttatatacatgcactgtattttcacaactactaagctactgaagtttgattgtttaagacgataatttgtcttttcgacgattactagaaagggacttctttatctatatatactccttacgg

SEQ ID NO: 73719 - DNA, 3867 bp, Arabidopsis thaliana landsberg
gtactgtggtaatgaatcagagaatggcatctgctgaaatgttttaagatttggtacgatccattctaatggaatgtggaaacgattacggacaaaggtatctagataaatgggtgagaaacaaaatctttaaactaaaatccaaaagcggcatcaacttgaggtcaatttcagaatcaatgtaagatcgggaattgttttcaatcaccttgctgagatcaagtactttgagcatgcgcagaacaagtttcccaggaagatggccatagaaataggctagtatatcacggacaaacgtgaatctgagaggatgatacgctagaaaatgcgagtgtgcaagcaaaagattatcagcttgctccatcgcattgttctcgatgagcctgtaaagcactagagggataactggaagcaaacgcgctgcaatatcatcaaagaacgttggatacctgcgtttaacacaataaaaaaataggtaaaacatttacccaactttagcagaatccaacaccaaaattaaaacagatcaaaccaaaattcaactatttcctagtcatacacaagttttcatggaaggttccatcacacatttatggttggatgccaacaaaaccaatcaaacaatcaaagccatgtacttaagtgaaattgttgttagaaatcagttacactgatgttgaattggatatattacctgtccttccaagaaagatggttacccagggccttctggagttcattgcgtttgaacacctgtgtgacaagccagtgctcaggagacccacggttttggcagtagttttttatcctcagcagaaggtctggcgttttaagtaggctcatctgtaaataaattgaaaacaacactgtaaaatttctatgatgttaagcttcttttacgtaaaagcatgaacatactgcaattatcaaggcgtgaggatcatcatcacggtcaatgagcgccaaaagaaaaatgtcgagaggaagcatttcatgtgtccagaagaaaaatgcaagatttgcgcctgccttgtctagaactgcctaaaaaatattacgatgcaatgtaagaagatggatcaagcaacgaaaagtgaggttaatctcttctggctgacagaaacctctagagattgtccttgctgaaggtctacatgaacgtggtgaagcaaaacatcgaccaaagtgtatatgttagcagtgacttcttcaggagaaacttctctcagaactcgtgcctgataatcatttggaagagaaaatcataccactatcaactaacaatcatttcacaattatgaatagactaagcaaagcaaaccagatttgtgctgttgatgttttcagcgtggccttgcatcagcagacaagcaccagcacatagatactgacggtgttgaggaaaactgtgactgaggtatgttgaaacgtaagcgggttcagcagatggtgagagaagttgagtgcactggtttatcacagttgtttcagcctgttgccatgcctgaattgataggcccctcttgtctacccgtcctttcaaagtttcacggagaagggatgggaaatgccgcatcgtcttctctgaccatgtatgctgactcgtcgcgagtatttgttccaacatggtttgcagataaaccatgtgatcagggtctgcgataccacgtgttttgatagtgatagcaagagtcatgatggttatgcgatttaacgtctcagtgaattcagttggcccctagtgatgataacataagaacaattatttacacctgagatccaggcacaaaataagaagggggacagtgagtaattcgaaaacaccacttacttttccctcccgtttcacagagaaaaagtctctgagtgataaaatgagattcatgcataagttttcagctagtctgaatatacggtggtcaccacgttttcctttcaatgcagatattattttagtaacatcatacattaaagttttactctttccttggtatctgcaataagatcagtaattttgtttagtcgggtctaacagccaatatggcgaaagcccgaaacaattgtcatctaactaaaagaatgacccagttaaaacataaagaaggatctactccaacttgagaacttttcgctcgttttacctgtagagtggcagcaaccgatagttcagaatctcaagaacaagtaatgtcactccaggcttgcttagcagagaagcatttcgctgggccaattgctacagaaagttagctaatcttatgaatcgcttatgatcaataaaacataagataatgaaagtcaaaaggtaacagaaggaaccaaatagcttacactgaaatgtgaacggaacatcgaatgaggggaaatcagaagcaatcttgtgtatgtctcaaccattgcaatgctaggaacaacctgcactcagatgttttactacgacactaaattcatttttctcaggttttttaaaatctactattaacatttttaaacaagtaaaacgctaaagttgttttactaaaccgtggagaaaataggtcactaagtaaaaatgaccaaagaagatgttcttcatagatcagtgtatcaattaacatatataatatctttgtgagacaaaggaaacaaacctggctaacaaacaaagcttcttccatctgaagggccaatttcaagcacaaattcattgaaaagccagatagcaatgacataggtaacggggtaacttcctgcgtcatcattactcggtcgtttggctgtaatcccggtaactcagccatgccagctgaagatagccaatttataactgtttcacatgctggttgtgccatggtgtaggaaacaacccaaaacatgccaatcgacctatcatccatattcatataatccatcatccgctctcctgacaaccccaaacaagaaacagaatgagaggatgctttttataatcgggattctctgcttcctagtctaagccctgccattgaaaccttatgtacctttgcttctccaccactcatcgatctgttttcccttcaacagctgttcattgtttaggtatgccctagttgttgtgcttagtgaccaaatccgtagattctgacaactgcttacgaagtcaagcaacacactctgaggattgttgggatcagaatttctgtcttccctgtgaaatgataagatcttcctagtagtctccacctgagagaaaacccaaatagagcacaaattgggatgttaaattcgccgaaaaagaagtacaagtaattgcattgcagctgcaaacatatcattgtaattgagtaacgacctttttagcatctgagttcaaagcagtcatcacaagctccacgcgtattatttgtgcaagcagccaagtcacatgattcgtccgaagaatatggttatcaacaccgttaaggcgtaaaaccaacttgtcaatgaaatcaacaaaatcagtacacccacttttgattagaaagaagaatatatccgagaaaaccagccactcttgccagcaatttgcatctgcatagagagggggaaaagtaacagataccaaatcaataccaaagcaatcctagtataatggtatctcaactcttacttttatcttttctatctaagcctaacgaatcaacgattatagaactagaataaaacgtaaaggatgtaggttctttacagattgtgacgactagcaaaaccacttgctatttcaaaataatttccacagatttaaatggaagtgacagatcaaagacatgagaaatagggaaagacaaacattgcctgagttggtcagcttaagaagctcaacaattctgtcaatgattgcctcacaaatcatgtcagaagtgaatacag

SEQ ID NO: 73720 - DNA, 542 bp, Arabidopsis thaliana landsberg
ccatatatcatcttcatcatttaaactccataacagctaaatttccttcagttcttaataactatacacttcaaggagaagtacatgatatattttggtcaaaataagtacatgatatatttatctctaactcttttatacttgcctcttctccaacaacttgtcgatttcaggtaggacacgcttattaacgtagacacgtcattgcgttcgtattattataacgtggcagatttagccatgtcatatatcccaatcactctgatttttttttgccaccgtccccgtgaagatcaaccaattctagtttgcccaaaaaaaaaaaaaaacaaaagtttattttcaacttattttcttaaagaggttttttctaacgtcttactttattactttgttaatttaaattatggattacatatgtaaacattgtttataagtcaatttactataattgtccacacaaaaaaaaaaaaaagattacatagtctttggttttatcgataggacaactaatacattacaaatgtttaggtataacaatg

SEQ ID NO: 73721 - DNA, 426 bp, Arabidopsis thaliana landsberg
aacatcaacctactttttaatagaggctccctatattattaccacaagaataaaaaaatagcacaagggtgggattaatgtttgttttaactccgctccaccttgtttagcgtttcccatatcatgaagtaaaatttaactattttcgaagtggttcatcttgttgattatttactatgaattgtcttcaaactcgaccaatgatattattagacaataggaaactctgagtggaaatgttgtctgcatcctatcatatctaaatatgaacataggaaaaagtcatttgattcgtgccccataaaactttcacgtttacgtgtaaatgatcaaaaagcatacatatttatggaatgaaatctttatataaaatatgcattcacatagctcgtcatggaccaatggttttaatataatatacaaaaa

SEQ ID NO: 73722 - DNA, 436 bp, Arabidopsis thaliana landsberg
gctttgtgaatcgattgtctgcgcaaggaggcggggggcggtttgacgattaccagcggaacactctgtcgtagaagcaaccagctcgagctggtggactcacccgaccgtgaaagaacactatatgtaatcattttttgccgctacttcaatggctagtgttacggctggatgaggaatgtctgcacattgaacaacgacagggaccaccagtcccggcgaaactataactgcatctgactgctataatactgcttacctggggcctgccattgtgggcgaaacattggctatcgatctagacacgtacttaaatgagaaggcgaatctgaatggagaagctggagaaggtgagtgacacatgggaggaggaactaccgattatagactgacacctattgctcctacctccacaggtaacagtgctgatctcaca

SEQ ID NO: 73723 - DNA, 406 bp, Arabidopsis thaliana landsberg
cccaactcctgaactgtcatttgataaccaccttcaccgattacagcgacaacctgtctttgtggggcgctgggtttatcacccatcgctgccggaagcgcgaaacccatagtacctgcaccacctgaggtgacagatgttcttggatctctgaatctgtaatagcgggatgtcaccatttgatgttgtccaacatcagttaccacaacagcttttccttcagtttgattggaaagcgcattcaccacttcacccatagttaatttttcagctgggttaaattctctgtgaataactttatcgcattcgatttgactcagcgtgtgaaagcttttgatccactccgaatgactgtttttattacagtgctggatcagagataccagtgccttttagcatcaggatg

SEQ ID NO: 73724 - DNA, 525 bp, Arabidopsis thaliana landsberg
aaaaggcacagcacatctacaacactgcaaggaaccactgcatggaagtattatggtgttcatcctgatcccagggcgatcgcttgatgcgaaccggcagccgcaaagtagatcctgcgcggcggagagggatccttcgggcccggactgggccatgggcccgccaaactggataagctggtgtgtctcgtggaaaagatgtcttgggaaggcgcgagggcgaccacaggggatgcacggtctcgtagtcgagaaacagaaggcaggaagggtctcgcgggcgtttcagcgtctcgtgtctccaccaaccagtcagccagccaataggaacatcgccgtcaaagtcagctgcaaggtgacttcatgtgaacagcaagacagcttctgacccaaggaattttaaaggcggaacgacaccaccaccaccaccgagtcctccgagtcttctcatgttgttcccactctcccggatttcaatccgtggctaccacaccgtacagcgggtgcccctccagagtcttgaca

SEQ ID NO: 73725 - DNA, 581 bp, Arabidopsis thaliana landsberg
  unsure (1)..(581): unsure at all n locations
cctccttaaagtgagatttcaccaatgctaaagacttttacctatgtgatatcttgttcttttcttgggttgccagctctgcatacctacaagcaaaatagagaatatcaccaagcactcttagttttctctttaaccaatatccgataaatcgaggtttaatacaatgctttctgggatacaacagaaacgtacgtttggtcatatccatcaggttgaaacactggatcccatccgaaatcagttggtcctctggctggaactatcttaccctaccacatcaatcacaaggggcaaaagaatcaaactttgacaataaacaaacagagaaagaacaaaactaataaaagagtggttacaatgttgaacataccggagttttccccaaaaatgtaagaggttcagcacctggaccacgcgagaaagagaatgcgcacaatgcataagctgatttatcttcataggccatcagtaagttgttcagacctgtacatgagtcagaccaaacattgtgtgttaccagtgtaagagatnaatgaaacatatgctgtagtgagagaaacangtgctattacaaacct

SEQ ID NO: 73726 - DNA, 516 bp, Arabidopsis thaliana landsberg
ccgtgaaaacccgataaactgaatatggaagtggaaacatttaccatgcagttttgaaacatacaaccggaaagctgcgagctgcggatcatctggggtaatgtggcggtacgtgtacccatgagcaccaatatcaaggaccgtatacgcgcccaggtagaaaaagcactctcggccgataatgccgatggcaacacttatgccagcgctgccaacttttattatgagtgggataaggacctgaacaaagcgcttgccaacattaccaaagccacacaggccaacccgaaagcatactggctgctgcttttacaaaccaggatccagaaagacctcggcgataaagtagctgccaaagccagcgccgaaaaaaccatcgccgttgccaccgaagccaaaaacgatgactacgtaagacaggcaaacgagctgctgaagaaattataagattgtatacattaaaaaagctaatgaccaacggctaacagccaacagccattagcttttttcttattt

SEQ ID NO: 73727 - DNA, 500 bp, Arabidopsis thaliana landsberg
actcagcaatcccattacaacaaatattgttaatcttgactgaccatatttttgttctttttactcatgacgttgatatcagttaaatgtaaaacattaaacgttatataacagtaaaagttataacttattgtcgttaactttttatcagcaatattttaccactgagctaacgttagtaaaacaaacacaacatccacttcataactcaggaacagtgaaatgaacgtgttttatatcctttttttaatcattcgtaacaactataatttgaagatgatcttagattatgtgcacatagctcattacacacatgattattgattccgaacaattgattacttaatattttttttgaatgatttcacaatattgttaatagcattcaatcacgcaatcaaccattatatatatttaaattgcagttacgattcacagatgcggacattagttactattcacatgtgatatattcttattctagtttaatcttgtgagag

SEQ ID NO: 73728 - DNA, 744 bp, Arabidopsis thaliana landsberg
actaaggcgaactcatacgtccagaattaagggggaatgtaacggttattatttcaggatttgtggatcgaactcgatgactaaatttcaaccgtattgccttttggtataactaatggacaaattgttacaagttttaaaatggttttataacttcgaaaatatcaatacattgttaagagaaaaatactggaggggaaggagagagtttggtaaagatgttggggacctatgatttaattgcaggtcacgtataagtagaataaagtaattaaatatcgttggatatgttttgttaaacctttcagacctaaccaaatgttttattttccttaaatcggaccaacgtggaaaccctaaaacgactctgtgtcttaattaattaataggttaactgactgatatatcagtggctttgtactttataaaaatgaatttgacatcttatttgctcaaacatatatttggtcttcaagcacatcaccaactttctctcttgtcttgtctacgacggttggcttttaatttgtactctcagttctctaacaaatttaaattgaaaaaaaaaacatgaaatgtagcattggttaccgacttctatttcatggttaccgacttctatttttaacattcagataagatataataacatagcctaaatacttaagaacattaaaaattaatatatgaaatataaattaaatgattggaataagttgaaaacctgaaaagtgatgtattgta

SEQ ID NO: 73729 - DNA, 339 bp, Arabidopsis thaliana landsberg
taggctaagacagtactaactttgttttcatcaagccctaccaacgtataaaggggggcctcctttgatggaagtgaagctaaacaaataacttttattacaagaaccattgactgtggatgtactaaaatacataaatgcaacagtccatcttttactacagacacgacaagaatattaatggcacgaaacaacatgataggtgtaactgcttatacgatacagatcctaagacctcacgtgaaaaaagtcggaaatcaatctatttaaccgacggccaacttctcggacctaaaaaagctaaagagacatgaggtatatattggaaccgggacccaa

SEQ ID NO: 73730 - DNA, 507 bp, Arabidopsis thaliana landsberg
gctgaatacaaatagaatatatgaactgcattgcttataaattaaggattagcaaggatgcataaggtaaaaggcaaaccttagaaacagcatcttgtacaaatgtctctacctgaaattatcaagcatgaagactataaacattctgtcatcaaacattattgttgtgcatgaaaaacggaatctgcaaagtattattaatagaatgtaccttttgcactgctgcatcatttataagtggaccctgtaagaattttgaagcgacaaatagattaacagcaaaatagtagagcacacaagagactcagttaattttaaaatcaaatcgcttgggatgctactcgacagaacgtagaaataaggtacatgaacgtgaaattctcatatttcttgtaaccccctcaatcatcaagggtataacatcacaaagcagaagcataagatcgaaaaaggacatacctgggttgtcccatccctaaacccgtctcctacttctaatttttgaac

SEQ ID NO: 73731 - DNA, 451 bp, Arabidopsis thaliana landsberg
ctggctgatcaagaagcatcgcccgcgctacaacatctgtcttaaggacgacaaagcctatccgtacatgcgggtttcgctcgagcacgatttcccgcgcttctttctggcgagaagggtttcggccgacggtgcgatgtatttcgggccttatccttccgggctttccgttcgcgaaaccatccgtttcatcaacaagaccttcaagatccgcgattgcaacgacagcttcttcaagtcgcgggtgcggccctgcatctcgcaccagatcgggcagtgcacggccccttgcgtgaagatgatcagcaaagaggcctaccgggtcgacgtcgattcggggatcgccttcctgaaaggccgcaacaccaaaattctcaaagatttgaccgggcggatgaaggacgcggccgcgcaggaacgcttcgagtacgccgcgcgtctgcgtgattcg

SEQ ID NO: 73732 - DNA, 510 bp, Arabidopsis thaliana landsberg
ggtccgagatggagagcgccgaaggagatagggtttcttatcgcgcagcaccccgctcggacgcacggggcggtcggccgtactcgtccggacctcctcgacatcctccaatatgcgcaggcttcgctcgtaaaccgcagcgccggtttcggtcaggctgatacgccgcgtagtccggttgagcagacgcgcgccgagccactcttccagcaactggacatgcttggtgacggctgccggtgacagtcgcatctgccgcgccgcctgcgcaaagcttccctcgccgacgaccttcgcgaatacggacatgctggtcagccggtccatcgttccgctccattgttcagtgttcgtgaattctccatgcgaggatgccgcacttctcaatcagacagaaggaattatcttggcctgtcagcaaggggtggcgggccgcgggctggcagcgaacctaacgacgaggcaaagatgtccatcctatccaacaccacagcttttgaatcgatctcg

SEQ ID NO: 73733 - DNA, 564 bp, Arabidopsis thaliana landsberg
ttgcatataagactgggataggtagatgaatgatttgaagatttattggcgaagtacgagcatgtgacgtctagcacgtctcaacgattcccgcttcttcgcacgcttcaaagggtactaaaataacaccagagcacaattgtagcaatcagcctaggtaggcatgagggagcgaaggaaaggaggctgagaagtgtccctccttggaacggaatggaagcgagcttagttgcattgaatttcacgaagcctcgcaacataaactcggcttgcatatattcatcacaccatgtactgcgaatagcggctagacggagagtgtcaagtcggtgaataactcaaatataaagcacttacagcatagaacaaaattgcaccatttgcccaagcgaggcaagcaaggaaatatgatattgctgacttccccacgccatatggtcccgatagaatgaaaccattgaagatacttggtcctggctgcccacagtgcaatgaactgcataactccagtgccaaacgcaatctctgcttcgatacagaaaactctttagtgatgctgatgct

SEQ ID NO: 73734 - DNA, 552 bp, Arabidopsis thaliana landsberg
  unsure (1)..(552): unsure at all n locations
aactcaagaacaaatttacggcagctggtgctaccattatcggcgtatctgcagataatattcagtgggtgaattcattctcctctgatccagactactgtgcaggcaagttcccggtagcttctgaccccggaggcaaaattgcaacaacctatggcctgaagttaatggctccgcagcccggtgttaaagatgtacggggcgagaaggttacacacggtttcatcccccgaactacatttgttatcgataaaaaaggtacaattgtggctgtgttttcaacgaaaaccgatcacattacaccggatgaacatgtaaaaaaagccttggctatcgtaaaggcattgtagcattgattatattgattacgcatagtgagtgccacggaacgactgaagaagtttttatgatgtactacagctatgatggcggaaaggattgtctgtttgcgggcatcttttagtaagcaatgcagatgcaggtgtttttataaccaatgccttcctcattnattaattcatcggtgtcaaaaccgtatccattatcttccac

SEQ ID NO: 73735 - DNA, 582 bp, Arabidopsis thaliana landsberg
gatctttacataatgtgtattaggactcctttcttccattactataagaaaacccaggataccagtctctccgaatgtaagggtttatctcaatcatactatttggctttttccctaaagcaaaaccatttgcaggaagacaacccaaacaaggaaaacggtgcagaagacaatgacgctatgcgaaaaattaaaatgtacccgataattttgagcgaaacatttttttgaaattattttttacaaagctattttatggattttcacaacaacatagatatattgattttcatacttgttacattattatagacatttaaaacaagcgaaacgctgcatggcctataaaattttttgacacacagtagataaaggatcaagtgagatttaaacgggcaatgcagtattttgcttaaatattcggacttttgcaaagattgcagtcagcggtcagacggttccaaaatgtctgaccgccggaagaccgctgtaacgctatcattaagcttttaaatttataaaagaataaagaatatcatgcaagatttatcaaaagatacccaaacactgtatgaagcatac

SEQ ID NO: 73736 - DNA, 566 bp, Arabidopsis thaliana landsberg
tcgtcaatcatgcaattaagtacgtacaattttttttttcttaagtttatcttgtatatatataatatagtaggtggaaattgttttttcgttccatcaagttaatttgtaagaatttacccccaccaaaaaaacaaaaggtaagtgtgaataacttgctcacattagtgcggatgatgtgtttaatacatgtaataaccaacaacttttgacgtattatccatctgaaaaagatgaaagagacctcatcatctctatacgagagaacgtgttaccctaacgggtataaataatacgccaacctatgcaagaaaatcatatcatcacacttaaatctttcaaaacacctttaaatctttcaaaacacctttagttcttacaaaacacctttagttcctgcaacacaaatattattgcaagatgatgaacaatttgcaggatgttgctcatcacgctcacgcaaacgaaggtaaatgtcaataagatttagacagatcgagttatataattctctaatcttccctcttcttcctttgtctaacaacaattattattattttcaagat

SEQ ID NO: 73737 - DNA, 504 bp, Arabidopsis thaliana landsberg
aaagcgtttcatagttggataattgttactgttgttgtttctaactgtttagttaaatttgaaccttttgaggtttcgatattactcaacatcaactttatttgtgtgtgaaataattttgtgttctgtttgttttttgaagctattaaaaagtaaaaagagtagacaaactaatggacttggtcttcttttccgcaaatccaaatttcaacctcacagttgttcaagattcataagttctttttgtgcagcaaatgcattaacctgaacagctacaaaaaaaaaagtaaagatggtaagttcttaactaaaccaaatgattgaacaatctgttaatctttgttgaaatttcattggtgatcacatgctctggaatgatttgaaagatttaagtaaacaagatattttcttgaatggtaaaacttttttagaaaaaaatttgtatttaatattctacaaaaggcttgtcaaatccattaacttggggaacgaaaacgagataaa

SEQ ID NO: 73738 - DNA, 597 bp, Arabidopsis thaliana landsberg
tgctgtttcttcctagtgaggcacgcttgagatgatgttgccagttaatcgaagaatatttttacccgtgatagtccctcaggcgccgttccattgggccaatccacttatacttctttggatccagagggatagggagaccgccggggatgcatttgaaagggttcttggttgtgggtgactgacggccgaattcttcttgcgttgataatggtgttatgaagtcagagcaacctaaaaacgcaatacagaattccgccgccaagtatcgatgggccttagccggggaaatgtggagactcttcgaactgacatcatctgtgctaaggattgcttggccttggagatactccttcatggcagcatgcgaaagattgatctccggtggcgtaggccgatagtcgatattcaagaattgtccaagccgaagacagaatgcattggggttccacgggatggttttcttgacgatgaagttgtctttcgttgtcttcagcataaccacccgaacaaactccccaactgagaggcagtaattagcttggcagagccagacgaacatttattggaaaatctccaaattattctcttcaggat

SEQ ID NO: 73739 - DNA, 478 bp, Arabidopsis thaliana landsberg
aattggagtttgatgtgagaactcagaggagatatgaaatatagtactcaggattcatgccattcgaagatggtgcgttaactaaaactgttctttgtgattgggtaactgctttccgtgcaaactcatatcaatattcattctcaggcaaaaacttgtcttgattccgcagagcctgcttcaagaaaatgactggaaggtctaaagaacaaacgagagcgtgatactccgtacgaacctgaatggcagaggactgttgctcaagacaatctgtatgtaccatatgaaaaccgattcccttttttactagtggatgaaaaactcccttatctaaaggaaggggtgtgtttgaatcaagacagaagttgaatgttgttgttatctagatgtatgatcatgagtccttgatttttctgcaaacaccatcgtttgaatatcgagagcatgagaattccgcaaaaccagatacagataatta

SEQ ID NO: 73740 - DNA, 472 bp, Arabidopsis thaliana landsberg
  unsure (1)..(472): unsure at all n locations
caaaggcgcggaacggctgcgccgcgcggagtaccagagacatgcggcggcaccctgcccttgaacctttcgtggaccaagcaagactccggcatgggtccgggccagctgatccgcgtatttcacgttgacgaagaaagccaggtgcatcggcccggactcctaaagcgaggccagcccctatacaggctggaccgcgcgtgaagcatcagccagatgctccttgggnnnnnnnnnnnnnnnnnnnnnnntcaaccttgtcggatctcggaagaatgtgtgctgagtcatgccacccgctgcgaccgatcgcgggggcacgcttagaacgttgtgccggcgccgaaccggaatttctgcacgcgatcatacttacccttggtgaggggtacagcgtaattgtaacgccacacaccgaacggagattgccagagcaggcccacacccaccgagctacggatcgttgaattac

SEQ ID NO: 73741 - DNA, 616 bp, Arabidopsis thaliana landsberg
caatttaagtaagttttacatttcaaactgagataatgtttaaggactatagttcttagagttttaatttacatggaaagcgagaaaatgaacatgcagaggctatgatgagccaggcacaatgctggatacattctttgcattatccatctggggttaaactgtcatcttgtaggggattcactggtttaatcattcattcattcattcattcattcattcatccattcattcattcattcattcacctattcactcagtgtttgttgagtaaggcagcaaccaagttcagacctaagacattaacaatgacagtgagagccatgaggactagggagaggggcatccttggactacaacatccatttttgatgaggtgaactcccctagtaaggaaaggctatttggtttcctttattctccagatgaggaaactgagcatagaaccaggttgttcgctgttaaccagcaaaacggaaaagccctttctcagtataaacacaggatctttctgatgtgccccactaccattagcacagtcctggtcatctcagttataacataccaaacacaccatcttatccacccttacaactggactggtgccatttcacag

SEQ ID NO: 73742 - DNA, 604 bp, Arabidopsis thaliana landsberg
cacggtaggcaaactgtaaatttatctgctgcccgataatactccagcaaagcgcctcaaaaaaatcgggaatacctaccatgtgaagtcccttgtactgttcggccagtggagaaagctccctgtcctttcttagtaaagcatagaaaggccggagatcccggtccatatcgaaccattctttgataaaatggataacaggctcaggattcggtacttttccataaagtacctctacctgcaattctttttgaacttccgaaatctgttcagcacaggctttcgattcacctttaaaagtttacggacgcggttatccttcacttcatgcatgcaatcgtccagattcctgtcgaggaaccacaggcattcggcaaagctgaacagctttggaattggaatagtgaaggttggatgttgcataagtaagttctatggccttgttgtatggaaatgttgtttctgtaagccatctcaaaaatactctatatagtcattcagaccacttcgacttactcaatgtaaactccatggaggaatcttttgcttaattctaagatgccctggctccgctcgcatgacacaaaataaaattacattttgg

SEQ ID NO: 73743 - DNA, 634 bp, Arabidopsis thaliana landsberg
  unsure (1)..(634): unsure at all n locations
gttcgatgagaaactcgaacacaacttgtaaaacacttattgtttatcaaaagtcaaaagcctttttgtacatattaaactttccattactaaaccaaaatagtttttttgtttttgttttgtatcaatgttgttaaaccaaaatagttttgtgaaataacaagagtcacaagacttacaaagtcagcctctttgtcctcatcgatccgttaaagacctattagcaactactagttggtacatacatagattataatatactttcaccagcatgatataactcacacttatcatcttattcaaagggcttaccatacccaagagaatcgaaaacaaataaaaaacttaatccaaccccaaaaccactcttgtagtcctttttccttagcttagtttgtaattttttttttttttcgttttttttagcagttttcattcaatttttctagtgagttttaactagaatctccatttgatgcacaatatgcaccaacaaaatcttgtgcaacaccacatgttagcttgtaacacacannatatttcttatggggttctaactngaaattaagaaagaaagaaaaaatctggtccagatgctatcagtaatcctggtaagcccaaaaatgagcccaaa

SEQ ID NO: 73744 - DNA, 534 bp, Arabidopsis thaliana landsberg
  unsure (1)..(534): unsure at all n locations
gacgtgctctttcagcatcgccagcacttcggcggcgagctggccggccacgcgcatggcggccaggtcttcgggggttttcagggtaatggccatggttccacccagatggcggcggcgggccgggggatcaacgtccgccggcaacttgccgcctaaccggcgcaccggctacaattcacgagttttgcagaccgtacacgcccatttcgggcgatcttggctgcacagcgaacgggcattgtaaccgcgccgcggagcaagcccaaccnnnnnnnnnnnnnnnnnnnnnnnnnnnnnnnnnnnnngcgtacgtttccgccacttaccaggaaacgtcgcggtcgaagtcggggatgcgtggaggtcccaacccccaggttcctcatcggaaccgacaattcggannnnnnnnnnnnnnnnnnnnnnnnnnnnnnnnnnnnnnnnnnnnnnnnnnnnnnnnnnnnnnnnnnnnnnnnnnnnnnnnnnnnnnnnnnnnnnnnnnnnnnnnnnnnnnnnnnnnnnnnnnnnnnn

SEQ ID NO: 73745 - DNA, 463 bp, Arabidopsis thaliana landsberg
gtccgatgctggtaggccggtcggtcttcaccgcctatgccgtccgccattcgagccattcgaactttctttacttcacccgcatcagcatatggctcgccgtagccggcgtcttctggatcgccggtggcctgctggagcatgaggcgcggctgatcgcctgggtgattgcgctggcgatcgaatatgccggtccggcctcgggcttcttcgtgccggggcttggcaagtacgtcgaccgccgactgggacgtctcgggcgcccatatggccgagcgttgcgcgctgttcatcatcatctgcctcgggagaggcggtgctggtgtcaagccgtaccttctcggaaatgccgttctcgccgatgaccgggctggtgctcgtcaccagctttgcgtcaacagcggcgatgtggtggctctattttcgctttggccatgagcgcgccgatcaccgcatcgagcac

SEQ ID NO: 73746 - DNA, 563 bp, Arabidopsis thaliana landsberg
  unsure (1)..(563): unsure at all n locations
acacttctcgatgcttttccaatggtatttttttttcttgcatataatacaatcgtatatatgtacatttcttctaatgagaagaaaacttgtgtaagaatataaaagaatcaccgttaaaggtagaacagagcaaggattagggtatttcacggcagnnnnnnnnnnnnnnnnnnnnnnnnnnnnnnnnnnnnnnnnnnnnnnnnnnnnnnnnnnnnnnnnnnnnnnnnnnnnnnnnnnnnnnnnnnnnnngctctggatcttctccaaccctgaactccgggtgggcgtaggcgtctcgaaggaaagctttgaggtttaagtttggttcacgtatacggtccagtgtatctttgatcatggcttcctgctttggctcgaaacaagaaaaaggttagcttacacgctttacgtatagctactagagatcttcagttatttctgttttttgtattaactgacctgtaacgggtatgtgacaaaggcaggttggtaacggtttttgcagtgtttgtggaacccgatggtcagcaacggatgcacaagcagcaaggagtggacta

SEQ ID NO: 73747 - DNA, 707 bp, Arabidopsis thaliana landsberg
actatctttttctttcatctctagatctgtttcatcatgttctttcttcttctcttcatcttctttctcaaggtcacccttctctcccttttccttctttcccttcacctttttgtcttcattactcttagattcttctttttgtttcttttctttttttggtttcttctttttctcctctgtacctgattcatctttctctttcttcttgttctttttaccatcttcctcttctaactcttccttttcttgtgatacatcctcatgtttcttctctttatctgccttcttatttttttcctctggacccgactcatccttctcttttttattcttcttctttttaccttctttttcttcttctaactcctcgtgtttcttctctttgcccttcttgtgttccttctcatgctcttccactttcacatcgctctctttaacctccagatctccatggccttcttcatgtttcttgaagaccatttttccatctttctttttgtcatcatctttatcttcttttacctctgagtccacgtttttgccctttttcttttctttagccttcttgaattttccactactctcttcatcttttctttggtttaaacctttcttcaattagaacttttggccttttcaactttcccattctttccaaacctttaaaaccattttttttccccccccttttccttcttttttgg

SEQ ID NO: 73748 - DNA, 761 bp, Arabidopsis thaliana landsberg
aatttgtcttcattgatcctggtaaatcccaatttccatatccaattgcatgttcttagattcttcgataatctgatctggttggttactgagaaagagatcgatctacttggaatgtttatggatttaagtttttgtttaggtttaaacggacatttaggtgaaatgggtgaccttaaaggttcaaattcaccacttcatataacaactatggttccttctccaattttcctctggagatttaaggtggttttgtttctgttttgggctttatgttgctgcaaggtaaagatcttattctgttaagtctgtgtattgatgttaaaatgtgaatctttgatgatgttttgatgatgtgtatagattggatgggattcagttatgagaatgagtatcgacctgcgagatttatttttgtatgaagcgtttctttattacaatcctcttcttcttgtggttagtttactctcttttatccttttagagaaactcttttctcttctgattagtgattgctttgtggatttttgaatactttagacaatgatggtttggctgtggggagtgaacttatgggtgttctctcaaggaagtgttaattattccaaagtctttgatcttgatcataaccaccttactcatagagagatgtggaaggtattttaagtataaatttaactttttttttggctttccttgatatgaagaaggctgctgctccatgatgttctcgtatcgggatattttgtgttgtatttggc

SEQ ID NO: 73749 - DNA, 962 bp, Arabidopsis thaliana landsberg
agtccaacacttaaaacgtgaaacaaaccaggaattcttaaactttgggtagctatcttccttcagagcatcagctgttgaagattttggagccacagcacaaccactaaaacaaaatagaatatacccttttagatatctattcatgtcaaccaacaaaatgcacaatctaagagaggcaccacgttcgctggaaaatacctaaattgcacatagttgacatcattctcatggccccgtagaacatccagctcatgagtcggctgttcagcatcatccaagttaggttttgaggcactccaaacctgcaagattatggaaatactgacaatcaagactaaaagtaaacaaaaaccacatatcccacagtttctgcattactaaggaggataactaaagttgaaagtttaacacagacccttgcattgctgtcagagctacccgtgacgaaaatggttccattagcattgtatgcacaacataatatttgatgactctgagatgcattgctcgtggatcctgtgttggaagatgtaaaagtgctttcgcctaagagagaaacttccaatgagctctataaccaaatatatcttaacattgaacaaaatatgatgatgtaccactttttaccagtgttagcatctgaaggacttggaacatagattcgtgggagccactgagaatacctagcatcccagatacgacaggttccatcatctgatgacctacatagattacgaaaaaccacgaataactgattaccaatccagacgcagtatgaaacatccaaactaaagatccaggggtcttgaatagaagcgaaacaaactagttaaaatagatacatattgatcagaactcacgataaaagttggtaaacagacgcctgtctggaactgaaagcaattgcggtaacagctccagtgtgtccccgcaagacagaaattggcattccatcaggc

SEQ ID NO: 73750 - DNA, 557 bp, Arabidopsis thaliana landsberg
aaaagagagctggatgtccctttccagatgtataactttttcttaaaacgctataaagaaagaagcgagggtatggggacattgctgaaagaaccaaaacctttccatttcaaccaggacgagtccatgaacaccgaccgcgataaggcggcatgggctaaaaataccgacgagctgaacgacacctggcgtcaatacctgaaaagcgaggcattagacctcaaactgtcgggtaaagcggacactgcggtgatcagcaccttgcgcgaccgctacaaaagccgtgaccgcgcgttgggccgcattcgtacggaacaggtattccagatgttcatgaacgcttattccgagtcgctcgacccgcatacgagctacatggcacctacttcggctgatcgctttaaacaggagatgagccagtctctggaaggtatcggtgcattgcttcgtgaggaagataattatatcaaaatcgtggaggtgatccctggcggaccggcattcaagggaaaacagcttatagaggaagataagatcgtagccgtagcgcagggcga

SEQ ID NO: 73751 - DNA, 611 bp, Arabidopsis thaliana landsberg
tgctctcagttttgccacgtaagctaatgtttatccgcaaaactacttttaaataaataaataagaatatcattttttatcgggtcaggtcatttcgggtcgtccttaccgggtcggataattgatttcttcttcttctctctatctcaagctcgctaagattctcatcaaatttcctctttagactaagatagttcttccgtattcttcaagggtttttgtttctagacctaaagtttagtcctttttagaagctttgtgtttgatttcaaaaccctagctgttccggattctattgtagaaacgattacttaaggttcaatcggaattagggtttgaattagaaccgtaacttcgtgtgtttttaggaatgatactacactgtcctgtctctttgtcacttagctttcacttgaatcttcgaaccagtagaatcggaaacataggagtaacaagagtcaacgctagtcaaaggaatcactctaagaaactcactaagaatctccgtaatccacgccgtaccaagcttcctcctgatttggtggtaatttggttcttaggaacccaaattgaaccctagtgattgtgatgatgatgagcagttcaagatc

SEQ ID NO: 73752 - DNA, 763 bp, Arabidopsis thaliana landsberg
  unsure (1)..(763): unsure at all n locations
tatgttagaaatagtgaaatttcattaatataacaaaaaaaacatttagataaacattataattttttttaatattgcaaaacttgatctgcgttgagtttgctttctttcaaaattcataatctcagaagaaaactacattaggtctctcttccccctagagccgctactccctctcactttttcactttttgacctctctgttttcgcatcaacaaagtgatgatatttcactaatcaatcaaacagagagactcaacttacttgactatataatgtttgacaaaccctaacggatcttttctcttttctttcttacaccatctcgtgcttctcccaatccaatcactgccccctctctctctctctctctctttggggaattcttacttccatgacctctctgcctctctctaatcttaaatgttctcttcttttttctgtaggagtttcctttttagtatactgaatcttaccttttccccatttaagttttaacctttttgctatatttagtaaacaagattttgtcatagggtttagggtttaacaatagacttcatacgaaaactttctgactntatatttttccttttcttaaaaacacacactaactttaacctcaaattcaacagtcatcaagatttttctcggattctaatcaaacgtccacaggtgaaaatgtcctcttgtgcctatagcttcgaggtggaaatgatgaactcgccgccgtcaaacaacactccttcaccgtcatctacaa

SEQ ID NO: 73753 - DNA, 261 bp, Arabidopsis thaliana landsberg
  unsure (1)..(261): unsure at all n locations
gaaactatgagattctgtncataaaaaacccacttattatatataaaaaggcctctttgttttgtgggtgtgttaaattaaataaaacatatcccttaaacaatttaaaaaaccaataaactacaaaattaccattattttctttatttcaaacgccctatcctatataaatcaccttacaaccaaacctttcatctacatgataacaactatttcttcacttaaagtcatttgttatcatccactattaaaaaacaaacc

SEQ ID NO: 73754 - DNA, 544 bp, Arabidopsis thaliana landsberg
  unsure (1)..(544): unsure at all n locations
gccagggttccagcttgccgtgccagcctttgtcatcaatgatctggtattcgggtccgctggttaaggtattcggatatttctcattgacatggaacatgatgccgctattggaagccggcgatattttccattgaatggtaagcacaaaattggcatattcaccatccgtgatcaggtcagtgggagcagcgccttttttatgtccgttgcaatgcaaggtcccgctttccacgtcccaggcagcgattgatttattttgatannnnnnnnnnnnnnnnnnnnnnnnnnnnntaaaaaggagtgcccacccgcctgctttatcttgtggtgaaagctggttgacagatgtatcggaggtaacggcagtcgttgcgactgatcccgaatcgcttttttcctggcttgtgttgttagccgtggaatgacaggagaagaagaaaacggtcagggcagcaaaaaaaagatattttttcatggtgctattttgaagaattaaactgatctaaaaataaaggcagtttttttcgggaaaaagtatttt

SEQ ID NO: 73755 - DNA, 603 bp, Arabidopsis thaliana landsberg
  unsure (1)..(603): unsure at all n locations
actaattaccactttaacatcatcaaattcacatcacgtaattcactatgactactgtacatttttcataatgaaataagttagacatatgcaggtggtaatggtaaaatatatagcttttgtagaatacaccaagttcttttcttttccaaaagagcaaattgggtaataacgtgacgaatgcgactcgagccaaactcaagtggcaatcaatcctacgattgtagaacataagataaataagaacagctaacaaaagtcaacgtcagatttgttggtggacaagaggacaatgaaaataaataaatgtttggaatcttccaagttctagtaattttgttgttaatccacctatcacggatcatgatgttttgttgctacaatcttttttgtttaatccttttaaaataaataaattagaataactaaccagcaattactagttaaattgattaatcgaatatttattagttagttattggtctgatattaatggtgtggtcaactctttaagtgtcaatgctaaagagatacaataatgaacaagtattatctttcatttatctnttaacgtttaaattattcattatggaaatatgagaa

SEQ ID NO: 73756 - DNA, 480 bp, Arabidopsis thaliana landsberg
gtttgtcaatgacatatttggtgaactatctcctgaattatgatatgcgacatttgcttgcattgttttaaattgatatttcatacctataaattattactctagttcccgagttataattagtctctattttggacacgactcaagagcataacatgatctaagtgcttaccatgtttcggtgttttaagttttcttgcctagtaagggacaattccaatcaacgactttatttggtgaaaataaaagaacaccattcatcatgataagaaatgtgtgatacttccacagatcgattgacataaaatctgaaatcaactcaaaccaaactttaagaatattgaaaagtacaactttattatgtgatatagcgaaatagttatagactgtttttcgctttcattacctagtcttcactaactccttgaattggctagccttcatgtataatcccaattctggatatatattaagaaaagc

SEQ ID NO: 73757 - DNA, 1883 bp, Arabidopsis thaliana landsberg
aaaatatggaataaaagatcgaatgcaaattgaaaccccgaaacttaaaattgatgctcttatctcttccttcttcgtgtaagataatgatttggagatgtttgagataatgtagaaatgtattagttttgatgaagaaggaagaagaaagaggagaagaagagaggtttgatcaaattgtaattcgcaaattatttctgagttctctacaaaacaagaaaaaatgaagcagaaaaggttttaaaagcaaaaaaaacaggagcagaagaatccatgccgtaggatttaaaagcttattttgagattgttttcagctatttatggattttactgataatgaaatgtattagttcataactagagctctctttagccaaaatttactaatttttcaaatcactttgattctgataatatttgggttgtaacatgatgtttcgtttttgcaagagtgaacatacaaagatatgaaccaatctgctatatgtttgtaaaagccttcttcgtgcaacgcagcagttacctaaaacctagctatgttgttgtttcccgcttttcttgcccttcttctgtttctgcttcaactgcgtcaaacctgctgctgtgatcttcacattcccgacaagagcagccatcagctccggatccgtacaagctttcatcaactctttctcccttactgaagcctccgacatatgtgtgaacagattcattgcagtttttgcagctgtccaaacacaaaagtcaacatcaatacagtccaaaagctctacatttacaactacttggaagagaatgtgttattaccttttcctttcttcatgctgcctggaatcgctttgactctgtatttatatgactggagagcattgtaggggccgcacacggggaccgcatataaaaggatgtcggttggtaacgggttaccagtaaggtaatcgacatcaatcagtttttctttctcttcgtcccctacttcatgaatatcgtcttcttccatcaccactttgtccatgtctgaagtttctttcccatgacaatccctagcaagatgtccaaccttcttacacctgtaacatattttcacagcatcgtctgtctctgcacagcaacccaaagcaactatcagtatcatatggttccagtctaatggaaagtgtatgcccggaaacaatttcagaagaaaaaagacaaaattgaaattttttaccttcagaaggtttcttcacttcagtgaccgcggtttttgcattctgtgattcaacatcagtcttctgtggctttccagacgactgcaaaggggagacaaattaatttaccagttatgaagtactgataagagaacaatgatggtctatgacaaaaaatggagaatccaagggaagtacttactgccaacaatgccatccgtatttttctttcgtcttcatcttgatcagcatacttctccttcattttcttaagtttacccctttgcccacggctaactttttccccagctggcttgttatcaggtatgctcttggtagcttggcttaaagaagaaacgtctttttcctttcgttgctgcttttcttgcccagtgttaccatcagcagctgtgttgccgctttggcccatcttaagctttcttctttcagcttttgacatataaggcttatctctcactactgcattcttctcttcctgtttcatcttctcttccatatcatcttttgatgtctctattgtatctttcttgcctgccaccgttgcagcaccaagaccaagggttctatcaagaagatcttcaagctgtgaggtggctcatgcaacattttcttcagtaataccagatgaactcatgtctaaagaagaagtatcttggctcaatgccgtacttg

SEQ ID NO: 73758 - DNA, 611 bp, Arabidopsis thaliana landsberg
  unsure (1)..(611): unsure at all n locations
gnnnnnnnnnnnnnnnnnnnnnnnnnnnnnnnnnnnnnnnnnnnnnnnnnnnnnnnnnnnnnnnnnnnnnnnnnnnnnnnnnnnnnnnnnnnnnnnnnnnnnnnnnnnnnnnnnnnttgccgtcagcgcggcctgaacttgcgtccatagatagcgcacgggggcgggctggataggcgctttttggtgaacggtgcgttttgctctttgacagaaggaaaaattctgctatccgcgctgatcaggaccggcacttgcgccggcagggaagacgacttcatgttctacacgggaaccccacgacgacgctgatgcttcaggctgcgcccccttcggcggcggcgcgataacccgcatccacagcttcgtatccggttccccgatccatgaacatgctcaagcacgatatcgtctacctgacggaagatgcctcccacgacgccgctatcgaactcatcaacgaggaagccttcggccccggccggcatgtgcgcgccgccgcccgcatccgcgagcagggcccgcacgacctgtcgctttccttcgtctgcaccgatgacagcgagaccatcgcctccgtgcgcatgacgccggtgatggcgggcgatgtg

SEQ ID NO: 73759 - DNA, 257 bp, Arabidopsis thaliana landsberg
atgctggatatgctctgcaaatctactcttgtctgtcctaactgcaaattcatgcaccatgatgatcaccggtcccgaagggaccacagactttaacatttgtttaagctcttatgctagacttttatagaggtgtggacgggcccctgaatgtgaaactagatatgtatgactcattggtatatacaagtactgattgttttattatatgctttcagaccaagaacctctggactacatggttgagccgctttcca

SEQ ID NO: 73760 - DNA, 599 bp, Arabidopsis thaliana landsberg
  unsure (1)..(599): unsure at all n locations
gaccaaaaatggagtcttttatccaaatattacttttaattttttgaaaagtttctttttttgctgatttggttttgcaacactatatagcttctaacttctaagctacaaaattgtttataaacatttatgcggatccgtgtaccttggctagacaagtttgggctttgtccttgattccagtcccaaaaatggctttagttctttctccttatattcacgtagctaagaacccttccattcctattgagattagtagaatttttcactgattgtttggaaatctttgaatggatttgtatttgaagaaaaagtggagctagcttctgaacttataaacaaggttggggaagaagttcagcaattgtttcaggtccaagatagatctgttgataagtctaatttcgatgtgttggctcttgagcagaaaaagtgaaaacctccccccttatacctggataaaatgccatataggagtgtcttggtccaaaggaaaccaaatgggtccatagtagaagatacttttctcacattgcatcaatgcatgatgctaaactgataacttgaagtgttgagtanaagtaaaaatcgaattaaca

SEQ ID NO: 73761 - DNA, 416 bp, Arabidopsis thaliana landsberg
  unsure (1)..(416): unsure at all n locations
ccatatgtagctttctggtctttgttttttgcgagatgtttaagtactgataaaagtaagtatgtctgagaatactcctttgtataatttctcacttttaaacagatatacttttggcttaattctaaataagtaatctaagtacgtataaatcgttgtaggaatcaaaataacaggaaaaacgaccatataattcaagctaccttgtttttgtttaatggacaaattttattcaatcgttagtcttatcgtgtcacgataggactcagatatacttaaattgaatgactttncaattttttttattattaaatttaatatgactataagggaccattggacatcctttgtgatagaaagccacctaggcttagtgagcatttacctcttatgaaacttaacatttacttctttct

SEQ ID NO: 73762 - DNA, 575 bp, Arabidopsis thaliana landsberg
ttgcagttgctgaattcgaaccgcgagctacagcatagttacattacttgctatgagctttatccattcataaaattagatattctctctgtggaaaatgaatatgcctattgcgaccgaaagaaaaatgtgaatgaggaacactcacacatgacatgatccgactgatggccaaactcattattgaagtcacttgaatatctatgcatattggatcacattgttaatattctttaaagatgatcatggtggaagcctattctctgtccaacaggcgaaaattgactagacacccgaattaatatactgtttacgcttatgcaaataggagatcattaagaatttataactatctaatttcataatatttgcatggataagtaattaacgatccgaattccagtctcatgaaagtaaatgacataacatctaccaaagaaaaaaatgttctggattatgattcaacactatatcagggctcctgactcaacgtgatatgctattataaaactttgaaggattgtgataaataacattaatacatttccttgcgtatcgactttctgctcattatt

SEQ ID NO: 73763 - DNA, 284 bp, Arabidopsis thaliana landsberg
aggtgggttttctttcatatctcctaaagttctttctttgttttctgggtatctctcaagttgagggggatatgggggtttaatattcgatggtctaaatctcatcaccggttagtcgattgttggatttgatagctcatagcttattcagttacaaggaggcgctattcagggatgcttgttagcgagtcaatcttgatggatcgttttggatatgattggtgcgtactctgtctacattcgattatggatgtgtcttatgacagctcagatcagcaagtgat

SEQ ID NO: 73764 - DNA, 589 bp, Arabidopsis thaliana landsberg
  unsure (1)..(589): unsure at all n locations
tatcccttctaacaaatcatatatccttagcaaacatgatcttgtgcttttacaagactgtccttagttgattccatctcattattgctctagtttcctcgtaagtctaaactaagtgaaaaagggaaataacaaacacaaaaagaattttagaaaaaggaaacatcaacgaatgcgtgaaaaaaggaaagtttgaaattcccaaacaaagtctatatatacagagagagagagttatannnnnnnnnnnnnnnnnnnnntctgatttcaccattaccttgttcaatttctctaagtttttcatcttgttcgacgcttgatttgccgttgctcttcgtcattatctaattctgacggcctaataagcgcaagctacaatcaccaagataatatgtacatcgaattgggcttttaagagatggaaagggcctaaagatgtatcaagagaaaatgcgttgcacttattgatgtagttggcttgtggtcaaaagttgcctctgcaacaaggaaaaccctaattgaaattaagtccatcgatgtgacaatttttctatttttgggatcttgcatctagggaaaatgggagttt

SEQ ID NO: 73765 - DNA, 387 bp, Arabidopsis thaliana landsberg
aggcaacacctcaggacgtattcatcaggatattttgcatactggacagcaaagtttgcagatgagaaaacgtgccacattcctggaagaccaaggaactgaaccatttggggagatatcttgcatggcaccattgcttttcccattctccctcaagctaatccctagactcaaattcctttctttctccaatctggtcaaaatgccttcaattccactatcgtttctagattccacttgtctaataaaacagaaccaatgttaaactccaaaagaggtgtttcaagagaccaattatatgcagactaagaactgtaaattagattactcactctgtcgaagatggaagattggaggaaagatcaaaatctccatgattcaaagttt

SEQ ID NO: 73766 - DNA, 602 bp, Arabidopsis thaliana landsberg
  unsure (1)..(602): unsure at all n locations
attttagctcgggattatgagaaagtgtaagtttactatttgaagagcgtacgttgaggaagagagaaccggtggctcagccgcttcggttatggtggtgaacggagagaagctagctatagcgagtattggggaccatagagtagtggtttgcaaagatggtgaggctcatcaaatcagagataggaaagcctcaacaaaacattggtcacaatttattttccctggttagttccttcaaacccgaatatcctcttaggttacttgtgtgacaagaaaatgaaatgagacttaaattctttaaatgtaatatctcagtttgtaatcaaggagaagaagaagatgaatcagatccaagaaattcagagcttgtagtgattacagaaaagattaattcagatacagaatttatcattatcggtagccccgggatttgggaggtaagatcaagatcaagatccatcaaaatacanactgatcaatcacttagcaaaataatttggttacaggtgatgaagagtcaagaagcgattaaccctataagacacatagaggatcctaaagaagctgcaaaatgtttagctaaagaagctttaaacagg

SEQ ID NO: 73767 - DNA, 565 bp, Arabidopsis thaliana landsberg
aaagattattctatactctctctcctttatctttgcctttttttttgctccaacctgtgtctgaattcgatgtcaccattaggtgctttaaccacatggttagcaacatgttaatctatattatacatttccataaataggttgaggacacgtgtctccatacatgtgtttacaaatatcatgttgtaggtaatgattctaacaaggaccagctaaaaagaaggtggatttctagatagctcttaagttatggtcctagatctgtttagccagttaattaatcttgttttttttcaattgttaaatgttaatacttaatactattattaatatattctttctattttcgttcatgcagcttttaaggcgatcttgtataacttcgtggtggtccaaggtatacatggcacaacatagaagcattgtgtcaatataatattttcttaatcaaatcgaaataattgtttagctcaaaactttgattggttcacatattatattgtatataataacctttttccttcagaaacaaccagtaagatctatatcagcgtgtaaataaata

SEQ ID NO: 73768 - DNA, 556 bp, Arabidopsis thaliana landsberg
caattccttactattcttattctacaatataaagcatgactttttgaccttaatgtccaaccaaaaccttctgggtttgttggggttcttaaataaaatgatttacgtattggtgattttcaaatggtacgattgttaatatggaactgatttacgtcaacccccgagaatatagggcgacccatcgttgagaattggaccacacatcagttggacaattggttagttatcatccagttcatcgtcctataaaatgaaattggtactgttgtagggtcagtgcaaatagggtagaaataaagacctagtggtagggttttgaccgcatagtcttccaaccttagcatatgaaattaataataaaattctctaatgcataatttgttgggtttcaaacttatttttttgttaaattttggttgtcaaacttaatttcagagttagtttgaatgcaataatttgttttcttttgaaaagtagtttgaatttaataaactcacttaattcataaacaactggtacaaacaaaaggctaccttataagtggtttcaacgt

SEQ ID NO: 73769 - DNA, 528 bp, Arabidopsis thaliana landsberg
atcatcatttcgcaggcttgcgtctgtctctttttctctttttcattgactctctctctctctctcgctctggaatcatcctttatttctgtgactgtgtgcactttcagagaggagagagaggcccaaaaccaaaagaaaagaaaaggttgtggcttgcagctgaatcaataccatctccatatatacaatacaccttcactattcccccttttgtatttttattatatttttcccatcaaagtctgtttttttagactccgatttgccgctttgtgtgtgtgtgagagagagaaagagagctatctatcctctgttttatggtctctggatctctgacaatcgagttgagttaattacaacacattcctctctttctcaatcgatctgtgaaatcctagattgttagctgtgtctgttttcagacaaatatgaacaccggtggtcggttaatcgccggttctcacaacaggaatgagtttgtcctcattaatgccgatgagaatgcccgagtatgtttctcctctt

SEQ ID NO: 73770 - DNA, 325 bp, Arabidopsis thaliana landsberg
  unsure (1)..(325): unsure at all n locations
gaaagcgcttggttaatgagtataaaactaaaacctttccggtcntggaagtaaagtagattaggttttaaagtttcgtctatggtttgaggtttatgttaggtagggtttacgttaaattaaggtttaagttagattgttttaggttcggttgattaggttttggatttatgggtaagttagttatgttaaagcaaattctatatctttagaacagaaaatttggtagcgttcaaggaattgactctgtcatgtgttgattgatgaaactagaactcaccgatctgaaaagtaagtatgcttcttgttacattcatggttaggt

SEQ ID NO: 73771 - DNA, 629 bp, Arabidopsis thaliana landsberg
gcgaagaggtcccatggtacaaaaggatccgtcatatccaagtcccattgctctaaagagatcgaatcttctgcaagatatgatgaagattcacttcttgaaatattactacatagtgaagagaaagacgaagaggatatctcattgcattgcgtttcaaatagagattccaagtctacttcttctgcacatagaattttgcagtttttcgccacaagttcctcatcattatcagataacattaatgtttttgttgtttctgtgataacatcatcttttggagtttgatccttgatctcttctccttcattgatggtagaacacatatttggttttttatcttgattaggatcggtttgatgagtaatatcattcatcggtttgtgcgtagccggatccaacccaagatgtttcatcttcttcttgatcttcgtattccagaggtttttgatctcgttatccgttcgaccagagaaatgcgaggcaattttagaccacctacaatgtccaaagcatccataaaacatgaaaaagcaaaattaaagcgtatagcatataacatgattatatcaatatataacactttatattacaagtctcatgaattaaaccaaaaaaatataatctat

SEQ ID NO: 73772 - DNA, 548 bp, Arabidopsis thaliana landsberg
taaaatgattggccatcttgccatgcagacaggctttcattctattcccttatcatgacttcgttgattggttcaaaaacaccaaccgccgtggctaacaaccctcacttgagtctcagttcggaggcttcaagttatccgtggctaccaaatagtgaggactgggctttacataaggaaatatgggaatgcttaccctcaagatggaatagaacgttagattggtagttcttaaacatttgagctaccagctccacgttcatgttttggatgttgatgtcctatgacattcgtcagtccgcaacgctatgattcaaggggttattaattctacctgaaggctcttgttcataacaacaacggcttcgttaagtttctcctgtaaatccttagctttctcgtactctaaggccagaatccgccactacttaccacattggtgatgatgcgggacaagaggaggttctgctgatgctcgtgtgggctctcctgtaattactcgtaagtatgcagtcataatgataaatgagtttcgcaacactaatatc

SEQ ID NO: 73773 - DNA, 522 bp, Arabidopsis thaliana landsberg
ttacgttggaactgttaggtttctcataaaatattgtaaaactaaaatataataaggggtgtgtggaattttggctcaaaaagattgtatagtttaccagatttattgattttgagactatgttgtgcagcatgtgcacaaaatttgttgattttggtaatagtgaaaatatagatccaaagatgatttttaaaaaaatttagtgaatatatagttcatttttatcgtaaataattggttaaattataaaattaaaatattgtataagagaaattaaagcgattgtaccattgttgcaaccacaaccagcatatatgtttgctcaagatttttaagttgctttatacacgattcaagcatttgatcttaatatcaaaaaggatatattaagtttaatcggctttccattttagttggtcgcaattgtcaaaatttaatattatattcttatttattaaatattattattacctaaccttttttgattaacaataatcataaaaaagctgaccatcttaattt

SEQ ID NO: 73774 - DNA, 571 bp, Arabidopsis thaliana landsberg
attaaaagacgactgcgatggtttgattgtttagtattttgaaaataaaatgtgtccaatgggataatgattaaagcggcagggattggacaaaaaaaaaggtagtgtgtagcaatggtaaaagtgacaaaattagaaaccgtaagtcaaaaagaaaacaaaatatttgtctccctatgtaacaagcccactctacgaacagctcattgcatatcaacatgaaccatttaagcttaaaatatttacattcatttttgtttaatcattcattgtatgtgttcagttttgtttcagaaataaatctatatgcaaggtgttcatacttgagaaaaaagatgacaaaattttatcaaacaagaaagatgcttggagaaggaaaaaaacattagaaaacataatctactaaccaatatcaatcatttagagtgaaatataaaaacatgtgaacatttaaataataaataaataaacatgtttgaacttagtttgagaaaaaaaaagtctgaacggattctttgatgtgggttcatgtctttatacgtcggattttcatgtttagactgttttgaat

SEQ ID NO: 73775 - DNA, 287 bp, Arabidopsis thaliana landsberg
cttgtaacgagtgtggctgtgagaacatcgcgcgtactgattgtgagtggtgatcgggtagctagcgttcataggctctcatgctcgctgcatggcgctacctaccagctatactgttcaaataatatacggtcgaagaatccctcgatgttgaggtcccaagcctgtgacttgtacctaatttgacagaattggtgcatgctgctgacacctatgaccatgtatagtacgacagggtgaagggaagagcacgaacctcctgactggcacacccaatgtcatttcat

SEQ ID NO: 73776 - DNA, 590 bp, Arabidopsis thaliana landsberg
  unsure (1)..(590): unsure at all n locations
actctaatatctacaatttttaaaaagttcagtaataataaaaaatatactattatgttagtacctgtgaatgggcgagataattttttcaccaagaataaaattaaattatacgaaatatataatattgatgtagtttagtgcaaatatttatcgttgtaaaactattacattaacatatctgtatatttacgaactaaactgattttagtttgatttataaataaaattaaatatttaataacttaatcgaatgaatttgttctggcttcgtattaatatattgtaatatcttattatatcaatataaacaagttcatggtagctcacatttttaattgaaagatttgaaaaagagtcacaaactttttctaatcatctatactcggaaaaagttatacaatcagaaagttacacattttatatagctagatatataacttgaatttattgaaatttagctaatcatctataatcagaaagttacctataaattttataaactaaatngaaacccttgattcagaaatatataaacttagtctcttaaatatgcanatgtataatctaacaaaatctcatatttaagt

SEQ ID NO: 73777 - DNA, 512 bp, Arabidopsis thaliana landsberg
cgtttatggcaacctttttttgagggtagtaaaaaaatggttcatcgaaatatcaacgttaattttagtgagccagttagtacctttttcgtaaacaagtacgtatgggaattgctctagtagataatttttttttattaaaaaaatctattatatagtggttgcatatggaagagagaattataaaaggaaactggtaaataatgtataatcatcattatttactaaaaacaaaaatcagaagtatatattaatgctagaacacaattaaactctgattttgaaggctcgaacctactactcataaggctttttcatatgtttgtaggaagaattacaagtgaagtggaagaccatcattagtttgatcaccaacattattcctctcgagtctcgatcaaagcttaaacactcgccgaggtttatcaaaaacgttaggacaataagtggcgcgggagatctcaagtaacaccggatactgaaggacaacgaacattcccagcggaatcacc

SEQ ID NO: 73778 - DNA, 511 bp, Arabidopsis thaliana landsberg
gattttttttttgtttggctctgtttttggtagatggttctccaggggcaaggtggagagggggttgacaaaaatactaaacgattggttcaaaagttacggagacaaccaattaacaatactgcaattacagttttcctaaactacccctccccaccaacttaattttatttttattattatattattgttatcagaaatcttatacagttgcaagcatcatcttcattaatacaacaagaatattctctggcttatgtgattaagatttattatattaaaaaattggaacattcaagatttatattaatatagagaatctcacgttaaaatgcaaaccaacaattactttaaagtaagaaaaaaaactgtttgtgtttcagtctcaagcttgtaatttctatgacactgaataaacaataataataaaacatgtacacttttgggatattcatgtttttttttgtctttctgagaagaaccacagatcatctttctcctttctctatct

SEQ ID NO: 73779 - DNA, 633 bp, Arabidopsis thaliana landsberg
atcttgatgatccaatctgcttccttgtgttggaaatgatgcttatggccctcttccttgtggcgagatcgcttttcctctcgagggttcgttttctcaaactatatgctttgtttaagatcaatgagtgctttgctttcttagattaaggatcctctgttttacatgattaaggtgttatataggacaataataacacattatttgcctttgtatagtttgatgcctagatctatgccactttgtattgttgaatcaaaccttttatacttgtgaaacctcattcttttctccgctttggttttgtgttttcagtttatgagtcatcttcaattgctactacccttgctcagcaacggtctccagttgcaaaggtatttacattgttggcagctttgtcctcgttatttcgaatcctgttttttgaaggattgcattcaatgctttttgtgttgggactatgaaatgtcaattaactggagcttttcagtaaaaagattgggaatcttagtgagtcattttttaacttacaatgttgattcataacagggaatgatgattaaatttgcggagaatatagccaattttgctgcttaagtggaaagagcacatcattgtgttatcgagttagac

SEQ ID NO: 73780 - DNA, 620 bp, Arabidopsis thaliana landsberg
  unsure (1)..(620): unsure at all n locations
ctataataaccacgccgttgtttgtgttgatgatgttgaaaatatcgggcatctgaatttcttcacatggtctgccaaacaaattctcgatgcccttgcgcagggagagtttctcaaagaaagagaatggaaggcgatcgagggaaatcctgaactcgtcctgcatattaaaaaggccgcggatcttggacttgagatttctgaaagtctttgcccgatggatccgaaaagtcatgctaccggtgtctattcttcggatgatgaggtagatgctgcccgacacttcattatgagttcctatctcgcattcaaagtcggtaaagagaaggcgagaagattcatggcaactcatgaagacgcggaatacgctaacaccaacatgatggattactacaataacgagttgggttttaatttcggtacgtcgctcgtgcaaaagtaccaaaagcttggtattcgcggcggaacaaccaagtacttcattgacgatatcaaggccgaaattntgcgacgccatcaattgccacgaggtagtcgagaagacttcattgtccttgcgagcggcccatctgtttgctctaaagtcaaataccctaatttctagcgtttactggttctaa

SEQ ID NO: 73781 - DNA, 605 bp, Arabidopsis thaliana landsberg
  unsure (1)..(605): unsure at all n locations
gaatgtaacagatattccagtgtagttggtcctaattttggtgtatctacagctgcaaatgtcttgtcgcgtgctccgtgcacaatggtatgatagaaatagtagaccctgtcatacaactgttctcgtacgcacactggtttgccattcttttgttcatctaaatcttgagctccccaatggcaacgaagacaagatgcttgcgatcccaccacctgagttttggaggttaagcagtcgtttgcgagttactggagacgacggtgaacggtnnnnnnnnnnnnnnnnnnnnnnnnnnnnnnnnnnnnnnnnnnnaacaaaatattttctcttcgatcccacattcactcatatcaacactcttcagcatacaagcgcgcagtgacaagcaaacagcggttatcaattgccaccaattgttagatgaacatcagaaattcctacgatagattgagagtccatcctgtgtcaggactattcatatatcgcttggtaatattatctcatatagcgaattataggtactcattcacaggagttgttcaggagacgatgaggacacaggaaatacggagacagaggggtgaagtatgagtttttttttt

SEQ ID NO: 73782 - DNA, 500 bp, Arabidopsis thaliana landsberg
ctgctcggcctcggtgtcggcggtcaaggtcggcaacccgaactttcagctttaaacctccaagggcatcaccttcggcgtcgtctgggatccgttcgagggcacctcgatggcgctcgatggcttccgcatcaagcgcgagaacgagatcaacccgctgccgtacaccgaagcggcggccctgccgaccgcgatccgttcggacaacaacctgatcgacccgacgacccacgccgtgatcccgaactcggggaccctgctgatctcgaaggcgccgtaccgcaactcgtcgtacaccgagatcaagggcgtcgacctggatgtgaagcagcgcttccgcctgggcgactggggccgcgcgaccgtgggcctgaactggacccacgtgatctcctggctgcgcgcggagtccgagaccaagcagtaccagtacgccggcacccacggcaactgcgacacctcgaactgcatcggcaccccgaaggacaagatctcgatga

SEQ ID NO: 73783 - DNA, 501 bp, Arabidopsis thaliana landsberg
aaaaaattgtatgcatttcccaacaatccctcccttttatgttttagaacataaattcctgcaaagatgcgaggcaaagaggatccttagcatcattggtgctcaattaatcgaaggataaaaataaacacacacgaagatttacaaactggatataatgatggatgaaaacacaaatcagtgaactatgaatcaaaatctcaaacactaacaattagggggaaaacactcaccaactgtgatatagaaacggcgacagatctaagagacggcgacaaagacgacgcaactaaaaacgatgacaccgacataggagatccctgggaaccgtcagagaatcagtaattctgctccgttagagcatgcgtgacgacgagatctggattcataaaattagatctgaacaaagaaagtgggagaagaacagaactgaagaagatgaggcgaagatgatgaggagatagacgaattcataatacaattgagttggaggaagaagac

SEQ ID NO: 73784 - DNA, 496 bp, Arabidopsis thaliana landsberg
ggattcggcccagagactttaaaaaaaaattaactttttaccgaccacgtgtctataaactggatttaacctaaacacatgtagagtgtataaactcaagcattctgatgaccaacctctgccgttcgagccatattccggtgaaagaatcctttccgattaaaaaaccggccataaattcatgtgatattcaccgacaacaacgaatcgaaactttgattataaagagaacaacttaagggatagtaaatatgaaacggaaacctcttgctttcttcaacgcaaatcgcgattttctaattagttcctaaaaactcaaaaccacaaagaactaagtcgaaaataaacagctttaatcgataactcgttaaaactacaatttccgacgacatcactgatggagtttattaaaaaaaaaaaaaaaacatcagatccactgtaagaagacccgatctatggctgaaaacacggctgagccgggcccacgtacgacact

SEQ ID NO: 73785 - DNA, 584 bp, Arabidopsis thaliana landsberg
  unsure (1)..(584): unsure at all n locations
gtcgaagcattactaacttttctaagtttatagagaaatacttaatcataacatatatgttctaactttgttaatgttttcgatcttgtcggcttacaaacgcgtttatgtcctaatttggaatggaatatagcatacatcttcttcatagctctttggaatggcttattgtatcagagtaatgaatatatatgtttgagttaatatgtgaagttgatttgccttatgttgcaggtcaacgatctggctttgatcgacttagcagaccttaaggatacacttaccctgatgaagtaattcaaataatcaaacgtttttttcggtagattccttttaacttctcaaaccaaaacgatgtatatatggttcttagtacttttgtattgtgtatttatctagctactttaaagaatttgtgcgtaagaaactaatgctagctagctntaatatcacaaccatctctttcatattatataaactatcgtccatctaaactntttctttatcattgatgttttgactatcttggttattccaaaaaanaaaattcattttgaaaaattgattaaatatcttatgaaaac

SEQ ID NO: 73786 - DNA, 647 bp, Arabidopsis thaliana landsberg
  unsure (1)..(647): unsure at all n locations
actgcgcggacgattctcccagcaaattagggttgctaagtgacaacgatcaagtagatcgagagactaatgaaaaagcttaagtttgtagaacaattatgataatcaatggtctctagaagggaaaacgaagaagcttaccaggctgttttagagagacagcgcggcgcagaaacaactactcaaaggccgttgaagcttctttttttttttcttcacccgccgtgaagcgtcccaaattatcttattttcatagtgtatagtactgttactagatattttatttctcaagaatgtcgaatcgaaattggcggaaaaaaaaggcgaaataaaataatgtggaatcgagattactacttaggccttttgattgatattaaactgaataattccttcatgattttgtataatgtaagtaacagttgatttaacctatttcacaaataaaaagtaacgattaagaaatgagattaatataggatcaagattacgacaaaacgaaggatacatttctctttattggcggcagtgactcttggtgatcagatgacagaggttatctcattcctagagaatgntaaattgttctcaacctatgcactactactgcactaagaagttgtaaattattctatatatatatttct

SEQ ID NO: 73787 - DNA, 620 bp, Arabidopsis thaliana landsberg
gtatatattattataaggaaagcaatattttttttttataaggggttaattagatttatttcctaaatataattaatctttcttaaggaatattttgcattgactgaaaaaattagcaataatttgatttaagaaaaattgaaaataatttaacactaaccatttttattttaacaatatctcacaaaaaaattgaaaatatctcatacaaattagattgtaataaatattttggctgactattttccaacgagaacttttacatcaagcgaaatagagctcaaactatttatttgtaaaataaagttgacgaacataaatgattttaaatgaaataaagttctaaataacattgttttctttcaaaatatctatcatagatataaaaaaaaaatagagaaattgttagaattatcctctctttgatactttttttgaaaaatggccattttctaaattgataaatttatgtgtatatattataaaagaggcatgggatataaaaccgaaccaaaataatcaaaaccgagcggaccgagatttttgagtttcagttcgggtttggttattgagggaaaccgatcgacaacatatatatttggactcggttcttggtcggt

SEQ ID NO: 73788 - DNA, 149 bp, Arabidopsis thaliana landsberg
caccaagacgacaagcgcacaccaaaacacgaacgcagctaccacgatgaccgaaaaacggagaaggggagcaccaagacagggggggcgaacgtgagaacaagaacaggggaggggatacatctacgggcaaaaaaaaccccgaaagc

SEQ ID NO: 73789 - DNA, 572 bp, Arabidopsis thaliana landsberg
aatactttctgacggacaacaagacgtgtgattaatagattagttttaataaattttatgttatttggttgttaattggctcttttgtaattggtctttgtttattcttttacgacagctacatatgtcttcacgccatggataatggattgggtttcttgggccacagaatcagctggatatcagaaaataaaaagattcatttatttaaatatattatctttacgtttcattaagaagatactactgtttaattttcttaaacatgattatagacttaagctagcttcacttttatgctgtctctatattcaaaacctctgtttgtttgtaagcaaaactttcggtaccaaacaatatcacttcaatcgaaataaattctttattcaataaaaattattttttttgtccgaaacgaatgaaatttcatatactaaaatttgttatcattcgtattttaatagcaatcactaacaaataatgctgttcttaaacaaataatgatcattcaaccttactaaaaaaatccggtttaattcatttttggtaaaaagatatgtatctttcattgc

SEQ ID NO: 73790 - DNA, 572 bp, Arabidopsis thaliana landsberg
ccggtaatggcgatgacgatgattcaactatgttatgcaggagtgactctctttgcaagagctactttggttcatggattaagccctcgggtttttatcctctataggcaagcctttgccaccattttcatcttcccatttctttacttatccaggtaattaaacccattaacccatccctatctcccaaatggaaatgtgaatttacaatttgttaagagttttatttgcttcagaatcacctttctccatatccgaatatgcaatttttttaagtttcattggttttcttctaatccaaaaagtggaaatgagtgaattggttcacatctcgtatagtatatattatttataagtttttttctaactttctatgtgacatactaaaatagttaatttttgctggccgatggatttttttttgttgggattgtaggagaaaatcaaagatagctatatcttctttggatctaaagagcttttctttaatattcttggtctcgcttatagggtaagtgtatattaaaattaatttcttaagaactccaattagatgaatcttggaccatttt

SEQ ID NO: 73791 - DNA, 467 bp, Arabidopsis thaliana landsberg
cacgtattcctgatatattccaatcccatatttcacgcctttctctgttttccccgaacttattgtctgcaggctgtgtaaatccgattctcttatccaaaccatagtccttatgcaaaccctggaagtgagcaaccctccccgcattgcattaattatgagttcactagacctcccttgccctaatttccaaggctatgttgacagactatcttgaacaataaatgcgcagtccccggtatatatagaggaccttgctggaggtcatatagaattagcggcgtgccgcactctttggtaacgctacaggttctagagcacaggttcctaaggatgttactttatatcagtcgtctactatgcaatataaatatttgattgatggatatcttctacagactcatctatctacttatttgataataacttttgtctccacggactgccgacgcatgtcacataggttg

SEQ ID NO: 73792 - DNA, 581 bp, Arabidopsis thaliana landsberg
ccctgacatgcaaactctcctttcggagccggttcgcgtatctgcattggagataacttttcgtggatggaggcagttctggttgtggccggcgtcatccgcaagtggcggctcggattcaacggtcccgttccaacagagcttgcgttgagcgcacaaatttcacttcggcctcgcgatggcgttgtgatctcagcgacgaaacgataatgcgatggccctcgcggcagggaaaagatcgtttaccaggatttgaacctggctggagagaatgctgtcatcggcacatccggggtctcgcccagcatcgcctgcgtcatcacacgggcggtcaccggggccagcaaaattccgtccctatagtgcccggtggcatgccagcaattcgcacgctgcgcaggccccagaatcggcagtccatccggagtgcccggtcgcaatcctgtccatgcgtcgatgggcgatggaatcgtaccttccggcagcagccggagcgcagcctccatcaatcgtctgactcgtgcttcctcaacgacatcatcgaaccccgcgtgctcaagcgtcgctcccacggtgacacg

SEQ ID NO: 73793 - DNA, 723 bp, Arabidopsis thaliana landsberg
gacgcttgtttttttgtggatcaccaaattcaatttagactataacaacttttaagatactactattcatttaaacttcatttttttgtttttaatatatattaccagtttgtttgttgcattttgagcctttgaggtggactaatcgacgcaaattatctgtttgaaaacatttgaattaaacaatatagtaaccgtgttaattaattaccgatatagaaggtaatttgtcatatatcagtaaaactaatagtatttgaacagaatagcctagttatattttggtttagtttttcataataaagctcatgtgactcatatatactttactttagattcgtcgaaatcaagtcacgtgattaactaagatctagtgcttcttctatggtatctattaccttttaagctttgtatccgctttttccatctttgatcttattttcttattaattattttataagctttcatcagatcctgatgttactctttgtaaacttataaatatcagtaattaaccctttatcaaaaataataagggtcgatttatatacatgggttttagttatggaacgtaatgtatatagactatatataagtacattttaaattgataactatagtagataaataagtgttacctaatatgttaaaacatacacaaatcgttgcatttggcgtaatcttaggcttcttgtcaaaagtcgtaagactgattcctagga

SEQ ID NO: 73794 - DNA, 554 bp, Arabidopsis thaliana landsberg
  unsure (1)..(554): unsure at all n locations
tattcttctcttattttctttaattttgttcataagaaatcccattttaattatatgttctcaaaatttcaacaaagagaacaattgcatcctcaattttatccaacacaataatcatcttaatcacacgtttaacattcacatatatatttttttttgtatcagtttaatcattactactgatcatgttctctcttagttttccgttgtcatctacgtacaagatcttgtgagcgtataacatcatgaaactatctgtaactaacatgatttgttattctacttaattataaatttaagttaattgtatcactattttgggaaattaagatatatatactataatataacgacttcttctaattcatctgagaggaaagttttaccttaactctttctctgccatctcgatcgctatcttttctccagtatccctctctctttcatttaccacgtgatgtagtntcttgttttgttttgttctttaaacacaaaacaagganaattgtaatttagcttttgatagcgagactgttataaaatccataaaactg

SEQ ID NO: 73795 - DNA, 497 bp, Arabidopsis thaliana landsberg
tgatttatcttttgctacaatctttttctattacagaaacttacgtaacatcacaaagcctggacagaacataccagccttaacagttcagctaaggagagttggccatgatacggtaagaattattcaattttttccccatatatatattatacataatataataagaattttgttggttttaaggtggtagttgataatggtattgtccaagttactttctcgaacccagaaggcttaataactgggataaaataccatggtatcgataatgtgttggacgacaaaattgatgatcgcgggtaagattcttttagtcttttaacatacgagtttgtaacacaacttctttatatgtttggaacatgttacattaagacaaacataattacatacggcacataactttttaataacgtctaattgcaaaaacttttggcgtattggtatggaaataggtattgggacgtagtctggtatgaaccggaaaagaacag

SEQ ID NO: 73796 - DNA, 484 bp, Arabidopsis thaliana landsberg
tttaatatctctgaaaattatttggtcaaaatcacattagattattgatatatatgatgaagatatataaattgtacataaactaagtttgcaaggaaaaagttttataagaaaggcaaagcattggaatgatgataatggagatgaaactatgaaagcatgatgttgtttgtgaaaagagaaagagggactagaaataggttgatattccccaaaatccaaaactactaaagtacacacttacaagtgacaacaccaccaagcttttatttcttttctccacaaccactattgtattttacttcaccaatcaatttattaaaaaaagactcatatataaatgttcacatcatcatctttgttcttctttcgtttttttctccaacttgaaaacggtcgctactcgtattcacctataaattatgtcttttttgttaagttatgctaaaactgaaccacattggctatcgagcgagtagctgat

SEQ ID NO: 73797 - DNA, 385 bp, Arabidopsis thaliana landsberg
  unsure (1)..(385): unsure at all n locations
attttttatttgggataaaactttatgattttatatcttctataccgcaaggccaaacgggggatcggataccttttccgaaagcccaaatagagccctacgacaaaagaaacaagacacttggaccttttacattgcctttttgtcatctannnnnnnnnnnnnnnnnnnnnnnnnnnnnnnnnnnnnnnnnnnnnnnnnnnnnnnnnnnnnnnnnnnnnnnnnnnnnnnnnnnnnnnnnnnnnnnnnnnnnnnnnnnnnnnnnnnnnnnnnnnnnnnnnnnnnnnnnnnnnnnnnnnnnnnnnnnnnnnnnnnnnnnnnnnnnnnnnnnnnnnnnnnnnnnnnnnnnnnnnnnnnnnnnnnnnnnnnnnnnnnnnnnnnnnnn

SEQ ID NO: 73798 - DNA, 488 bp, Arabidopsis thaliana landsberg
gatcgaattcaaattgctcgacgcggtttctctttgatttttggagatgatcggcgattgcgttcagcgggtcggagtactgcggtttcggtttatctcgataagacgagcgatgttaacgtattcgacgatttattcgccggtttaaccaatccgaaacatgaaggaaaggttaagcaaacgcttgtaacgctatgtaacagcgcggttgagacgtttgtaagagcgtcgcggaaaccggttcaattgaaccggtcatcgtcatgtcaagattcgtctcaaacgctgaccgttggatcaacgaaacaagcgacgtggatcgatcgggtgtcgtcgtcgttatcggtaccgagtaaccggaaatatgtggtggatttaaccgggcgggtaacgtttgagacggttagatcgttgttagaagtgttgattgagagagcaaatggtaaagtggagagttatgtggagaaagtgagagagagaggaaatga

SEQ ID NO: 73799 - DNA, 342 bp, Arabidopsis thaliana landsberg
ttttacacggcatattggtaaatttatcttgagctgtaacaaaaagacaatattacttatacattttatttgagtattaataatttatatggcctctgaataaagacaaactaccatattaatgcagatacctaaatcatagcaactctaagaaattatcgagccaaaaacatataattatttgtcggacagaaatctctacaaagtcaaagacaacgattgcggttcatttgcacatagcttgtattcgtagcctacaagtaataaaaacacgccgcatgcagctcatggaaccaccctccctataggagttcacgttggacatttgcacacccaaaccaa

SEQ ID NO: 73800 - DNA, 502 bp, Arabidopsis thaliana landsberg
  unsure (1)..(502): unsure at all n locations
nnnnnnnnnnnnnnnnnnnnnnnnnnnnnnnnnnnnnnnnnnnnnnnnnnnnnnnnnnnnnnnnnnnnnnnnnnnnnnnnnnnnnnnnnnnnnnnnnnnnnnnnnnnnnnnnnnnnnnnnnnnnnnnnnnnnnnnnnnnnnnnnnnnnnnnnnnnnnnnnnnnnnnnnnnnnnnnnnnnnnnnnnnnnnnnnnnnnnnnnnnnnnnnnnnnnnnnnnnnnnnnnnnnnnnnnnnnnnnnnnnnnnnnnnnnnnnnnnnnnnnnnnnnnnnnnnnnnnnnnnnnnnnnnnnnnnnnnnnnnnnnnnnnnnnnnnnnnnnnnnnnnnnnnnnnnnnnnnnnnnnnnnnnnnnnnnnnnnnnnnnnnnnnnnnnnnnnnacatatttcttagctgcaacgtttaccgccagaatcggaaaggctccctcactatataaatgccgccgaacatcgcccatgacaacattttttttttattgagaccattggcctggaaagaaagat

SEQ ID NO: 73801 - DNA, 484 bp, Arabidopsis thaliana landsberg
aagctcgggggcgggcacgtcgatggcgcccgcggagatgtagcccgcgagcgtgatcgtgtagggcagcgacaggtcgaaggagccgtccccgctggccagcacgaccatctggcccagtccggccaggcccatgaacacggccagggtcaggctgaccagcagcagccggaacgagaagctgccggagacgccgcaggcgatcagccacagggcgaccgccgccgtccagggccagatccgggccagggtcagccggggcggggtcagccgccccgatagcgggcggccggtaaccggcggggcgctcatagcccggccccctgccgccgctgcgcgaaccagcgcagcgtcatcacgatgatcaagatgattccctccacggccggctggtagttggtgttgacgttgaagccgtcgagcaggaccgggatgaccgacagtgccactcgggccaccaccgttccgatgggatcgacgactt

SEQ ID NO: 73802 - DNA, 325 bp, Arabidopsis thaliana landsberg
gcaatttacctttcgacttgggacggtctgttttatggtagtccttatccgtgaaccgtttatctaccctcaaagggagatttaagtacgggttcccaaatcttagggcctctttgatgatttgattctatggttgattctcattgatcaaacgtcggaaaatttgcgttattttgacttgggtttatgagaatgtctgttaatggtctgatttattctatatctgaaccgtttggtttgtcctggaatgtaggtgttaattccgactccgcatggagactagaacagggaggccacattcagagctacacccatatccagactt

SEQ ID NO: 73803 - DNA, 577 bp, Arabidopsis thaliana landsberg
  unsure (1)..(577): unsure at all n locations
agtccagctagtgctggtccagctgcatggaatgacaggcagcggaaataatgagtgatgacagcttctcaccataactcacgatcctgtctttggttctggaggataattctcccagcaggaacacgccatcgcagatactgtcaagctcattgaaatgctgtttaacaagacttagcgtagcgctttgctgttgtatcggcagcaactcacgcacagcatcaaggtggcgtgtttccatgtctttcagcaattgcctgtaagaggtgtccccggcagatgccagttcgcctgtttttaataactggtcggttacgccgcccatggctgaaaccaccagtatcacgggctctttgtcgagagatcgttgcacgatcgatattacttttttcatattggccgcgcccgcaacagagctgccgccaaatttgattacctgcatgttgtattgaataaaagatgaaagaaaaacagagatctcccttcaggagacacagcccgcggngccctatggtgatatgatactgcttaacccttntacaggttgtggtggtggtaataatggtaatagcagcag

SEQ ID NO: 73804 - DNA, 546 bp, Arabidopsis thaliana landsberg
  unsure (1)..(546): unsure at all n locations
tgattgccggcctggaccgcaagctgtgccggcaggtcgacgcgatcatgcttccagttatacagttccagaagctggaatcggcctggcgggcgctgaagttcctggtcgacaggaccgatttccgcgaaaannnnnnnnnnnnnnnnnnnnnnnnnnnnnnnnnnnnnnnnnnnnnnnnnnncgaagatgcttcggacatcacgcgctcgggcttgtacaaggccgtgtatacggccgagttcggccagttcggcggcgaaccgttcggcaccattatcggcaactatgagttcggccccggcgggcaggacatcaagctgctgcaatccgtggccagcgtcgccgccatggcgcacacgccgttcatcgcttcggccgggccgcagttcttcggcatggacgcctatgccggcctgccgaacctgaaagacctggccgcggtattcgaaggcccgcagtacgcgaagtggaatgcctttccgcagaccgaggacgcgcgcttcgtggggctgaccctgaccacttcctgctgcgcgtgccgta

SEQ ID NO: 73805 - DNA, 605 bp, Arabidopsis thaliana landsberg
  unsure (1)..(605): unsure at all n locations
atggatatcctcaaccgctatacagatggagnnnnnnnnnnnnnnnnnnnttttcgatccttttgagaagctcgaaatgctgggggatcattatgtagataaattgcagaacaatacctgcttctttaagatcatgcagagtgagcatatgaaaggccacggcaacaaagatcttgacgggatcatttttcagagcaagaagaaaaactttgacctgatctctgccttgctcgccgaaggccagaaaaaaggcctgttcaaaaaaaatattgacgtttcattgctggtcagcaccctggtcggtgcctccaaccagatttatatcggccagcagtactacaaaaggctgcatgagctggatgatatgccggaagataagtttcagcagttgctcaaaaaaagaatgagagtgtttttaaaaaatatgtttaaagcaatacttacgtatgaactatagagtaaaaatggtaagcagcattttttctttattgctgctcggcttgtcggcccaagcgcagatcactaaaaacctgagcctggacgaagcgataacataggcgtggatacagcaagcattgcgtagagtgcttgtaaaatcgcttcgc

SEQ ID NO: 73806 - DNA, 554 bp, Arabidopsis thaliana landsberg
aaatgaggaacatcaggagaagaatatggagaggaaagaggaaaaggactcttttatccctttgttcttaaccgtttttgggtttgggtttttgtcacacaaaaaagataataaattattttgtttatagaactaagtttgtttggtcaaacatcaaaatgacataatttgtgatgagtttatttcattgttgtcgtgaaggaatggagaaaggaagttaaagaaggaagaaatgcatgccgtttcggttaaggagatgggtagagagagacgtcacagcaacctctctcccccgcccaatttataaaccaatcgttttttttttttttggctgtctctgttgaatgtgatgagatattattaactgtactcatgacagtttcttaactgactctattcgtcctctgtggataattttgttgactcatttcaagttatggccataacaattaacaacattattcactggcattgtcaaagataggaggcaacaacctttacctgtgagttacgaatacgttgtcgtttcttttccttttttgctttggactgat

SEQ ID NO: 73807 - DNA, 513 bp, Arabidopsis thaliana landsberg
ggatcctggccgctggcgggacgaatcggtcgccaacactattttcgtcattggcggctcggacggactttttcctgaattgcagcgcatggccaagcttcgactggcgttcggcaaggccacctggccgcatcagttggtccgtgtcttgttgctggagcaaatttatcgggccgcaacgattctggcgggccatccatatcaccgcgcttagcgccctacgtgacggtcgatgaattcagagcacgatgtgatccgaaaatcgcttcacacgtttcagcttcataccctggtcgccggactgctcgcggccggcatggtcggcgcgtggccgtcgatcgcgacggcgcaaaccccggctccggcacccgcaacaccggtcgccgcgacaccagccgagacggcaccggccgcaacgacgacaccttccaccgacgacatcaagcaacgcgcgcaggagcttgaagccgcgcggcagcggcagaaagatgccgctgagctacaggaaaaact

SEQ ID NO: 73808 - DNA, 1299 bp, Arabidopsis thaliana landsberg
ccaaaatttggattcaaaattacgggttttgggtccaattctcgggttcgaaattttgggtggggtgttttaattaagttgggaaagcccattaaaatatttaaaaactgtttttttgttttcatgtgacacttttgggtaattaagagtctaaggagaggagatgggcaaatttgatttctttctaaaaatcaaagaccacacctaataaacttatttataacaaataaattataaaagtcaatagctgcaagttgttgttttttttcatttatgatttaaatacttatagagaaataattaattttaaaatttcatattgctgcatggccgctttgattaaacaacatttttgttattaattacacaaaaagatcgctagaagttaacaacaatatgaaaatactgcatctaaattagatatgtctaagtttgtagtttattcagtatgattacgtatagatctaaaaaacaggtaatgagatttttttttttttttttttttttggtaaacatgtgaagtaatgagaatttggaggctccacacataacaaaatggtccaaaagttaatacattaattagaaatgtcatagaaaagccaaatgcaccaaaaccttcatcaggcattagttgatcattattaatgattcattagttaaccaactaggctgatgtagttttcaaatatgtacattagatttgacttttgaggttccaagtgcaagattcacttgcctggtcaaagcaggctctgatatgtaccaaattaaatgctcgtatggttaaggattttacgtggcatttttttgaacaaaacgacatttaaatatactatatagtctctagatagtagtgtaagtgtaactaaaccctttttgttttatttattagtggaacacatataattgcctacaattactgataaaagctttaacaaaaagaaaaaaaaaatgttgaaaaaagcatcaaaagattgtctcaatctcgtgatttttgataaagcatcactttgttttattgcactaatgtggccccatggccattcatattggaaatttggaactcttctctatccttttcgttcaaaattcattccagtctctcttcacttaaaaatgtacgcaccaaaaaaacttaaatcatgttatttattcaacccatccggcttcttattatgttcctaaatttacgacctggttgtattactcgcgctcttaaaaggggtcttgggattgtgttggacctaagttcaagcttttatttgaaaacaaataaacaccctttttgtccattttttc

SEQ ID NO: 73809 - DNA, 544 bp, Arabidopsis thaliana landsberg
actgcgaagggcgatcaaacagtatatacacagatttagaatttcggtttccggacaatagagatacgcaggggtgatggcatttacctgaacggtgtacaggtaaagatgaaaggcaccaaccgtcattgcttctggccggaaacaggccgtacactcagtaatgatatacagctgcaggatgtattgctgctgaaagaaatgaacatgaatgcagtgcgttgctcgcattacccgccagacaggcgtttcctggagttatgcgattcccttggattgtatgtactggatgaactggcgggatggcagaaatattacgctaccggaacaggccgtaagctggtgaaggaaatggtgttgagagacaggaaccatacgtcaatcattttttgggataacggctatgaaggaggcactaataaagaactcgatactgaatttgcgagatgggatctatcgcaccgacccgtcatacattctcaccaccgcctcggcaatgcatttaatggtattgactgctatcattacgaagactattacagta

SEQ ID NO: 73810 - DNA, 283 bp, Arabidopsis thaliana landsberg
gagatacacatgtcctttattttttgctacacaagacttggggagacgggcacgaaggagcttaatgagattccttagtccatatacatacttgtttaattagaaacttaatatcctgctgggggtttcactcaccaaggtgcattctgtgccgagacatttatgagacagacccgttcgagcagtatccattaatcatggttggggacacagccgagtgatatgactgtcaagctaacatgctctataaagacacaatgtaccatcacaagatcgttgatac

SEQ ID NO: 73811 - DNA, 568 bp, Arabidopsis thaliana landsberg
  unsure (1)..(568): unsure at all n locations
ttgcgattccaacctcattgatggcatttgcaattgttcttattagtaatggcttagtttcttccattctgattggggttcggcttgcattacattctctatttacaacgcagtgaactacttgagcggcgtgatcgatcttttgtgaaaccattttatccagagtgttttctctcaccaagtggagtattctcacgttgtgatcgcgcaagtattctaaaagaattaatatgtaccaatccaacattttgttactcataaaccagggcattgttgtccattgattgtactgtatgatgaatccgttctttcctttcttcaccgtcgagtttgtaagaaacgcctctagtgctggtgaaattttaggtggaagctttgcatctttaggcatgtgatttgtactaaaaacttccaaggccatctcaattccaggatgtgacgacagcatactcttcacccaatgtgttccagacctttgagacgacatcagaacaatcattccatttcgccagcaatagttntgattatcttcctccagcatctgcttcaaagcagattctttctttag

SEQ ID NO: 73812 - DNA, 549 bp, Arabidopsis thaliana landsberg
gacgcctgcgccgcatcgttggagatgtccgcgaccgcgtttgagcgttcacgggtttcagaggcgatggacgtcacgttgcgcgcccccgcctgcatgtgtgaagcggcgcgggccagttgcgtcacgacatccctgaccgactcctcgaaagccgccgtaatgcgggtcatcgtgctacgcttgtcttcagcggcctgcagttcacggttctgctgttcgctcatgctatcgatcttgatcgcgttttctttgaatacatcgatagaacgcgccatctgcccgatctcgtcctcacgctctacataatgcaccgtcagtgaattgtcgcctgacgacaacatgcccatcatggctgacaagcggttcagcggacggaagacgccggtcgccacatagaccgggaagccgatcgccatcaccagcagcagggcgagtgcgatatccagcattgtcgacatgcgttgcgcggatgtatgcaactcctgcgaccacgccatgatcagatcggtcgctttgccctgatcttcttccagaacgccgaaaacg

SEQ ID NO: 73813 - DNA, 248 bp, Arabidopsis thaliana landsberg
gcgcactcgatcgtctgcgtcgattccagcgagcgcgtggtcgaggccgccgcgaaacgactgaagtcgttcgccaacgtgcgcgtgatccagggcgacatgcacgcgctggagctgggcgagcagcgcttcgatctggtgctgatgctgcacgcgctgacctacgccgaacaccccgccaaggcggtggccgaggccgttcgcttgctgcgccccggcggtcggttgctggccgtgacgctgtgcca

SEQ ID NO: 73814 - DNA, 575 bp, Arabidopsis thaliana landsberg
  unsure (1)..(575): unsure at all n locations
aggtttgtcgccactctttgtcggctctgttctctatctgcttaacaagccctcacatttttttatttccacgttcttctttaggatatggagacggcttcactcacgtgtttggtagggcttccacgcacatgtatccatgttacttcttcccattttcttaaaaatatattttaaaagccatgaaacttttttacttctcgataattgagattttgtactttgtagtttaaaacatcactatgagtatgttgtgttctatttttttcttctgaagactgaagatttgttacatttggaatataaaaattttcttgtgaagactgaagagttttacattgattgaaatataaagttcttgaaggaataaacggttaggtttctaataactaacaatgattattttcaacattcaactgaatttagatgagtttaanattccctgatcaaaataacacaaggagggtgatggtactacaataagttgcacctattttcgtatcttaagttgtcgtaagactatgcgatacagaaaatatcgctgaccaaattgtagagcacatgacatcacgatt

SEQ ID NO: 73815 - DNA, 296 bp, Arabidopsis thaliana landsberg
  unsure (1)..(296): unsure at all n locations
tcaaatatttgtcattattcgtctctttcagttccctcaggggtctgtatttgacactccaacaagaaccctccaacccgtcgtcccctgagtagaacttttgacttgaccttctatcacttcanntggatggattcttcgccttaggacgccgnngatcgtgtgctnnntcattttcaatcattatcttttcanntatagtctattttcatntgataaccttcttttaattanttaatgaccatttntgcctatattttaaaaaaaaaatcaacaaaacgagagaatgaattttt

SEQ ID NO: 73816 - DNA, 553 bp, Arabidopsis thaliana landsberg
tacacagaagggcacaaagggggagatactgattcatgaatatttgtcgtaaagcagagtagcaaaatgacagcggagaaccaaaatttgcttcactttataaccatctgtgcaacctagcaaaagcagcggaccaaaatggggcatctctttacaatggtaataagtctgatactcgacactagataggataagagatcatcagaaaaagtagatagctatgttttttatacccgcattcgaactttggctttgaataagaaattagctacacggaagggcacaacggggaagagactagtgacatggcttcaaggaaacataaccacatagtctaaaacgagagtcaaaggggataaatcttctacaagctatgaacatgaatcatgcaaacgatgaacctttacgaattgcaaatcatggaatcgaacttgtggtaacaacttgattaggctaaaatttcatcgccaattagatacattcgatcaaaatcccaaattttgctcaaaacacgaaacgatacatagaaaattagtaattgagcaggaaaaaa

SEQ ID NO: 73817 - DNA, 628 bp, Arabidopsis thaliana landsberg
tcaataataatcaaatgcttaatactgttttcctttctcttgttgcatgatttgacttttagatttgtttcttaatgacttattgttgaattatactcgaaacttttacagaacaaaaacgttagaaaccctaaataatgaagtaacggaacttaagatacgataaaatggcaatttttgtcactaaaatggtaagagcaaaatcatttcgattatcaatcagaaattttatcacacatggattaattcaatgttatgtctatggatgtataaacttgtagatatttggaatataaaacatgtttttgatgagggaggactaataaatacactcgataaagaaacaatattaagttttagagagttgacgaatgctcatttgatgtgaggccaatagatagaagaagtcttctcccatgaagcttcaaggacatatcctttcacattatagaatctctatttgacgccgtacatttaggctctttcttgtaagtattggtttcatttaatgcatttggacatttaaataatactctgatctgataaccaagatccatatagactttacctacactttcacttaatgagaaggaaggttatactttctggtatattcatcacagtttca

SEQ ID NO: 73818 - DNA, 243 bp, Arabidopsis thaliana landsberg
cacccctggaacgatccttggacatgttgactcgtattaagcactaattatattatcaacgctcttttgggatatccgggactcatttacatgtgatcgtatttaccaactattattgcaaaaatgcaataaattgaactgatgaaaaaaatctatcgatcttgacataaaaaaaaaaagaacataactctatgtgaaatatagggactaggcttgtgatattcacacaaatggtttggtcat

SEQ ID NO: 73819 - DNA, 459 bp, Arabidopsis thaliana landsberg
taacgctgactagagagcagagtttcagagatcgatttttggtttgtgattcacatatttgcaatgaattctaaatgagagattattggagagcttttgagtcagtgcagccactactgttcccaatttccggcaattctatgtaccaaagcaacatatgcattggcattgtataggattaagtagtaacaagctggacctaaccaatccggtttttccataaagttccggtttgcttggttatcgtgtgtaaacaaaaatagaacacaactttcagatttttcagtaaaaaaataaacagtttagttttctcattctgtttagtagacaataaaaccaagaaaaccaaactgatttatgcacaaatatcagttacaaccgttcatattcaaatgaaaatggaaagcttgaacattgcaatgagctgttgttgtgcatggtcctgtatgctgcttaagt

SEQ ID NO: 73820 - DNA, 478 bp, Arabidopsis thaliana landsberg
agtttcatagtccagacagaatccgagataatagtttatatgagactataaggaagacaatatacatgaagtcttcttttcgttcttgcaaatccagaccttaattttgtccaaaatacaaatcctttgtttttcactttttctttgcaaatttaattcccttctttatattatgacatttctaataacaattgacttgttattcaaaattggagacatacataccatctaggtagttaaaatatattttgatcatatttaaaaaaaaaataaacacgtgtcatatttaacaaatgtatattatctatactttacaagaatttgttacgaggcgtatccattaattatactcttaatttttttcataaacttcaaaactttgactatttttagtgactggtaattaagaacctaaagataagaatagaaagttttgaattccaattttaagatattcatgaatgaagtttagatattt

SEQ ID NO: 73821 - DNA, 610 bp, Arabidopsis thaliana landsberg
  unsure (1)..(610): unsure at all n locations
aaagtctctaccggttgcgttgctgcagtttgttagtttaattgcattggaggattgagcttatatagagggaataagctaaatgctgttctgaattgaagtcattctcggtttcattaacagaaacttcacatggaacaacttcccaacacagttaaaacgattcaagtatctatatagcttctctagactttctccatgaagactatcaatatcatccactcttcttcttcttgttctttgaagtgcttcggcttcttgaggaatcatgaacaatacacggtgatttggagaagggatatggatggagtgaagcaagttctcttacacgatgtagaatatccttcggtatagagcgagccactgactttcgtttttcttcagcctgaacatctcaaactttgtgttacagaggatttctcagaatatgaatttttgttgacaaaggaagagaaaaaagcaaacctgtccatcgttatgcttttcgttataacttgctntcagtagattacgccatttgtcctgcattgaggagaagaactgagtcaccaatcactactaaatgaagagctngctntngaggtgaatgaatgatgaaatactctgatat

SEQ ID NO: 73822 - DNA, 239 bp, Arabidopsis thaliana landsberg
cacagacacaatggcgggtatcttgagaaggtagggaccaaaagctcacaacatgagaaaaaggcaaacggagcggagctacgagcaccaaagccaggaagcaaggacgcacatagaactggcacaaacccaagacattgcaaaccaacaaaagacagaagccagcattaccgagcagatcggaggccacaaaaacgtctggagagacggcagaagaactcaaagccaaggccccaaca

SEQ ID NO: 73823 - DNA, 400 bp, Arabidopsis thaliana landsberg
atggtataaattacggaccattacaaacattttttgttcacaggatattttgggacaaaaccaaatagagtaaagtgtcagattacgtcagttagatcagtagtaccgattctgttctataagaatagagtcaagaacaaaaggtagtttttcaggcggaaaatcaaagctaaagaacatgcacgcaaagactttgaccaatcttgtaaaaatatcaatgcttacgaaattaaatgattctttgtatataataaggaacatttataagaagaaggaccattttcttcttttatctttggattctcttgcgattttttatttattttttaattctcttgcaatttgtactgaccaatcagtttttggaggattttctttttgatattctatctcacacttg

SEQ ID NO: 73824 - DNA, 569 bp, Arabidopsis thaliana landsberg
gcacactcaggttgccctgtggcccacgcctggtgttgctgtggccgcactgcgcagcaacctcgaaaagctcatcttttgcgtatcaggcgcaggtgcctgtgtcgtttacacaacccgatgaaattcgacaaatcagcttgtcgattttcgacaaaagctttgcagtcacctatctgctagaagcagccgcattggtgattgggctgtttggggtggccaccgctttctcggccatgggcttgcaaagaaaacgcgaattcgcattgttgtcagccattggtgcaaaaaagaaaaccatgctgggtctgcttctgcgtgaggggttactagcctctggtctggcctgcgccttgggtttaatgatcggtttagcgttcgcctggatactggtgtttgtggtcaatccgcagtcttttcactggagcatggaatggttcacaccatggcgagacttggcggtgatgtgcgctggcttgatcacggtatcgtgcctgaccgcagccttgtctgtgaatcacgcactgggcaagcacgtgattacccagcttaggaggactggtcatgac

SEQ ID NO: 73825 - DNA, 544 bp, Arabidopsis thaliana landsberg
  unsure (1)..(544): unsure at all n locations
tattgaaataatctcgtgtatcggactaagatttaagtcattttattattgaaatataaaatatctttattaagagaaaaaagttgcatgttaaaaatcatataaaaaatgcagaaatgggcgtcccctaatccttagacatgtttccatgtcgcaattgaacaacatatctaactgtaacatacagctttcaagatccattaatggtcttctagtagtttttttctcataaacatctttataaaatactaatacaaagtcaatagaatgtaaatttcaattatattaacaaatttattattattcttatgcattgaccataaccattgacttattataaaacaacaagacaaatgccgttttggcgatcaagcagacttgaaatatgaagattccaatgcttttgctttcttacctgcacttataccagctntntccttgccttccattgagtaactctcttcctgccaaaagaaagtcaacgtttcataaactgtagacgtatatgaatcaactngtcttgtctggtcatataaatgactta

SEQ ID NO: 73826 - DNA, 545 bp, Arabidopsis thaliana landsberg
  unsure (1)..(545): unsure at all n locations
cggggagttgtcttgatgaaccgagccattaaaaatgatttgtttcaatggagggagaccgccaacagcggggaggtttgttgattattttgattttaatgccattatggagaagatacttgttatcaccgcnnnnnnnnnnnnnnnnnnnnnnnnnnnnnnnnnnnnnnnnnnnnnnnnnnnnnnnnnnnnnnnnnnnnnnnnnnnnnnnnnnnnnnnnnnnnnnnnnnnnnnnnnnnnnnnnnnnnnnnnnnnnnnnnnnnnnnnnnnnnnnnnnnnnnnnnnnnnnnnnnnnnnnnnnnnnnnnnnnnnnnnnnnnnnnnnnnnnnnnnnnnnnnnnnnnnnnnnnnnnnnnnnnnnnnnnnnnnnnnnnnnnnnnnnnnnnnnnnnnnnnnnnnnnnnnnnnnnnnnnnnnnnnnnnnnnnnnnnnnnnnnnnnnnnnnnnnnnnnnnnnnnnnnnnnnnnnnnnnnnnnnnnnnnnnnnnnnnnnnnnnnnnnnnnnnnnnnnnnnnnnnnnnnnnnnnnnnnnnnnnnnnnnnnnnnnn

SEQ ID NO: 73827 - DNA, 409 bp, Arabidopsis thaliana landsberg
gagctcttcctccgcgccgccatagaatcgtcccccaattgtggcggacatgcgcagcgcgagggcgttgggcgtgaacgcccggtcaccctggagcacgccgatcacgcgatagctgtactgcattccgaagtgactgaccgtcccgagctcgtagatccgatgggcgaagcgatgcgccacgatgccgacgtatagcgacagcgacggcacccagctcggcagtccccacctactcgcagagcgagtgcactcctggtaaccgacgacgctgctgatctcccgacagcgatggtagcggtgcgcttctgcggtgtgtgcggcgaacccgcgcgcatccgtgatagcagtgacgatgattggcctcacggttcaccatacgacgcgcgcagatggccgtcgatcgaca

SEQ ID NO: 73828 - DNA, 509 bp, Arabidopsis thaliana landsberg
ttacgtataacctatggacacggccggcgtggttcggggggcctgtcatctgcctctggctatcatctgccaagatacgctaagacagattgggtgattcagttgtgctgcccacgttcccgtctggagctggtggatcgcactgggatccgagagtctgggtcactgataggcggtataatcccccaagagggtcaatgccaccgaccggaaaacaaccccccgtaatttgcattggcagtactacattggcagtactacggctgccaggttcggtaggtgaacgtcttgatattgttctcgatgttatcagaacaagaccaaggttatctgcgcctaaaaattcgcattacgataatgggacagacttgttatttacgtagactgagcagatctccgatttactgctaaatagatatgtaattggctagtacttctctcaatcaaaaatgtgaagaataacatatgcaaactccagtctgtaaagcctgtacgaagtggcgggtgta

SEQ ID NO: 73829 - DNA, 227 bp, Arabidopsis thaliana landsberg
gctgagtaaactctgtgttgaaacttctaataaagtttagactccgatgaatgatatagcctctgtcgtttgagtttttggaataaaattagtggctttgcctaaatatttgaaatggttttaccaggtgaagaaacctaagtatgtccagcagaactcgggatgttctagaaggtccggttaaagttagctcacttaaacgcccgcctgcgaagcaaagctctttt

SEQ ID NO: 73830 - DNA, 470 bp, Arabidopsis thaliana landsberg
cgcgcttacaccggcgcgcgccgaacccggaaagagcaggcgtgtggtggcgcgcttatgcttagtcggccgagcgtgtcgtaatcgggggcgggatcgggctggcgagctcggactggcagccgctcgcactaccagtgagcgcgcgcaacatcagcggcctcgtgttcgagcgtggcgcgttcaccgccgatggcgccagcggcgtgatcctcggttccgccgacggtgcgcaatggtcggcgcaacccttgggctcgagcgccaacctacaggcgatcgcggcgttcaacaacacgctcgtggcggtcggggatggaggcacgattctcgcgcaggatggacttcacctgtgggagcaggcagtgagccccacgcgcgagctgctgctcggcatcgccgcaagcgacaccgaggaggtgatcgatggcggcggtggctcgattctccgtgcccgtgcggactcgctc

SEQ ID NO: 73831 - DNA, 540 bp, Arabidopsis thaliana landsberg
ttcgccgggtcgcgccagtaacgcttgagtgcgccaagggtgatctcgccgctggccgcggtggtcgttgcggcggctggcttgccgaaaaaacgtggctgatcggcgctggacggcgcaccgagaaaggccggatcgtacaaaaacaatcgaggatcatgtcgcggatggccgcgtacatcgcgctcgtaatagcgcgcatcgaatggctgcagcggatggcgaatacaccatggccggacgggttgctcgtcgaaggcgatggcgtgctgctcgtcgaggaattgcagcacctttgccagctgtgcggcggggttgcgcggtttgccgacgcgcacgccttcgccgacgtatctgatatgcagcgcgtcgcgcgcggacattatcgcttcgaggaacaggtagcgatcctcggtgcgggtgtcgcggtcgccttggcgcggctgactgaggatcttgtcgaggccggcgtcgttgacggggcgtgggaactcacccttctttatgccgagcaagcagaccaagcggaacgggatggaa

SEQ ID NO: 73832 - DNA, 358 bp, Arabidopsis thaliana landsberg
  unsure (1)..(358): unsure at all n locations
cgcgnnnnnnnnnnnnnnnnnnnnnnnnnnnnnnnnnnnnnnnnnnnnnnnnnnnnnnnnnnccagcaggatcgcttccagcagcgtgtgcgccaccgcctctatcgagccgcgcacgaacaccgtgggatcgtagacgatgcggtagtccacgccctgcgggaaggtcttcttcagttgcgccatggtggcgcgcacttcgttggagatctggatggcgttggagccgggccgcgcgaagatcggcagcgccgccgccggctggttgtcgagcaggctgcgcagcgcgtactggttcgagcccagttccacccgcgccacgtcgtccaggtgcaccacgctggcattcgcattggtg

SEQ ID NO: 73833 - DNA, 569 bp, Arabidopsis thaliana landsberg
  unsure (1)..(569): unsure at all n locations
ggagcacacactatcataattggactgagttatatatagattacatatttaaactatccttaatcattcccatgaacatctgccaaactctctctaccaactttgcacatatacaagtgtaaatatctcaatcttgagagacttaacaaacttaccaaaagtgtgaatccatgacttggccatcgttcagttacgccaattagatgatgcctcgagctccacatcctcttcccaccaagttgccgactgcaacaccatcagtttcggaccagtttaagcttctatgcgcatatacaagaaagagacaaaaacaatctagacaatgtgctaaaccttgtatcccctgcgcaggaactcgagtgagcttcctttctcttcttgtagtcccagaacctgtaacagctcttccttcgtctgtttgcatccacatcaataaaagcttgttacttttttcccagagattggataaaaaagactatattcaaaaggttaaacgctnttagcgcacatacttcacccagcgtgaaacgagtanggctttctgcaacacacgccaatgaaccatcagt

SEQ ID NO: 73834 - DNA, 328 bp, Arabidopsis thaliana landsberg
tcacatatgaaaaatattatgcatcatcatttgactttttaaaatgcttaattaccgctaattttgacttgcttggcaaagataaattgacatcaaaacaagtttcttggctcaattataacagtcacgatacacaaatcagcattgattctaaagaactaaactgaaggtaacttgtggatatggcgaggcatccctaaaagggatcacattgataatccaaattcattgtttaattaatcacacatgaatgcgtcaccaatactctcggggtttttcatgttgctcttcttcagatcaattagttattaatgtattataagaaaac

SEQ ID NO: 73835 - DNA, 579 bp, Arabidopsis thaliana landsberg
acagatcatttgagctactctcagcagtaaattatataacgaaaatttttgtggttataatatcttgagcacgatttttcccctgctactgtgattctattttagtcttgaccatacattggaatacaactttgtcccaggaatgagcatcctgttgtcccaattatcaaagaacaccgcactttggcaaagctcttaaattgtacacttggatcaatttgttcgcttgctaaactacgcttgagcacgcaaaggtacactttgcatggccgctggcttcaaacatcaacagcaactgggcggctttccatagaagagcctaatctccaagtatgacttctgctatgtttgctctttcattctatcgtgtatcttaaaatcaataaccatgttacttttctgcagtctgttgagcatgaagtagagttcaaattggataaaaatggaagggacgtaagttcagatgctgatcgttacaaaataaatgcacgtgatttctttgttcctactcaggtaaatttctgtaagtgttgtgtctttggtctgcataccaacaagaatacatatttcttaaaacaa

SEQ ID NO: 73836 - DNA, 533 bp, Arabidopsis thaliana landsberg
atggaaataacattggttgcgagcttggctgggcacttggctggcccgaaggtctgcatgatggcttcatgctgggttgtgtggttggcttaccagttggcaataacgctggctggctagatggttgcgaacttggttggcgcgacggcttactcgacggttgtgttgtaggttgagtcgatggctggtttgacggacgggaagatggttgagttgtgggtcttgtagtgggctgtgaagatggctggcttgacgatagtgctgggacgaaaatctaaaccaaaaaattgctttaaaaaaaagaagcacaaattgggaactaacgtctcacctggactataatcaacaagagaaataacaagcgtgctctgttaacagttatcttcatctttattcgcggcattctggctcagaaggggcgaatttcgcggtttagatagaaattttggttcaagccgctgacttgcgggcagctggagtacgtacaaaattggacggtttaaaaatgacttacgacgtgcattacgacgtac

SEQ ID NO: 73837 - DNA, 296 bp, Arabidopsis thaliana landsberg
tgccttgcgttggctgtcattagtgattcttggcgttaaggagcctgaagacaaaaactgcagacccaacttaagcataccacatatgaccatacacaacagcgcgctaaaaaagcacgagttactcaagcaatgacctaactgctctttgatctatgtgctgtccaaactcacttgatgcattgattttacataacacgtccgatggtcatgagaacgactgcaacacagacaaaagggtcgttctatggcgtggacatgtatgaatcctactatgccgtgactgtggcgcgtta

SEQ ID NO: 73838 - DNA, 4045 bp, Arabidopsis thaliana landsberg
cattatttaagattaatcgtcaaatgaagtgattattgtaaatatgattaagaaaaatattgaaacagagaaaatcaatattgatggcaaaaggaagaaataaaaaaaggcattaaattaagagagaagtcatttattctatgtttggcgcgtatattaaccaccaccggcaaaacacccacaaaaaaagcgagcacgcataaagaaagatcaaaacttccccatccctcttccaaaatccatcccctcaaaaaaaataaaaatacttcctttcgaaatttcgctaaaaaaaaaaatcgaagccgaaaacaaatagtagaagaaagaaaaaagtttcagctttaaggaaagagatcaagcgactgagagtggtgtggagacagaaccaaccacgatctgtggttttttttttgttgtccttttttttctccaatctcagaaataaaaaaagtttcttcccgacactcccatttgatcggagggcttcgacattggtgggctctgtttcgccgctccggctaaaagttagtgtaaagcaaaaatggagcggtacggtggcgccggagaagatgagtcacggtcggatccatcacatgaatggtccgctcaaggaaccgaaactggtatcgaaggtaacgttgattatgggtttcctacattttctttctctctttttgttaatgtctgatttttacggggttaaatctgcgattagcgtttttgtcagaattgaaagtttagattttttgaaaaataaatgcggcgtttgtagcttcgatgtggcggttagggttgcgaggtggtggaggtggaggtgaaacgttcccggagcgacccgatgaacccgattgtatctattatttacgaaccggtgtttgcgggtacgggtctcgatgtcggttcaatcacccacgaaaccgtgctccggtaataaaaactctctctctctctctcctctgtttttctgggttctacggtaccggtgatgtagctgtcgcggtagaattgtctcaacgtgtgagtgtagagcgtgtcttgatacgcatctatgcgacaacgatttataacagtttgatcagcgctcactcgtagagccacagcctggtgctttgccggccctgcagtgttttggaaccatatgtcttgtgccataaacccgtctccattggcagctgtacatgttttcaaagcaatattttaagttcttcggatacaagaatgtaataacttaaaagacacaaatgaaagaaaaatgttatattaccaacagtggctgatctgaaggtggtggatccatcaatgacattcaaactaccggttatgatcgttgcatctttgccatcaccaacaagcattaagttcttctttttctttcctatgtcaatagtttctttgtaaacccctttctttacgtatataacgtatcttgtattgctgttctccggtgctgccgccactgcctcattcactgttttgaactttccggtgccgtcttttgccaccacaacgttcgcggtcaccttaagtgtctagtaaaaggtcaaagtgtttagagtttgaatgacgaaagataggtaaaagttaattttttgttacattacaaccgaaactttttctttcctagaaatatattggccatatttattaattgaagtataagaattgaaaatgattttttattaccttgggagaagattctaaaagctttctgtcaagagcagttagccacgacgggaagcgattggaaatgatcattttgagatcgtctctggcaggcaagacagacacaaagatggctagagccactcttgccctagaaaccaagtcctcgagttgtggcttgactatttgcttagagttgacggagacatcactaatactttctaaacatgtcatgtagtttgtaagcacactgctcagccaagtatgaacgtttgagtatgactcaagattatagtttcctccgcgaagttcctccatcgaactcatcatccgatcctttgatacgtccatcatctcctcgcagtcagcaagacctgccttgtctctaacaccgttcgagcggatcctagcctcgctcaccatggtcatcgtgctctcaagccgccacaccgagttcttcaagaacacgtgcaataggtcaaggcggttgagctttgagagcgacaacgtcgtgaattcggacaagagagcttggcatgagtcttggtcgtgagctccatggcaaatctggctcgtagttaataaggaatcatcattattgttggtgttaacggagattaattgggctgtgaagaaagccacagagccaagaatggctacgaaggagaggacaaggcatagattcttgtgcttaagagactttggtttggaaagaagtggttggtttgaattagacattggtctttggcttttgaggtaaaaggattctttgtgttggcctttcactaccgcaaatcatgccattttatagaaaacgctagtgagtggagtacatgaggaagtgctatgatttccttttctttgcacatgctttttcattatcattgcaccaaatactctataaattaatgtaaaacaatgtgcttgtcttttttttaaaagcaaattaaatgaacatgttgactcttgttttgcccagcactcgaattaaaaatatagagaagcactcatataaccaaattagcatatccaatttttatttatattatgacgacaattcttttttatcgtaaattttaattactaaaaaaaaattaaaataaatgatttgattaaaatcatgtaaaccaaatgacgtatgtgtgaaactttacattcttgaaatataatatttgatagataacgttaacagattgaaatcgcaatactattcatataataaaacgtacacatgaccaaattttttttttgataactacatgaccaaatttacgagatactgaattaacaaagaccatgttccccatcaatctgttaaaagttatccacatttattaaaaagaacaaatatacgtgttttcacgaattcacgggattccgtctatataagaaaaaagaaaaacgacaaattggtgttctattaagtcagtggcaaaacaatttttaatataaaaaaaagtctacacctaaactattttgttttctaaaatataaagtgctagctatcttattcagttgtttgaaattcattacatctgatccgatccattgacgctcgacacactaacgacgacaactatagatttctatcactggcgtttttcatctttgacaaccaccaaagttgtatatcaattattattaaaaaataccaccattaatatttggtgatggtgataaaacaaaaaaatatataaatttgctagatagctaaattatgtggcaaaaattgacaataaacacgcggtaaaaaagtttgtacttttcacgtttgaattaaataagtaacgtaatatcatcttaataatggctttttgttttataaaaatattcacgtaatgtcttttataaaatatatacgttacatatgctttctgaataaaccaaaaattgatttcgaaagaaataaccattacattgaacgcaaccaaccaatgactttttattaaacagttaaactaaagaatttagctcatcgatcttttcaaactatcttttagacatattgacttataagtatgaactcggctatacctatttttacttacatcgtaataattagccagtaaagataactgacaacaaaaaagtaacacaaaaatatatcgtttgctatagctagaaagaaaaatacaagtggtatcagtcattatctgatttatctctctactctgttttataaaaaaaaaaacttatccttgtcgtgatatatatatatatatatatatatatattataaacttaaaatgaaattgtaactgattaagtataatcattttgaaaatttctgtgacttattaagaatgtttttttactgatttttgcagtaaaaaaaaacatcagttgggagttttctatagtaaaaatcccccctaaagtttaa

SEQ ID NO: 73839 - DNA, 700 bp, Arabidopsis thaliana landsberg
tgtatatatatatatatatttttttgaatttctataaatagtttttggtcatagaaatgttgtcattaatcaccaaacaattgttttaaactcatttacccttgtaaaattaaagtgatgatagtgttgacacttgaactcataatctcctataagtctttttggttctctcagtcaaaacttaatttttaccttcacctattgtacaagtggattaattttccccctgattgcacaacatgacttgtaaaactcaggatatatccccttttttctctagcaaactctataccacaacactacaaaaagataactttgctttggtcttgaagcagagaacgaaactatagcttgcattttcatgtcttgctagatattgctatttatagtctcatacgcgagaaccaaatatttagcagcgcttatcagtttagttatatagtcatttaaaaaagaaaggaattgacaatcagcattaactgattatcaatcaaaagtattaactatcaatcaaactattatcaatcaacctctggttaagataacgtgtcatttaccaatcaaatgatggtgtaaacatatttcatagatccttgatcgtcagcctcaatcaacgattataccatgctcgtcaaatgcatgattggtttgactaaaacttagatgcacaatttgcttaaattgcggaaaaacataagaa

SEQ ID NO: 73840 - DNA, 453 bp, Arabidopsis thaliana landsberg
aaaaaaaatgtgggtagatctatagctttatataataatagcgtgtgtaatcctataaaatgtaatttaagtaaaaaccaacaaaattgaatatatcaaaattaaaaaaatattgaaagttgagggctattacgtaccatcagactaacataattgacatgtatcagaaactagtttttaattagaagattatttttgtataatcgaattacaaaaatttcagttttcttaaaatgcatgcgagatttgaatttttgtatatataaataataagttgatagcccttaattttaaataagttttagaatactataggacaagttttagaactttgtactttttgcaaaaaaaaatccaattcaataaggagatttctccaaaagaaacatatctagctaatttactaaattcaagatgcttctaagatgtttattatatagtcatgcaattaca

SEQ ID NO: 73841 - DNA, 246 bp, Arabidopsis thaliana landsberg
agggctcacatcctttgataacaaaagagattcaacaagattcacaaaatttaacaatctatgtagtatctgtatctctataggccaagcttttatctgtctaaactcaactagaggagattctacacaggatattcatgaaacagcttaagtatagtagcactttctggattacaatctgtacaacttttactatgcacaatattctttacttatgcacatacttgccttcacacacaagaagtg

SEQ ID NO: 73842 - DNA, 2147 bp, Arabidopsis thaliana landsberg
gctcccaataatcacctctatattaaaccaaaccagcaggagagataactttggtgttgccaagaagaagaatgaggaaagccctacagtattaagttgaaaaggtcggtccaaaccagccaatttagcccaccacagtaactgaacgtcctttattctaatttgagcgggcttcaacaccaccgcaatatgaagtcttgaatttctttccctccataggcaatagaccacagcttgaaagatcaacatgcatactgcctttaaccttttaatggaagatgcgtttctacacaagcaccaatatcaataggcaagcaagctctcaagagtagaatcagatgtcttccccgaggtctaatccatgatccatccgcacaagcttgagagaccgtagccataatttgaattcctgtaactctgggtccattcacgcctcgaaatctctatcaatgggccaagtgttgtccaatctgatcatcatgccaatcattatgatgaacgagatgagttttgtggaagacatttttttagttactgtgaaacaaaacaagcaacgtttcgttgtctattatttagcaaccttttatttatacacacaaatgtaatacgaatgcaaagcagggagagaagtgacaaataatcaacttcatttacatctaaagttgaaatttctattcacttatccaaaagtactatgacaatatgacttatcggtgaaggtgtctggtgctgacaagttcgatgtaaaaaacgagagttccaagaggagaaccttctccattggtaagacgtgttgggttaaagatggtcgtgaagagtctctgtctatatatcaaagaactgcaaaacacacttacatacatacaacaagaaagaaacagagaatttttaaaaaccaaacattgtgatcagatttatcaagacatgaaattgtaaacttctttatttcactcggtattgaagtacaaaactaagaagtaaagaggagagcaaccatatagaaccaagtatagagtcttagggtgtgaatgctatagcatgccaaattctctcatgcccaaaaccaaacacttcatcactttataccccctcctaattgatttgatccctaccaatatacacatgctgatttggctgctcgaggaactcttatcttctccatgtgtgaatctttctgtttatgtggataaaacttttttagagtataatttgtggtctaaaatgaatgaggggcaacaagtggatgcaataataatgtgagtgtggtcttgaggaacaagtagtatgtaatgagtggaggtgaatttgtgaaatttggtttgtgagtggtgttttagggacaataaaaaccaaataaattagttgttctctttagccagttgtcttatgagggttgaatgactcgaataccactttgataagatcttaaacaatactaggcctaaaccaaaaccagcttaagagtgtggacatgtggtgcactaaggaactacctaggtccaacgaccaacacctaatctatgtgggactccaaaatagcatttgactatcaagattgagatattaataacacatcatctacaaataaaaacttatatttttggaatttcagattttgcagagtaggctacaagtagaaccaaattttgttttggtttgatttttttttttggttcagactcagttcaaattaatgaatacactagccttgggcttatgaaaaagacaaaaaaaaaaaaaaaaaaaaaacagaactaagaaccaaattattttcgtgtagaagtcatccaagagaatattgtaagttatagtgtcagcaatttctccttgatggtgcactatagaaaaaagctccataactttgttgatcttttcacctttcagatatcgtagaatgagtatgttgaaagtatgagttaggacgacatggaaatagtatagaatgtcttggctgctgaatacaagttgttacaattgtaacactaacttctaatgaggctaaacaactttccttctaataatttcgcaaaacatattttcatttaagacctcttttggcataaccattgaggataccaccgtaaatgataaccataagtgcaacacctatttttagcaatttacgcataattttcttactttcacgt

SEQ ID NO: 73843 - DNA, 605 bp, Arabidopsis thaliana landsberg
ttaatgatgttaatctataagaagacccggtttgaaatggtgtaaacgaattataatcaaacatgaaaaccaaacaacataaataaatttgtttaattttggggttttcagtccggataaaccggtatgatccaactttaccaaaaacgattgatttgaatgaattaactctattatatccgaactattgaatatgaaccgaacaaaaactatctaaaccaaattttgtttgaaactaaagatatacagtatttgacaatcctaatccaaaatgaaagtaaacccaaagccaaccaaaaaaatttagacatccctaatttgaaaagagttttaaagtcttccttgtgtacgaaccaaaccaaaggaaaagaacagaaatcaaccaaataaaccggttttgtagtgagattttgaagccttcctacgttaaaaaaccaaaagaaagcataccggagtaaaccaaaagtgacgtaccattgcttagttgatgttccatgtaccacacagtaatcttgctcccatcttcataataaattccaatcttctcgttcggattcttagcggttatagtcacgttaaaagccgtagtcaaactcgagtcttgg

SEQ ID NO: 73844 - DNA, 604 bp, Arabidopsis thaliana landsberg
  unsure (1)..(604): unsure at all n locations
aatgtaaatttaatattgtaattgtaggcgatttacgatacttgcaacaaaacagatttaggtggacagtctcttggtggattgtatccggaatgggacaccttcttcactggtttcttcgatcaacctgtaaacccacaaaaaatcctttggaacttcaacagcacaggcttaaatgtatctacatctgattgcgttggaagttgcacttgcgctacttgcttcgcttcgtgcggtgcaccaccagacgttgttgatccacttcctgaaatgagctacattgacgtattcggatatcaagttggtattgttggagttttctctttgttcgcctatatgggtgtcacattccttctgttcgttattggaagctttgttgcttcaagacaacataactggagaggaaaccgcctccaccttttcattacgggtgcagatacatttgttgcttcctatgctatcttagttgcatttgctttgctgagcatgcataaatttagcgaatgtcaagtaattaaccaacttttaatgccaacctaacaattatagattgtcgtctatgaagatactatctggacatgcagcaatgcangaatngttttta

SEQ ID NO: 73845 - DNA, 646 bp, Arabidopsis thaliana landsberg
ggtcacaaactcaagcgaattcaagaatttagagacgccatatactaatttacacgtcctgtcaccatcaactaaatatctatgaactcaagaccaacacaaaaccacttgctaaagataggcaaacgtgtaacgcctttcttcgtataattgtatttgcaaattcactgtgtattcttttttggcagggttcattatttgtattcaatcacagaacaataaacaacacaaaactggcagtgcgagcaattcaagacaggcaaacaaatgtgatttagtacaaaaatagacggtatatagaacagaacacagccgaataggacttacaagatcataaagaatcctaaagaagtatacttttctaatactaggaaagaatccatatgtaacggcttctggagagtagtctcgaggctcagattcgtcggtggtcaggagcttcgatcatcgaaaagttatcgtctgatttaccatttcaatgtcttgttgtcttcatcaagatcgctacattttaggtagcttaggtaatctacaagctctggtggtcttttgttatgatcaaaataactctttcataaatcaaagaggtgacgcttggctgccacccaacttctacttttttttatatagaaaattttgaatgcat

SEQ ID NO: 73846 - DNA, 610 bp, Arabidopsis thaliana landsberg
  unsure (1)..(610): unsure at all n locations
catgcaaacagcaagcgagagagagaagtaacagcttcattatatgaaacggacagatagataaaagagacagggcaggagttgtgaaatgtctctttaagcttcaaatgttataatcgaatatggaatacagcttttgcattgtttcatttcatccaccgtcttttcatctataacatgacacatttattatcatagtacatggaattcttattaacttttacacgtgtttacgttttttcagaaatattaaatcatgatttttggtgtttttttttataaatatatgtttgtcaccatttttatgatatatttcaatatattttgtacatgttaatctttatttgtttatcaaaattcatcttctcatgtgacttttctatgattacattctacacatgtaaacatgattagaaaaaatacatatacaaatatgaaacttagatttttaaactgataagtcagcaaataataaaaaaaaaagttattaacactaaaaaactactaaattctaaatcaaataaacccttcagcataaaatacttcttagattgcaaaattacatcctncacaagccaacagagcagggctaatcacactcatgatgttg

SEQ ID NO: 73847 - DNA, 335 bp, Arabidopsis thaliana landsberg
ggggggggggggccattgccccctcaccccaccaaaaaaaacccatgatcatctctattggttgaaaaaatgacacgcttttttatatatatttaaccccccaaaacacccccaaaggcgtgtctttgaatactagacccttgcgcctctgcatacacaccttacacccaaaacgatatggcgtctacaaacatcactattaccctatccccttgaatgatccttcacacaccaacacacgtgccctaagaatctaccgtccaatatccttctctctgttctccatacatatgcttatacacttcccccgttattcatcacccttcatatcactc

SEQ ID NO: 73848 - DNA, 479 bp, Arabidopsis thaliana landsberg
gcccgccgccgcccagccccaggcaccggcgtccgcgccgtcacaggccccccagccgccgaacgcctttcatttccccgccccggccgacgattccctcgacctgctgggcatagagggcgggcccgtcctcaagcggctggcgcccgagctggccacactcgacggcgtgacgctgaaagccatggtacgccggcttctgagaggacgtgcctaatggccatccagcccgccagcgacaccgggcccgccagcggcaccgccggtacctacggcacttacgacccctccggccctgtcacctctacaggcactgacatctccaccggcactgacacctccaccagcactgacccctcccccggcactgccgacgcggcggcgggggccgaccccgggatcgaaggcgggatcaacgagcgggcgggtctcgtcggcacagtaggcctcgggttccagcacaacctcgggctcgcggg

SEQ ID NO: 73849 - DNA, 539 bp, Arabidopsis thaliana landsberg
atcatgatatataataacgtccgacatatagccttgaacagccgaaccctaaacataaaagacgaacttgtgctttatgctttgagatttaatctctgcagtactagcattctgtttgactaagtctatatgtatgtggatatcagtagaggcacacaattggaaaggtctacaacctcgggtccttcatctttccgctgcaaagtagctaagtatattcataatcttatgatatcgatttaattaaatatttatactgacaattaaatttgggattcggtttataaatctgatattaattggtataaatgcctacaattaattttatgataatatttacattaacaatcaaaatttgagattagatttataaatctgttataaaccggtactaattcctacaatcttagcctatcaaatagtcatcttagattatatttttttataaaaatagcgacaaatagaaaactaatattatgctttaatttcattctaaatccttatttaatatagtaaacttaaaagcacagcaaatcttc

SEQ ID NO: 73850 - DNA, 456 bp, Arabidopsis thaliana landsberg
  unsure (1)..(456): unsure at all n locations
gaaaccctttatttgtttattattaaatgtgtcctaaacattttgacatgcaaccattgatctgatatttatatcttttttaaatcatatgattaatgagaagattatataaaccatactataattattaaccagacgctttgttcattatttgatggccggtgctactatgagacattaatgaccatannnnnnnnnnnnnnnnnnnnnnnntactgggagacatttatatcatcgataaacaaacataaaaaagtactctattgtgtagcgcagcctttatttgaatttgactagcatcacctgatataatgattattcatgtggcatctaatttcaaatccactccaaatgtgtacaccatgttataaggactaatagtctattataataagttttttaaagtaattggagactggatgacacaattagagtattttttttaaaatctcatgc

SEQ ID NO: 73851 - DNA, 537 bp, Arabidopsis thaliana landsberg
gttagaaattttttggactcattgtgtctctggtcaaccttattaaagtgtgtgatatgcttagaaacaagggggcttggcacaaaatacttcttttataccaacacatgtaaagctagcagcacttattcaattaattacactataacaaataacattagtttatggaagaaaccaattggatcaagattgaactcgaatatggaagtttcatccctcactaaagcttcccctactactagaccacaaatacttcggcgacaaacgacattatgttgccacaacaaataatattctcatgagataaaaagctttaacttttataactttccttcttttaaagtagccaaacaacaagtgtaaaccaatatgtgtgggcggacgtgtcagaataaatcccatgtgtcaaagagtgtagtgggattcgtaatttttattgtgctattccacaatttataccagcatgtcacactccttattgaggtcagtagaagacggaaacgagtccaaacatacatccacttttgtttcacctat

SEQ ID NO: 73852 - DNA, 4351 bp, Arabidopsis thaliana landsberg
  unsure (1)..(4351): unsure at all n locations
aaaacgtcacatttcaatacctaagaggttgcaaactcctacacatatgtttgcagaggctgaaggtacaccagctttcttgaagacagttgatgagaaatagaacacagcatttatcccagacaactgttgtaaagcaaaaagggtagatccaatgaaaaccactgcaatcggagaaaatttaaacgtaaaaatgaaggtaattaagaggctacacatcatctatatgtatgtttttggcaaatgaaaatgtcatttttttggctatggatccagtttagccacctaacataccttccgtgcaaatgattcaactttttgatgaataaaaatctagatctaatatttccgtgatatttgacatcgaactaatgccacacattttcaccaatcttgttggttaaagatcacacatacctctaaaactgcgtccaaaaagcaactccgacaatttggctgaatcggcgtcatctcccctatccgacttcactaactctgccatagcagctttgacgtacgaccctcccaatagcttctcaaacacagcttcagcttcagctgcccttcccctctacggttaaacagaaaaagaatcaaccaaagaaatggtttataaaaatcaaaacgtctttaagagctatgcgggttaaaattagacagtaaccttaaaaagccactgaggactttccacgcagagttccatgaagacagcaagcattgcagctgggactgtggatatccaaaaacatatgcgccacctacaccaatcaagaaagagaaacctattcaactagtaattcagccaagtagaccaaagcatgtgatctgctagtagcttagaaactccaggatttctttccctacaaaggcggttctcatgtcaaaatcactaatgaatttgcagcaaaagatgaggtggttcctatagagttgcagcattttaacaaggcactagagattcacattgcatataggtgggtttggaatagacaacggggatcaaacatgccacctaaagcaagcaaaaagggtgaactaccatgcgtttggaagtcacagatggcacagagttgcaataatttcaacctcgaagagttacaggccatataagctgttaagtcatctattccttgagttcttatcaacatcttaccagcccaagttatcttttgccgggattccagcaaacagcgaacctaagagtccaatacatgttgcgatttgggtagaactcccatatgtacctctcacataagcaggtgacacctgcaaagagaaactgtgagtcttgctctaagtatgaatgtaagatgtattgacaaagcgagttagtgatatttgtgtgcccagaaccttctttttcacattaaataaatccaataatgcgaatatagctttcaagattgaagtccttattacaatgaaaattatgtgcgtcaatgaccttctgcatgttaatggttccaagttcaagtctttttatgtctgaaatagacatctatttacattgactccaaacatcttttgacataattaaaataatatacgccaagtaatattcacatcaaaagtgaggaagaaatttcatgtagcaatcctatcaaaacaagtgcagataagaaagacttcaacgtatatgtcaagtacctcagtgacatagagagctgtaacagaaggacctatgcccatcccaattccgaccaaaaaccttcccaggagcatgcccataagactctcagttgatgcactgcaaacaacacacttgtaagcacacagatttcatgattacataaatggactctggctaaaagagaaacaggatgaattaacctaactagtgagtacaccttgggataagtgaaaatcaccatggcaatgacttgagaccaaatatgttcaaatgaggccaaatatgttaaaatcaccacgctataactataaacatccaagcaggaaatcactacgagataatccaactgcataatgactagcctagaccacaggttcagcaaatcaacaggcaaagattcgaatctgaaatgttcaagtgcccacatagacattcaaccaaaaatatatatcataccataagaacctgaaacaagtacttagtcatgtgaactgaacagcctaaacccccaattaacctgaacaaaacatcacctcacagaagctccaacaatcattggtaaagcgctcaactggaaagctctacggcgcccaacaccatcagctaccaacccactgaacagagacccaataaaggcgccgcctaagcaggtgctaaccacaagaccttcatccatcagaaaaaggtttttggaatgatcagacgggagatagacacaaagactggataaacagaaaaacaagtaagttgtcttcttggataggtaaggtaccttcagctatggtgttcccactaaagccaaggtcaattgatatgctttcgagagtttcattaacaaccctgtgtccagaaaagaggcatgaatttgctattattcccagacatatacatttataaaaaactgagtcattgaggcaaatagataatgttatcgagtgctccaagaaaaacaatgcatcgagaagaaatacaacttgagcctgaaaaataagcttacgaaagaaaaagataatagcctagcatcatgagaagtaaatttccatgtttggtctataaatgcaaagatgaaaaagaaaaaaggaaaaagggagaacaaatgtcacaaggagagacccgagatgatagccgaataaaagcgaagtcagagaagcaacgagcacgtgaggcagagatcgcttccaggaaggattcccgcagtcttttcccgtcccagtaggaagacgtactggagttgagaaaagtcaagagtcagtctatgcagaagaagtttcaagatattgaggcaacaagaaaaaagtggtatatctaggtacaatgctatgtctaaaacacaaacaagcaatatagagttgatgagcaaatacaataaaaagatcagaagtggtctttaaaatatataacactgtccgtgtgcaccaaaaagtaggcaatagagtaaaatcatgactattatgagggtgggtacaaaaaacctgcagtttcagctttatccaaagcagagagaaactctttagaaggaacacgcttgtctatgtgacgacctcgcataatggtgtaagtgcgtcgaacagaatccatcccctctggaaacacgctcctgcacattcaaacaagttgagtgctgactgatgcaaggccatagaagaaaagcatacgaataatgggattcttcaacatggatggatgctcaaagacgtcaaagtcgcaatttattaaataatcaatccattaaaggaaagcttcattcaagtgctacttgttagtgtgtgtgaagtccagcgatcacttacacataatcaaaaccagccttgcgagtcaatttaaaattcaaagcacacacatgacgtaacgtgacgtgagctactaggaaaattccagaatcaacaatatatttattttaaaaataaaaagagataaaagaagaaacaaaaaagctgacgacagatgatgagaaagtgagatcgtcggatctgacggaagcaatgtaaatcagaaatataagatttggattaaaaaaggcaatggcagatctacaaggaagcaaggaaggaaggagggatgcaaacaaagagaacaaggatgatgatagtaccaacctggagaggaaatatgataacgtcgagaggaatcgtcgaatagaagaaacttttacagaggagcgacgacaactttatggctacacctacactcactccgttcacaggggatgggttttaatcacctgctctcgcctctaccgttcttttcatggaactcagcaaactatactctagtaccaatgaaataatgacatttatatatgaattnnnnnnnnnnnnnnnnnnnnnnnnnnnagacttttgatgaaaggatccctcccctgctttatgactattgattgatgctgaaaccagcctacaactattcattacaggagaagccattgcagagctattttgggcctttgggcttttattaacatttacaagagggccggaggcctttttgatctttattttctttatctatcatttctgtgattttgatatctcattcgggtccattcgagtcacacagttttcctatatggatggattgctacatcaacgaatcccattattaatgggtctctccaccgtttttctactacacagacaatacatggtacatacgtagataagtcacacagacaaaagttattctcgtctccaaataataattacgatcgaatcactgtagaaa

SEQ ID NO: 73853 - DNA, 337 bp, Arabidopsis thaliana landsberg
gcagtccaaaacactggccaggcaagagaaatctccactcacagcaaggggcgaacccccaaccgtcagatctagcgccgacagggccactgtgtcttacaccgaacatgagaataagggaagctgcttcacaaacgataggaacatgaagattcacatacattacccttacaaactccatgagtcctacaactacgacaggatacaaagcgcactgcctacaaaaaactatgaccgaacccatggaaggtataagtccaaaaacaaagccttctatctgcaaacgtggatatagacctacaaaagcagcactagcctgcaaaagatctacacttat

SEQ ID NO: 73854 - DNA, 464 bp, Arabidopsis thaliana landsberg
caactaccgggagcatggttacgccatcatgtactttatttacccgaacaacgacatggccggggtgtggggtcttttagacggcgtcgaccaagggctggggcaggtccatgcacatgttcgacgtcacccaccgactgctcggtgggtacgggatctgtgtagctcacctacctctgaccaccgaggcggcactcgcggtgaactacaagagcacaggtgacatggtgatgtgcaccctctgggacagcaccaccggcatcggcgcgttccactagtaagtaaacatggtggtcctgtagcacctggcagcggtatccgttatcatcaacaaccaactggccatgggcacgacggtcgatcattcctcggccgcacccgagcagtacaagcgcggagcggcctaccggatggattccgttcgcgtagacgggaacgacccgctccaggagttcgaggcggtc

SEQ ID NO: 73855 - DNA, 370 bp, Arabidopsis thaliana landsberg
tttgccacttaaaatgatgatattagttagaaacaaatatgtgattctaatgatggtgataatcatgtttgtgatgatgatgatgatgataagtattagataatatggctcgccaacataggtattcaaaatccaactacctaaactctttctttcttgatcactgaaactaatctcttaagagtcacttataagaaaactcatgtcacattataggtcctctgtttacacatcttatatttccctcccaatctcttacacaacttacaaccactatttttaaatgttatggaaatatctaatttcattctagaccaaacaaatcttagaaaaccaagactttgtccctcttggtatgaacacaaccccc

SEQ ID NO: 73856 - DNA, 606 bp, Arabidopsis thaliana landsberg
aacccatctctgttttcatcaaagacatcaaaagcttgcttcacttcctctaagcttggctctttctcttcgaacagattcgaaacctccttggaactgtactgtttttgaagtccctcgttttcttggtcagtggaaagccctaagcttttcataaccatccctacatcttctctgcaaagaccatcatcatcatcatcacgatattcttcgtgtttgatcgaagtttggaactcaagatctttgctcttcttctcggaaacacattgctggtgttgaacaagaggccagaacctagagaaaaataactgagcaaaagaaacccatctgaaaaaaccgatgaggaagaagttgatcagaccaaacaaagggaaagacaaagaagaagactgtttgcatttagacaatgaactcttcatggttataaagctatataattggttttcagtcataacttttgttagaagtctatttgaaaagtaaaactaggcaaaataatgaatcacaaggaaaagaatgttttggaggagatgttggagatatgagtttgtttttatgggtgtgtatatatagaagatgaattaatttatgttggacacaattttt

SEQ ID NO: 73857 - DNA, 538 bp, Arabidopsis thaliana landsberg
gattcatgggttttgcatcaaaggtcaaatgaatgaagcatttttgctttttaagtcgatggtcgaaaagaagggggaaccgaacgaggttatatacaatacgatgattcttggttattgtaaggaaggtagttcttatagagcattgaagttgcttaaggagatggaagagaaagagttggctccaaatgttgctagctacagatatatgattgaagttctttgtaaagaaagaaaatcgaaagaagctgagcgtttagttgagaagatgattgattcagggattgatccatctacttcaatccttagtttgatctctagagccaaaaacgattcacatgtaagctcaaaataatgattagagcagttttaatctgagataaattaccgataatgcaacaacctaagctatgcagctacatgcatacacctagtcgagaaattatgacttgcattttgatgatttattctcagttttgattacaatcagaaggagccagcatccatggtgtttgatggtttgatggtttgtgagctc

SEQ ID NO: 73858 - DNA, 493 bp, Arabidopsis thaliana landsberg
tagacggcgccccggacgagtcggcgacggaccaggtcgcggcctgcgccgggacttggacggcgttccccgagctgtccgtgccggacagcgcgagctgctgcgtctggccgttgtcgaggtcaggctggtcgggggagacggtgagcgacttcagcgagctgaccacgtcgaccggctccgtcgtccggacgttgccgtcgcgggcgacgagcacgccgtggccggcccgcttcgccgtgaactggccgtcgctccaggtgccgagcgacgccggggcgacggacgccgtgaccgttcccgcggccgggttgtcctcgcggtcggtcgcgtagacgtttaccgggatggtggcgccgggcacggtctccacggtcttgccgccgttcgcgacgaccttggcgggagcgccggccctggtggcggtggtgtagacgaagagcccgttggaaccgggcgttcggatccgtctgacggtgtgttgagcgtggtg

SEQ ID NO: 73859 - DNA, 451 bp, Arabidopsis thaliana landsberg
accgtggtcccagcgacatgggtggtttgcttgttcccttccatggagcaacgccgctagcgaaggggtagtcggggcaggtgacgatggatgggcctccagcaccgcaccgcaccgctgcgctgcgctgcgctcctcaaagccaagagccagagggacctatcttctggcccatccattgggacccctttggtcaagcctctcttgctgggtctccgtccgttggcacctcgctcgctctggagctggggtggcttacgagatctgactagacctcatgtagacccccaaggggacgacgctgcgttggcgacgtctagggaaataataacacttcgctcccccaaccgatagccacttttgatcctcttgctctcgtccctctcaagtccagtcggccgccaccccttaaacctttggtcgccacagcgtcttgctcgagtctatccat

SEQ ID NO: 73860 - DNA, 527 bp, Arabidopsis thaliana landsberg
  unsure (1)..(527): unsure at all n locations
aaaccgctattgtgaaggttctgttttctgattgcaacagttctgtatttaagaagattgatgaagaagtatacattttgaagggacaaggagaggagttgatagagttaataacgaatgcaagcaaatttcttccatcttcgtgttcatatcttcaaggcgcacttgtctcatcgatgcatctatgataatgaatcttttcttcacctttttctgagtttatttgtgactcagtttttttacttgtttagtaacaacatttaccttttggtttagttatggttattgacgttgttctaacttgtattaaaatatttggtttttcaattgaatgaaaggaatatttcttctcacattatctttattcaagattcaaagtttgaaataataactgatattggacctaggatctaaagccacctcanttgctaattaatgatacgagcaaaagcctaagacttaaatctagtgatatggtaatatgcaagacccgtgatttaagcaaaaccttccctttgacccaagtg

SEQ ID NO: 73861 - DNA, 323 bp, Arabidopsis thaliana landsberg
tggctacaacatggaccccaataaatgagtggcgtctactacctacttaggtcctaccattccttaatgtggtcctccctttcattgctgagctgcatgcatatgaataataatggggtggaacgaccggacgcctgaagtttcggatcgtagcttctcacactataaactcggggccacgttgcgttgggggagcggagccatttcccggattgtctttgtcggctgctttcgagtaattaggactctgcttaatgtcagctttccataaaacagactgctttaccgaaactggctgcctggtcattgggcacttggtcgat

SEQ ID NO: 73862 - DNA, 451 bp, Arabidopsis thaliana landsberg
ggcacattggcaaaaaagtatacaaagataaataaaggggagggcgggttatagaaagataacctccaacgcctttgcagagaaactgcaaaggtctcttttgtatttctgttttacttcgacgtttccaatggaagattcacaaaacgcggtcagagcttcgacaactgccttattgtgtgcttctaacagcatcgactgcagatgatcatgtgaataattcattttattaatgtatctaagtgatttttgaatgctacacgaatttaaacttacttcatcaggagtctctgaacgctccaaagacgacatgtatacctcagttgctgtatcacgggccctgcgaccttctaattcctctacagtctgaaaatacagaagaatgatgcataagaatatgctgaaaataatatgagaacgaaatatacagaattgacttattaattacctg

SEQ ID NO: 73863 - DNA, 617 bp, Arabidopsis thaliana landsberg
ccgatgactccggcagcttcacggcggcggcacaccggcttggtctgtccaaacagttcgtcagcaaacggctcgcggcgctggaggcgcggctcggtgtgcgcctgttgatccgcactacgcgcaccctgcgcaccaccgcgctcggcatgagctactacgaacaagccagccggctgattcaggaagtcgacgccgccgaacaatcgatcacacgccagaatcacacgccgcgcggccgccttcgcgtcacggcgccgatgagcttcggcaccatgttgctgagcacggtgctgccgcgctttctccttgcgcatccggagctgaccgtcgaaatgcagctcaacgatcgcactgtcgatctggtcggcgaaggctatgacgtcggcgtgcgcatcggcacgctgcccgactcctcgatgatcgcgcagcgcatcgcactgatggacatgctggtttgcggcagcccttcctatctggcgcaacgcggcgcgccacaaatgccaaacgatctgcgcgagcatgactgcctgccctacggccacgcgccaaacgtcagctggaatttcacgcagaacggcaaggccagggccgtcaacgtcaacgggcgcttgtgt

SEQ ID NO: 73864 - DNA, 103 bp, Arabidopsis thaliana landsberg
gtgtaattgactttgtaagaaccggtaatctcatatccggtttagcctccaaaaatttgtatccaaagaccggtttgttggggtttgctatagctgttgttat

SEQ ID NO: 73865 - DNA, 640 bp, Arabidopsis thaliana landsberg
  unsure (1)..(640): unsure at all n locations
taccgacgcgccacatcgacgacgcaatgaacgcggtcgccacggcgaccacaggactggcgaacggcgcccacgacggcaggccgaggcgatcgttacgtcccaggatgtagaccgcagnnnnnnnnnnnnnnnnnnnnnnnnnnnnnnnnnnnnnnnnnnnnnnnnncagccacgagccgtaaatgccgagcgggtactgcgacaagaagttgccgccgtaggtgaatgcgttctgcgcctcgcgcgcttcaacccaccagaagcacacacaagtcgtaaagacccacacgctcgagaagatcaccgcggcggtgacgaccgacaacgcggtcatcgcgacgacgggcaccgtccaatggatgtgcgccgcgccgcagccgatcgcgaagacgagtgcgccttcggcgaccttgccgagacgacgcagcgagaaccggtcggcgacgacttgcaccaagggcgacgccgggcgcaacagcactcggtcgaagttgccgaggcggatgtcgacctgcangtactcgatcgacccgatgaacagatcggcgatcccaaacgcgaagttgccgagcccatagagaaacgcaaccttgccgagcgaccacccgtcgagcgccgcacgttctcgacacgatga

SEQ ID NO: 73866 - DNA, 481 bp, Arabidopsis thaliana landsberg
cgcggcgctggatggtcggaggggcatgggtttcatcagtttcgcacccgagcccgcgttcgcggcgaagtcgaccagtgcctgcgcggaggcggtggaggtgcgcgccgatttcgcgtcgaaatccagcaccgggtcgatcaccgccgcttcccgtccccccgcgccatggaccacgtagctccaggtgttgctgccggcatggaagaacggctcgacgtgcggcgaatccggcatgggctcattcgcaggagggggatcccccgcaatatacgtcgtgcagcgtggcgatgacctgccgcgccggtcccggcgcgaccgcgtagtagatggtctgcgcctcgcggcgggtggtcaccagtccgtcctcgcgaagcacggcgaggtgttgcgacaaggcggattggctcagttcgacccgcgcgttgagttcgccgaccgagcgttcgccttcgaccagcaggcacagcagcatcagccg

SEQ ID NO: 73867 - DNA, 530 bp, Arabidopsis thaliana landsberg
gagatccgcgcgatgaacaataccttctacaacagtcattggtattcgcgaagataggcttcatgaaaattaccatggggaccaaggcgaaggcttaacgtttgatcattgtgatcttgtgcgtatgcgttctactacagcatccagctggtgcaagtgtggtgcgaatgcacatacggtcaacatattcagtactatcgcagtggccaatggtcaccgagatgaatctgtatgtggtgctgacacctaaatgaaaatccttatacaaaagaaaagaaagtatgttgtgaccacacttggagtgggggtcaaaatcgcgaggtgaagatgaggctgacgcctgtgctcatcgagtcaaggatttctgagaatcgacaagtacctgacgataactcatccccgtgagaggacatggacacctcaccataattccatacatgtcatcaccaattatgacatatccatgtttctgggctcgtgaagcagatcccgctagaaaagtgggtatttttcattctggtcatcatctt

SEQ ID NO: 73868 - DNA, 502 bp, Arabidopsis thaliana landsberg
  unsure (1)..(502): unsure at all n locations
ggcagggtttccgtgcctgcggcctttcgttccgtgctggcgcagcgcaatatccatgagctctattgcttccaggattttgtgtttccggcgatcagcgtcggcggcccggatcttctcgaaaggttcgagcggcagattgctgcggaggatccgttttcgccggtcgcgaacgagatgtcgcttctcattcatgggggcggggtcttcatgaagctcgacgccgaggggcgtttgatggtcgcggatttcattcgggatttcacgaggatctcggacgaagtgactttcgtcgggcgggcagatcattatcagctgtggcagccgcagnnnnnnnnnnnnnnnnnnnnnnnnnnncgagaggggcgcacgctggcgggcaagcgctcctgaacaagcgagggcgcggaatggtgacgaatcctggcggaggttcatccgaagctggtggcggaccggttcgtcacattccggttcttctcaaagaggtgctcgacgcgct

SEQ ID NO: 73869 - DNA, 561 bp, Arabidopsis thaliana landsberg
ggaagagaagaaaaatgactcaacgagtctacgtactagcgtaagtaataccttgaatttcgatttaataataatatatagtaaagaaaaggaaagaaaaagcaaaatatccgttaaatggggaaataggagaagaagaaaaatgaagtctatgattttcgagctcccaactagtaactacaatctgccgttataatttgatggagattgattaacaaaagaccacattgttgttggcaagtgtgatcgcgtacggggattcttataatattaaataacaaatgtacgtaaaatgttttacaccacatattataccaacatccttgaacaaaaaaattcttcttttaacgatgataaattctatttttattagatcattcatacccatacgttcttgatcatgccgtaaatttagagagcaaacatttgtgagtgtcagaaagtgtgtcttttatatattaaaacacatgatcaacgatgatgagtactcctgttcttagggtagagttaagaatgacctaggatacggctgtttgtgttaacaacaataagaacttcagt

SEQ ID NO: 73870 - DNA, 492 bp, Arabidopsis thaliana landsberg
ccggacatcatcctcgcggcgctgtcctgaacgggaccgggcgcggatgacgatcacccatgcgctgctgatcatcgctatcggactcgtcgcgggaacgctcaataccgtcgtcggctccggcacctcgatctcgttcccggccctcgtgctgctcggctactcgcccctggtgtcgaacatctcgaacaaggccggactgctgccgggagcactggccggcatcgtgggctaccggcgcgagttgagcgcgcagcggcgcaacatcgcactggtcgtggtgctcgggctcgtcggcggcctcggcggcggcgcgctgctggtggtcctgccccgggagacgttcagcgccgccgccccgatgttcatcctgctggccacgttgctgttcatggcccagccagcgctgtcccggcggatgcgggccactccggagcgaggccggcgctcacggcgggcgtcgctgtgcgcggcggtggccggcgcgctcta

SEQ ID NO: 73871 - DNA, 542 bp, Arabidopsis thaliana landsberg
cactgaaaaaccttttggaatgtgtttacttgattattttgatcaatgatcataacctaggtagctttttgtattattcttctagtcgatatataggtaatatacgcaactcgtgtgtctttgacaagctggtgactgaatattatattttaattaccgtctaatcaaacactaaaccatttttaaaatcgttaaagcgaattttggcatatatgcagagaattccacgtttttataataatttagagaatgtgcataaatgagaagaaaatgcaaagcacaataggctacattttaaaggtcaatgacctcactttgtgtgtagattttattatttgattgtttttttcgttgggtatagaaatgtctgatttatgtgtggaataaagacgacgactttgttaaattattaattattaaattttgttctcttaattaatactcaatcggctttttcttgctttttattattatggctgataccacgtaaaccacgagtaagtatgtagtacaaatcaattactttctaatactacataaaa

SEQ ID NO: 73872 - DNA, 611 bp, Arabidopsis thaliana landsberg
  unsure (1)..(611): unsure at all n locations
aaccttcgcgccaattgctcacgcgccttctggatcagcatggcaccggacgggttatgttcctcaatacacgcgctgccatgagcgggtgttccaaagcgtatcgcacacctcctcgaactggatagtgacaaagagcgcgtcactgaacttgaagaggaattcgcgagcgatatggatccgcacgctccgaaaccacactacgactacgatccggacccgcgactccattggctcgccgaactccttcgcgaagatcccagccgcaaaattctactgctttgccgctaccgcgagaaggtcgaggaaatcgaagcggccctgcgcggccatatcagttgcaaagccgcagtctttcatgaaaagcttcctctcatccagcgcgaccgaaacgctgcctggtttgccgaggaggatggcgcccaaatcctcatttgttccgagatcgggagcgaaggacgcaacttccagttcgcccatcacctggttctttttgaccttcctattaaccccgaactgctcgaacaacggatcggccgnctcgaccgcatcggccagcagcacgacattcacattcacctnccggtcatcaaaaaaactccgcaacaact

SEQ ID NO: 73873 - DNA, 853 bp, Arabidopsis thaliana landsberg
  unsure (1)..(853): unsure at all n locations
gtaaactgcaaaaacaaaaacacaaaagataagttttaaaaataaaattatcaagaatgaataaaataatatatacgattttttttaataactaatataagacattttatttacttaaaaaaagattacaaatattatatttaccacttatattttattttaaaatatatacatacaaaaacttacagctacaactaattcatttattcaaaaactctacaacaacaaaagctacgacaacagtcatcactaaaaaactacagctacaacccaaccaatcacctaaatagttgtttatcttcttggatcaattctgatcataacaatttatagtttacatatatttctgaattatttataaaacaagtaattttctaaaaaaaaaaaaaaaaaaaaaggaaccaaatattcgaatttaaaataatcgagaatatcgcatagtgatcaatatgaatatatgaaattgacttgtataatatgtaggattacaactgattatatacagaaacgaagagtaattatgctgagtaatgagtggaagaattacaaggatacgactcaattagaggaagctgaataagcaattcgtatatgtcaaacacaaatatggatcatctataccgntgcttgacttcatttgatatgctagttttggaattatattatgtaacacacagttcataagttttgcaggtaaataaaaatggtggagatctagagcttaacatcaagcaacatttgccattcttcataaagcagcagcatatgtatattgtatcagacgacccatgtaagagtcacatcatctagaaaagcaaagtaattgaaatttattgagagttgaattgagaga

SEQ ID NO: 73874 - DNA, 744 bp, Arabidopsis thaliana landsberg
attcagctcaggatgacaagagtcgtacacacagctcagacacataccaaagtattcagatccatacatagatggtcagagctaccaactaaacgatcgcaagaattcatttcatacgcacaatagtcagggttccaggatcatcctctggcaaattagccttcaaagccataatatcagaccactgaatctcaatcttgctcttaagaccttgttccaacacttcccacacaagtttatgttttgcaaagtaacatttcgccaccaaatcaccttcataccttgacttatactacaaacaaaactcaaaatcagattccaaaacacaccaataaaaaacaaactttgaaagactcacctcccattgaccaatcctgagaacagtagcaggaaagttagaagctttaagcttctcaacggttccgacaccaccaaaaccaaaactttctttcttaaccgaatttgagtcatcaccactttgagaaagtttcatctcaatcagttcttgaaaagatgggctcttttttaaactcaaacccaaaggacttggctcctcaagtagactaaacttagagacacttgttccattgctccatagctgaattcatttcaaacccagacaataaaaatcccaccctataaatgatcaaagtactaaacaaaagttctcacaacaaaaaaccctggatcgtttgttgagaggagcgtgttcttcttcaagagaatcttccatgatctctaact

SEQ ID NO: 73875 - DNA, 496 bp, Arabidopsis thaliana landsberg
aggaagaaaaaggccaagggttttctaatcaaaattatctttttttggttgtatgaaggaagcgaggggatatgcatatattcaacctactcccattttctatacttgatatgttaccatgtcaagcttaatctaccacattagatattcgtgtaaatgaaccttctaatcaatttgactgactttctaaatcatattatcaaaatgcaaacgatattcttaattgactgatactgaagaaaatacactcatgcaatgacatgaaccacacatatacacaatattgatttctattgaataatgatacaatataaaatacctttgcattatgtcattcaatacttccaaactaaaacctttgaactctaaattattgaaaagagcaaattcaaatacatggaccaaacatccattcgaccacacatgtaaagcgatatactcgatactaaatctaataaagaacaaaagatgttgcacttaagacacttcgtaagac

SEQ ID NO: 73876 - DNA, 563 bp, Arabidopsis thaliana landsberg
gatgactttccgatttatatgatctttctttatactctattaagacaatttagtttcaaacttttttttttttttttggtttttgaaggattcaggaagaaattaggatatattattccgtataaaatacaagatatataaaaccaaaaagaaaaagtaacatgatcggcaagttgtccttggctacacgttactttgtgtcgcgcataggtgttatatggtaaagatcgcaagaactcaagctaaggtacaatgcagaaagaggtaactaattttaaacggtttataaaaaaagaaattccttgaaaaatatgtacaaccaaaattaattcctctaaatattgaataaaagctttttagaacaaattaaaatgctcagatttgttttggtctatatccctgtttcgttatagttttctttagtatacagtagaaggatcgtcttacatcataaaagtccagactaatttcagctggaacagcaagatcttgatgaatttcactggtgaatactgattaaagggttgtatcacacacactttgcatatctctattcattatct

SEQ ID NO: 73877 - DNA, 518 bp, Arabidopsis thaliana landsberg
atcgcggtcgagagggagcggagggtgagcttgcggacctcgtccttggcgcgcatggcgtcagggatgccggccttgatcgtttcgtggatggtcatgccggaaatactaccgccttctcgcgggaaaaggaaagcggcacggcctttgggacgaggtcgtaatgctcgtgcaggtagaggaggtccttgcgcatggattccgcgaaatccatctccgtcgccgccttctcgcggcccgcggactcgttgatggtttccttgaggaggcccacgacggtcgcgaggaagggaaagtagtcgcctcgttcgacgtggaaggcgagccgcgcgagccgctcgtcgtccgagcgtcgttgaagttccagaagatcgaggcgggcagatagtattcgcgttcaggcatgaaaagggcgggattacgactgatagcgggcgggcacgctcgcgaagccgtctttcgagacagtccgtggtcgacgagcgtgatgcccaaaaggcgccccgcggcgatgagct

SEQ ID NO: 73878 - DNA, 398 bp, Arabidopsis thaliana landsberg
  unsure (1)..(398): unsure at all n locations
gccgcacnnnnnnnnnnnnnnnnnnnnnnnnnnnnnnnnnnnnnnnnnnnnnnnnnnnnnnnnnnnnnnnnnnnnnnnnnnnnnnnnnnnnnnnnnnnnnnnnnnnnnnnnnnnnnnnnnnnnnnnnnnnnnnnnnnnnnnnnnnnnnnnnnnnnnnnnnnnnnnnnnnnnnnnnnnnnnnnnnnnnnnnnnnnnnnnnnnnnnnnnnnnnnnnnnnnnnnnnnnnnnnnnnnnnnnnnnnnnnnnnnnnnnnnnnnnnnnnnnnnnnnnnnnnnnnnnnnnnnnnnnnnnnnnnnnnnnnnnnnnnnntttacacaacacttgctctttcagcaattacccagagctccgttgatcccaatagcagtcatactttcctgatgcttatacacaaatgt

SEQ ID NO: 73879 - DNA, 399 bp, Arabidopsis thaliana landsberg
tagagagaagaaatgtgaatttgacgttataagtatgaaattaatttttaaaaagaataaagactggtaatgtgaaaagaggaaaatatataaatgaagtctataggcagattcttttgttgtcattgtcagacagatcatgattcatgttactagtagtactatggtttttcctgcgactgttatggcaatttcaattttgttacagtgtcttttccttgtgaagaaatttgtagcaccgttagatttgaaccatttttgtatttctaatgaactcaaaaaataaaatatagaaacgaaacaaagggaaaaccaaaagagtagagagtttctacactatttattggaagtgtttatttaaatttatttaggtaagtaaatatagaaacttatatagtt

SEQ ID NO: 73880 - DNA, 459 bp, Arabidopsis thaliana landsberg
  unsure (1)..(459): unsure at all n locations
tatatcagaaggggtgtcttgccccatgataaggaagaattccttattgggctataattgtgatgtaatcaacatgtcctttttcttacattcatagatgnnnnnnnnnnnnnnnnnnnnnnnnnnnnnnnnnnnnnnnnnnnnnnnnnnnnnnnnnnnnnnnnnnnnnnnnnnnnnnnnnnnnnnnnnnnnnnnnnnnnnnnnnnnnnnnnnnnnnnnnnnnnnnnnnnnnnnnnnnnnnnnnnnnnnnnnnnnnnnnnnnnnnnnnnnnnnnnnnnnnnnnnnnnnnnnnnnnnnnnnnnnnnnnnnnnnnnnnnnnnnnnnnnnnnnnnnnnnnnnnnnnnnnnnnnnnnnnnnnnnnnnnnnnnnnnnnnnnnnnnnnnnnnnnnnnnnnnnnnnnnnnnnnnnnnnnnnnnnnnnnnnnnnnnnnnnnnnnnnnnnnnnnnnnnnnnnnnnnnn

SEQ ID NO: 73881 - DNA, 652 bp, Arabidopsis thaliana landsberg
tttcatccttccccgcgcactgtgtctcgctctctctctcccacatttccattatctcctttactttctttctttgagaatgtcttctacaacaatcggcgagcacatcagactccgacgagctagaaaccaaacaatccgtcatctgcacgccgccgacgatgatccgccgctaagccacgtcgttcttccgatttcacaacctaatcgcttctgtaactccgcaatgtcttccttctttcccctcccgacttcctcctgcaacgaaagcacgaggaagaaaccgtaccaaacgtcgtcgtttcgagggatgggttgctatgccgcagcagcagcagcagctcaagaggtttctgttccctccgtcattcgctactccgcggatttggatgccagaattagaaaagataagaagaagaagacgcataagcataagaaaaagaaaaagaagaataaaggaagctacgaagatggttcgattaggattttaagcgaagaagctagagacgttattgatgtttggtgcagacctggattaggcttctccacggatgctgtaattggtcgatcggttgatcctcctcggggaaggaatattccgtcgtctcgtcgcaaaattgatgtggataacaacaattatgatcacacactg

SEQ ID NO: 73882 - DNA, 638 bp, Arabidopsis thaliana landsberg
  unsure (1)..(638): unsure at all n locations
taaatacattcataataacatggttatgcactattctgaatgattatcccaagaaaataacttttgagagacttcctcatcttcgatagaatttaacatcttgtgtgcgctagagctaagttcaggcttcaatgcataaagaacagaaggttatcataatttatcaaagcagggataagaaaacattgtagtacggtgtatgctttgtgtgattagaattaaaaaaatgattataacaattaacaccatcttattcgatattcaaggtataaaactaacgtagctagacaaaatatctagatattatcaagctaaatttacacaattaacttgagactgagtaatcaaagcatgaactaacttgttgaagagcaagaaactaaaattgaggtctaaatataatatatattttaagtaccgacaaagccaactcccgatacgagaaaagcgaccgcttgcatgaagagatagagatatagaaatgtgtttccaaagaaaagtccatagcaagcacaacacaagatgtatatccncaccattantctcttggagtttactctgcaacanaccaaactctttagcanacattagtttagatatattatttttaactagntgaataattaattttttatttt

SEQ ID NO: 73883 - DNA, 541 bp, Arabidopsis thaliana landsberg
aatgtcagcaccatgaaaaacaagggcctggagatactggtcaatgccgtgccggtgaagaaaggacgattcgcctggacgagaacggggacgttttccaccaacaagaacacgatgggacggctcaacagcaacaaatattccctgggcgcggattatttctacgtgggttcggctcagccgccgatcaacggcgagccgactaacatcgtacaggtagggcagcctatcggccagatctggggatggaaagcagtggacatatccagcgacgggaaatggatctaccgggggaaggacggcgaaccggtgccctctgacaaggcaactcccgaagacaggcaggtgctcggcaacggtattcccaggtattttgcggggtggaacacacgtttcgttacggcggcttcgactggggatcaccatgcggggccagtttgataccagatcattaacttcaccaggatgcacctggaagacttcgcggccaattcaggccgcaacgtgctgaaatccgctttcgacaaggtgttcgtaagcg

SEQ ID NO: 73884 - DNA, 245 bp, Arabidopsis thaliana landsberg
tctaaatcagataaattatgaagagaaatacattaatccaaatgtaatcaaaactataaggtctaacatgaacttgaacctgaacccgggtcggatttcaaagaaaaatgaagtcaatgtacaatctcacaacatcataaaagtttataacaattatcttgcagctttatccctgtattccaattttgaaaaatgtgcctacaatataaagatggtcttgattgtattgattttattatctctaa

SEQ ID NO: 73885 - DNA, 556 bp, Arabidopsis thaliana landsberg
  unsure (1)..(556): unsure at all n locations
catcatatatatcaccctaactaagtgcttaaccagcgtgaatatacttggtaacagtatgagaatacttgtatgagttttttttttatatagaaaaaatgaattaattcctattgccttttgcctgttcaagttgaccagttatatagaagacaaaaaaaaaagtttagatagtgggaattcaccggaattattgaaaatatgggtaaacactaatatctttcttgatattaagaaaactgacaaacgggaagataacaattaatgattacttgatgcaatctttatatcttgttttgacttaagcgtatgcgatagattgtgtcgtatatgtgcccaaagtcaagaagcagggtcaacacacttcaatgacatagatatgtaaatatgtttctatgatacattatattcaatccgtgagacattatatggatccggttgagacccatacgtgctataaactagtagtaattntgtcgggctaacaatgaactaaagagattggttgttgttgcccacttccacataaactatctagacctacatgtcatgttaa

SEQ ID NO: 73886 - DNA, 204 bp, Arabidopsis thaliana landsberg
gccaaactagaacaccaaaatgttgattcatgatcctaactcctatacatttccttggttaatgaaagagttcgttcatgtttcaatccatggacaataatagcagctgtcacctcttcttcaccattacgggcttcttcttgacgtaatggtgactagtaaggcctttatgctgtcattcaatgccttaaggacaaggaccta

SEQ ID NO: 73887 - DNA, 165 bp, Arabidopsis thaliana landsberg
ctccaccaccacatgcttcttcaccacaaccagcgcatgctccttctcgaccaccatggtgtccaacacgaccgacaccacaagcaccgtctccatgatgaccaccgcgatgataaccggcataacaggggcggtgattggcggcatcacgagatagggagagtc

SEQ ID NO: 73888 - DNA, 577 bp, Arabidopsis thaliana landsberg
cttgacacatacccaatatgacagactgatgatgttttacggattatctataatacccaatagcggtagcaaaatatgaacaaactcgggaaaatagggaaatggatagacgatcgcagcggatttaccgaaacgatccttccgttgatcaggcatcccgttccggcgagcgtgcggtgggcttatgttttcgggagcggtacccttttttgttttattttacaggtcatcacgggcatcgggctttccctgctataccagccgtcttcgcaggaagcgtataaatcccttcaatacatcacacatcaggcggcgttgggtaacctcttgcgcggcattcattatttcggcgcttcggggatgattatcctggtgggcattcacatgacccgcgtgtatatcaccgcttcttataaatacccgagggaaatgagctggatcagcggggtgttcctgttgattcttacaattgccatgggattcacaggccagttgctgcggtgggattccaatggcgtatggtcctcagtggtagccgcggaacattaggcaggacacccgtaatcgtacctggctg

SEQ ID NO: 73889 - DNA, 612 bp, Arabidopsis thaliana landsberg
  unsure (1)..(612): unsure at all n locations
tgaagctttggattatcgcccacaagagattcatcatttacttctctctcaacctctttagggagatacacattggtatatgggtcaaaaacacaccaccagcgattagcaacacactcaagccaaagatacaccccttcttggaatagatggtcggtattatcgacaacaccatagagagctttgccatacgctcccttcatcggccccaggctatttaacctcattttgcgatgccatgcgtcctcatttggatggtctgtcgacaccaagatactgtgtcctcgaccgcgcagtcgaggattgatagggcgccctctgcataatgccctagtcaaagagtcatacagcagacccagtgcccagctatcggcactgggttccaggtcaatagttccatcgagcataggtttgttatttgcaagggctctcaaaagctctttgtcagagccaaacgccgcgtatgcatcacccgcaattgcaatggaagctttgaccttagcatctttcaagcactggcgaatctttaaaattttagaagggcttttgaagcncgaagcggcgtgcgacctgggcatacttaagatacgcagggcggaacagcggagaata

SEQ ID NO: 73890 - DNA, 159 bp, Arabidopsis thaliana landsberg
agataaaaggaaagaaccaagacagcaagaaacacaagacccctaaacaaacaaaaccgagaataggaatagtaaccgccaagcaaggccacagggggagagacagagagaaagaccggaaccgacccccccccgggaagacacaaaggagcaaccaag

SEQ ID NO: 73891 - DNA, 648 bp, Arabidopsis thaliana landsberg
  unsure (1)..(648): unsure at all n locations
tgttagacctcgagacaaatggttcaatctagctcttagggaatgtcctgcagctttagagagtttcgatatcgggcggagaagcagtcttgagcctttggttgttgatgttgttcttgtggtgaggccacttgttggtgatcagtctggtaaaagggagcttatcaggaacttctccgggaaagattatcagtctggttggaattctgatcaagatgaattgggatgtgagactaagaacgagcagattattgagagatgggtggtgcaatatgataataggaagatcagggaatctgttactactagtagcaggaggtcaagcagtaataagttgcaagtgatgtataagaaagctactctgctgcttagatcattgtttgtcatggttaggcttttacctgcttataagatttttcgggaactcaattcctcggggcagatcttcaagttcaagcttgttcctagggtcccttctatagttgagccattcactcgtaaagaagaagcagaaatgcagaagttttctttcacaccggttgaaacgatctgtggtagactttgcttatcggttttatatcgttctctctcagatgtcagttgcgaacactctacacctatgtctccaacanttataacccgatattg

SEQ ID NO: 73892 - DNA, 460 bp, Arabidopsis thaliana landsberg
tacctactcccaagagatttcgcccgatacaacctgttaacattttgatcggggacctatgatacgtgccaaaaccatggacattaggacaagggtgaactcctgctctgctggcataccacaaggcgggcttagcagcaccaaataaggcctgaagcttgtgcatggaggctgttcctcagcaataaaagaggggacatatatatgatgcagtgcagctggcatatactggtggcgcaataacccgtgacctcaaatcctagatgttcctggattcaggttgcacattcccctcccaacgatggtgtacaagtagctcactttgagcactgtgatgtcatcttatccaaacccaaaccatgtgcacttttattcgttggcatactgaccgggtaaatcatcataccgttgggtacttctcgcatttctctctgaatctcatcttacagatctgggaacc

SEQ ID NO: 73893 - DNA, 632 bp, Arabidopsis thaliana landsberg
  unsure (1)..(632): unsure at all n locations
ctaattgcattttggttcgttattacacgatagttataataaccaaagttgagacatctacatagcttcataatatatgttagccaaaataacattccatacaaaatcattcaagaccatataaactgaaccaaattttgatgagtatgtaaaattatcaggatctagctcaaacgttgttacagtgtagtgacttgactttgattagaaggtatataaaaagagttcaaaactttctttttgtctgatagttcaataattagatcctatttgtctctcttttggctctttatggcgtctagtgtatggcttaaaagcttcgacaaaattttgatatgatggtacttttggagttgtatactgaaaacatgtaaaatatgaaacaacttttgattttcagggtggagagtggttacgcctcctaagtggactgccattgaaaaatcttgtcaaacttgtcttcccaaaaataatttatcaactgcaatacttttcctacaccttttcttttaaggttatagtataataaacccttctctttttctttttctttntggataataaaccctttaactttttaaaaactggtatagaattatttctctactgcattattctacaaaaattgtgga

SEQ ID NO: 73894 - DNA, 542 bp, Arabidopsis thaliana landsberg
aaattaaatggacactacatttagacatttaggttatcaataattattgatctatcaagacaacatagtcttatatatatataggggaggatgattcataacctctatatgactatcgtctaatcccacgagtaattggcgagaaaatgtatttttgattttaagtgtgctggcatctagatgcgggcttgattaatttcgacatcagacagcgtttgattccaacaaatgaaaacaactacatacacagaacaatttaaatattctggtttttagtgataaagctaatgttatcttgttatgagatctattatgattagcaatactaatatattcaaaagagagaaaatagcaacaacttcttgaaatctttctaaatcagaccagaaatctatgtgtggatcggagtaatgctaattattatagattttgtataacattaggctttgatttcctcattttacaaaaaaaaaaaaagaagacttttttatttgttttgatgtataatttctattcgtatcacatagtatatatctctcggc

SEQ ID NO: 73895 - DNA, 630 bp, Arabidopsis thaliana landsberg
gatgacgattaagacaaacaatgattagggctataaatactcccaagtgggtttacgggcccgaccaggatggtctaatatcctcgaaaacacacacgcctatgaactagttatatgactaattaggcatttaattatcaaaaagaattttgctagacaaatcaaaaaagattttagagagtaaatatattaatggcatcaatgtcgcattcatgatcacgacaaggatcgatcactgtaaatatatacagcatttactacaaaggatttgttaaaaatgtgtaatctgatttgaaactatatgactaaggttttgcatgctgatgactttttattaataccatcatatatatctttttttttttatgattatcatatatatctttattttgggtttaaccctatatctttattaggggtaacttggtttgtctagttggaagctaaatatagttcaatagaatcaacaataggaaaaggaaaacaatcaactcacagtaatttagtggttaaaaagggagttggggaaacaaaattcaaaatttcctattgcacacttttaatcatggttagctaggtcttatgtgataaaaattcaatttttacaggcgacaacaagttcaaaatttt

SEQ ID NO: 73896 - DNA, 460 bp, Arabidopsis thaliana landsberg
  unsure (1)..(460): unsure at all n locations
cgcgatccgcgcgccctgcgacaggcgccgcatgctgatgcgtccgaccttacggtcattggcgacgcnggagaccgcgagcatgccctcaacgcaggcgacgatcaccggaaacagctcgccgacgccgaagagcccgacatagatctgctgggcggagttgatgaagccgaacatcgccgcgaaggcgaaggtgctggcgagcgcgtagcagagggcgacgcggttcgacagcacggaggtgaagccgccgatgatcgcctgcgatgtcagggggcgccgatattgcggatgcagcgactagggaagacgcagcgtcacccaggtcgagatcagaattgcgcctatcgccatcggcacgaagatgaagtgccagctcgtgaacaggatcaccaactggccgatgctgggagcgatgaccgggatggccatgaacaccatgaagatcagcgacatgacc

SEQ ID NO: 73897 - DNA, 613 bp, Arabidopsis thaliana landsberg
  unsure (1)..(613): unsure at all n locations
cctatgcttgaagcattctgcttggaatctaattattacatttcgaaatattttagttgattaaatatcttaggatatcaaaccggccagccaatagttaggacggaatcaaggactagtttacagtggcgtcactatcttcttcaattttttttttttgtttcttcaatttttttttgtagtggataaaaaactccagatgagaatttcaattaggttcagtagcacgttgacgtatgctgagtgaaaaaagtcaaaaattaaattgctaaacccactaattacagttaccgctaattannnnnnnnnnnnnnnnnnnnnnnnnnnnnnnnnnnnnnnnnnnnnnnnnnaccatccatatatgtagttcaatgcatcatatgtatagataataaaactgataaaagtatagttcaaaaagcttcgataatctgtaaataagacaaacacatgatttgctatctcatgacacgacttagtaaaatcaatctatacgtaacatatatagccaattcttttaataaaaatatatatatganatcattttatcttttttgagaaacaaaaggcatgcttagatatgcttggggcttcatgatatatccaaatagta

SEQ ID NO: 73898 - DNA, 686 bp, Arabidopsis thaliana landsberg
tacacatatacttaagatattaatagtttttaaacattaatttatatatgagatattctattacatattataaaataatgtctaagatatatcttaagagaaatcccagatttaaaatattattagaaagagtgataaatatattaattacaaacgactattttatttttgatggtgttgttacaaaatgactaacttaattgatagacttacgtacatgtgaacaaatgattatttgtagttagtaaaatatattaaatgttgagaattttgagaaatgtctattttagtgtgtcgctttttaaaattgtttttttagatgtttactttcaaaaatacccatcatttaatttaaagtttataaagttttgtaaggttttttcttgatggtaattactacttggatactcatccaattattcttaagaatttgtaaggtattttataacgttgtacaaaatagctaaaaatattttacaaagtattttgtaaagcatttataaaattttacacgtatagaaaagtagtgtctatatgctttaataagggtacatacatatttggataaaactcaaaagtttactgatattatggataaaggtttgatattatggataaagttttgaagaaacaaaaaaccatttttaaatattaaagttggatataagtcaacatttttaaaaaaa

SEQ ID NO: 73899 - DNA, 413 bp, Arabidopsis thaliana landsberg
ggatcggcgatcccgaccgattttccctgcgatcaagccggggaggaaccgacatactgctgtctagctttacactctagcttggactatgacactcattccagcatcctttggctttgacaagcgcttgactactctctactagccctcggaggtaccccggcatcctctggtctgcgacaaggcatctctgctactcctactatgccctcgggcgcgcccagcttctctgccgtcttttggcggctatcctgactacttctactatgcacctcggggggcgttggacagcggcttcactatattccactatgcccttgcagcgcgggggttcaacactggcgggccggactaccagtataacttaacctgagagacgagctcggtaaggggaatcgtaagggctgtgcttg

SEQ ID NO: 73900 - DNA, 422 bp, Arabidopsis thaliana landsberg
tatatatatggtacaatagaaacaagaaaaactttttggtttgttaaaagaaataagtccgagtgagtaaccgtaatagtataacccacgtgtaacgaaactttaaatatgagagaacaatttttttttttgtttgtagaattatccagaagcatgcatacgaatatgaaaccacgcatagccattagagtagagatatggtcgactaaccctccgaaatggtgaggagttgaatggaagttacttataaaattcgaaatttttcatcgcgaaaatttaaaaggactcttcgataagggtaaagacaaggagcaacacagttaagacacgtaggggaaggaatgatataatttcagcgaaatgtataaactatgagtacgcatgaagataccatcgacatcattcattggagatgggtcctc

SEQ ID NO: 73901 - DNA, 330 bp, Arabidopsis thaliana landsberg
catttgatatctacaaattaacatacatttttatatgtaaatcagctatcaatgctcttccactggcgatttggtagtctatcttcttcaaagtccaaaccatgttgcattgagaggatcatctctattaatgtctgaaaatctgctttttttatctttaatacatatgtcttctcagtctccttgaggaatgcaacgctttccacttgatctaataagatattcatctcaagctaacaagagaaagctttttttgatctctttctgaaactaaaacttattaaaaaaatcttctaatgatttcttatcctttcactcttaaacgtatta

SEQ ID NO: 73902 - DNA, 508 bp, Arabidopsis thaliana landsberg
ccgcctgttgaaccagaactggctccaacagggtttgaggtttatcgattggggaacaaggactggccatttcggaatcaccgtatcatcaggttagtacttccatcagccacactcagatttgcataccttgcgggccggcgcatgaccccatgagtggatcctagcgtattcctctccagccatactgtgacaccacctagtatgtatcatacaattcccattggatgacaattcttcaagcttcttatcaagaccaatggcacggagacattcttggctcgattagccattacgatctcccgcatgaggtgagtatgtcttacccaacgctgccatatttgagatatgcgctcgcggcgtatttgctggtgcgcacgcggcactgatcataatttccttaagatctccagccagtcaatacccaatactttcttttcacgatacgatactcaccatagcttgctaggaaacaggccagggatgctccagctggtccagcgccaac

SEQ ID NO: 73903 - DNA, 561 bp, Arabidopsis thaliana landsberg
  unsure (1)..(561): unsure at all n locations
tggcaggccgccctgctggaagcttcattcggcaacgtgctggtgatnnnnnnnnnnnnnnnnnnnnnnggcgtcttgcacgcgccggtcgattccgccaattttcacgaagcggaacaattacttgccgatgcggacgaagcacgactgcgcggtttgctggccaacgcgaagccctggaactgagccgcgtcaggcgccgccctgcgaggtggccgaaatgaccagcccgatgcaggcgctcaggcagatcaaggccagcagcacgtggtacgtgatgctccagccgcggtgccggctgtgccggacgcccaggaaaaaaccggccatcgcaagcacgaacaacacgacgcccgccgcgaccacgccggtgcggttgaccagggtgcccccgatcacgcaagcgctcccaacgttgaagaggccccattggctccagacgatcgcccggcccggcggctgcagcgccagccacgcctgcccggcaccgaaggcccattgcatcacgcccaccaccagtaccaggtaggccaccatccagatgagatgttgcgtcggatc

SEQ ID NO: 73904 - DNA, 609 bp, Arabidopsis thaliana landsberg
  unsure (1)..(609): unsure at all n locations
ctaagatccaagcagagcaagagatccatatactctcggtatccttctccaacttaactcgactaccataggaaaataaaaccctagaagctacgaatcaacgaaatctcagccgaacatttgaaattcgtcctcttctcgaaaacatatggacatcaaaatcatgcgtatcactaataagtgcgaaaactcaccaagggcatccaatatctgaggtatcaaactaaagaacacagagctttcggagaatcggaaacaacatccaaggttctttgaaacaagtaagctccgtagatgcctacgnnnnnnnnnnnnnnnnnnnntggacggtgaaggttcagttcaaatcgcgggttcagtggaaaaaattgaaatcgaaaccctagagagagaaaattcacgaaaggaagagagagatagagagtagttgagaaaggagagagagaaagaccaagtcttccttatatactgaggccagtcgagtcaaggcataaacttattggtaatcaaaataatacaaatgagaaaatacaaataatcccttgataattcaatgacgtggaggaaaaaacattacctttttcacggttttatgagtatttcattacc

SEQ ID NO: 73905 - DNA, 529 bp, Arabidopsis thaliana landsberg
  unsure (1)..(529): unsure at all n locations
actgattgaaatggggtggttcttacaacactgaacgaacaatttggtcacaaaccaattgttaattaatttattgcaaaagacaaaaactcataacctaaacttatgtataatcaacgatttagttcattgcgaattatacttaaaagttagnnnnnnnnnnnnnnnnnnnnnnnnnnnnnngcatgttgggaatggacgtccagagaaaaaaaagaagaacgaagagactggctgccgaccaaaaaatataatcgaaattgcagagacaataaaaagaaaagaaatgggcagtcggggatggaattattagacgtcacaggtgatgaagctataaaaaaaaaatatatacaaagtggacagaaaaatcaacataagctaaaacaaaactattcttctccaaaggacagaaagaacgtcagaaagcaagtaacgaaagcacaattcctttcctgtattttaaagactttgacctctttgaccgctgacctcgttgactcgggaaaattctaacacacaacgcacgagt

SEQ ID NO: 73906 - DNA, 358 bp, Arabidopsis thaliana landsberg
  unsure (1)..(358): unsure at all n locations
acgccgtaaagaagaacaccccgcagctcgcagcggcggactccggcacccgganccttcgaaaaacaaggcctccgagcacgccggaggaaggagcgaggcgggggaggagcacgacgggaggaccaaagggacccgaannggacgcggcgacccccgaggcaccgacagaaagcggagaagacgaagcaagcgacnaaagngaggangcaaccaagccacgagncagcccnccagaaaccgaagagaaccgcggccccgancccccagcagaagggcacgggcancanccncgcgagcccgaaccgagcggccccgaccggaagacaaaacgaagaagcccgcgggaccgggaaga

SEQ ID NO: 73907 - DNA, 459 bp, Arabidopsis thaliana landsberg
ggagatgcgggtcgagataaaaccgctcttttccattgagtgggaatgcatcatgaagactggctcggttcctagctatggtatgagaagtgatgtttataacacaagatggaaggtcaacctacactattggtggttacgtctgtagctgaatgtttcttctttattggctttagtaaaaggagtagtggtattaaaataagagaaaatttgatttcagagtcttcccatctatctttgtcaacttatatcccccctgcacgaactttcttcccctacaaggcaggagaaacagttatgtgagtctacgaaagttcctttgtcgaatatgttacttgtgatcaatatccatacagcataacataaaatatagagttggacaattcaacaaaagcagccgcagatcctctacttcacaacaacaactaggtaagttagttactgatagctcagaaagag

SEQ ID NO: 73908 - DNA, 560 bp, Arabidopsis thaliana landsberg
  unsure (1)..(560): unsure at all n locations
aatatattcatttacattcacatcattagttttttttttattttatcagttttggcaaagagaggttgcaagggggcagcaacagctccaacatctacaagaatgccacaggtaagagctattgcacatgtcaaaacagaaactgagtataagatacaatatactaatctaatctcgctacttatttacaaaaactatcaattatatataagaaattgcaagtaaaaacaaatagattttgacagaagagctagcatgttaaacaaattatatttcactcccaaatgcattataaaattaacctataatactatgaaggaaactagtgggagaggaactttctggaatgaatgctaacgacctacaaaatcttgaagaccagctagtaacaagtctaaaaggtgttcgtctcaaaaggtatggttntaaggaacattttatacaaacatattttggacaaagaatattggtgcctctctttcattgccatactatntggacaacntattattctcttttgtaggatcaacttatgacanatgaaatcagagaaacttatc

SEQ ID NO: 73909 - DNA, 402 bp, Arabidopsis thaliana landsberg
  unsure (1)..(402): unsure at all n locations
cacggggnncggcccgtggtttggccctaaatttggcaggctgtttatgtaatcgcacgttgaatgggatgctcggggccgannnnnnnnnnnnnnnnnnnnnnnnnnnnnnnnnnnnnnnnnnnnngcttcgcagcctgcggcacctggaaacggacgcgagacaacggacacgacagccgtttcgtcgccgcgccaggcgaggctctgaatgaacgcagtatcccaggacaaaatggtgccggtcacggtgctgaccggctttctcggcgcgggctagaccacgctgctcaagcgcattcttttccgataccacggccagcgcatcgcccgaattgaaaaaccaatttcgnnnnnnnnnnnnnnnnnnnnnnnnnnnnnnnnnnngacagcgacgaacag

SEQ ID NO: 73910 - DNA, 538 bp, Arabidopsis thaliana landsberg
ttgaatataatttagagaaaaaagagtttttattacaattgaggattaataaaaggacaggtattagtctttgtatcattttgtgaactttgtcctctttttttcttcaactttttgtcctttttctttttttaaggtcgcttcaggcaacacctgtcgatcagctaacaacaacagatgttatttaattcctttttttcccatttatttattttcagaaccaaaaatatgtttacaaatggaaattgatttctttctctttccttttgtttaaaaaaatatatcataaacagaaaaatttatataaagtagaaaaacactaattatttccataaaattttgacatgtaatattaaccacgaaaattagatatagataagtgagtatcttaattgtacaatctgacgtgtagataagtgagtatcttaattgtaatttgtagtttatataactgtaaaatgaataaattgtattaatgggatcaatgaaatcttgacacgtaatatattggttcagcaaaaatttccatttttttatt

SEQ ID NO: 73911 - DNA, 472 bp, Arabidopsis thaliana landsberg
cttcttcaaaccaataataagtaaataaaaaacaatcataacgacttatgagtaaaggtttattgataaagaaggcatggaacattttataaacaagagagaacagaattcaatatagtgatcagagaagagagagcaaagggaaagggttaatcctcagcaatgggctctcacctttccaaacaactcgagcggcgaaaagccatctccacggagaagaaagccctcaccgatctcgagaaatcgtgcggctgcgagtttccggggtgtgattacatgccttccgatcgtaaaaactggatggccggcgttggacctgaaaagcttcacatcaacaagatcgtctggcctgggacgcacgactctgccaccaacaaaatcggtatccgattcgtgtctcgtccctttgctaagtgccaatctctctccatctataaccagcttgtggcgggtactcgagtccttgacattc

SEQ ID NO: 73912 - DNA, 1095 bp, Arabidopsis thaliana landsberg
actttcatatagcgcatactaactataaggtaattctttttggttttttttccctatgattcacacactgcattcatataatggacagtccgaaataaatagacaatgaagacattagtcgaaattactaaaccgcttacgaattatgatcacgtatgttttcatgaattcaaagtgattgatttataattcgaatgttggagtacatgttataatgtctccaatatttttcaagcattgtatatattattactattagtagtatacactatagaatttgtagagcggcttgatcaaaagcaaaattcattaatttattatttaaatttgaaaatattgatcctaaatcaaaataatgcatggtaacatatatgttaattgtatattccttattatctccctatatatgtagtgaaaagtatgttattgtgccttttataatgataatgatggatatagacatatggatttcaactttactattgtggtccaagtcctagtcctactgatcatgaaacgctaaatatcatgtaaactcggaatactttctcttattaacagtttaacacgacacgtaattttgctatgtcgatggtgaatctgtgcgtagcggtagcttagatgagactcgaatatataaattttgtagggcttgaaaataaagagttttgagcaaatatttttaaatgagccacaacactattttaaataagtatatctccaacaaaccaaaaaaaatacaattttgataaatgtataccaacaaaaacattcaattcttgtctaaataagttaagatagcagaaattttgaaacttaactgggccaagcataaatgggcttaacatgatgttgattgatgataaatgggcataacgtaacaccaatggaaatatatgttaatccattgacccatttgcggtgtggtataattatggtcgtatatctttttgaaaatataaaaataaagtagagatagataagttgacaggtgttcattgtccattctgatccaaaattaagtccgtttctttgtggaactgactctttaagaagagtttgccttcgcatgggacaatgcctctccaatctgaa

SEQ ID NO: 73913 - DNA, 416 bp, Arabidopsis thaliana landsberg
gagtaaaatcacacaacggggtggatgaatcacgcggcattcacgtgaagtgctcatgatcttggccaaaaaaagcctaattgtgggtccggttaaagagaaaactaagcgcactttaagaaagggcccatccatatatgtctcaataatggccagaaggtactatccgctgacgtggcccttttgagcccggatctctgccatgtcactcactacagacttactagtgccttgttctatgcttgattacaacattattgatgtagaagcggactacctgagttatgacctttctttgttaaaagagaacaatcgaacatgcgtcttacttattgataatacttttatcttcaataaagaaaataactcacgatcgtatgatggaaatcgtgtgcgccaatactggagattattta

SEQ ID NO: 73914 - DNA, 155 bp, Arabidopsis thaliana landsberg
gaaatctacttgtgagtttgagaaggagaataggacgtttgaactgcgtcgtagagttttactcttgtgacgtttggtgatctgaaggagcacggcgactcttgcccgagatgggaggttgcctcttcttccccccttctttattcccacccctt

SEQ ID NO: 73915 - DNA, 486 bp, Arabidopsis thaliana landsberg
  unsure (1)..(486): unsure at all n locations
aagtcacggaatgaaactgatacataaccaataaatgtttcatagctgtgagtnnnnnnnnnnnnnnnnnnnnnnacattgccatcaggaacctcgacaacctggatgtatccggcggatccgatgtatatatcgaaaatgacctgaaaataacctctctgaatatgcatctttccggcggctcagacctgcggggcaatatacacgggcagttgttgtcgctatcggccagcggtggttcggatgtatatctttccgggaaggtaaacaggatcagcatcagtgccagcggcggcagcgatgtgcacggatatgatatgattaccgactattgtactgtgaataccagcggcggcagtgatgtaaagatcactgccaacaaagagatcagcggcagtgccagtggaggtagntgatctcctttacaaaggtactggcaccttcaccgccagcaagaggcgagggggagggatcaggaaagtaaat

SEQ ID NO: 73916 - DNA, 540 bp, Arabidopsis thaliana landsberg
tgaaagaagtatacattatatctgcagtttgaacacctattggtagtttcggaggaacacgtgcgcttttctttcagccactcagctgggagcggcagccattaagggcctattaaagaaaaccggatgtgatccaaaagaaattcaggaagtaatcatgggaaatgtactttcggcaaatctaggacaggctcctgcaagacaggctgccgtttttgccggacttccttatgaagttccctgcaccactattaacaaagtctgcgcttcaggatccaaagccattatgctggctgctcaatccattatgttagggataaatgatgtagtaatcgcaggtggaatggaaagtatgtccaatgttccttactatctcgataaagcacggaacggatataaacttggcaacggccaattaacggatggcttgatcaaagacggattgtgggatgtatacaatgattttcatatgggaaatgctgctgaattaaccgctaaagaaatgaatattttcagagaaatgcaggaccagtatgctat

SEQ ID NO: 73917 - DNA, 617 bp, Arabidopsis thaliana landsberg
  unsure (1)..(617): unsure at all n locations
taatagaaccttccttaaccaacctccaaatgtataatgcgtctactgaccgttagattaaatacaaattccgcgaaggataatcattttcgtattaataaaagtaaattgatttcttatcaaatggcccgtannnnnnnnnnnnnnnnnnnnnnnnnnnnnnnnnnnnnnnnnnnnnnnnnnnnnnnnnnnnnnnnnnnnnnnnnnnntttgtacaaaaaaattactcttgagccaatgaggctattgtgcaatagtttgccacaagaacagagacattggcctatgtggtcagtgttccaagactccaaaccatgtgcaatgaaaaaaatcccttaacccggaacctctggtttatgatatcacattacaacaatcctacgatttcaaaccaaacttagaatacataaaaaaaatggtcgattgataatgaaaaaaaaatcgaactttatattcataagaattttgttactaaaccatatctctttatctgtaagagtgtaagactgtaacttcgaaaaagtatctatgattcttcttcaccagttagcctcaagctaaacttccatagttttttggccagatctttgtctttaccctgagaattagggtcagat

SEQ ID NO: 73918 - DNA, 280 bp, Arabidopsis thaliana landsberg
atgtattttggtggtggctaattcacaacaaggctccgggatttttttgtgtctaaattatatatatggtacaaaggtttttttctttcaagaagaagaggtttctgcattcgagaagagtggggacaatatcggagagttgaaattggacggaggattttcgatgccgaaaatggacaccaatgacgactaagcttttttggctcctgagatgaatgcatttggccgccaattcaggtttttttttcttccacatttttctattcaattcaagaatgaa

SEQ ID NO: 73919 - DNA, 619 bp, Arabidopsis thaliana landsberg
  unsure (1)..(619): unsure at all n locations
ccaaatttctcaaaattacatacttctatctaataatagagttacatacttctatctaaaaagtataatttagtcacatacttctatctaatatgtaacaatataacataacatgtaatttgttttattataaaataaaaatcatgtaattataaaataaaaatacatgtgataaaattgtctagtgattaatcaatggttcctacacaatgttctaaatattttagtaaattttactagctaatagatggaaacttatcgcatgttacaggagtagttcatcgtggccttagtaagttattgataaagttgtccattttatgntgttgttgtcaaattggttttgttttttttgtatttttttttgaataagttgttatcaaattataatgtctaatactactatagaaatttatcacttttatcctctctttttggtatgtctttttcctttcaaaattgcataccattttgtatttttttctcaccaaacttattcaaactaaatttccaaacatattatagagaactatcaaaatacaaatagtttcttaaacaacataaggtcaaaccaaatcacgagaaaaagtgaaattattatacaaaatgctatattttt

SEQ ID NO: 73920 - DNA, 604 bp, Arabidopsis thaliana landsberg
  unsure (1)..(604): unsure at all n locations
atcgtctgaagcttgatgtgcaccgttgtgtgttcttcctttttttttttagctgtagtcttgtctgcgaggctgggacattgagaagatgttttagggactattcaaatgcttgatctcccatatctgaggccattttgatcttcatcaccatctacatctctctcaattcaagatacctactgcacccatcacagccaaccatcgccaacctaagcaacaccggttcaagcaaaaaggaccaataccaacaacctgtaaaccaactctccaataatcacaatccaaaaacaagaataaaaatgtcttcgcctgccagtgcccagtaagaagcctttccatcacctctcacgatgagttggtcgctaaccatgaccgctctcacaggtttagcagctccagtggctcgggttccgcttacacaggcggccaggccacatccactaacagcaccatgctcagccagtgggccgccacacaagaccggagtgagcgcttctgggccacaggagagaggacgagaaggaacgcaatggagcatgctgacacgantgtggctttcgagagggcccttaacggaacgagatcctagagcttggattaa

SEQ ID NO: 73921 - DNA, 393 bp, Arabidopsis thaliana landsberg
  unsure (1)..(393): unsure at all n locations
ctgagcgaaaccttggggcctacggatttcgaatggaattttatttgcattaaaattaataaaataaagcatgttaacaaaaaggtgggagaaaaaaaattcatgacgaaatgcannnnnnnnnnnnnnnnnnnnnnnnnnnnnnnnnnnnnnacaaaagtaaagtagatcttcatcaaatgtattttgactttataatgtacctattagtcaaactatatgcgatctaaatattaaaaacttgtattttctcaaagacaatgcgaggcgtaaatatatgaaattttattttgtagattaagtaccatttatatatgaaatataaataaatcaagaagagtaaacatgaaagagcaaaagagtaaatagaaaaaattatcggaaataaaaaga

SEQ ID NO: 73922 - DNA, 559 bp, Arabidopsis thaliana landsberg
  unsure (1)..(559): unsure at all n locations
ggtaaagagatcctgccttgggtttcagagacttacagtgcttcaatgacgcccttctttctaagttgagctggcagattctcacaaaacccgacttgtctcctagccaaattgctccttgataaatactgccacaagtcctccttccttgatagcaaaacgccagcttcctgctcacatggttgacgaggaatttgtttaggcagggacttgcttcgatctcaactcggcagagtgttaggagatggcacatccttgctcatttggaaggatccatggctatctcttagtacaccctccacacctatcggaccacgaacagaaaataatcagaatcttaaggtttcccacctcatatcccctgtttcattagactgggacagggagaaaatcttgcaaacattacctgaacttgtagacgacatccttgaaatcaagctgagctccttcggngcaaaagactactatgcctggctcccatcaaaggatggaatctacaacacanaatcaggatactttgaaagtctaaacggagaacgttgctagaagagaatcacca

SEQ ID NO: 73923 - DNA, 406 bp, Arabidopsis thaliana landsberg
  unsure (1)..(406): unsure at all n locations
atatgaaatgggactacatatccttttacttcttcctacggaaaaaaaagagggggttgttgagtgtacaccgtaagatcaattgaaaggtttggaccgcacacnnnnnnnnnnnnnnnnnnnnnnnnnnnnnnnnnnnnnnnnnnnnnnnnnnnnnnnnnnnnnnnnnnnnnnnnnnnnnnnnnnnnnnnnnnnnnnnnnnnnnnnnnnnnnnnnnnnnnnnnnnnnnnnnnnnnnnnnnnnnnnnnnnnnnnnnnnnnnnnnnnnnnnnnnnnnnnnnnnnnnnnnnnnnnnnnnnnnnnnnnnnnnnnnnnnnnnnnnnnnnnnnnnnnnnnnnnnnnnnnnnnnnnnnnnnnnnnnnnnnnnnnnnnnnnnnnnnnnnntaactaaaaaaaaatgaaagttt

SEQ ID NO: 73924 - DNA, 510 bp, Arabidopsis thaliana landsberg
ttaccgttgaccggtttcgaagcatccattttggaagtgtctatcggatttgccgataacgccggccgcattcgggggctggaccgactgctctctcttgaccggctcgccgaggcgctcggacaccactttgcgggatttcccactgaaagcgcgcaagaattcgacttcggtgtaggatttcttgcccggtgtttcggcaaagctcatggggatgctcatgccaacacaggccagcatggcgatcgtgagggaaagtttcttaccaagttgcatgattctgtttcctagtcgctacaagttcttggattatcgcatttaaaattacgtcatgcgagcctatgcatgcccgaattccaacctcagcccatcatatgccacatgtactgaaggcggcaaacgctggcccagtgcctcatactcaagttcatgcgtcatgtggatgaggtaggtattgcgtgctttgatgagactcgcatgtgcaagactttgttccagatcgaagtgcgt

SEQ ID NO: 73925 - DNA, 612 bp, Arabidopsis thaliana landsberg
atacactatgacgccgtctagtcaaattaaacaagatggatttaacgatctcaaaaaaaaaaaagatggattaaaggtactctctccgtattaataattattatagattttacacacaaatgttttttttttaaactgtctattacctattatattccttccttatataatgcaaaatcgaaaagaatggtaaactaaaaaatagttaataattttacaccaaaatatggaacataaatcccttaaaatgaaattatataataaaaaaaaatcaactaaatataagaaatttcgttttcgtagttactagtttccatgatttgttttatgttattaagatgtaaaaacagttttgtttcatcctaaaatactatttggagacgactttcctataatttatgtattgttatgtcttttttcgattccctaatccacttcataaaagttaaaagtatggaattatttcacgagtgtatcttttcaaatcgagtatccactaactaaagtttttctagaaatgttgcacgtttacaatttggttaagtttttttccaaacccgttaacgtcaattccacatatatgtgaccactcgtctagattaaacattacca

SEQ ID NO: 73926 - DNA, 515 bp, Arabidopsis thaliana landsberg
tactttttcctatttagctatgtcaaaaccaaacaaaaattaaaacctcttagtaaaagaaaaatatttaaaatttgggcctttgttcttaagaaattttttaaaactaatattggaccatggcatttgcctaccttacctatgggcagagatgggcgaactccgtaatcaagcaagcatagatggaagaaactaacgcaccagacaacttgttatgtaacacagccaaccttcaatattagacaactaagttatttaagtagagattgtaggatacaatatcatatatatcgatatgtactcacgagaaatgagaaacttgtaaaaaattgtttcttccaatcaattctccgcattcgacagcgtgtaagtgcgagaaagagagatagagagaaattgtgacttgcgatttaatgcaacttatttaggaggttgatttcttcacatcataactaatgaattattaagtgtgacaagaaaaagaaaaaagatgaactgttaaatatgcattttca

SEQ ID NO: 73927 - DNA, 547 bp, Arabidopsis thaliana landsberg
  unsure (1)..(547): unsure at all n locations
cgcgggaaacagctcgcgccagatgtccgtttgctcccagtcgatgatcttttagttggcgggacgggtcgggcgaaactcatggcgaatgcggatgcgctccggcgtcgcttcgatctcgcattcgacctccgccatcacgcccaggtacagattcatcagggcgtatcgtcgcgcaggatcaacaggccgcgcgggctgtcggcgacgaaaatgagcttgcgtgccggatcgacgtcgagcccgaccgcgccctcgaagaactggctcgtcgtgtagtcggcctgtggatcccaggtgttgtagtagccgacttgtttgggttgtgtcggatcggacatgtcgagcacgcgcacgccgtnnnnnnnnnnnnnnnnnnnngccttgttcccgaacgccatcaagttgtggatcgagatccagtcgcgcgtcttgtagctgccgatcggctgcatgaacgtcggcgacgcgggatccacatcgaccacgtcgaggtgcgcgttgtagttctcgccaccgtgcagcgcgatgtgacgattgccgacgc

SEQ ID NO: 73928 - DNA, 612 bp, Arabidopsis thaliana landsberg
agctccgaggtctcgccggaattgctgagcatgaccaccacttcgtcgcgcgtgatcatgccgagatcgccgggcgaggcctccgccggatgcacgaactgcgcgggcgtaccggtcgaggccagggtggcggcgatcttggcggcgatatggcccgacttgcccatgcccgacatgatgatgcggcctttgaccgcgtacatggtctcgaccgcctgcacgaaacgctcgtccagcgaggcggcgaacagcaacaaggcctcgccctcggtgcgcatcacgcgcgccccggtcgccagcacgctggtgcgggtattgatatcgtcagcgggtgccagcctggtcataagcagataatcttccgtttccgccctatatggcgggtcgtgcggtcatagcaaggttggcggatgcggacaataaattaagaccctgttgccgggcatgcgcctatctcataccacggcaattttaagcggccgggatagacaaagacacaaattgtatcgccgacatgtgcctgccggataaagctgcggctgactgacaccgtatttcctgattgacgatctccccaggcactcaccttcagttcgtgagatttgcaccatc

SEQ ID NO: 73929 - DNA, 642 bp, Arabidopsis thaliana landsberg
ttcgggtttctatatataccggtggaagttatttaagtttggaaacggtttcaactttcaaaatatatgactggttctacttctcttcttgtaaatagtttttataaaaaaatggaatggatcaacctacttgtacagtatttaatcatgtagttagtctttggcataaccacatactagatggttgtttagggataataaaatgcataggtaggctttactaggagttagctaaacctatattaacgacttcgtttaaagcaaagctctaacgactcttcatcctcacaagttgctaataaatgtaaacatatattgatttttttttaatatatttttttggtcaaaacattttatattgataagctatataaatcaacattattcagcttatcactaatttgagttaacattgtgtttatgtttttggttccgtataaccattagtcgctcttctattcatccaccaacacaaagtattattgaaagtttaacaaaaggtagtgaaagttgtgtattaatcttctacattgcagagagtttgcttctaatacttctcttcttgcttcagcagaatcatattttcagtgtacagatgcttcgtaatggatcaatctggatcttttaactattggcccatta

SEQ ID NO: 73930 - DNA, 514 bp, Arabidopsis thaliana landsberg
aataaaaaaaaaacgacaatgtgtatgggcttttacatatggattaattgtcagataacatggtgaattctaacatgtttctgtctatctgattttagattaaagttgtttatacaaaattttagacaacacttaaattagtactatcgttagttatatagatccattaatcatttctccttctgtatggcttatttggacagatatgtcattaagcgtataaaaatatttgtagattcgataatttgtcaaaaatagcatttattgatattatagttgatccgtacgcgttacgaattctttagttgacctttctttttttataatctcctaatatttaaaattcagcagcagactgatgaataaaattaaatacttggttccatttctagatggtaacaggtacaaatatagatcctcacgtaagaataataacaacggaggacaaaaacgttaaattatgattaattaaacatttaattaaaagtattagcaaactcaatcaaagaatgac

SEQ ID NO: 73931 - DNA, 129 bp, Arabidopsis thaliana landsberg
gtcgaagtgatctcggaatacgtagtggttaatttgggacaggtaacgattgggcgactacaagaccagtcttgcagttttttagagacaacgacagaaaaggatggcaaatcctagattgggggagag

SEQ ID NO: 73932 - DNA, 534 bp, Arabidopsis thaliana landsberg
  unsure (1)..(534): unsure at all n locations
cgagcgcgccgacgcgggtatgtacgacaacgagccggacgctcttccgtcgttggccgcggatgagcgcgggcgcgcccggacactggcgcgcctggtcgacggcggcagctccgacccggtcaggcagatcgcgcggcgcgagcgctggcaccggggcgaccgctcgggcgcgctgcgcgcgggggtcttcggggtcagtgacgggctggtgtcgaacacggccctggtgatgggcttcgccggctcgggcgcgccgcacacggtgacgttgctggccggggtggccgggatgctggccggcgcgttctcgatggcggcgggggagtacatctccatgtcgagtcagcgtgagatgtaccagcgggagatctcgctggagcaggccgagctcgaggaaaagcccgaggaagagcgggccgaactcgcgctcatctaccgggccaagggactgccgcgcgctgacgcagagcgcttncccgacaagatcatggccgaccgcacggtggccctggacacgctggcgcgggagga

SEQ ID NO: 73933 - DNA, 449 bp, Arabidopsis thaliana landsberg
tggatccaccgaatggaacgggtggaatgcctatagaggttcataatctaccagccgtcaattcggcgcggtggccggggaccaaaccattgtcatgcggacgcgtagaatatgaaataccacctaaatatgattccatgcgagatactagtcatttcaacacagctgctatcctatttggaagagcgtgcaaaacatctgggatttgctaagatctaaaggccctagagcaatgaagtcctagttatggtaatggaccaatattgtaccatcgccgatgagaccttttgtattatcataaaagaagaccgagcccgattgttctcatgccacactaaatcagctgatgaacttgagagacaatccataccgaatgcgggtatcttacttgccagatgccgaactaaaacacatgcttggtatttaacatgaacagagattgtctgatt

SEQ ID NO: 73934 - DNA, 525 bp, Arabidopsis thaliana landsberg
  unsure (1)..(525): unsure at all n locations
agcctgccgctttgggtcgaacgcgaacgccacccgccacactccgttgtcggcatcgaagcgcagttctttcatgttcgcgaatgacgaatcgttcagagtgtctgcgtgcggtcgccccaactgaggaccaaacgcaccgagaagtttcgcggaggccaacagctcgtcttggaccgtttggggcaatgcctcgaactccccatcgaactcatcgccgaaagcgacttcccaactcatatatagctcccagnnnnnnnnnnnnnnnnnnnnnnnnnnnnctgatgcctggaagcgaagcaggtgccactcgattgccgggcctgctatcgaggttcgtttggggctcaattcctctcggtggacgaacggcgaggcctccggaggcacgcaaggccggctcgccgggttgtttcttcgcggccaatatcgcgcgctgtgttgccctaggaccaagccacgatcggatagtctcatccttggtgagaaggtccccaagagcgtcgaacattatgctgctgatcg

SEQ ID NO: 73935 - DNA, 283 bp, Arabidopsis thaliana landsberg
atacacctttacaagtgcacaaactatggcagcatccttcacatagccggttttcgatacataagcgtgaatcggtgtgtccgaattgtgaacatccttggatcatggaagctctgataacactcaaaaaggttactttatcaggagctatacccaaatcaagcatatccaaaaacatacacagtgcttcctctgcatcaccgttctgactataccctgtaatgatggagttccaagaaaccaaggttctctcaggcattccatcgaacagatacctcgcagt

SEQ ID NO: 73936 - DNA, 631 bp, Arabidopsis thaliana landsberg
ggtatacgaaaacgacaacaaattataaataaataagtttctccccctcaattttagcatctgttattaaaaatgtatagtttgactaattaacgtgatgtgaacatactcctaatgcgaaaaagttgtataaatgcttttttgattataagttgtatatatatgaaatatgaatataagtaagtagttcagtgaaaaaaaaaactgtacaaatattgtttcacgtccttttttaatcatgtatgcattcaccttcaaagatatatcgcatagaaatgctatgatagaaatatatcagagtggcgcagctaaagcataatggctccgtaacccacagatcataagatcaaaatttgactctaatatcaaaatgcaaaattttcttttctttcaaaaaaaggaaaaagtggtattataccactacataatcatattttacaaggaaaatcgtgttataaatttcttttttttaggcaaaattaatcatattataaattcaaacctctaatttttataaagaaattcttagagtacgatagtgtagtgattagcaaatgatattggtttccattgtggtagaaggttattctattgtgcctctacctcaatttctcttgggagtaaatgttga

SEQ ID NO: 73937 - DNA, 437 bp, Arabidopsis thaliana landsberg
ggagcgatgcaagagacgaacaatcatccacccatgatttgtcttgtacaacagcatcaaaatatttggtgagatgcatggtctctgtgcagtcccttctactgtgtatgtgagagataaagatgacatacaaatcaaaagcttatatacagatttgggacacatcaacattagcgactgactggggacacaggctacagctgactaaaccgttggacgatacatcactaactatgttatacaaaatatcccaaatatttattatgtaaagagaatgatatatctgcatatacacgtgcggccaaacctgttagacatgggcacaccttatctataccatttggtcaaaagagatacttaagtgtacaatggacccattgtcttcaccacatcaggccactcaacgatacttgcaaaacagaaacttacacatggag

SEQ ID NO: 73938 - DNA, 609 bp, Arabidopsis thaliana landsberg
  unsure (1)..(609): unsure at all n locations
ggagtactaccatcactacgctngtttacgagtaagatctaaccatgctaatattacaactagtatatagggacctgtgaaaacgacgccgaaaatgacatcctctggcgccagaaacggcctcctttccacccgtaaactttggacagccagccgccgtttgaccgcccgctggccagtaccgctccctattctgcacccaaccaggactgttagtcatccacctctcgtcctgttgttgacgcttgacttcaacgattgttccccccgtttccactggggaccaaaacgacgccgaaaatagctccgctctgcatctaaacctatggccccctccgttttgcctagcctgatcgagcggctataagatgcttcgtctgcgctctccccgnggggtcttttaacaaccttctcctcgtcctacctccgctgcctcgatcgacctcgacacacttgattcctaagtctcctatcacaaaatccaaatcttggcctttgtctccgaattctcctcatagcgctggtgtctgtatctctagcttaagtcgatgagcactagttctgggccgatcctatcctttgcgaggaaactcgagccggactgaaaca

SEQ ID NO: 73939 - DNA, 520 bp, Arabidopsis thaliana landsberg
  unsure (1)..(520): unsure at all n locations
tttgtgtaagttattcgattttaaattaagggtttcaagaatttatagtctaaaaaaagaaaaaacagatggaattaaactaactaatgagctaccaaaacaaataaacaaaaattacttttttgcctataagcatggagttttgccaagaaattctgatgtatctagatttttcttttccataagttgtgaattgtgataataatttacaagttgacaaagaaaaaaaagatttaaaacaaaaaaaatgtgattgtacttaagatttcaaaggtagcgttttgttgtttctctcttcctctctctctccactggtaccaatcacgctccattaagaatttaagagagagagagactaaacttgagcccatcacttttgtagtgactagtgagtagagtaggcttttagagagagagagagagacggctgttgaaagaataccacagaacacanaaactcattcatttaagaatgagaaaagaagttccaaaaacctttttttgctttgaaaagcaacgc

SEQ ID NO: 73940 - DNA, 548 bp, Arabidopsis thaliana landsberg
gccgatacggctgtctttcagccccagcgctgcccagcggtcacgaattggtcccatagattttcatgcaccggtagatctagtccagataatgtaaccgttctggtattgttgccaaaatccattaccagtctgccccatgtaacccactacgtctcctagcacgccacctgcgccacctagtttcgtgtatcggtttgttatggcggtgtaagctttgtcggagttcggatcttgtgagttaccgaaccactcgttgtagtaaacccagaagtttcggttgccgtatgagctacaactatcacccgagccgtgcaggttgttgagggcggctttgttcggtacgtatggcgtgtagttatatagacccgaagttgcctggttttgcacgtaaactttttcggtgccacaggaatgattcgggttatagaggatgttcgatgtcatacccgctggatagttccattcgcccgggtcagctttgtaaacctggaactgcagagccgcgtcgtagacttggttaaagaagccgtaatagtcggcgtcac

SEQ ID NO: 73941 - DNA, 481 bp, Arabidopsis thaliana landsberg
ttattcgttcaccaatacaaaaaacttatcaagattttcttgacaaaaaaaagatgttagcaaaagattcttgaattcagatggaggctcaccaatgaaattcattttttaaaccaaacccatctaatcaaattcagcacaagaagttgagcatcaaaatttattataatcacctagctagtcaccctcacgactagactcttactcatcccaacataattttaagaagaaaaaaaggatgaattaagtttacctttcgtttaacggtaaggagacacttcccggtcgcgtccatgaggacaatctcatcgttatctcttgtgtcaggtccataagaatcaaccctgaagatgatatcaccacggcagtcataggcggcgaagccatcgccggtgtagaagagagaagtcttgcagacggtgagtggattgtcttcttggtaaagataagctctgtcgaccacaattctttctcccatctt

SEQ ID NO: 73942 - DNA, 629 bp, Arabidopsis thaliana landsberg
ctctcgtgctagagatgcgtaccagaatccctcctactaaaaatgtcaacttccacagcaagcaaacgtttaagcatcaagagttggaatttgtctttttgtgtttgtttagtattgtccagtgtttagttatcctatcaggatgtttaggttttatgttgtctcttaagcaaacactgatatgttatattctaagattcgtatattgttatgttctctgttgtaatgtgtgaatgaatactaaagaatagaaaaccatgatttgttgtgatcactgttttattggtttgggttgacatgcctgatttgggaacaatgaatgatattaaactagaactgaatttttccggtttagtttggtttttattttttaaagttcaactgaaaatgaagaaaagtaaagaatgagtatgttttatattatttcagataaaatgtttcagataatcagatacatccatattttgaaggcagcacttgtcaggaacccaacttgtaaagagtaacagatgcctacgaatagggcccatatcaggctgcaggcggaagtctttgattcgatttcgttgctgtacataaacatcgtaaaataccaaatatcacataaacttggactgttcatagatcta

SEQ ID NO: 73943 - DNA, 246 bp, Arabidopsis thaliana landsberg
  unsure (1)..(246): unsure at all n locations
aaaacgcaaancaacaacggcccgacaaaaacacgaaacaacaccagccgccaaaaaagaaaacacaccngcacgcaaaaaacgcaaacaaacacgagcccgccaaaaacgacacgcaacacagcccggccaaaaaagacgacaccaaggccaggaaaaaacgcaacacaacagggccccgccaaaaacgacaaccaacacgggcggacaagaaaagganangacangcacaccgacaaaaacgca

SEQ ID NO: 73944 - DNA, 568 bp, Arabidopsis thaliana landsberg
  unsure (1)..(568): unsure at all n locations
ggtagatgtatgggcctattataatgatgctgatgctgtttagttatttttaaatggtaaatcactgggcacacgcagcaaacaaggtgacaacctgcatgtaatgtggcgtgttccttatgaaccgggaacactgaaagctatatcaagaaaagatggaaaagcggtactcacccgtgaaatccatacagccggccctgcctcaaaaatggttctgcagcccgatcgaaaccatattcatgctgatggtaaagatttatcattcgtcaccattaaagttttggatgcaaaagggaacctggttcctcatgccgataacctgataaattttaaggtcagcggtcccggctttattgcaggcgtggataatggcaatgaaactgaccatgagcctttcaaagctgattaccataaagcatttaacgnggctttgctggcagtgattcaatcgaaaggacagaaaggcaaaattactgtgactgcaacatccgccggacttgccgtagcgagcactactattgatgcaggggaataaatangttgcaattgacagtgagcagaatgatgt

SEQ ID NO: 73945 - DNA, 194 bp, Arabidopsis thaliana landsberg
ggggataaaaggaaataacaaaaaaaaaaaaagataacaattttttaaacaaaaaaaaaacaaacgggcagattgtaagatataacacggaaactcaaaaaataataaaataaaaatgataaaacaaaaacaaaataataaacaaaagtaatattaacttaaaaagcaaagtgttttatacaaacataaaaata

SEQ ID NO: 73946 - DNA, 558 bp, Arabidopsis thaliana landsberg
  unsure (1)..(558): unsure at all n locations
caataatgcgaatccgccatacccgtgcgtattatgacggtttttcatggcaatgctttccagtgcgctgtcgggatacnnnnnnnnnnnnnnnnnnnnnnnnnnnnnnnnnnnnnncctcggggccctgatacgcccaaactgcaggccctgctccgcttcgggaacggcgttgcccacgatcacatcatccacccgcttaggatccagctggggcactgatgccgccaatccttttaccacttacactgtcaggctatcaggcctgaaaaaacagcatcccccgcgtttgctcttggtaaccgcggtccggtagcccgatgcaatatatgcttcctgcatacccattattttgttatgcaaatatacgcatttattcaaaaggttgtttatgcaactatatgggacatgagttgagatcgtgagtagacttgagctgaccggcataaagggacaaacctacgtttttacgccaactcacgatcatgcttccttatttttttcgcgcaatgatctacccccttattcgaaacctgctttttccgtttgatgcggagg

SEQ ID NO: 73947 - DNA, 340 bp, Arabidopsis thaliana landsberg
  unsure (1)..(340): unsure at all n locations
gatatagaaagttaggttgcttaatgttactataactttatttgtcgntgtaacagcgatggtgactaggccgaggtccatcgatcccgtgaggttgtctacttttgttttgttttgttaccctttcatttttttcagatcttatatttttagttatactcttgtgggatgatgtccttgagaacgatagtgagacagtagatacgaacacaagtttctcgtagatattttttcccacaaaatagtgaaagactaatacgaactctactaattttactgatacaagcaaaagttatttagggagatttgcttaaagaatacaaacaatacacgttttttt

SEQ ID NO: 73948 - DNA, 599 bp, Arabidopsis thaliana landsberg
  unsure (1)..(599): unsure at all n locations
nnnnnnnnnnnnnnnnnnnnnnnnnnnnnnnnnntttnnnnnnnnnnnnnnnnnnnnnnnnnnnnnnnnnnnnnnnnnnnnnnnnnnnnnnnnnnnnnnnnnnnnnnnnnnnnnnnnnnnnnnnnnnnnnnnnnnnnnnnnnnnnnnnnnnnnnnnnnnnnnnnnnnnnnnnnnnnnnnnnnnnnnnnnnnnnnnnnnnnnnnnnnnnnnnnnnnnnnnnnnnnnnnnnnnnnnnnnnnnnnnnnnnnnnnnnnnnnnnnnnnnnnnnnnnnnnnnnnnnnnnnnnnnnnnnnnnnnnnnnnnnnnnnnnnnnnnnnnnnnnnnnnnnnnnnnnnnnnnnnnnnnnnnnnnnaaggggggggggttatttttttggcgtttttttttttttttaaacaacacttnaaaaaaaaaaaaaaaaaggccccctaaaaaaggggggaaaaaaaaaaaagggcgccccccccccccccatttttttttttgggggggaggggtctcccccttaaaaaaaagaaaaaaaaacaacacccccctttttttttttttttattttgtgtttttttaagaccccccctctccaaaaaaaaagaaaaaaa

SEQ ID NO: 73949 - DNA, 527 bp, Arabidopsis thaliana landsberg
  unsure (1)..(527): unsure at all n locations
taaactctctggtccaaaaactttatctgaaatcaattgagttcattattagccatcaaaaaccgcaggacttgaagagttggaaacatcagatataaaacttcaattaccaaatgtaaatgaggactgatgatgcaaacgttcttgaacttgtggtttagacacaatggtgtggtcatttacacattcccaagcaacttggtctttagctaacagttctctcttattcattggccttaaccttacagtaacaacaatcttctcttccctggatcttgagcttncacctggtgttacagctggggttctgtccatcttcgaaaccggagttcccggtgtttttatagtcatttccctacanaatattcccaattttttcatcagatctaatagatcaacttaattctaagcttaaattttcccccaaatctatcagatctatggaaaaagttcatataaggcacattgtgcagacttaatccatanaaaagtaatctttagtttttgctcataaaaggaaaattaac

SEQ ID NO: 73950 - DNA, 544 bp, Arabidopsis thaliana landsberg
ccaacaaggtacttacactttatgaagagtctattaggtttttctcgctccccaagcactctcgacatactgtgatttgtactcacaatccatccaaacatctctttctctcaacgatgccttatgattctctagcaggaatctcactcttctgctaccttcgaaagtctttctcactcctcgtagacttgttgtgaataagacaacagaaccttgcccaccagctacacatatctcttcaaaagcccacaaaagctcatcaagattctgtagacctcgtttatcctcagaaacctcaattgtcgttggcgtaagacactctttctcatctatttgatgaaagattgcgtgatcaaaatcgcttatgtggatagctatccactgctgtaagttcccaatagatgtgataagcttaagttccttcaccattctctccttcatatccatcattgcttcaaccttcaacctttgataagaagttgagaaagaggagaggcataaacctaatcaagattgacacacatcatactggataagagaaaaa

SEQ ID NO: 73951 - DNA, 562 bp, Arabidopsis thaliana landsberg
  unsure (1)..(562): unsure at all n locations
tctcgggaactctctcttcttttaagtatttttctttcttttttttagttaatgggagactgtaattgtcttgttgtttgttaactaatacatagaggtttaaatgttctaagctgtggatgtaattgaattttattatttaaaatagtatatgtatgtgacagcatgcctacatatatatgagtaatattatacgcagtataaactaattttttgttatatagtttacttttaactaacggtgttcacatgcatttgaatatatataacttacacataatgtttaatatcagagatatatagtgtttgtcttttaccgcaaacttaaaatgcatttgaaacaacaacacaacaaataatttcttccgtaatttgattccatctttttttgagaaaattaaagggttttcttcttaatttaatattgttgaaaagattgtattggtacatgttaaaaggagatctacatgctggnttatttttctttatcttctttttttgatatattcatctagattcttttagcttattaggggacaaccaattaaataataccgttttc

SEQ ID NO: 73952 - DNA, 511 bp, Arabidopsis thaliana landsberg
gccgcacgagcgccgcacacgatccagcccatatacgaccgcagcatgttcaattgccgacgatgtcgcagcatcgacaagccgtgtgcgcagcacgcgccgccgtccacgcgcgacgcccgcatgcctactcgcccagctcggagacctgcgcggccgcgggagctggcgtgacggcgcggatgtcggggctgctacagccagtgcgcggctcgcacacctgcagctgccccgtcagcccgctcacgcgctgcatgcgcaggtcgcactgccacgctacgaagctgatgtcggaggtgctgctgacgtcagaccgcatggccccgccgtcctccagaaagttaatcgcggcgccgcccttgtcgacgggaagcaccggcagcggcaggtgcgaccagacactgtagcggctgctactgccgcccgccggtagggcatcgtcgtcggagtccacatcgtcctcttccacgtcgtacagctggctgctggggtggcgcggccggctgtgacg

SEQ ID NO: 73953 - DNA, 516 bp, Arabidopsis thaliana landsberg
  unsure (1)..(516): unsure at all n locations
tgcttttttattgtgccctttgaaaaaaatatatatatatacactccagngaatacttattaataaaannnaagaataaaataaaggggattttttannnnnnnnnnnnnnnnnnnnnnnnnnnnnnnnnnnnnnnnnnnnnnnnnnnnnnnnnnnnnnnnnnnnnnnnnnnnnnnnnnnnnnnnnnnnnnnnnnnnnnnnnnnnnnnnnnnnnnnnnnnnnnnnnnnnnnnnnnnnnnnnnnnnnnnnnnnnnnnnnnnnnnnnnnnnnnnnnnnnnnnnnnnnnnnnnnnnnnnnnnnnnnnnnnnnnnnnnnnnnnnnnnnnnnnnnnnnnnnnnnnnnnnnnnnnnnnnnnnnnnnnnnnnnnnnnnnnnnnnnnnnnnnnnnnnnnnnnnnnnnnnnnnnnnnnnnnnnnnnnnnnnnnnnnnnnnnnnnnnnnnnnnnnnnnnnnnnnnnnnnnnnnnnnnnnnnnnnnnnnnnnnnnnnnnnnnnnnnnnnnnnnnnnnnnnnnnnnnn

SEQ ID NO: 73954 - DNA, 611 bp, Arabidopsis thaliana landsberg
  unsure (1)..(611): unsure at all n locations
ctctcgcattgatcgacgcaatccgatattagttatcacatttccggtcacatcgcacgcatggggtatgggcgcgaacaacggatgccgaccgcgccaactcttactaccaaaccgttcaagctaactataatcgcgagctcaatgctggttagcaaaagctgacgatgccgaaaccagcatgggccgcggaagcacaagaccgcgcattaacgacggacgtaacgccggtaacgcaaaaggcaccgacgacggcaaaaatgcaggcgacaagtttactcaagaacgcgacctcgttcgcggttataaatatggtcgcactcaggcccaagaccctgccctgaagacgtcatacgaaaaaggcttggctgatggatcggctgccgctgatcgcgaagctgttnnnnnnnnnnnnnnnnnnnnnnnnnnnnnnnnnnnnnnnnnnnnnnnnnnnnnnnnnnnnnngaacgaagaaaacatcgacatcacttcggaattgccaaccgacgaaggtgactcgacgaaaaccttgtcgctccaacgcaaacagggtcggcacgtatacagcccaagctacatcactccagacgaacccacagcacaatcaccat

SEQ ID NO: 73955 - DNA, 549 bp, Arabidopsis thaliana landsberg
  unsure (1)..(549): unsure at all n locations
attttttcctcagtttatagagatcgggagagaagtgttcctttttacaacgaattcagaaagaatctggtgatgagtccgatcagcaaatgggaagagttgacagatgatgaagaagctatcaaggttttaagagaagtgtacgaagacgatatagagaagcttgannnnnnnnnnnnnnnnnnnnnnnnnnnnnnnnnnnnnnnnnnnnnnnnnnnnnnnnnnnnnnnnnnnnncttcctccttgtcgcctccaggtttctaaactctaaatcaaattttgactacacttattaaaacagaggcttttctaaactctaacttacttggatttaaatttgattaggaggctagaagcagataggtttttcacgaccaacttcaacgagaagacgtatactaaagaagggttagagtgggtcaatactacagagactttaaaagatgtgatagaccgacacttcccgaagttaaccgatcaatggatgcgatgttcgagcgccttctctgtctggggctcgggatcctaacccaagattgggttccttt

SEQ ID NO: 73956 - DNA, 579 bp, Arabidopsis thaliana landsberg
ttctttttcttgtaatgaagaagaaaagctttaacgaagtagccttttaatggtttattaatttgtaacgagtaacgactagctttttatgtttctggtcattaaaggattgtttgatttttttgacatgtttacatatgttacttacttgattaataattaagtcacatttcagtttatacacattttttcatgttcacgccaaatgcatagacttagaaggggcttttgtgttataatgggcctatgggcctatgggccaaaaccattgaagcccattttaagaggagactcacagcaaaccctagcaaaaacactcgaagccactctgtttcttcttcctcctctgtttctttcttctcttccatcgttcgccgttaaggaaaacaaaaatcagagatggtgaagaaggagaagaaagcgaatgtttccggtaaaccaaagcattcgctcgatgcgaatcgtgctgatggcaaaaagaaaaccaccgaaaccccgtccaaatccacagttaaccggcttaagatgtacaagactagacctaagagaaaacgcccgtgtaaaatccttagcaacgag

SEQ ID NO: 73957 - DNA, 422 bp, Arabidopsis thaliana landsberg
  unsure (1)..(422): unsure at all n locations
gctgttttctttntatgaacaaaaaaaatataaatctagctctattatatatttggctagaaatagaaatatatgtatgaattgatcaataaatctttaagaaatcaataatgactaatatattagatgattcatgaactacttgtccagaatcagaaactaagtgatggtggttatttcttttcttttttcccttttttttgtgtgtggtatatgtgtttttcttttgatgttatgatattttatgtagtgtgtacataattttggacctagaattcacatgacgtctacatgatgctctaaactttctatatgtaggcttcgctccaattaaatataaattgtatactaataaacacccaaaaacagcttgngctaaaantaaaaaaatatgatatcgtttcttgacatcaaattaaaag

SEQ ID NO: 73958 - DNA, 557 bp, Arabidopsis thaliana landsberg
  unsure (1)..(557): unsure at all n locations
ggccngacgatagggattgatgtcggtcagggtcaccgagcgcgcgcccgcgaacctggccacgcccgccgccttgacgccgatcggccctgcgccggtgaccagcacgttctggcccagcatgtcggtctgctgcacggtatggaccgcattgccgaacgggtccagcaccgcgcccagttcattcgacacgcgctccggcaggggcacgatattgaaggccggaaccgcgacatagtccgcaaacgcgccgggccggttgacgccgatgcctttagtgtccgggtcgagatggaagcggcccatgcgcgccgcctcggaattgaggtcgatgacgtgaccttcggcggaaacgcgctggccgaggcgcaagggccgcgtcacctcggcgccgatctcgacgatctctcccgcaaactcatggccggtgatcatcgggacagggacgttcttctgcgaccagtcattccagatatagatatggatgtcggtgccgcaaatagcggtgtgcgtcacgcggatcagcacctcgtgcgggccgggttgcgggacgggag

SEQ ID NO: 73959 - DNA, 358 bp, Arabidopsis thaliana landsberg
tgtctccgcagttttcgctatctacacatctttttctgcaatcatgatcattgtccgtaacatcatcaacgagattgttcctcagaaaatccgagattacatcactgtgaaatttgtagacttgttctcttcttactttcagtcgaatttcttttgtgattgatcatactttccgtgcggccaaagtttacttaaaaacgcgtcttgccggactctccacaggagaaatcctcgtgggttcgagtgatctcaagaatccaacggctgagccaaatctcggaatccctcccaacacaaagatcgttgatgagtttgaagggattcatcttgagtggactctacactctcttagactaaa

SEQ ID NO: 73960 - DNA, 505 bp, Arabidopsis thaliana landsberg
attgtcgtcgccttgcagcatataggggacgaccgtactgttttgcgcggcgctggtcacgcccttggcgccagggcggctcatatagcgggcgacttcgccgccgcccatcgagaagccgacgagcgtggcgtccgcggtcgcgccggtttcctgcagcacgtcggccagatcgtcggcgaagctatcgtaagtatagccgttccagggctggtccgaacggccaaagccgcggcgatcataggcgatgacccggaagccggcacccgccagcgccaatgcctggggatcccagctatcggcggaaagcggccagccatggatcaggacgacagggcgaccattcccccaatccttgacataaagccgggtgccgtcgcgcgtctggatatggggcatggggaactccattggatgggagtatcccgaacggacggacgcggatcgcgttcctggatgccggagctaacttgccaggcgccggatgttctcgccgcgatcggat

SEQ ID NO: 73961 - DNA, 445 bp, Arabidopsis thaliana landsberg
  unsure (1)..(445): unsure at all n locations
gaaaccgagncggcggggttgtggcccaggcgcctggccgatcgatggttcgatatacggtgtggacctggggccgtgcgccggcacgctgcgcctggccgatgcgtccgacaagttgctgcgcaagctggccgggcgaattcacgcgtggtcgctgacccccagcggcacggcgggctacaagaaagccgaagtcatgcgcggcggcgtcgacacccgcgagctgaaccagaagaccatgcaggccaaggccgtgcccggcctgtatttcatcggcgaggcggtcgacgtgacgggatggctgggcgggtacaacttccagtgggcctggggcgtcgggcgcggcatgcgggcggggcgttattggccgcataagggtggccatggtggtgccgcgcgcaacgacgacatttgtatcggctctattcgctggctgagccgggct

SEQ ID NO: 73962 - DNA, 521 bp, Arabidopsis thaliana landsberg
gttcgtttgtatgatcttcttattctttggctgtctttatttttttggacgtacgtcgagaagtcatgcacgatggactgatgatccatcaaaattccccacaaaatttgtccaattccctgtaagtattttgttttagccttgtcttgtaacaacaagtgacatacaaatattggtgatggcctttgtaaataacattacttctatatgtaggtatttacagcttccattcatacaaattatgtagattgtaaccgttggtttggtgattttatcctctcaaaggttagtaagtcaatgatggttaagattaattcatttggtgtactgttaaaacactttactcttgtgttgttctatcggattttagagtgtggacaacgagatcctgttgtgggaaccacaactgaaagagaattctcctggcgaggttaggatctcattgttgctccaaacacaacataatcattcatttcatcacatatatttacagttgaactttttgtggtttgcagggagct

SEQ ID NO: 73963 - DNA, 354 bp, Arabidopsis thaliana landsberg
  unsure (1)..(354): unsure at all n locations
gagaaccctatgttgaaacactgtgtttgttcttctgtagtgtcttactaatcggaagtgggcaatccaagttctcggtaccattgatgacttgtattnnnnnnnnnnnnnnnnnnnnnnnnnnnnnnnnnnnnnnnnnnnnnnnnnnnnnnnnnnnnnnnnnnnnnnnnnnnnnnnnnnnnnnnnnnnnnnnnnnnnnnnnnnnnnnnnnnnnnnnnnnnnnnnnnnnnnnnnnnnnnnnnnnnnnnnnnnnnnnnnnnnnnnnnnnnnnnnnnttattttaaacagttacatttacttctgaccaagaggagacccaccgttacttttttgcgtgttgtatatattctaaca

SEQ ID NO: 73964 - DNA, 558 bp, Arabidopsis thaliana landsberg
  unsure (1)..(558): unsure at all n locations
aatttacctttaaaggagacttcaattagttacaagtgtgaccccaatatggttccatatcttatcctagatagttctttgcatatatcttaaacaatgttggttcaatgcttagttctaaacgattaaacacagtagtttggatcaatctcatctttcacttcaaacaataagagaaactaagttagctagcagaatctgagaaccaaatgaataattcaaaaaatcacattaacaccataaggaagattacaaaaaagtgtttaccattgagtcggcgttcgcatttaacaagcttatgatcaataatctcttcaccgtatgtgatatnnnnnnnnnnnnnnnnnnnnnnnnnnnnnnnnnnnnnnnnnccctaaacaacagaacaccttccggaataagcaaagccgaaagcgagaacaaagaaactaggaactagtttcacgatttcgacttaccacacgaaccatgggagcaagaacaagcttgttctgataatccatcttcgtcttctttttcttcgtggcaccgtcaaacgtagccacgaaaaattcaaag

SEQ ID NO: 73965 - DNA, 302 bp, Arabidopsis thaliana landsberg
  unsure (1)..(302): unsure at all n locations
tatactttggcatcactgaaccgaacggttcttcagttctttcccaacttgccgagaatcnnnnnnnnnnnnnnnnnnnnnnnnnnnnnnnnnnntttgaacggaacgatggatctgagagtaaataccgaagtgaagctcgtcttcttcttcttcttctttgtcggtagtttttatatctctaatgattatagaatacgtgttctctgaatatgtactttgtgatctctcttgtactttcatatttatctttctttctatatttctccatctctccattatatctttacttttttcttctc

SEQ ID NO: 73966 - DNA, 619 bp, Arabidopsis thaliana landsberg
gttgatattaaatatatgaaatatttttcctaaaatataagtttatgtttttaatgttagggtaacctaaaaaacttgatgagttcaagaaatctcggatgtgacgtacgtgtccatttatctacaacataagctttttgaaagagaacatgcaaaacagaagactcaaaactaaactagctccataaaagattaggatatgttaaaatttcaaaacaaattcctacttcatctttcaactgacacaatctgccttcacatggttacaatttagttagttgcgcggcttcatcgttgctgaagtcactgaactccaacatgatgcttgtcgaatggtatctatccaactgatgtcagaatttgcaaatattctctactcttgctactaacttatatgaaaatagtacaaacgttgtcttattggaggttattaatattcgaatattctgacatataggaatttcggctcgttggcttaggcatttcctcgcaatcctctatattttgtgtaagcaaaaggattgggtttgcatgtcttatgtcagcagtaaaggttttctataattgacacttcatgtttatatggtatgtatatagggtacatatgaaactaacaatt

SEQ ID NO: 73967 - DNA, 541 bp, Arabidopsis thaliana landsberg
gaccgccggctcgatgaagaacatttcaaaggcgaaactggaaggccttttgtagccggcggtcgatgccccgcgacaacgtggggtttgcgcggagaattgcagccattcccagggttgaccaggatcactttgacaccctcttcgcctccctccaatcccgcgccttccgaggggaactctgatggccttcgcggtaatcgatttcgagacaacagggttcgtgccggagcgcgctgaccgcgtcgtcgaggtcgggattgtgctcaccgacgaccagggcgcgatcgaagacgagtggacaaccctaatcaacccgcgtcgcgacgtaggcgcctcgcacatccacgggatcactgccggggatctgctggacgcacccgaattcgccgacatcagtggccacgtcctcgacatgctcagcggtcgcacggtcgttgcgcacaatgccaccttcgacatgcgctttctactgtgcgaactgcaacgggccaactacgccatcgtcgaccgcccggccgcgctgtgctcgatgaaatgg

SEQ ID NO: 73968 - DNA, 605 bp, Arabidopsis thaliana landsberg
cgaggcaagaatattggtggaattgtaacagatgctttaaaaggttcagaaggttcccagtcatctgaagaaactttctttttagtgctagtagtgttggcttctgcgcctttatcagaagaaacagctaccccttgcagcgttggaagtgatccggatccagataaactattcccattttcaaaatgccccaccgtagaagcacgatcattcataggaacagaactggataatgatcctgtccaggctggtccagcagatcccatgtctgtttttaaataggaactgatagaaggtctatgctcatgaacaaagctgcttctcaatgcgaaggaattggcgttattaataactagagacctgttgtcagtgaaatcagcaccatacgtttgcttcaaactctctcttctaatgttttcaaatgaaggcataaagcgcatctcgttattgaacgggaaaactctctgagaacctgggggattcacaaaagacatggaggagaaaactctctgaggattcatgaaagatatatcctctctggtaggcaacgatgtcacaccgttttcgcttaacgggaaactcttacaccttctttgctgtccaaa

SEQ ID NO: 73969 - DNA, 639 bp, Arabidopsis thaliana landsberg
acccccggcttttctgaattgtattcaagaagaatttaagttgtgtgtatatgaagtttgtgcaaggtttacccaaaaaaaaaagtttgtgtaagatcaaggtttaatgatatgttgagtaggtgagcaagattggataaagaagtaccaataaaggatttatacatcaatctgcttccatctcaagaaaaaagtccaatcagcttagtcagagtccgaataaggatccgggctaggcaagtgaatctcaatggaggtggattcacaaatcttcgtagcttgaactgatgatccctaaggtgatacaatacacatcatttaaaggaaagagatgtgattataggtataataagcaaaagacagtactggtaatggagtagcatgcaagaatagaatttacctcttctttaaactcttgattcaccggattagctatagacacaattttttctccatgagatatatcatcagaatcatgaagctctcttccactatcatccaaactatacaaaacaaaagaaacaagattaaacattctttttagatgatttggattaccgaacccttaatattattaaatcacccacctggtggccaaagcacccgtatcagagcttttcgttatggttatctcatctt

SEQ ID NO: 73970 - DNA, 543 bp, Arabidopsis thaliana landsberg
  unsure (1)..(543): unsure at all n locations
cagacctgaagtcgaggtcggccgacatgcgctccactcgctcggtgatccgctcgcgacgccggtccgacatctcggccaacccctcgaaccgtggatggtcctgccactgatcgagtttcgggcgcacctccgcggcattgcgctggtcctgtttgagtatggcgaacagcggtaccacgaacagcagccgcaagaaggtgacggcgaacgcagcgattacgccnnnnnnnnnnnnnnnnnnnnnnnnnnnnnnnnnnnnnnnnnnnnnnnnnnnnnnnggttccagatcgatccccataagcaggaagatcgcgctctacatcaggaacgcgatggtgcgccaattcatcgactcgacccatcggtcgcgcgcagcgatccggcgcgggccctcctggccgaccaccagaccggtgacgacgacggcgaggacgccggacgcctacaactacttggcgggcaggaaggagatgaacggaacggcgaacgacatcgcggtgctcagcaccggatcgcgcagtagcgcacggacgcggacca

SEQ ID NO: 73971 - DNA, 379 bp, Arabidopsis thaliana landsberg
agttcgagacacgagaaagagaagaggaccaagtgcttttgtttcttacggacgggaaaggatctcagcggaagggaggactaccgactgaggggatcgaaaggaggcctatgcccctgaagacggtatcaagatggggataccattaacagatagagcggacgctattatttatgtgcaggtgctatttaacctattatacagtgtgaggaacctgcatgataacatataattagctatgaagaaaataaagcccacaaatatagggcactttttcaatagggtatgaaaagaacactatgcgtgggggaggcacaacacaaacacccctagaacttgctacataatgacgcgccaaagaacaaagtggaggaacctt

SEQ ID NO: 73972 - DNA, 439 bp, Arabidopsis thaliana landsberg
gtatgccatatcgccgtgggcgagaacgtgatggggctcgcgtcgggtgtgtttttttccggtggttgtaaccgacggtcggctggtggtgtcgatgcccgacgacatcacgttcgcgaccgcagcaggcgtgtgcgtcgcttacctgaccgcgtactacgggttgggcgacgtgggggccatccgccccggggaccgggtcttgatccatgcggccaccggcggcgtcggcttggccgcactccggctcgctcggcatctcggcgcggaggtctatgccaccgcgagccccggcaagtggcatatcttgcgcgcgaccggtctggatgacgagcacatcggctcctcccgggatctcgccttcgaagatcatttccgcgcacgctgcgccgcgagcggattcgacctggtactgaactcgctcgctcgcgagttcacc

SEQ ID NO: 73973 - DNA, 666 bp, Arabidopsis thaliana landsberg
ctcgctgtggtgggtgttgaacaccggatgggtgaggaacggcgatgtgcgctgcagttccggcgggatcagcgacggtgcgctggcgtccagtgcatcgatgctcggcaatttcgcatcgtcgccgccaaagatgcgccacagcagttcgatgtcggcgcgcgtggtggtttcgtccagcgagatgcacaggtattcgtcccacgccttgcgcaggttggcgcccatcgccacggcgcgcgccgcgatggcatcggtgcgatcgccggtcttcaggctcagcgtgtcgaacgcgctgtcgtggtgggtcgcggtgaagccgagctgctgcagacccgccttgaggatcgcggtgaggcgcgccacgcgcgaggcaatgcgtatcaagccttccgggccgtggtagacggcgtacatcgaagccatcacggcgagcagcacctgcgcggtgcagatgttgctggtggccttctcgcggcggatgtgctgttcgcgcgtctgcagggtgaggcggtaggccttgttgccctcgctatcgatggagacgccgatcaggcggcccggcatcgagcgcttgtacgcatcgcggcaggccatgaaggcggcgtgcgggccgccgaagccgaacggcacgccaaagcgctgggtgttgcccatcacgatgtt

SEQ ID NO: 73974 - DNA, 145 bp, Arabidopsis thaliana landsberg
  unsure (1)..(145): unsure at all n locations
ccagnnnnnnnnnnnnnnnnnnnnnnnnnnnnnncacctgcgaattcgtttaacataagtgccgtcccatacaaactactcacctgacaatgtgctccggccggttcgacccgtcgaagcgagcctcgggccctaaaagagggga

SEQ ID NO: 73975 - DNA, 235 bp, Arabidopsis thaliana landsberg
ggagaatacgttgagagagcgatggatggtgcgtcgtttggagttataatactaacgagaaaggcgttaagaattcttttacgattgaggagctacggtttttcgcaaacaagaagaatcttgttccggttctctttgatctttctcctggagagtgtcttgcgagagatttatctgagaagagaggagatttgtgggactaaacattgaggggaattgtgggttttgtatggtg

SEQ ID NO: 73976 - DNA, 192 bp, Arabidopsis thaliana landsberg
ttaacgcaagcaaccatcgtctccgttccagcgtaacagggctctgtatgcgcttttcttaatgacctgacaacacacgtatggcttcatcagctctaacctataagggcatatgactatgaccaactattctttccaggtgcagggaggcttcatcaagcctctcagtctattgacccatccgacaccctc

SEQ ID NO: 73977 - DNA, 549 bp, Arabidopsis thaliana landsberg
gctcatctgagtcaacgtgggtggctatggggcctatatcttctcgcctgggaaggccggcttccctgtgacgcgacggaggtcgtctacgaatgctctaaggagagcgcagaggagtttatacatcagcaagacgatcaaatccgctttgagaagctcacagccaggctccgtgccgaagtagattgccaagtttgttactcccttatactggaccccctgacgactccctgcggccataccttttgtcaaaagtgcgtggcgcgggttctagatcacaccgatctgtgtcctgtctgccgacgaaaggtaggcatgccggctgctgtccaggcggaacccttgaatcgcaccattactcaaatcatcgatcacttcttcgcagatcaggttgcggctcggcgcgaagctgatgcagaggatgaggcgggaggggatcatgagaaagatctacccctctgtgtatgcactctgtcatttacaaccatgccgactttcctgcacattgtcgagcctcgatatacgctgatgattcgccgtgtcgtggag

SEQ ID NO: 73978 - DNA, 663 bp, Arabidopsis thaliana landsberg
cgccactaagcaaaaatgcgatttcgattgaatctttcaacaaacaggacgaatatattacttacctgctcctgggttaattcctccggagcatcggaatcggaatcatggtctttattatccgacatcgaatctgatttatcttcttcgccggtctagggttttcttctccgtccgttctagggtttaacggctcttcaaaattcccaaaaatcaccaccacgacgattataccgctatagaatcctctcttctaatcagagacttggtttgttccattttatgatgggctctcgttggcctttttacctcagcccattaactaaactaccatttttttttttttttttttttgtcttaactaaactaccattagatatatatttatacactttttttttttatgtcgaggaagtattttcaatttattttgtacatacaaaagcaaattattatatcaagccgaccaaaataaatatggtacgagacaagaatgccgagtacaaaaatagtaagagacaagaaaaaacaaatcagacaaaaaaaaaatggtgtagacatatacatatatagcattacaaataaaaatcaattgaatgaattttacatcactttatagtaaaagaacacaaccatataatctatatatactctcagccaacc

SEQ ID NO: 73979 - DNA, 656 bp, Arabidopsis thaliana landsberg
cttcctaatgctttctgtctaatgtccacacaccgacaaagaaagtcaaaaagataattgatgatctcttctgtattaactttaaatagcacagagaaaggcacacgaaaatcgttaaagaatggaacaacttaaataagtttatttggacagctatattatcaacttaaacgagacgactctatatatagattgatgatagtcttagcgtacaagatttattttatttattttattgcaaatttactttggcacttaaaatcttgaatcaaaatcaaatcaatggtaattgactaattgtgaaattctctgttatttttaacccttaaaatcaaaatcaaatcactcggagttaggactaaagagagttatagagtctgtatcataccaatcatcactttttgtaaaatatatattcttaaactttgagacattgtttatgccagatcaaacttgttatatatcatataacttacgatataaatccacattttagttttttttttgggaatttttatctatgatatttcttcactatttttttctctaagaaatgtattgaacatggaaattttgacctacttttcaaaataatattttcaaaatttgaaatctatatgtctctaattttattgcatcgatggtcctcactatta

SEQ ID NO: 73980 - DNA, 498 bp, Arabidopsis thaliana landsberg
gaaccgctctccatggttggagacgaaccaactaccggttccgatttacctgccgatcggcgcggagatccggcgtggcgttcgatccggatgccttcgtgctgctggcggaggatccgccggtgtcgcggtgtaagaccctctctgccctgccgggcatctcccccacaaggggggagaaagactagtagcctgcttttccttcaaattttccgctgagagtgccgcaacgtaagtccctcccccttgtggggagggattagggaggggtcttttcggccctcaataccccgacttgatcttctccaactcggcgaacatcttctgccgacgctccgtccgaactgtcgactggaagagcgtgttgacgacaaaggcgtttacgtaggcataacccttgtccttgaggatcttcgtgtctaccgccggcatgcccttgtctttggaatggccaaagcctcagatctctaccatctacgcaaggatcgctggatcagt

SEQ ID NO: 73981 - DNA, 542 bp, Arabidopsis thaliana landsberg
aataaagactctatcagtttatcacaactcttttattattttaaacttaacttattctttgggcgacaatgaaatctaatctttaccttgagatcaacgtgatcttaattcttgtatctgaatacgcaaagttgaaattaaatatcaaacaaatgaatccattattaaaacaataataataaagtggaaggtgaaccaaattccacagtaccaaccgcatacggacctaaataatatatagctttttcttttttggcagcaacctaaaatactaatatattatcctactcttttttaatatcagtatatttacttaaagaaaatgaaaacttaatcagttcattgtgatttcgctctatattatattcgtgacacaattcttgcttatatattatagcacatcgctatttcctccacgtcatttacaatcccattagtagtactgctaatatgtgataacatattattcttattaaacataaaccaacaacagagagaataattcacctggggaactattattctcccatgacgttaaaaaa

SEQ ID NO: 73982 - DNA, 386 bp, Arabidopsis thaliana landsberg
ggtagattttaagaccaaaaatgatttagttttgaccaaacattgggtatattttattgttaaaacgtagatttaattaattgagtggaataaaagaactaaacggttttgtaatttgtacaatgatgagcaattgagcactataataaggattaaggagggcttgcttaagttaatcacaaattcacaataagaagaaagggcattttagtaaataaaacatccgtatacgtttggtcaagctctctttaatcattattggttcactctatctatatatataacctagtcttgcccacaaaaacaacacacaacatctactaagaacctaataaaagaaaaaactctataagtaatctttattttgctaaagaaaacatagaaat

SEQ ID NO: 73983 - DNA, 575 bp, Arabidopsis thaliana landsberg
  unsure (1)..(575): unsure at all n locations
actgttacttgcaagttttatttagtccaagtcagatcttattatctgcatttattttaaaagttggttggttgggttagttgtaatatttaattaaaaataagatttaaataatgttattctacagaaaagcaagtggggacagtccgaatgtcttctctctctaaagccctaatgaccctactctctccctcttaaacagtagggctaatctctctctatactcttttcttttatagcttatataatttaaaaaaaagttttgtctatttttttcagtaccttgttcttttgttatcccagcgggaatctgattctctcgcatatagaagactcaataccatggaaatgagctgtttattaagcaaacgacgaaacacaaagtgaatatttatcaaattatacatatatacatataatnnnnnnnnnnnnnnnnnncgtcatatatttgcattgctacattctatgaaaacgtagtaccgcaggtttgtattcctatcgttcacaactaatttttctcgctgaaagttataccatttcgacgcttctattgaactataatgttattcttaaac

SEQ ID NO: 73984 - DNA, 382 bp, Arabidopsis thaliana landsberg
ggcactcccgcggcataaccctagagcggtgatcctattaccggaatagcggcaggtgcacctggcacaagtatgaccgcccaatagccaatttgatccaacggcaaagaataaccgggtacaccaaaagacgcggtcaatgcacccagaaccacaccagaaacggaagttaattcgcgagggtaccgtaaataccaccggggaggcatacaccgaaaacgcgcaggatcatcattaggaccatcagactttgtcacggaacaccaatttcgggaaaacggctaaaaaaaaccccgatagggttaacgaaccaaagtcagctccaggcattacatattgaacagaaccaaaagcttcggtaacggttggacggaaacaaaaa

SEQ ID NO: 73985 - DNA, 1131 bp, Arabidopsis thaliana landsberg
ctaaaacagagctcaagtccatgaacctgaaaaaatacacaatattttttcatataagacgactgcagaacaacacagtgcaagcaataactaaaacatatgtagagaaagctctgaacatacttgtcatttagcttttcccttcttagtttctcgcgacaggctttggttcctggcttgctacatgatccagttcgtctcctgttcatacataatcacatcaaacaacgaaatggatgctatagttgtcttgtagataaccaaacaacaagataaccatggccaatccaagctacataactaaaagactcaattcaagacccaaaactagtggagaccaagagaaatcattagctgcaaatatcttaattcaatctaaacacaccacagaaaacacaacatctttcaaatcatcagaacaaagaaaagtaaagagcaaggtatccaaattcttaaaagactacctcttccccgaacattcttcctcaaactcttccttaacagctccaacagatgacgaagaattgatttccactacaccactaaacacctgtccttgttgctgctgcaaatgaggcactgcagaatcgtcgttttgtcctctaaagccacagacttgatgtgtctcttgctgcaaaactccactaaacgatgcagccaaatccaattgtgctgatccaatgctactactataaacaactccattgtttcctcctctaaagctactacaaacttgctcaagatttccattaaaagaatcaaattgttcttgttgtggctgcatcagattcacaccacaagacccaaaatcctgaaatatgttatcttcatttgtttgcatatatccataaggatcttctactccattgctacagaatcaaggtaacaacaatctccatcaacaacaataacgaccgctagaaaaacttttcatattcaaaatcgaaacttttgctaaaattggattgaaatttggaattgttaagaaacccaaataacaaaaggcacaatacaacacaattcaacaataaaaatcaaacctttgatcaaaacaaagagcagcgagaagatcatcatcgtcttcgattgatggatacatcagaagaagaacagagaatgcagaacgagaga

SEQ ID NO: 73986 - DNA, 564 bp, Arabidopsis thaliana landsberg
tgatatgtgactcatctgtacacgtgcaaagctctatgtttagatgttatgattccttggatcaaatatccaaaattgcttgacccaaataaaaagattaattaattatccaaaaaaaaagcggccactaatcatatggagaggtcactaggtcagacaatttcgtttatccaaactagtaaaataagtataattagctacatcaatcgtaagatttttgttcactacttgaatgttgcatcaactgatttaaaggtcaaagttttctatttaatttaaatagatcataggttgacattagcgtgtgtcggttatataaaatttcaagaatttgacatttgtagttaacaatagctgtatgataatattagaaagaacaaatcgcattgatttggtcattatttaatgttgatacgcgggattgatgacttactctccttaaaactagtgaaacaaatatccgtacactaactaccatgtggttgaataatacaaccgaggatccaacttactttggatgcattgactttgtactccatcaatttgtttttcacatcatgagaa

SEQ ID NO: 73987 - DNA, 595 bp, Arabidopsis thaliana landsberg
  unsure (1)..(595): unsure at all n locations
tcagccgttcacagcttcacatcagttcaaattctaaatttgagtagtagtaaactttgaaaagggcaaaatgtctcataaatgatacaaaactaaatgatcattttcccgccaaatggactaatatccgaaaaacagggatatattttcttcagagcgagatatttaagtcacatcacgaccacgattcacatatcacaacttctctcttttccggtaaaaacttccgccaacggagaccgatgtgtgttctggttgcctaaattgaccgaatcggttcgttaattgcgtacctatatgttttgttnnnnnnnnnnnnnnnnnnnnnnnnnnnnnnnnnnnnnnnnnnttattgctcaatctagggtttatgtgttctcgtgaggttggttacataaatacaaaagacgcttaatttaggcttcttatttctttcttctagcttgaggtgcttttcactttctacactttgtctttagggcacttgcaaattttagctctttttcaattttgatctgtgcgcttttagatatacgttttgtccctatgtgtattatcttaccaatggtaaagtatcttgatgtccatttatata

SEQ ID NO: 73988 - DNA, 321 bp, Arabidopsis thaliana landsberg
ctactggttctactggatacaacgtttatgtgggcacagtaactggtactgagacactgcaaaacagcacctctattgcgattggaacgaattggacagagcccacaactggccttgtggtcgcccaaaacccaaatacgataaacacgatgggatcgttgctgacaatcagcacgctgaccaatggtttcttgtacacgggattgaatgtaaaccgtggcgacaccggcgctgttgtcggttcgattgctggtggaagcggatcgacttggtatttgagtgcgttggccaaccgtgcttcaatggtcatgacggcagacg

SEQ ID NO: 73989 - DNA, 552 bp, Arabidopsis thaliana landsberg
agtcgaccggtcttcggtataaacgtcggcaggggcgaggtaacgccgtacaggccgaagaagttggcggtgatccggtacttgccggcctcgtcgagctggatctcttcgatgtcgcgatccgggaacgacagcgtggcggcagggcgcacgcgcacgttctgcgagaattcctgcgcgtcggcgctgcgcaagcgcaagagccgcaacgcctggaaaaaagcgtagcgatgcccttgcgccagcagcgggtcggccccggcggacgtcacagcaggcgatagcgaccgatcttcgctggccattccagagtctctccgttgacgatgtccaccagcgtcagggcgctgaaggtgttgatggcggtcgtgccggccaggaattcgtccagcaccgtgccgaacaggaacaggctgtcgcggccgggaaagtggtcgccccggcattcaatgcgcacctcgttgccctgcaccggcatgccgtgcacaatgcggcgcaccggctcgacagtgacctggccgatcgactcgatgctgcggcgcgccgcggatt

SEQ ID NO: 73990 - DNA, 597 bp, Arabidopsis thaliana landsberg
  unsure (1)..(597): unsure at all n locations
aggactgaaagcccctaaaaagnnnnnnnnnnnnnnnnnnnnnnnnnnnnnnnnnnnnnnnnnnnnnnnnnnnnnnnnnnnnnnnnnnnnnnnnnnnnnnnnnnnnnnnnnnnnnnnnnnnnnnnnnnnnnnnnnnnnnnnnnnnnnnnnnnnnnnnnnnnnnnnnnnnnnnnnnnnnnnnnnnnnnnnnnnnnnnnnnnnnnnnnnnnnnnnnnnnnnnnnnnnnnnnnnnnnnnnnnnnnnnnnnnnnnnnnnnnnnnnnnnnnnnnnnnnnnnnnnnnnnnnnnnnnnnnnnnnnnnnnnnnnnnnnnnnnnnnnnnnnnnnnnnnnnnnnnnnnnnnnnnnnnnnnnnnnnnnnnnnnnnnnnnnnnnnnnnnnnnnnnnnnnnnnnnnnnnnnnnnnnnnnnnnnnnnnnnnnnnncagggtgtgggttttgctaccacagccaaagccgtacaagctgactcgcattaaggggtnnnnnnnnnnnnnnnnnnnnnnnnnnnnnnnnnnnnnnnnnnnnnnnnnnnnnnnnnnnnnnnnnnnnnnnnnnnnnnnnnnnnnnngatgagatcttcaagatcatcgacatcgag

SEQ ID NO: 73991 - DNA, 355 bp, Arabidopsis thaliana landsberg
gacgaactggaatggggcgataccggaagccgcgcttcgcttcgcgcgatgcggccgctcagcctgccgtaccggtacgcttacgccgcacagcgtgccggcgtcacgctcgaggactgcctttccgcctggctgttcgcctggaccgaaaaccaggtggccgctgccctgaaagcggtaccgctgggtcaggttgcgggacagcgcatcctgttcgggctgcacggcgcgatccaggccggggcccgccgtgcggccgccacgccggaggaggaagcatccaccttctcgcccatgctgggcatcctgtccgcacgccacgaaacgcagtattcgcgcctgttccgatcctgac

SEQ ID NO: 73992 - DNA, 576 bp, Arabidopsis thaliana landsberg
  unsure (1)..(576): unsure at all n locations
acccggacgtcggcaagcggtctgcccgcgcccgcaccggccagggttcggtttatgcgcatgacccccatgcggttttcgaggaggatgccgaggccgccaccgtgcgccgcccggaacggcannnnnnnnnnnnnnnnnnnatggcgttcgacacgatgcaactgccgcacaacgccaccttgatcgagatcaaggcgcggtataaggaacttgtgaagcgttttcaccccgacgcgaatggcggcgcccgggacgcggaagagcgcctgaaacaggttatcaaggcctatggcgtgctgcgcgcgtcgggtctgctttcctgaccggcgcttcaggcgccctcccccattcaggacatgacatgagcgaccagacagagactctcgatcccgcgcgcctgcccgacacccaggtggatgccgccgacctgttcggcatcaagaccaagatgaaagtgcctgccttcaagaagggcggcgcccatgtgccggaaatcgatcccgcttatcgcttcgaccgcgacaccacgctggcgatcctggccggattcgccttcaaccgccgcgtcatggt

SEQ ID NO: 73993 - DNA, 489 bp, Arabidopsis thaliana landsberg
cctatgtccgcgaaggcgccattacccatcaggattcgctgggtaatacgggccgcacggaagctggcgatgtgcaagtcatgtcagccggcaccggtatccgtcactcggagtataatctagaaagcgacaccaccaagatcttccagatctgggtcgagcccagtgttcgcggcgaaccgccggcctggggcgccaggcccttcccgaaaggcgaccgtgccggcaagttcgtcaccctcgcctccggcttcaagggtgatgaagacagcctgctgatccgcaccccggctcgtctgctgggcgccactctgctgaaggaccagttggaaagctacacgccggtcgccgcacctgagggccagacacgtcacctctatctggtggtggcgcgcggcagggggagcgtaatggcgtcgaactcaatgaacgcgacggcgcggccatcaaggacgaaacttcgctcgaaatccgggcgctggaagatgc

SEQ ID NO: 73994 - DNA, 178 bp, Arabidopsis thaliana landsberg
tctccttctttccttctggtataggaaaagtctcgcctttttttatatttatccaatcgctcctgttcattgattccccagtaggattgtagtttttggttattgcgaaaattgagtaaaggaggagctcggttgccactccgcccttgcctcccgtgatgactactagcacccccca

SEQ ID NO: 73995 - DNA, 190 bp, Arabidopsis thaliana landsberg
gccggatgaatatctatcttccaatgatttggataattgtcgcttgaacgtccaatcatatactccccgacggtagggcgaaatgtcaaatttctgatccctccaccatgctttcttagtactccacttaatcaagttacatattcgtcttgattcagtctcaactgcgtttaaacttcatcaaaaacaa

SEQ ID NO: 73996 - DNA, 565 bp, Arabidopsis thaliana landsberg
  unsure (1)..(565): unsure at all n locations
tcgattgtcttggattgagctaattagtgtctcacactttttattaagagcaagacaacagattgagaaaccaattgtgaagtggagtcttgtttgtttacttttcaaatgacatgcttttgtttacgatacaaacaggaattagagcaagaaagtcgactaaatttggggatcagtatgtgcatttcaacgtcagcatccctgcgtaagtcctacgaagtcctgagtaaattgtgtctgacaatgatatataatagtcaagctccacagcacaatcttttcttattcttgttcatgttctttggcagaaatataacgcagagacagcgtgaactgcttgaggaatttagtaaagcaaacaaggtgaatacgagcagcgcacagcaactgtgatctttccagtgaaaaatgcaaatgctgctataagcctaaaaagctattgttgtggctgtatcaatggatatataatcaatcagacaatgattgagattatattgcgtangattagtggagagtattggctgggttttacttttaactatttctacaatgctacaagataaaa

SEQ ID NO: 73997 - DNA, 587 bp, Arabidopsis thaliana landsberg
  unsure (1)..(587): unsure at all n locations
atgtacacatcaaatataatatagttcagtatgaacattttgtgccaaatttttgttttaacatttgcacaataaaaaattaaggataaaaaaaaagcttaaaaattatttcttaacgcttgcgtataagatttttttctttccatattatatatatatatatatatatatagatttgatatatttatcaaattatctttaattagatgtaaaaaaaataacacaaaattaattagtttttttatattttgtgcttttagccaaaacatcatctcgataatgaaacaaaaagagtattacgtaattaaaaaaaaaaaaaaaactaaataaagtatatagggcttctaatttacttgaagtggtgaaactcttattcgtacgtatataatgtgatgaattgatatggatgcttaaacagtgtaaaagattattcagagaggaccttaaactatcaaagtgggcacgcacgggatacataccaaactatgacgaatacatggaggttggaatagtgactgcgggaatagatatgacggttgcgttcgccttcattggtatggnggagggcagaaaagaagcttttgact

SEQ ID NO: 73998 - DNA, 146 bp, Arabidopsis thaliana landsberg
tccaaaacaaattaattttaaactctcttctgagatgtagggagggtttacttaaaaatggggcttgacaaacattgtacagcttatatagctctttccctattgtggaactcctacatgaaaagtacatagtagagacacctcca

SEQ ID NO: 73999 - DNA, 596 bp, Arabidopsis thaliana landsberg
  unsure (1)..(596): unsure at all n locations
aacaatacatcgctgacagaatgtagaagaggattaatcattactcaaatttgttttaaaagaaacatactttctcctctttgttttgttttttttaccgacaagcttgtctatctttctttgttatacaattctcaaaagatgaaatttcaaaaccaatagaagaagtgaaaacacnnnnnnnnnnnnnnnnnnncttttatcttctcctctaaagaggcaaatatagtaaataaataaaaattccatcgatttcaaaaccttacattttcataccaaaaaattcgaatttcgaaaatttataaactctccggacaaaaaaattctctctttagaattttgcttatagtataggtggaccaaagatctctctttttcttttgggtctagattttatttttctaggtaaatatttttttttaggttttcaaattggacccatatggctaatgttcacattaagaaaaaaagagaggagaagattaaaatcttacttcatggccattactgctagtgtctcttctgtaatgtctgagtttcttgccgaagctagaaacagagtttgctctgagaatgnnctcttctttttgtcttct

SEQ ID NO: 74000 - DNA, 466 bp, Arabidopsis thaliana landsberg
  unsure (1)..(466): unsure at all n locations
caggcctcactggaaannnnnnnnnnnnnnnnnnngcctcggcaggtaactgttagccagaaggaagagcaggagaactcgatctagagcacgaccaaccaaatcaacaagctgacggattatctatcggacaagtattattggcctgatacactcgaggcgatccggggttccttgattcgggctgaaacgaagcagacgcaacccggcaggcctgtgggggtttggatcgagaaatatgggacggaatacgcttcaacctttacgccggaccaacaggaggaccagaacaacagcgggatgagcagtgggannnnnnnnnnnnnnnnnnnnnnnnnnnnnnnnnnnnnnnnctctccgaagttgatcaagggcggcaacagcccggtattgccaaccgagcctactgaaaccacggagaagaagagcagcagcacttcaactaacacagcgacggtggaggtgc

SEQ ID NO: 74001 - DNA, 462 bp, Arabidopsis thaliana landsberg
aacttgggtaacatctcggtcaatgttgtcaggtgttgtcaattgcggttaagagtacacagtgtttggacaggttgttgccagatatggtcattgatagtagggtattgcgaattatagggaggacaaaaaatatcaaatggcaattttttctcctcacacgtaactacagataacattaccccgactacatctgacaacacctgactacatctgacaatacttgacaacacctgacaaatatttaaccgtaacgttagctcagtgcccccagcgcccccacaaaggccttcatttcatccatcgtaccgatacttacgcggcaccatggtttgctcatgacgtacaaggaacggacggcgatgcctttggcggccatcttgctgagcagttccttgcctgggatcgatatcgggaagagcaccgagttggtgtacgacgggatgcatttgccacccatct

SEQ ID NO: 74002 - DNA, 411 bp, Arabidopsis thaliana landsberg
aagtgacacatccactgcagagtcaggatctgcgtcgaagatatcggttctccaaaggctataaaggatttctctcatctccgcttgacacctgttcgtgaggaggtaacttttttctctttctttctatcttctagttggggaagtagtagatgtttatcctgaggctctgcaggctaagatagctggtgcaacaagcttggctggtagctgtccgggttatgacgagtatgtacctatggtggacatatgccgtgactccacctggcaggtgaacccttcatccagagagtcgcctcaagagggtagttagtttgcctgtatacactttacgtaccatgaggctccgggttagaaccaaatactgaaggaaaagaatttaacctaatccttgtttacataggatttatt

SEQ ID NO: 74003 - DNA, 114 bp, Arabidopsis thaliana landsberg
gaagcacaacaaccccttcccctccccgacaagccgaacagaaaaggggagggggaaaaaaaaaagacccaaaaggccaacacacgggaaaaacggggaaaaaagcagcccagg

SEQ ID NO: 74004 - DNA, 433 bp, Arabidopsis thaliana landsberg
taaatacccgaccaaaatctttttttcatacctgaccgaatttgtttccgcgggatttatttatatagaagaaccataaccaaatgatcactaaaactgcaagctacattcattggaaacctaatcatccctgtctgtcatcacatcttctctttcttgactcacaagcggcgatctcgctaccttgatgccatcaacgtctctaggactattaatcttcgctctttccgactgcaaattccagtaagaaactccctttttacaagtcgttatcgttgaccaggcgaggaacacatcgtagagaaacaacacatgccaatctgtgaacatgcggttacagatcacaccaatacttactccgagaagtagacatggttgaatagtaagagctaaatataagacgctcctggttttgtctcttgattaaggtttc

SEQ ID NO: 74005 - DNA, 509 bp, Arabidopsis thaliana landsberg
acgcgaatggcactgttttttccgccaagaaaatttttttcatcaacagcgcgtacgtgaaaatcggggggtaaaacccgatggcgcttttttgaccacaccgggaactgaaaaagaatacgttaccgaaggctattaaaaactgggcgccggaaacgtttccgcctagccacgaatttatctgcgtgtgagcgacgaccacaaatacctagagatggacattcaagtcgtcaccaattccgccgccggtttgtttgtgtctgacgtgctctagacgcgcaccttccgtaagatcacttacgcgcaagaaaaagcactgatcatagatgctctggcttgattagagcccaacggctcaaactgatttattcccggcatccaataaaaactgggtaatttcattttgataaaacagccacgacttcacgatggcgaagaaatgactgcttttaagctgataaaccgtttttggcttacacagatctttgagggccaactgatccgcggca

SEQ ID NO: 74006 - DNA, 398 bp, Arabidopsis thaliana landsberg
agtacccaattcctaaattttttgcaatccgtccagactaaaaaaaacgagtagaggtctcgaaacggaaaagattgaagctttatcagaaaaaatgagaagaacttacaagcaaaagaaccaactctgaaactgatttagggttttaagagggtgagactctgtagtgagagaaccggattttcgactttgctcagagaagagaatgtagtgtaaaactgatggtagattggcttatgcacagcgtatttttgatcaatgtatctctctgtccaaagaaagacgacaatttgaaactttaaaagacgaagtgaggaaagaaaagtgtatactctccacgaaggagagtcttcaaagatttgagaaacgcaccgtttgggagtcgtcattgacttttt

SEQ ID NO: 74007 - DNA, 553 bp, Arabidopsis thaliana landsberg
actttttttaagttagttattgaattattaaatttttattttcatacagcctaatttctcatgtatcaatgagaccattgtcgacaaaacaaaatagaaaaaatagttgaattgattaggctccatgtttgactggtacgccgtgtacttgtcaatgttccggacggcgaatagtatttttgatattaggaaatggggtttacctttaaaatattggtgtggacggatttgtggatacttgatcagatatcaaaggcggcacaaaatgaccaacgatcgacgaaacagtgcccaaaatcagagtcagaagtgactagctcaatagcatgatcgatgccctttcacccatttaaaccattccacctagaacacttcaacacgactgaagctaaaacttttgcatatctcatagagatatgtttgataaggttgctgaaaataacaacttctactataattttgtcttttattatttcgaccttctcttaagaaattcgcccaaaaaaatttccaaatcaaaaagttattattatcctaacagatcttaaattat

SEQ ID NO: 74008 - DNA, 636 bp, Arabidopsis thaliana landsberg
ggaactggatgacattatccggtatgcctcagagaagatgaaagagacgattcaggatggccgggttattttttatatggtcgatgaggaaatggagattttaccggttgggttgatcccactgagtaatgcagaaggatatatgctgctggacaatggatcgggtggagctacccgggcctatgaattccacatcaccctttttgagaaacaacatgagaaataccgggccatgcggaccacttatatcgattcatggctgaggaatctcgccaatacgcacgaatccatcaaatccgaactgatccgggaacgacaggacatgcccaaccctgcggtgtacagcattatctccaaaaagacgtttccgctggaagaaaccttgttgcccgtagcaaaacggtccctggtgagatatatttctcaacaggctgcctgaagacaatcggaagagctatccccagggaattcggaaacggccggtgaaccgtttggggattttcttgtagacccgcgacatgcgtagggattgtagacctacagataccaggatcagggcacaaccccagagaaaatggtcgttcagatgggtgttcttatgaaagattcaaaaggcgagtatgatcccggaaatgg

SEQ ID NO: 74009 - DNA, 493 bp, Arabidopsis thaliana landsberg
aggaccgaaaaacgaagaaagaccctctgtgttttacgttaagaatacggacttataaattgatctactcaagagacctcaatggaatctaccagagagtgacagcgctagttacagccttcattgttcctaggaaactggtgggcacgtgtacgtcctctggaacagaactaagtactttatgacgagttctacaaattcgatgcgagatcaggtcatggaaacaaatgaaggtgctacaacttaagaggcttgttgcctatctaacaaagaaaaaggatcgccggacttttatgcttacaggtagcacactctaggtgaaccttctgacggagatatcccttcccaaacctacagaggaggaaaactcttagcgtgcatctgtatgtggcgtgctttcttactgactactgaatacgttacgctatctctataggaggattctatgccgggactacacaaagagcggacagtttgaaaaattgaaacaggc

SEQ ID NO: 74010 - DNA, 364 bp, Arabidopsis thaliana landsberg
  unsure (1)..(364): unsure at all n locations
acactaccacaagaacggggtatctgtgcatctccaacatttagactgagactcgcgcgccattccattgagcagcgagattagctcacagcatatgaagcacacacagacacatcagaatcagacagacttagcacaaaataactaacgcgggtcttgctgaacacgaaaactaacgcacctaacagatgccagccacatannnnnnnnnnnnnnnnnnnnnnnnnatctcacactctggaactacttttggactcccgaccgtgatcggagtctttcacgaatactctacatcggctacaaacaggtggggaagacgaatctcgacatagagacccatcatctgtattcaaaacaccatacc

SEQ ID NO: 74011 - DNA, 402 bp, Arabidopsis thaliana landsberg
ggaaaggggctcaattttaaagattttgccattcttaaaccacatataaaggaaaggggtctgtggatttttaccaaacacaccacagttataaaccgaaacttaacatgggccgtgaagtatacactgggccttaactaaagtatataatatcgtccacattattattttggaaaatcaatcttacatataaattatgtaagttccttggtgggaacacattattatttagtctgctttaatgatagctttggggcttgatggaaacatgacgttgaactcactttgactatgctatactttatataatatgctataacatatatatttatctatataatatagaggtggcaacagatatatgtatgtatggagtggtccttccatgaatgacgagagata

SEQ ID NO: 74012 - DNA, 329 bp, Arabidopsis thaliana landsberg
aaagttagtgaatacaaagcataagcttcaagtgacgtggaaggcaacaaaactcatgtatctggttcagaaccaatggatgaggtctcttgtgtttcaaatcttactagcaagcagccatgtaaagctcgggaaggtatggatgagaatatggtggattcctctcaggtgctcagtcaaccgcttgactcatcgatgctggaaagccagcaaaacaacgagaaaggtggaaaagatagtgaggctggggatggggttgttgtttcctaagtaacagttcgacagctgagagcccacaaaaatctttggatgataatgaggcaactggc

SEQ ID NO: 74013 - DNA, 435 bp, Arabidopsis thaliana landsberg
gctgagaacagcctttatgcttttcagatttggctttgagccggatttcttcggatacctgggccgggctgcggtataccgctatagcgactatcaacacgagtgggacggttattatgctgctgtaaaaaacaaacttccatacgcacgttttgccggaccagacgttacgccctttaacctgtactggcttagcgaattcagtaaaaacactaccaaacgcatcgttctgctcgacgggcattattataacaatggccctgcgtccaacccggccatcagcctgactgacgttgtgacgccgaattccaaacatggcgccttatctgcaaggcatgtcggccattgccggggcacatggcgtaccataccgtatatcagagggtaacagcctctcgggacagggaaaacccggcgtatgaacgtatttgcgtc

SEQ ID NO: 74014 - DNA, 579 bp, Arabidopsis thaliana landsberg
aactataaaaccgacaaggtaataaataagtcacattatatttgcataaaattcttctagtctgtcgtttattgagaaggaaaagaccaagaaagtttcttaacaaaaaaaaaaaaaaaagactaagaaagttttgtgcaattatagcgtgactaacaacgacgattcatgactctcacatgtcaaaaacaatttttcaatatagcagaaaaagaagaggatatttattctattatttggaaaacaaatcatatatcacctagtatttttttattattaatcatgatcaactaattgcagaaatacgttttatacgttttatatgatcaactaatttgcgttgattaaaactggtttattgaaaatagaatgcttacgcatagctagaatcgcattatcaaccatcggtttgttcacattgcatttgatgattaacagagataaagattacgttggcccatcgcaacatccattgtagacttgtagtattgtgaattacaaaaacgatttttactcactaaaaaaggaaaaagacagcaaaagtaagtgagatgacgtggaagtacaagtggaccacgt

SEQ ID NO: 74015 - DNA, 555 bp, Arabidopsis thaliana landsberg
  unsure (1)..(555): unsure at all n locations
agtaaccaatcgtcgtcttcgtataagaaaaatcgagtattttaagcagatctgatgagtatcggggctaaaaccacacgactcagaccagaggaagacgaagacgttggagagagatccgttttgtgcagaaaagactctttgcctttttgttctctgatttttattttctctcttcaacagaaaacgtcttgctcaattttcaatttccaggggaaatttagaatgtttgaaaacatttggggtggaaatgtaaatgaaataagtttatttctttcttagtaatttatttaacaaatcgtctatttgttggttaaaaaatgctaatggcgccgatattaaaatgctaaaggtgtgtgtcactcatccaatttgtatacctttaagagattacctaaggctaaaaacaattttagttgccaaaaagaaagaataaangtccacgttttttttataactcgtgtgatttttttgcgaaaaagttaaactagatggggataaaaccaactttttttttgaattcgtacatttgccactacttgtatgtgttcttac

SEQ ID NO: 74016 - DNA, 495 bp, Arabidopsis thaliana landsberg
aatttgattctggatgcacacatggccatttttaagagacaatgtcttgttagaagaactagtcgattcaagactggagggaatttacccgaatgatgggatcataagagcttgcacactcgctgcagcttgagttgcacctgaagctggccagagaccatcgatgggcgaagtggctcagccacttaaaatggttcaacgggtggatgcagagcatgacccgggttaatacactcaatatgaagctcgtactgactggtgagagtcttgagctacgttcgagacagaaggaacctcttctatgttctcttctggacctaattctggtctaagcgcttttgatcatgaaaatgtttcacgaacaactgtcttctgagaggagctgcacgaaggccgatgatagaagccagggctttcttcgtgttatatgagttactcccacttacggtgaggaaatttccaccagagaagcttttgagtctgggacatttttac

SEQ ID NO: 74017 - DNA, 264 bp, Arabidopsis thaliana landsberg
aatcgtccaggattcctcgaccaggacttgaaatcgtcgaggggaaaaaatctgttccgaggtttatcgacccatccggacttggaatcgccgagaaaagaggaccgggtccaaggaggtgacgaccaaccctggaaaccatccccaaagaggggggggagcccacgtagggtgggtcatcccaacgctaaagaaaggcgcttccggggggtcttaaagcacaacagaaaattctcgacccggggccggagttcctcctccggg

SEQ ID NO: 74018 - DNA, 589 bp, Arabidopsis thaliana landsberg
aagaaccttaccctgaaaataagaaatatggttgttacaagagaaaaatagagtttttttgtttggttaaaaatattacaaaaaagaaagaatgatttgccccactccatttgcatctgcagagtcagaaagaaacaagaagaaggcgtcactgaaaaaatctattttctaaaacgacaaatatttgcattgcgataagcctatatatatctatgtcatgcactaattcttaaaaccaaattagaaacaaaattttctgtatataaataataaaacatatgtagaaaatattaaaataataaaaccactattgttatgacttgtgagcattagttaattaaaaccttgtttgatcgctttaaactatagttggatctgcgaattaccaccctaagatctagaagcaagatttattagttgctcctaattcccagagagaaaataataatctagaagcaatataacatctataggtggaagaagacaacccagtttcgtctgtttggaaaatcctcgtagtaatgagagaacttgcacttcttattttttaaaaataaattagaattacaaccaaaaaattaaaataatc

SEQ ID NO: 74019 - DNA, 576 bp, Arabidopsis thaliana landsberg
cgagacatcggtcagaagaatctactcataaaacacaccattggtctctaaacaagcagcttcacttaatacataagttacctaaaccacaagaaccaatctttttttcctggattaacatttacctaacaatccttcattcatggatcaacctcaagcaccgtagtactgacttctgccttgtcagactcttcttccagttccttaatcactctctgatcatcttcttcagcttcgtttcctactttaccagtctcagggatgcttgaatatgtttctttatcaatctcttctccctttgtcttagacatatcctccttctcaatcaattttgtgtctgcagtttgctcttttgctgactctttctcttctaccttggtcttgggttctgcatttggctcttccactgacttttgctcttctccctcagcttacggatctacatttgtctctttgtgcgacttttgctctacctcatcagctaccttgtgctcttactcatcagttatgcgttctgcagttagctcttttgctgcctcctgattatcttcatcagttatgagctcagcatttggc

SEQ ID NO: 74020 - DNA, 552 bp, Arabidopsis thaliana landsberg
cgattcggcttggggtcaattacgtattttaccccaaggtgactgtcattcttcattgtctggctcagtctcggttgtggcaaaatttgaccccaacagtctttaaaccaatatttttaaaaatagaagctctgaatggataaaatatatcagacgaagtggatcatctatatcaaacataacaaaaatggataaagtagatctagcagtacaattaaggatcaagcagttcaaacacatcaaaatatgtgttgaatagtgaaagtggatcactgatgcaaatgaaatattatttttagaatatatggtttgttatcatatttattcatctttttgctacccatccctcccttgcaaaaggaaaggtaaaaaaaatcaattattttgtggagttagaaaaaatattaattttaaatataatattttacataagttatatatacttaaaaacaaatttgaatttttttaaacatattattgacatgtatatttttatatgaatactatatatattagaaaatgagagtatatatagtattctaaatcatgaat

SEQ ID NO: 74021 - DNA, 276 bp, Arabidopsis thaliana landsberg
acgtcggctgtgcgccaagcattcgatgcatccacagtgatttcgtcgagtctaagagttgtctttctgttaattttctcgatgtctacaagataaggagctctatagaatgataccttcacgtagcaggcctggcattgcatatacacattagcaaagaactggaagtaacttgaggtataacttaaggtccgaatggtaacaaacaatagtttgatcatcgcctttcaactaattataatgaatagacctcaacttagattcagcaaactaaaa

SEQ ID NO: 74022 - DNA, 575 bp, Arabidopsis thaliana landsberg
gctgctggctccacttgatttatggattgaaaagacatcgtttgtttaggaagatatttggtcatattccaatcattactcagagccagttatcaggttgtatttagatgccaacgatcaaattatcaaatataatatttttcatgataatactttttccaccctagtgagaagcatctcgttctccaaacagttataaacatttagatgtatgatgattggattgaagatttttgttggttttacgttgttttgatgcatcatgttgttcacatggagtaaatgtgaaatcaactaatctttttactgaaaacatggatatataaataaatatgaggagagaacatataacagaaattcacaacaactaaaattttaaccatgataatatttataattagatttctttttttccacgcttctttctctaatctctacatatcagctgatgtggttgcttttatcttcttctgcaatgattcttcagcttgggttgaagatactatacaaacaaagaatgattaatacatccaccaaaattattatagtttcaattttccaaattaagaacagta

SEQ ID NO: 74023 - DNA, 304 bp, Arabidopsis thaliana landsberg
  unsure (1)..(304): unsure at all n locations
acttcggttctctgtcacgctaaaaacaataaactattctatgtgtattattgtacctgagtttttagaccgcatttcagttttttagaaaataaatattaggggcattgcattctaaatgtagatttaatttgtagaatgacggtaccaattcgtctagagcaaaatatttcatcatttttttataagtatcacatatatttcagtgatatcctcacagatttatagaaaaccatttattgtagggggggggnggggggatnnatnggnnnnngaatatattnaaatttatgctaaattaaat

SEQ ID NO: 74024 - DNA, 195 bp, Arabidopsis thaliana landsberg
aaagagtaaagggggggccgcaagagagcacaaagcacaaaaaggcgcgaaaaagaactgaaagggcttaagccggaggcgacaaaaaggcaaaggagagagaccagaggcgggcaacacgccgacggagggcaacaataggggcacaaccgaaaagggagcaacaagccagagggggggcccaacgggaggaga

SEQ ID NO: 74025 - DNA, 524 bp, Arabidopsis thaliana landsberg
cttggcggctgaaacaggcgagagcactattcttatgtcgtgtgcagagggaggcttctccatactttagcagaggaagcacttcacaactgcatctcccattacctacgaccatgatgcctgcgggtattacaatacctacaagctggcccgtgcacgcatgggttttggggcgctagcatgacatggggcaaccaacgtaccccacttcaggcactacgagagatgcattacccgcgcagcagttgcataaatatgcagataccctccattcagagtacgcggcgtgtcagtgcctaatgcttacttggtatttaggccgggttcccagtgacacttgttccgagaccagcaagcatcgacagacctacgtgaaaaacgactcatggctacctttgaagaattcgacgaaatacgcttcttctctctctctacccttctcagcgtgtgccaaggacagcaagaaccttgaggtcacgatgctgctaatgaagcagagaagtctgacaatgaagactgggatc

SEQ ID NO: 74026 - DNA, 552 bp, Arabidopsis thaliana landsberg
  unsure (1)..(552): unsure at all n locations
gtggacttcatgcttcttgcacctgaagccaacgattgcattttttgttggtcctcctcctcagtcctcacttgtcttcctcttattattgcttttgcgtatcgtcgttttcataaagcaaatcgaagatgataagataaatatataaaacagttttgttttcactcgttttgacgtcgtagatctcaaatcttattatcttaaagccttgtgtcccctctctggccaaccgattcttctcttcaccatgtttctttttttaccatgcacgtgtattcatgtaatccgtacattatacaattcttttattttgtatattgtagattttttaacacacacatgcatgtaggacttcgggaaacgaatttcgagatgtgaatgtgaagttcacatgggcgtagtgatagtgtgttccgacttctgcatatagattccttgaattgaaaattatggatcacagtagctntatacaaaaaatatattaatggtaaaattacacaaaatataatgttcattntttcatttttgcataagatttacttttcgaaaaat

SEQ ID NO: 74027 - DNA, 212 bp, Arabidopsis thaliana landsberg
tgaaacagaaatgatcggagggggggaggttatctacaacaagggctgcaacgctacatatagtgattgatcttgtgggggagaccaagctaatgacgtggccttcaccacttactggcacttaccatttctaaataataaaaaacctagtctgtatacgtcgtggacttacgtcaataaaaggtgcatctacaactaaacgtatcatagtt

SEQ ID NO: 74028 - DNA, 508 bp, Arabidopsis thaliana landsberg
cgggtccacccggtaatccggcgacaggaagatcttttcgtttcgccttgatcccggtttgatcctctggcgcgggcaggtctttccagcccgccaggacccgccgccgcacccctgtccgcaccgcatcctgcggcacccagaacacccgccacatagccatctgccgtctcaccgccacctgcggcaacacgcctattcaatagggaagccgaggaaaccggcctggatgtcaccctggttcccgggcctgctgccccggtcccggccgggttcccccaccgcctgttgcccgcgccgtgactgttcgccgaagggcgcgccgtcccggaccggcacaccggcgagccgcacgttcacgaagaccacgtctacgtcgccaccactaccggtccccgccccgtcagggaaccggaacaccaagtccgctggttcacccgggctgacatcgcctcggcaccgggcatctccgaggactcccggatcctggccgcggaactgctcgccc

SEQ ID NO: 74029 - DNA, 268 bp, Arabidopsis thaliana landsberg
gagaaccacacgaactaatagaggggggggatagataaaatttgcgatcaggccgcccacagaataggacaccagcggaagcaccaaacaaaggtgcaaccctgacgaaaggaagaacctgacagtgtcctacgaccggatcgaccggccgaagcgagcacagggaccacaaacaggggcgagaccccgcctccgaggcacggtgcaagttaaaaaacgagaaaggatggggtgttacacttgcgccgcagcgcccagttatcctaca

SEQ ID NO: 74030 - DNA, 507 bp, Arabidopsis thaliana landsberg
cctcacacgacctagaattttcgacgatttttgggcttatacaatttttcactaacacttaaagttgactggtaaatcaattcattaattatattatccacaaagcaagttgtgagttatccataaaaacaaatgaagcatttatcttccaacggctcaacttccataaaattcatgttcgcaaaccacaaaatctgtgaagcactgtttatcaagatgcatactcacttacataattaattagtcggatagttgattatccagcgctaaatctaagtaggaaaataaatgtgtttgcaacaattatagtacacgatttaatcatcaacataatttttttgataaattcttgataaagtcacttaatctttaactttaaaccaactacggacttgcattcaaaaaaaaaaaattgttatccaaatgaaattaaaattatcatggaggaagtattggtattttacatagttaaaacggacgaagactttgtttataatctcaactttt

SEQ ID NO: 74031 - DNA, 325 bp, Arabidopsis thaliana landsberg
accataaaggcgatttccaccacaaacgtgcacgtatcaattttttgtgacagatcctgaaagagggggcttggtgaagtatcaattgcaagaaaactttataaacgtggtagatgatacctgattaccttagtgaaaacaaggagagaaactttcatttggattattataaaaattaatttattaaaagagttatgaatagacgcaaaagccttttaaatctctagtagaagactaaaaccacactgtattgttttgagtgtaatacctacaatacatacactaaaatttctaatccaagagcatgtaagaatcgggagccaat

SEQ ID NO: 74032 - DNA, 561 bp, Arabidopsis thaliana landsberg
acttttaccggcgaattaccgtggatcaacccgaaccggtgaacatcttcttgtatgtgaccgtttctacctgcggcagtaacgatggggtgatgctggccaacgccaacggtaacagcggtccctttacttatgtatggcctaccgggcatataggcgccacttattcgggcctgggttacggtgttaatgaagagaacgtgatcgataccaaaggttgcgtggtgacctcctctactgctgttaacgaagacaatggcactggcggacctgccattgcgctgctctccatgagacccctggagtgcgcaggcagaggaagcaccattgatgtaacagtgctcaattccaccggtacacctacctattcatggtcgactggcgatgccacacaggacattaccgtgacatgggccggtgatttcacattggacgggactgatggatcctgccatgcagtaggcgaatttacgggggaccatgcgggcccttgcccggtgcccgttggaatggctactggtgactccgtttagcaaacaaccgcgggatttggaaaaaccc

SEQ ID NO: 74033 - DNA, 157 bp, Arabidopsis thaliana landsberg
  unsure (1)..(157): unsure at all n locations
ccccgcaagcggaaaccagggaccagccanccaggacaagccacaaggggagggccaaaaaacaacggngncnccagagacaacacaggagagagcacgaacggnggagcgaacgacgcacaaggancaggaaaaggcacanccacgagggaaagag

SEQ ID NO: 74034 - DNA, 588 bp, Arabidopsis thaliana landsberg
  unsure (1)..(588): unsure at all n locations
ggttgaattcaaatttagtaaattgtcaactttgagacatagatgatagaactaagattagtagcactatatatgactcaatggatgtgaacaagatgataatttaaaaaaatgttttataaaattctttttgtccaatgaacaataggttaaaacggacaaatttacttttgtgatttaattattgccatgcattttggcatatagtcactctgtttcataatataagctgtttaatttttgtcatttaacaattttaatacgtgtaacatttcgtcatgcaatgttattttatgtgtagatatctaatttattaaatgtacttttatttcagttataaaagttatacataatctgcgattataaaattttatattaatataatgcgttaaacattaagtatctgtttacgataataccaaaataaaaaaacaagggaaaaattccatcccaaatttttgcttttgttacttttgaatagcanatctctaatgtattatttttctaaaataaaatcttcctatcctaatgtcatcatctacaaaatcattaaaatatgtaatgtctgattaactaaaataattttat

SEQ ID NO: 74035 - DNA, 425 bp, Arabidopsis thaliana landsberg
cccccggcaccgataccttcacccttgccgatcccgcttccgatacctctcgtttttgccgagcccgacaccgatacctggacggggaccgataccgacgacggccgcgtcacctatgcctattccaccaccaatgccgatgccttctaccgatgccaccgccaactgctgcaccttgcccaaatacacctacgatccctgcaccttttgcaaacccaccaccgactccttcgacatgaccaccgacaactccaccaccaacacctgcaccatgggcaccaccagaacactgctgcaccaccaaagcctactacacgagcaccacgttcacctgcacctgcaccaccacgtcctacaagcccaccggctgctgctcctccaaagccacacccggttccttcttcaactgcaccaccggctacttc

SEQ ID NO: 74036 - DNA, 420 bp, Arabidopsis thaliana landsberg
aatttatgttctagatacctttgatcttttcttataaattgttttctagtttttttctaagctattgaaaaggccgtttttttttttaataatatttattataaattaaagtttttactattgtcaaatctgcgtagttttaatcaaaggaccctatatttttgtatataattaatattaacaaattaagatttaatgaaatattaggtgaaattaaatatgagtttcattacttattgattgatttagtttgttgatccatgtttgaagctaatgtccattgcatatgaagtttatctgtcagctctttctcgatccgaaaaatctaatcgtcattcataatagatcatttccttttgatgcttggctctccattttattgacaaaattggcttttatctatggaattcatgtttaatt

SEQ ID NO: 74037 - DNA, 360 bp, Arabidopsis thaliana landsberg
gtggctcagggctcgtcctccgacaaatctctgacgttgttcggcgctgtgttcatggtcgacgacgctcaaacggagaccgttgatccaaaatccaaactcgttggacgagcgcaaggcctttacggttcttcatgtacgtatattatttcttacaataaccgaaccgaaaatataaaatgggtttgggccatcactaataaccggttttggttggtacaggtaaagaagaagtaggtttgataatggccatgagcttctgtttcgagtacggtccttacaaggacagcaccataagcatgatcgggaagatctccgcgatgaacccaatccgagaaatgcctattgttggcggcacgg

SEQ ID NO: 74038 - DNA, 702 bp, Arabidopsis thaliana landsberg
gtaagattaaaaattaaatatgtggcccaaaacggttgcttaccttgcttatccaagtccagtgtacacattacagtaaaaacttttctttaaaaccaaagaatgcacttgcctaccaagatcaagcatttttcagaagcaatccatcaacattacatccaaatcgtctcgtagatgtaaacaactgaaaagcttgacggatcgggaatattatggattcaatttttctatttatctcatacatgtaaactactaaaaaccacacagtttaaaactataaattacatttgaccagaagatctcatcagatcagcaccattacataatttacatagccgaattcggagttattagatccaccaatgcaataacatagagttcccttaagtagtctaattcaaacaattaaattattaggtgaaccattacaccaccacatactgactttgtcacatttgtcccaggatactttttcttttagttaaagatcattttgcagtttggttgaactaacttggactgggtgtgagtcatgtatatgtaagttccctataaatagaattatataccactgcaccaaaaactcattttactctcacaattacaaacactttgttacgacaatttaattagaccccaccagaaaaaaacgaaaatggcaaaagaggaatatgtatcaagaatgttggttatgttaataat

SEQ ID NO: 74039 - DNA, 696 bp, Arabidopsis thaliana landsberg
acatgattcatttattaaacctacgtttgttatcttctcttgtttatgtttcatttattaaaattcaacttcattggtttataacatatccaatccacaccctcggataatctcaacttaaaggaaaaatatcaaaagccttgagacgctaaaaaacataaatagtggaaattgtaaaaaaagcaaagaagaaagtagagtccaagccaggtgggatattgccatggcatggacagggttaaagcgtcgaagagagagagaaaggtacgtgtacctcactcttctccacacacaaatacaacttaaattctccttcggtattgtctcacctgacaattttctatttttttactgcatttctttagaaaattgctctgctaatatgaagtctaaccaaaaaaccaaacatttaaccaattaatcaaacatccaatcgagccgaaccacaacacctagccaatttgccgaccgcagcttgaataatcatctatcatgcagccgaactttatcattccatacatattcgttacaagtgtatgatatcatgggttttatggattttgtaaaagataaaaagggatgcattgtttatcccaagagactatatcttgttaccgattttcaagaacatataatctaaactaatcaatcatcacaaaaagattagataacaattaaaagcattaatataaaaag

SEQ ID NO: 74040 - DNA, 342 bp, Arabidopsis thaliana landsberg
ggacatggccaacaggggagggcagggtacacccctcccacgaaaatgcgtcacctatcgaaagctgttcgctcttgtacaaacagtagccacgcatgacgctctttcattgtgaaactgtctcagactaagagcgactccacctgtatgcatagcaaatggatcgaacatgagctcaggcgtaataccctaattgacctgtagtgcagtatccacacaacaatgattcaaccggcaatgtgcgtgatcggctagagctcaaccaaccctacttggcaaatgaatgcgcactgcattcgaacaaccattccgtcttgctatttccagcccaccaagggagac

SEQ ID NO: 74041 - DNA, 315 bp, Arabidopsis thaliana landsberg
gctgcaaaccggccactccactaggaggaaaagatgacatgcagaagccgaccaggaaacgaagcacagagcgaagagcaggaaaagaacgaagcctgaagcagctgaagaggaaggccaagtctgacggcactcactcgcgcggatcgctgagctagctggtgacatgtaccgggagaaaaagagagataatgacgatggagacggattttaaaaaacaaaaagcgatactatgagagacagacccatgggagcatctgaaggagagacctagatagaagaacatatggacaagaacgcagtcgacaacagtta

SEQ ID NO: 74042 - DNA, 500 bp, Arabidopsis thaliana landsberg
  unsure (1)..(500): unsure at all n locations
ataaatatatatattttttggtaaactgttaagtaagcgttttatatatannnnnnnnnnnnnnnnnnnnnnnnnntttttacatcgagtttatcgagtttcgtatttattacacaagtaggaggaaaaaataaggacaagtttaattagtgatgtagcgtctatcttcctatttccttttacgtcttttccttttcaagttcgtctttgtttttgggctttcgtttttgttattaggttttctttaaactgtgtcggctatttgttgctttagcctcaagtttcaacaagggatttattcttaagttcgtataagtactcttaaacttgtaagagatacggtggttgttttgaataagaaaacagagaagctcttctctatctcaagtctttgaattctcctcttctcttgatctattgatactcgagaatactgagaactcttagctacggttgctaattccgtgatccatcgatactcggagtttcaaacgtattta

SEQ ID NO: 74043 - DNA, 504 bp, Arabidopsis thaliana landsberg
atatgaaaagtgttcccctacaaaacagaatacttattaaattatttcttaaaagctaccattgaatcggcaaatggtgttagtataatgtaagaagccaaattatattcacataatgccctaagcatgtatatgtgaggagtgtgttcaatcattattacattacagaacgaaagtgataattgcaaaacaaattacatttttaaaagatatataaacatatataaggaagagttgctatctttacgcaattggccaatgaaaacatacacaaatggttgttctgtctgtcggataaagaagaaacctctcctaagacctcttttttgttcctttctcttgaagaaacacactactcaaataataaaacttaatctctctatatctctatatccattttgtgaaataaataatatctccaattatcttctgtgtgagacatatatactttactagaatcccaaaggaactacttgattggaatgtttctttctattccaacta

SEQ ID NO: 74044 - DNA, 567 bp, Arabidopsis thaliana landsberg
  unsure (1)..(567): unsure at all n locations
cgcactcgtcaccgacatgccggcccacgaacagcgccttcatttgttttagcaggtgcgggtggctgaacggaactgggctgactgcgaagaccgcgccgcacgcttcgaggaaggccgttcaatcgtcatggctgaaatgaagctggcgctggtcgagaacaagatcgccaagagcatggccgcagcggaagacgtggtgcgaacgtcagaagaatggaagtcctacgtcaagaagatgcacgaagctcgccatgccgcgaacctcgcacgggcggactggcgcgcattagatcgtgattattgggccgtcgcttccgccgaagcaagctcacggcttgaaatgaagctcgcgaggggcgcatgagaagagcactcgaactacaggcaggcatgcggtttgaacggcttgttcttgtcgccaaacgccacgacctcaagctgaacaaatggacggcgacttgcgactgcgggaacacaattgtcgcgcgttcttctgagttatctagcggccacgtcaagtcttgcggctgcatgagaaaggaaatggnggcgagaaatcagttc

SEQ ID NO: 74045 - DNA, 385 bp, Arabidopsis thaliana landsberg
cgatgccgcggcgctggacgaagcgcacgcgcgcacccgcgccgtgggcggcgcgctgcgctacgtcgcgcggctggattgccgcgacgacgccggcgtggccgtgcgcgtcgggctggaagtgctgacggccggcgatccgctggcggtcggcaccggttccgacaaccgcgtggcgatccattccgaccgttatccgctgcaaccgatgctgagccaggggccgggcgccggcgctgaagtcaccgccgccgcactgctcgacgatgcgctcgacatcgtcggggaggccgccgcctacgccgacggcatggttagaccgagagctagcgcggcgaggtacgccagcagtggttggggatggtcgatcgcgtatccttgcgcg

SEQ ID NO: 74046 - DNA, 393 bp, Arabidopsis thaliana landsberg
  unsure (1)..(393): unsure at all n locations
ctatactctatcagtgtcaaactctgtcgatagacttagcggtattgcgcaggaaaatcgtagatggcatattatattagcatgggttgcaagaactatacgagcatctacatcttgttggtgtgaataagcgatgtgtattaatctagaacttgcatttcattctacacacaggatcatatctctatatatggttaccctatcttagcgttctgtattacatcatcatgtgagctaaagtattatagatctatacgcgttaattctctatccactatgcactaacagaaaatatgttgtgataatcaatactgaccttggccataaatcggctgacacgatgagtcatgtctaacganaggctcctgggctatgcgatccttcaacaaatga

SEQ ID NO: 74047 - DNA, 573 bp, Arabidopsis thaliana landsberg
ctaccgcgagaaaaagttggatgcagcgagtgattgttgcttaaggtcttacttttccacttgtttgtagttgttataacattcagttatgaaggtaatagatcatacagacttacgagttaaaagtaaaagataagttttgggttaccttaacgatgccatcaaaaataagccagactccagttggctttgaaccttctttataaagcgtgacaccacgcagtttcattggttcttttttcgagtgttttaaaggttcacaaaatgcaggaggaagagcaaccgataacggatgtgaggtgatcatgtcgctcaattttggaagtttaactattggagggtttctcaaaagctttttcaagccggtctgcagagatagatttgaccaaaagcataagacaaaagagacaagactatagttgaaggaatgagattctttaatttggtacctggacagcatcatgaagatgagcgatttctttttcctccaacaagccaaccttctcgaggttttcaatgtaaccgagtaaatgatttcaacactgaatatgttacttgttttgttttcacaac

SEQ ID NO: 74048 - DNA, 372 bp, Arabidopsis thaliana landsberg
  unsure (1)..(372): unsure at all n locations
cctcttgatttaaaactttgactctccgtgggcggaaaccgtgtgttggtggctccggttggggaagcgaatagaacctatttgggggctactactaagcttagagtatcgtcgactggtccagcgttaccggggcacatactggnnnnnnnnnnnnnnnnnnnnnnnnnnnnnnnnnnnnnnnnnnnnnnnnnnnnnnnnnnnnnnnnnnnnnnnnnnnnnnnnnnnnnnnnnnnnnnnnnnnnnnnnnnnnnnnnnnnnnnnnnnnnnnnnnnnnnnnnnnnnnnnnnnnnnnnnnnnnnnnnnnnnnnnnnnnnnnnnnnnnnnnnnnnnnnnnnnnnnnnnnnnnnnnnnnnnnnnnnnnnnnnnnnn

SEQ ID NO: 74049 - DNA, 172 bp, Arabidopsis thaliana landsberg
gaagacattatgagatcaagttgatcaccattttacatagattttatattggctatgagcggatatttaaggcaattatactgactaccactccaatgtctttttattattcctatgttactttaagaaaaataaaagttgaggttgtgtttgtgggtgtgggtgccgcttt

SEQ ID NO: 74050 - DNA, 338 bp, Arabidopsis thaliana landsberg
ccggctaatccacaaagcatttttcatgatgtttactaaacggctcagagttacaacacaacttatccaaaatatggaacattctgtgggaattctcattatctccatatgtatggaacatatagttataaaaaagtcctgcaatagtctatgttgtgaacttgccgtagtagtttgatagtgctatttctgttatgttgcttgtgatgaaattctacagttagatttttactcatgaatagcagatcactctaaaagtttgatactacatcgctgatgggataaaatccttcagaaccggtccaaaaagaatatccagttctttttttcttagattt

SEQ ID NO: 74051 - DNA, 591 bp, Arabidopsis thaliana landsberg
  unsure (1)..(591): unsure at all n locations
aaaaaccatcttatcgcacatgtattannnnnnnnnnnnnnnnnnnnnnnnnnnnnnnnnnnnnnnnnnnnnnnnnnnttatttctactttgtaattagaaaaactaattaacctagtgaatctaagtttctctaatatatgtgaatgtgatacgtcatgtaaattgcagtggctaataagatccatatggtagttttacatttcgaacaagcggtaaatcaaccatcactgcaatcccaaattttagctacgctaagtaaatgttaaaatgtaatacatgagatacagagaccatcgtgcgactggcgatatatgttactatacccattattcaaaatttgattttattaccaaacgatatacagtaagtatggacccattttccgaagttattggaccgtaaaatcaagaatatgcaaatactcagatgacgtaatcaatttctatataaatagaaccgcagattcggattatcctaaggaaatagtatcttcatgataaagtatcataatcgtatttttagataaagtagagtaatttacctgactcatgattatcagtcatgccatcaaaattatatttaaaattgc

SEQ ID NO: 74052 - DNA, 610 bp, Arabidopsis thaliana landsberg
ttgttcctccttccagtttaaattaatggacaggttcatatcatcccacaccatgtgggctttccgtttttggttttaagaaaattggttttacgaaatgaagagccaaaaaacagaagaagctgacgtttcctgagacattctgtctcattcgtaactctttggtttttgctttgcctttgctctgtcatttcacctcacaagtcattgcctacgtgctttcaacctctctatctctattcttttagcttcttcataccatctccgtacacgtgtcactcttaggcctttagatctttctcttctgcagcataatcaacacctaccaattattttcagtttcggttcggtttaatcagtgtgtatttatatagtacgtattatgatttatgaatatgaatatgaaaatgagtatagggattagtggtgtttgtctagataaaaccgagcctcgtctagggagcacatgtttttggtcagaccattttcaagcttgtattgatacaattatttaattgtctatatcacttcatttaaataattgtccatcatgtctcgatttagtagaaatcgaataaaaaacggacgtcacgatttcataagttaaaac

SEQ ID NO: 74053 - DNA, 545 bp, Arabidopsis thaliana landsberg
  unsure (1)..(545): unsure at all n locations
caggctgcagaaacgacccgcccgatcggatacacgatgaacttcacgattagcgcggcggtgggtccgatcaggagatagggcgtccaccgccctcgtcgcgagcggcgcgcccgagctcgccggggcacccgcgtgctgacagcggtcatgcatctccccctgcacagagaaaccggttcctgattcaagcgccacggccgtccgcagtcaaggcttccgcacccttgtataccggctaccgggtggctagccttccgaggaaccggttactcaggaggccatatgacgacccgtccagctgagcaccgcgcacggaagccgacagcgctaccaccggaagcacgcaggtacgcggtgtgtggaaccggttcacgagccgggatgtacgtggacgcgatggtcggccggtacgccgacgtggcggtgccggtcgcctggtgcgaccccaatccggtgcggatggcctactacgacgaccgactcgccgncgcgggcccgcggtcgtcgcactacccgcccaccgagttggccaggatgctcga

SEQ ID NO: 74054 - DNA, 119 bp, Arabidopsis thaliana landsberg
  unsure (1)..(119): unsure at all n locations
tgtttcatatgactttatggatcctatatccgcttgtctttttaaggggatttccctgcttctcccattattcccgntcaannattcatgctctgntttgctctcttcttacgctctgt

SEQ ID NO: 74055 - DNA, 157 bp, Arabidopsis thaliana landsberg
  unsure (1)..(157): unsure at all n locations
gctaaacgagacacgggcactagcaggccgaacccagagccgcccgcatacgcgataacaggttggaaattccgaaccgaacccccncaggcaggcaccagggaatgaaacgcagagcagaaccctaaaaaagcggcacgaagaaagaagaagaaga

SEQ ID NO: 74056 - DNA, 146 bp, Arabidopsis thaliana landsberg
ctgaaatcagcaacgtacagaaccaagggggatacaacacggagcacaacaataacagactttaactttaactaacacacaccagcaccgggggcggggacccatgggaccaagcgcatcctcaaaaacaacaacagcagaaccaa

SEQ ID NO: 74057 - DNA, 590 bp, Arabidopsis thaliana landsberg
aaaagacacgtagccgggcttaccacgcaagttccagctaaaaatgttattcggcttaaaagtcgctgtcggcgtaaatttggctacggaaaagcacatttaatctatgagaaaaatattaatgcgcgatgatattgccgaattaattgaagtaacccaaataattactggcctaaaaaaaggcatcattgaaaaagattactatgttacacgtctgctttgcattctttcccaagttcataacatctattttaaattagtttttgccggtggaacttgcttagctaaagcgcatcagctgactaaaagaatgtctgaagatgcggacttcaaaatacaacttcgcaacccatccgcccctcttaataaatcaaaatttagaacggaatttagaaagcttcgtgaacaaatcattagctcaataggaggtaccgatttaaagtttttaaatcaaaaaatccaaggacagaaaaaaaatttgttgattattacaacaatttaattgaagctttagtatacgaagaatctccttcatcatattctaacgcattgaagtttattaacgatgttagcaatgaaataataagcac

SEQ ID NO: 74058 - DNA, 562 bp, Arabidopsis thaliana landsberg
tagcacccaacactgaggacaatacaaccaatcaaaagttcgaatatgtggaaaccaacgttaacaaatgcatagtttatgcgacaagacccaactacttctccctcgttcacagtcatcaatcaacagagaatcttactatcaacattacacgtttttcccttttctccaattctttttcttacttttcatttcccctcttgtcattgcacccatgtgtatatataagggatataatggacacaacaatcaattcaaataaaacaatgacagaaatattcgagaagtttcatccctatgagtttttattgggggttaaaatttcatccctaatagttgaaaagatacattcaattttattttttctcacaatatagcaaaaaaatattatacatgcaattttttatggatgtactagcactgcatgcagaacccaacaatttatagaagaaaaacactctaatggttatagttgagtagaatcacaccctgtcgattgaaattacaaatttaatatatgtgtatttcttgatcactccataggtcacatggcatttgattc

SEQ ID NO: 74059 - DNA, 391 bp, Arabidopsis thaliana landsberg
aagttcgcggccaatcattggactattttatggggtacgtatttgattagtactatatggagtattttaaagcgattagtcgattagatgcttattccctttatatatttcagagggaccatgaaacaacatacacgccatatacaataagcttgaatattgcatagagaaagatgtaacacctccattaaaataatataaactagacccagactctcacatacaatagagcataaacaacacattccactatatagcatattctcgtgatgaaaagaaagtaaagttactgagaacactgtcacaacccacatgttaaaaaactcttctaatatataaaaagtgagtgccggcaaaaagaacaataacgtaaaaaaagtaagaccattat

SEQ ID NO: 74060 - DNA, 488 bp, Arabidopsis thaliana landsberg
ccgtgaatgaaggcgtaggcgtagttttcgcggttgttgcttctgaggtcttcgggcgcgccgcagatggtgcagtggcctttcttgtcgaagtcgtgctcggtgggcacgaagggaaggttgccggcctcgtcgtcaaaatgaatgacgctgtgcgggccggaggcatcgcgtgagcagtacaccgtgcggcgggcaatgatgccggtgatttccgtcaccgaggtgccgtagagcatgtggcgaaagatgtgctcgcggcgcttttcaaaatccggctcccagtcggccagccccttgagcaggcgagcggccacttcgcgcaggaacacgccagatttggtgcccggatctagccacttgtagtcggggttgtgccaaacctcctcgggcagcaggtccagcatggctcgcgccagcttgggcggcgtgggcacctcgtcgttggacaattgcgccaggcaatcgaaaatgtccggcacgtggtg

SEQ ID NO: 74061 - DNA, 305 bp, Arabidopsis thaliana landsberg
  unsure (1)..(305): unsure at all n locations
nnnnnnnnnnnnnnnnnnnnnnnnnnnnnnnnnnnnnnnnnnnnnnnnnnnnnnnnnnnnnnnnnnnnnnnnnnnnnnnnnnnnnnnnnnnnnnnnnnnnnnnnnnnnnnnnnnnnnnnnnnnnnnnnnnnnnnnnnnnnnnnnnnnnnnnnnnnnnnnnnnnnnnnnnnnnnnnnnnnnnnnnnnnnnnnnnnntcattaatggtccgcccccagcctgaatctttgtccggtttcgagatttcctctgccagatcaacttatttttgaatgatttcttgttcacatacttaaacatcgaaata

SEQ ID NO: 74062 - DNA, 607 bp, Arabidopsis thaliana landsberg
gacaatgcatagcttgcttgttgttggttctctttgacttggagaccttgaattaaccctctgatatggtctccttgtgttggttcatcatagcagaaaaatggctgctaataaacttacatttgtacttcttctcattgtccaccccaggggattcacgagcacatatatgttttgcttataattggctactgatatagctacacacctgctcgttattagtaggtgaaatatatttgctcaacggaattttttctgatatactgacacagtctattataacggaaaatattctttgtagggacctcttggatggctgtctttctcaggatattctacaggggaatatctactgcatagaggtgttgagttctttataaatgtcgacgatccgacagagataagtgccatatcttgggaagcaatcatccagaagcacatcgcagaggaacttcatcacacaaaaactgaggtgacactatcaattgatcatattcctattctttaacctgttgacgatactacctttgtagatgctctaactgtttcattttttatttagttcctcttgaatttcttcatataaatgtctctttttacggattat

SEQ ID NO: 74063 - DNA, 536 bp, Arabidopsis thaliana landsberg
  unsure (1)..(536): unsure at all n locations
gcattaggttgttcatgagacttacgaagaggtttcacgactaacaagaggaatgcctggctttctcgtttcgagatcctagagtacaataccatacccagaatcagtgcatacaccatcacagattacaaannnnnnnnnnnnnnnnnngctgcaacaaaaatcgtaaagaagaaaaacccaataaatcccacaacagcagaaacgggtatcaagcgattagcaggaaaaaaaatgtaaacttgaacagtggtgaccttcaaaatccagcaaagactcggagttgagctaattagataaagaacagattcaacaaattgacagagatctcgaaatcaaggagaaggtgaagattaggatggagatggaacagttaactcagaagaaaaaaaaaaccctaattgtgagaaattatcttcacgcgaatacagaggtgactttgacggcttgagagagagaaagagagagatgaagcgtttcgaagagtaataaaaagtgtaaattgatgatattggtgaggagaccgcaaatatttt

SEQ ID NO: 74064 - DNA, 579 bp, Arabidopsis thaliana landsberg
  unsure (1)..(579): unsure at all n locations
agctgttaccaggtcttcatacagcgagtatcgaacctgcttcgacaccatgaaggcgccgaaataaaaacctgcgcgatcatgaattgcgttacggtgagcgcttttcgcagcgaggtgcttccggatttaatgggaagcacattgcctttgaaaatggccactggcctaagccccgaaagcacccatgccgggtaagcccctgcgaacagcgttacggcgagcatcaatgccagtatgaagcccagcacaccgtgttgtgcccatgggtgaaannnnnnnnnnnnnnnnnnnnnnnnnnnnnnnnnnnnnnnnnnnnnnnnnnnnnnnnnnnnnnnnnnnnnnnnnnnnnnnnnnnnnnnnnnnnnnnnnnnnnnnnnnnnnnnnnnnnnnnnnnnnnnnnnnnnnnnnnnnnnnnnnnnnnnnnnnnnnnnnnnnnnnnnnnnnnnnnnnnnnnnnnnnnnnnnnnnnnnnnnnnnnnnnnnnnnnnnnnnnnnnnnnnnnnnnnnnnnnnnnnnnnnnnnnnnnnnnnnnnnnnnnnnnnnnnnnnnnnnnnnnnnnnnnnnnnnnnnnnnnnnn

SEQ ID NO: 74065 - DNA, 608 bp, Arabidopsis thaliana landsberg
  unsure (1)..(608): unsure at all n locations
taacagtaacagaacttgttcagtttgccgggacttgcgctggcttgatggggggagaaatttgtagcgatcaagtcatgtctgagattcttcaaaacataccaacttcgaggtattgttgtctgaaaatgatcatatatggccaagaatgtcacatggtgctgaggaatcttttgtttcagacttattattacaaaccatttgcctctaaaggtcgtcccaggattcttaaagtttggaacagatgttctgctgaagttggtggtttttaaccattttccttcaaatcttaacttttattattaattaataataaaaaatacattgtttaacttaattatggtctcaatattcaaatccatggtgattcagttttttttttttttggcttttcaaaatgactaaacgttataacttaataataacattctgaactttcaagacttttataaattttagatacagcttattcccaagaaacaatacccaagaaaacaatcacatttaatatagggatgacaacaaaataaaagaagcaaacaataataatcaaactcacatatatngagatattntcatttctatatctcttaatagcagaccgcacg

SEQ ID NO: 74066 - DNA, 108 bp, Arabidopsis thaliana landsberg
ctcgttatttgaactcactgcttacatacctggtattggccataatttacaagaacattctgtagccttagtaagagggggaagggttaaggatttacccgcgctgag

SEQ ID NO: 74067 - DNA, 451 bp, Arabidopsis thaliana landsberg
ggatcgccttcagtgttaaagggtctaacagattaaaggagttttttgatttctcgatttcactgcttttagaataactcaaaagacggcgatgaagaagaaaagtcggcgaggaatttcggaagatactgtgtcatcctgcgcgcacacgacaagtatggctctaacttttatttcaaaattcgctagggtatctgcgaatatgaaatctagggccattttcgacatttcaaagcagaaatcttcaatgcatcaatggggaaaaagtgtttcccgccatacaattgatattaaaaagatcagctgattgttgacacgcacatgactgcctggaagaaattctttgtgccactaataattatggtggggggggtgctattttgtgattcctctcctcccatgacaccattatttatgacagtagaaataaatcatctttttttttttttca

SEQ ID NO: 74068 - DNA, 926 bp, Arabidopsis thaliana landsberg
gtttgaagttttcttcaagttaaaatcaaagctttaaaagttatgtttcctaaaactttctctcttagtacttaaagactttctccattacttctaaaaaatttcactttaacattttttaatatatagactagcaaactttgattttctagctttctttcaccattcatgtcacctcctcgaagttaaaggtattagtcactcaggctacaagatatcctctttggaaggaacaaaacttgatagaacagttcatgacttttttttagctcatagattgtggaatatactcctagatatgatcctatcaagaatacaaaacttctatgtatattaaccttcttcgatgaaataaacatactttatattatatgcaattctgtttcatggtattagagcatacgattctgacctaatttgttttcttcttcttcataactgtcattacatacctcgtgaccactgctattatatactctacaaacaattaaaacttctataatctatattgggagaagatgtcgtcaccatcattgcagcaaaacaacttgcccttgctattactacaacaccttcaaacccatactcacttagatcttctgataatcttggatccttgatctcttccctcgtgttgaaggaagaaaattatccagaatttatattattccatcacccgtgacgtaatcggatggcacaacctcacaaaccaccaaacgtggcactctccctctaagctctacccataaacttcgctacgtcttatttttcctagattcttattgcactttgatctttgtctcctaattacttaaaatagatagattccattgcagtctaagatgacacactctgtttcttacaagactatattttgaggactttgattgaggccagggaagaacgtgaaggaccgtactactata

SEQ ID NO: 74069 - DNA, 552 bp, Arabidopsis thaliana landsberg
  unsure (1)..(552): unsure at all n locations
tggaaaagggattgtcctcaaattccgcggccaggttttcgtcgcgtcttaattcctcaccagtgaacagctggctctgttcgccccagctcacacgataatttccgtccgtggcattcttcgcggtcagcataaagcgattcagatcctcttgaaacggaacgaaggtcatgcccgagcggatgctgtcgccgttnnnnnnnnnnnnnnnnnnnnnnnnnnnnnnnnnnnnnnnnnnnnnnnnnnnnnnnnnnnnnnaacaaaagggataccgcgaactgcgaatcgtaaatacgccgtcacgggcggaaaccaacttgtgccccgtggaaaccgtcagcttctttttcgcgagatcgagctggaaatcggcaatttcgccatccacccccatcgccttgagaaacgcgtaggccatgatcgcatggccggcccaaccgggatgcacgccgtcgttgccggacaggtgataattcgttccatatttttcagccgcgtcataagcggctttcaacatgcgctggaacacatcggcaaaaccgacgccttcct

SEQ ID NO: 74070 - DNA, 517 bp, Arabidopsis thaliana landsberg
  unsure (1)..(517): unsure at all n locations
aaagnnnnnnnnnnnnnnnnnnnnnnnnnnnnnnncttcatattgataaaacatctctgatcttctgtgtgatagcaacacatagttaaatcgttggcattttttaatactatttaggtattaaaatctcaaaattccgttgtcaaattgcttaaaaaatactcgattgatttagttttcatgtaaatgcaaattaaacaaattctaaccaaatttgttttttcccctgattttattagttcctattctttttttttgtgcaaaaatttgattggttcctttgtggctatgtgtggtgcgtggcatttcgttaataggctcacaatcgagagcttaatacttacaataaaacgacatcgtttaataacannnnnnnnnnnnnnnnnnnnnnnnnnnnnnnnnnnnnnnnnnnnnnttatctgggtgtttttctacagcaatggcggcgagaggtgctctgcttaaatatctcatagtcaatgtcacaccttctcttcaaatctcaagccgtttcact

SEQ ID NO: 74071 - DNA, 411 bp, Arabidopsis thaliana landsberg
agcagctgcgcgggcaggtacaggccgcaccgccacgtgacttcctgtcgctggtgacgctgtcttcttttcagttttttgcgctgtggccgcggctgtcccaggttcccggggtcacgttcgagcacaagtctgagcggctgttcaccacggacgcgaactcggtcgtcggcagcgtcggcagtgagaactcgtccgtgctgcgccaggagggcgcggcgtacgagccgggcaacaccgtgggcgagtccgggctcgagcaggcctaccaggacgagctcgtgggcacgccgaccacgtcagtggtcatgatcaacgcgaacggcgataccggggccacgctgtggacgtaccccggacacacggggaccccggttcagaccacgatcaatacgacggaccagaacgccg

SEQ ID NO: 74072 - DNA, 499 bp, Arabidopsis thaliana landsberg
caacaacactatagccaaactttaaggaatcaacagatcgaaccgaaaaaggtcaagaaaaacattgactatgataattttttttgaaatacataatccaaagcaaacatgcataccatattagataatactattattcactttttaaactaactggtcacacagattgaagatattttaccgtaataaaatggaaagtaaaaatgatattataaaatagaaatcatttcgccgatatttttatcctttgacaatccttgctaaaatttatctacttttcgtctctaaacttgtttcaccaattgaaaaaacgattatcccgatttgtggctcttgcctctcgtctaccggcttatatttgcaatctgcaacatatcgtcgtcttcctattccatacgtatcaagcgagatatgttcagtctctgacttggccttctaatattttgaaaattttggaatgcttttttcaagtggatgaaccatattgtataccttgaac

SEQ ID NO: 74073 - DNA, 522 bp, Arabidopsis thaliana landsberg
tttaaaggttgccgcagctgggccatataggttatgagtgtgacgaattggcccactggtcgaagtcccgacgttacttgatatgcagcgatgaaggaaaccaccaatagccctagcatgaatatcatattctgagcgatattcatcacatttaaagagagcaagacctggtattccgcattctggaaattctggacagcccccctgtacctgttgaactcgtagtcttcagcgccgaagtatttcaccgtttcatatgactggatggagtcgttcttaactgcatcttcctctcggtcggcgttgatcatccgtctccgttgctccgcacgcatttgtgctagacggatagtcacgtaaaggtaccaaaaggtaacgatactgatagtcagagaatagtccatatcaaacaagatagtgaagtaggctatagcaatttctaagtccaagagcatatgggaggacccgggaaaggaaacttggttccaggaaaagttgttgattgcaagctccctttaccta

SEQ ID NO: 74074 - DNA, 378 bp, Arabidopsis thaliana landsberg
tggaatatcggtcaagcgacttaatcataacatcgtctctgaacacgtcgatggatgggttcatggttcgggcacagcaacaggcctggctcatgaaactccggttgaggggcctcacagtcaatctaacgctgcgggggaagcagaggagtaaagaggcaatgatattggcatggaccaatataagacttcgctcaagcgatcataaacctgagaccgagcgtggaaaggaagcttaaagatgatatcaccctcatactaagctcttgagctgacagaagcattaggggaggaaacagatcaggagatggtacctcacgagcctgaagaaaaggctacaccggccgcagcttcgacactggaggcggcaaatagaga

SEQ ID NO: 74075 - DNA, 513 bp, Arabidopsis thaliana landsberg
  unsure (1)..(513): unsure at all n locations
ggaccaacgcacacgttgatggggaccaaatggctgttaatgggccctaattcttaaatgcttaagcagcggcccgccaactcatgagccttcaaatgaataccatatctccagctgctgaagaacccaaaacggaaccgacgcacgatatgcttactggactgtctgaattaacgagcggaactggctgaggcatgcgtgcaaacagaggtaaggcacgtgctcgaaacaactatgaagacgaaagaagttacaacacaaactatgagtttacgaaagaaccctcttggtgcggccactctgacgcaaatggagctatatggacagaaaaaaaacaacgtagatagtgcttgggggctatcggggcaaacagatcaacacgttattggctcaagagaagaaacgatcacagctcactctgaatggttaggtaactatcnnnnnnnnnnnnnnnnnnnngtaatagtacgaagtgtgaaaaaagaaacattttgtatatatatgcgaaccaca

SEQ ID NO: 74076 - DNA, 630 bp, Arabidopsis thaliana landsberg
acaccagataaatctagaattaccagcaaaatcagcctacattctacagcttctgagaacatctaagttatcgtcatcgtgtgagaacttctaagaaaagcagagttctacttacactaatatgattagtagctgaccctttcataacagttcaagcatatcaactcgaaaagaggcaagcatcttgtaaaaataagatgcacttgatcccaaacttaagttctcttcaggtcgtcttccccaaaaaacttctaaggttttgagtaatttactgtatagcttcataaagaacatgcttcacttattactgcttccattcagaacattcttcacttactacttgcttccaaacaaaacattcttcacttattacttgctttcaaacaaaatattcttcacttaatactttctttcaaataaaacatgcttcacatataacttgctttcaaacaaaacattctttgatttgaaatgacccttaatatccttaagttaagaattttttcatgaggccttcattaaatgtggggcttggtcttgtttaaacttaagccacataccccttgggaaatagtggaatgttaattactttgaaaaaagactcctaacaaaaggtctgaataatcgaga

SEQ ID NO: 74077 - DNA, 265 bp, Arabidopsis thaliana landsberg
accgaacccccacgcggaaaccaaccaccccacccacagagaaagaaaaggcacacgaccacacacaccgactgaaccacgaccatccacgaccccatcactgaaccaaccacacaccctagaggaatgcaacggtaaaacgccgcccaaaacgacgcggtagaaagcaacgcacgacctgaattgaaggacaccacccgccgtggaaccttccacccgccacctttattcctacaataggaacacaggcgcgcccggcccgaca

SEQ ID NO: 74078 - DNA, 515 bp, Arabidopsis thaliana landsberg
  unsure (1)..(515): unsure at all n locations
ccggtaagagtatcgtcgctacctttaaagaacaacaacggaaaatatggaaaaggcccatatcaatatcattttaaaacagaagtttctaccgataccgctcccttaagcggctttggcaaccccataaaaccggttggattgatatgctccattttccgtcccagtgacgatgcgactatctatccgttcctgataccatccaactactttgcagtaaccagcctttaccaaatggccgaaatgtatgagcgtatcgggaaggatacagcgaccgcagcaacctgtaaaacgctggcggccgaagttgcacatgccctgcaaaagtatgccacagnnnnnnnnnnnnnnnnnnnnnnnnnnnnnnnnnnnnnngtagacgggttcggtaaccaattatttatggacgatagtaacgtgccgagcctgctggctttaccctatttaaatgcgctcgcaacccacgatccgctttatcaaaacacaaagagaatgatcttaagttcagccaatcc

SEQ ID NO: 74079 - DNA, 103 bp, Arabidopsis thaliana landsberg
ccttcctattagtttgtcctgtcagatagaaagaaaattataccccaaagataatatttcccggtgggggtgaagggtggggggggatggctttaattaaaaa

SEQ ID NO: 74080 - DNA, 511 bp, Arabidopsis thaliana landsberg
cgggtcgggtataaaactttataaatgccctcacaatcttgtcttggtcgcttcgcaatttttttcttttttttgttattactttttttttcctccgatttgagagtttgcttacctcggaacttctctccgacatcgtaccgtctcgtccgattgagctggtttaccttctccggcgaagcttacttgtaccctcaattagggtttcaagaaagaacccttcaatccaacaatctcgtatcagtgaatggtatcgtatcgacttcttcaattttatccaatgctttgattgcaactcagcttaactcgaaaattgatcaatggggtttcgatttggttgtgattttaaagccaaattgagactcttttgatgaagtttcagataaagaagttagctttttttgtttccaggtccgtttaggttggcttgtaattgcgtagttatttttgtctcttttgaaggttttgattgagttttaatggttggggatttgggaaggacaattgcctt

SEQ ID NO: 74081 - DNA, 559 bp, Arabidopsis thaliana landsberg
  unsure (1)..(559): unsure at all n locations
taacaattatgcggtgaaacttcttaggcttcaaataccagtatttaaaaaaaatagtcttcacacataatttagaacgtttataacataggtttttctagacaaaactttaggcttggtattgttttctctgcaggaaaaatgaggcagattttatcacaaaaatcgcgaaagatatattggccaaactcaatggtacaccgtcaaatgattttgaaaacataattggaattgaatcccatatggagaaaatggttcaattattatgtttaaacgatgatgacgttaggatggttngggatttggggtcccgctggtattgggtagaccaccatcgcaagggttttacacagccgcttttctggtgacttccgctttactgttttcatggagaacgttaggggaaactatcaaagaattgtcgatagtggcggcgaatacaacttacaggctcgtttacaaaaagagcttttgtccataatattcaaccaaaaagataggacgattaattatctatggaagatagaagaaaggctaaagaagccaaaagttctcattg

SEQ ID NO: 74082 - DNA, 507 bp, Arabidopsis thaliana landsberg
ccccattgtcgcggacctggaagatataaaagcagctgtggcaggcactgaaataaacagttcagtggccgcgcgcatcgttgcgcaccttactttcagaaccgcacatgtgcgctccactatggcgcaaggggcgatgctagtcctagaccacgtggccgattatgttggcaacaacgaccgaatgcgcgaagaattgggagttgatagaactcattctgggaaagtcgaatcaggattgattgaccaagtgctgtcgtcggcacccatcgaaatgctgtcgttaccgcctgaactcgccaagcgggttatcacgttctttgtccgagaacggtttgatgaactgtacgagcaaaccaagccgcaattagctcaagcaatgtccattttcgggcaaggcatttccaagttgattcaggatgcacataaaaaggtcctatcgaactcggacctgagcgggcgggagcatgccttggcgacgctttcatggaggacgcaaagtgtatc

SEQ ID NO: 74083 - DNA, 579 bp, Arabidopsis thaliana landsberg
cgctggcccggaacggcatgtaccagtttttcgccgcttaccgcaatttagatctcaactaccagaagttctacaaaacgctggcggaaaaccaggcctacggcatcgtgcgcgggttgatgaagacgccgcgttcgacgttcgtcagcagcgacccgaaagatctcacgcgcatcgtgcgcaatcccggcacgccgcaaaagctcaacgtggtgctgatcacggtggaaagcctgtcggccaagtacatgacgcgcttcggcgacaagctgcacctgacgccgttcctcgacaagctggccgacaacagcctgtttttcgaccacatgtacgccaacggcacgcgcacggtgcgcgggctggaagcggtcacgctgtcggtgccgcccacgccgggcaattcgctcatccaccagaagcacaacgaggatttgttctcgctgggcaagattttcgacaaccacggctacgtcagcgaattcgtgtacgggcgctacggccagttcgacaacatgaacgagttcttcggcagtaatggctacatcgacattgaccgccgcgacattccgccgacgatga

SEQ ID NO: 74084 - DNA, 486 bp, Arabidopsis thaliana landsberg
cccttcacggctcccgcgatggagcggccggaggcgtactcattagccggaagtacgcctcttcggtgggggggtttttcagcgcggtgccctcggcgatgccgaagcggatggcgccgatcgggccggtgccctgcgtggtgaggctggccgagcggtcgcccgtctgggcgaccacgagcttcgtcggcaggccggtgacggtggcctgcgcgcgctgggcctcgtcgagcgtgccgtcgagctgcgtcgtccctgcgacgtacgtgccggtgagcgaggcgatgggcgcgctcgagccgaaggtgagcgtgcgctgcccgtcgtcggtgggcgtgaacgcgacgctggtcgacgtcggcagctggtcgatcgtgccggtgaagcgctggacgtcgggaccgtcgtcgttggcgacgtcgacgtcgagcttcgtgggcgagctctgggcgagctgcccggagaacccgtcgccgatcgagatcg

SEQ ID NO: 74085 - DNA, 520 bp, Arabidopsis thaliana landsberg
  unsure (1)..(520): unsure at all n locations
agacatctcatattttcaatattaatggaaaattgtattatattacatcattgttgcagtttgttctctcttttgaaaactattatgttaaacattgtgacaaatatactcatgtttataaaacattgtcatatgtcatatttttatataacatctacaaattcagttaaaaagaattcaaaaaaaaagaagagagattgaacatttccttatataacgtttacaactttatattgcgacaaatatttaacacaaatcaaggtcaaatacgttaaatttgatgaaagtttgtgtctcatattttaacaaagctagtgatcgatccattctaaaattggagtttaactaatcacattatcacaagatttgcatcttttttttcttacaaattttgtcacgatagaaaggaagaataacaataaattcataagcaaaactaacaattaacctcaaaaactatgattnttacttgtacaaaaattaagttgactcacaaatcgcccctttttttaactctagc

SEQ ID NO: 74086 - DNA, 587 bp, Arabidopsis thaliana landsberg
gttattaactttacttaaaagtacgtatactttatccacaatcacaaaaaatagcggtgaattagaaaataagaaaaatggtatcgttagtagagtactcacgaatcacgattgtcaaatgtcaatttgtcatgattgcacaaactaagagcaagacatatgagttaggatacttaaaaacctcgtagctcaaatctttcaaactatatagtgtgttgatgactgtataagtctccacataaatggagttggtttcgtctatttaatctatttttacatcactctactatttacctaacttacaataattaccaatctttcttcttttatgccatttacttgctgctatagaaacttctttgtttgaaatacaatcagctaactccttcttctcttgattctttcttcttcctatttctatgattatgtacttttatccatttaatattgatttattttctcattgatttcctataaataccatgggagacgtgtttctcattccttgtgaatgtaattttatttatctcgaatcttcaaaatcccaactataccaataaacgagttctatacttctgtcttcttct

SEQ ID NO: 74087 - DNA, 655 bp, Arabidopsis thaliana landsberg
gaccctataatccattttttgactaaacaacgtaattactatttaaatgaattaaactaatctggtttaaagactgtttaaaattaagtacatgataaacgtggcctgtatgaaacttttgactagtgaatataattaggaatgcgtacaaactttaaaatattgagagacacataacaccaaaagtgtgtcggcacaatcatctcaaactagaaaatcttattattattactgatgttttgtaaaaaaaaatacaaatacgatgacagcttggaaacatcggacggtcgataaaatcatcctcgtactgtcggtgaatctagacagttgaaattatgggctccacttttcattaagatcacggaagcttgatctctccacaactcacgtgactcacgtgaataaaaacatgctacgtatctacctctttcaaatttacaagtactaacacagccactgttcgaatcatcataatgtcttttttatatcactgtagttgatagttgtgtatatatgtatacagtatacttgcataattctccgagcaagattataagatttaacaaatttcgtttcaaataattttcaaccataaatattttaataatctccttaatcgctgaaataaataaaatacgactccgggcatcgtcat

SEQ ID NO: 74088 - DNA, 248 bp, Arabidopsis thaliana landsberg
  unsure (1)..(248): unsure at all n locations
gggaactaaccgagccatttgcagataagaacatattctttagcanacacaaggaggcnganaccancngcggagagcgngggaannccaaccccgagaccccncaaccaancnacaagcacngcccgacagacagaagnaccgcaggagacaaagncgacgnccccaacaccaagggacccccgcacaganggcaganccaaaaacancnccacgancgagaaaccggagcacaaacaccccacgca

SEQ ID NO: 74089 - DNA, 467 bp, Arabidopsis thaliana landsberg
ggaagccctgtttggagtgtgatgttagtccctaataggctggaatacaaaccaagcggctgggtggcatataggtagactggggagggatcgcacttacctctctgctttttcatgaattctccacgccgtacgaatgcgagtgcgagtggtgcatcgcgtcccacgtgaagttttgcatggtgacgttgttattgttgacaggagtccaaccgccaaaggcaatgttgtcgccgggtgaagtggaggaggaagaagaatgggtatggtgatgggcggcggacatcggatgatgatcaaacatggccgtctgcggatgaaaggatacgacgttagtggcgtgacaaaaggaggacgtatgatggggaggaggatgatgaggatggttgacgttgattctgatggcgacagcataagccggtaggataccacccctgtcctaagcggtacatgacggaagggcgtgg

SEQ ID NO: 74090 - DNA, 1190 bp, Arabidopsis thaliana landsberg
cgagcacttacttagaatcgctaatagcttcagattgaaccgttttttcgacctcatctatgtaacttggatcaccaggaagctgagcccgtcgagaccattgttgttcttgctgctgctgttgttgttgttgttgctgctgcagttgctgttgctgttgaatctgctggggataacctcgctgaacgtactgctgagcatcagattgagactggagatactgaggaggctgaggttgctgtggaaacggagtccgtgactgaaggtactgttgaggctgaggtggattcggattccgtgactgaaaattaggatccggaccaggacccgccgcaccaatccccggtggaaatcttcctctattattattattattattcatctcgatctcgaaacagagaactctaattctaccaagaaatcttcacaagctcacaaatcgtaaatctaagaagaggctataaacaacaatctggagaatgttaggtcacacgtagctttgtaagagatgattgattgattgattgattggactctctctctcgggggagggcaagatcggaatatgctaacaattatccacaaaaccgtttccgccagaaactaatcgagcttagctaagatgaataattttcttttgtcgtctggttggttagtgagaaagtgaaagatacatacactcgccggagtcgttgttgttgtttaggtcgtcaagtggattttcattacacagacaggctcttcttcagtttcactcactcttatccacatttatttcactaaattagccttgtacgttcgtataattatgaaataacccccacatttctttgtatttatcattattctctcgtaatttttaaaaatagatcttcggatcttccgcaaacagagcgtacggctgaaaacgtcgatacccttcattgtgctcggagtctaaaattgtaaaattgaaattagaattttgatgatcgacaatgattgaatggcttctcctctttcgaatctctaccgctagaaaccaaaattaccacaaattctcatttcttcaagaatttttgataaataagacagagaacttgagagatgaaaagaaaaaaacacaaaacctggtgttttttctctcgtcgtcgtttggtcgtgtcctaagacaagaaccggcgaacgaagaacaaactttttgaatctaa

SEQ ID NO: 74091 - DNA, 211 bp, Arabidopsis thaliana landsberg
gggggcagaggggatctaggggatgttttggttgttattcgcggcttatctccagccacccatcttcaggtgcattgggagcagtcctacaagcaatattcacttttctccttgggataacagcgatcacagtggtgaattccatacgtggggaagagactggccacacacgtgctacccttacgctagaatttctcggaggaagctatga

SEQ ID NO: 74092 - DNA, 227 bp, Arabidopsis thaliana landsberg
gggggaacgatcttgattatcatcaacgtgtctgtcgcgttcggaggctgatgggaaatcgagtgatcgtgagacgctcatctgatattgtctagtgccacccatgttcaggtgcattaggagcaggccgacatgaaacatacactgatctccttggtataacagcactcacaatggcgaagaccattggtggagaagagactgttcacaaactagctgccctttgg

SEQ ID NO: 74093 - DNA, 291 bp, Arabidopsis thaliana landsberg
atgcatggctttctcctggctgctgcgttatatcttcttagtttttccgcccagaatagggaatgctccgggaaaaggtgagaggccgcggatcaggttgtggatatgggtggtggtgttttgccagtctatactgtaggtttctgtctaaattctaggaccatgtttcacaggtatgttgccggagataagacccgactgtacttttgcctgcccactagcattgacaaggccgtgcactgatcgtaccagcatcgcggcgcctattgttatcatacgggcgtgtacttc

SEQ ID NO: 74094 - DNA, 493 bp, Arabidopsis thaliana landsberg
  unsure (1)..(493): unsure at all n locations
caataacattggaatatgaatttacagactcaatatttttattattaatgtatcagagctatccagcgtggcgggaaccaccaacaatggtctcacttccgtattttttatagtcccgtctgcacattcaaacgcaataatatttccagacgcgtctttgataactttggcctgtgaaaatacattcgaccataaaaccgaaaatagcgttagtataaggaggattctctttttcatacgactttgttttttgttattggttgaacaaatttacggaagccttttaaaaagatcaactaaaaaccttagttaaaattgaacagaccgcctcatcgcacgaagaaaaacaaatgcgtttgaaatttaaaaagagatcaaaatgggggtttttacgcatgtctttgagcaataaacaacctaagactgaacactgctgttattccagcaccgttattaagaagctaagacaaaagacaaggcatnaaaaaagagc

SEQ ID NO: 74095 - DNA, 485 bp, Arabidopsis thaliana landsberg
cgcaagcagcgaaacttaggaggtcagcagctactaaagagtaagaacttgttcaatgtgagtatgcatacattattagttctacattgattgcttagtgagcgtagagttcatgaaattcagaaatatgattgattgcttagtgagtgtagagatcatgaaattcagaaatatgattgattgctttgtgagtgtagagttcatgaaattcagaaatatgatgcaacagttagttagctttaaacatgaatactatctggtagcagatattcctactaaagcactgcatcatcatggtgtagtattggtgtgtgtgtgtatttgttaattctcattttgaaattttagatctggagcagcatcacaaagaaatcaagctttcatacgatatgtatgggaagggtctgcttgcttcgaaggtagcttagtttgtgtgctcaagcttcttctttttttccgtctaaaactccttaatcgagatgtgc

SEQ ID NO: 74096 - DNA, 521 bp, Arabidopsis thaliana landsberg
acttttccagagggagactgtctgtcccactcgggattttgttggagcggctgtgagattggttaaacagggcgagtgtatccgtactttgtccgaagacagcctgatgccctcccaacctgtacttcgctcggtacctgctgggtatgtatccgagatggctcgttgcacaatgtcttagacagtgccgtgaaacattgtatttccagggatatctacacatgttcgatacatccacgcactcccgagaatctcctgcaagggcatcgaagggagcgcgcaaacggcagaaggatgtcgggaagtgagcattttctaggcgaagagacgccatggattgaaaaggggttgaccgggtacctcgggcagctaataggtgggcttggtccctgtttctcgtaatcttgtcgtatgcgcattccgcactgtggcacacgacagtcaatgcatcagccgccaatgggggagcgccgatcccttggagggtctgccccgatgccgcgagcgacaacaccaagcac

SEQ ID NO: 74097 - DNA, 573 bp, Arabidopsis thaliana landsberg
tatttgtttaccagggacaaccgcgtagccttttgtagaagtattatatttattagcttcaacattaaccgcagactgtaacgcttcagcatttacaccgattgcactggctactaagctagtaaggcttgtctgaatcgtgcttgttgagttagccattatctcaccattctggaagtcttaaaggcttgcttctcgaacgcttcagtagagccgttgtcattttcgtctacagttacttgtaatgagccaatcgtagctttataccggtcttcgtaatgctttgatttagccatccaatgatcagtaggattatcactgtaattaaagaaaattcgagacaatgcataaaaggtagccgcttgtcttacctcttcaatgtctagtaagtcccaaggtgtaatattttgccagttaccacttgaatctactttaatgtatgctttcttacgtaagtcctgaataatttgattacgagtagcaacgtgggttttaatgtgcgacgattcgccagcccgtataaatcttgaatcaaatgacctgcggaattccgtctgaggtcatagtcatcag

SEQ ID NO: 74098 - DNA, 580 bp, Arabidopsis thaliana landsberg
  unsure (1)..(580): unsure at all n locations
tgtccttttctctatgttcgattctctcgctgccaataggatgcaatttttttagttattaaatagatgaaaagctagggatgattggttgtttccaaatcgtttgcaaacctgcaaccatttctaaacgctatagttttatacatgtgtgatacgagaatacaaaccgttttagcattttataacattttaattcgttttaaattttatgctcattctttcaagcatttgtgtgttagtaattaacaaaatttacaaaaatatcaaaatatactatttgtaacgaaaatttaatattttctatatatataatattatgatatcaaaatcttgtatatttgatatatgtaataagagaagagatctatacataaaaaatgtttcacgcttatttaaaatatattttaataatttatactactatgtatttagcataaaatntcagcctttcataatatatgttttggtttctatttttataaaagaaatattggatttattntagtaattttatgactatcagttatgatattatttatcaatcaattaaaaatgttatgcaattatatatataatagat

SEQ ID NO: 74099 - DNA, 481 bp, Arabidopsis thaliana landsberg
aagtcctcgtcgatctcgcccgtctcggtgaccgtgcggattttgttttagatgtcgttgagcgcttcctcgccgccgtctcggcgatcggtccacccgacgatcaggacgcggtcgcggacgacgatctgggggctctccgagatgttcgcccccttgatgtcgccgttgtcgagccggacctcggcgtcgccctcctcgatcgcggtcttcccggcgacgacgcgccggtagtagatgtcgtaggcgccgtcgcggttgtcctgccagacgacgtggccgacgtcgccctcgcaggcgaccttcgcgttgaagctctcggccgagccggcggggtcggtctcgacgcggcgggcggcgccgaaccaggaagcgccggcatcgccggagtactgcaggaagatgtcgcgggcgtcgccggcgcgcgtgtcgtgccacacgacgtacacgttcggaccgtcggcgcagatgtccggggaga

SEQ ID NO: 74100 - DNA, 599 bp, Arabidopsis thaliana landsberg
  unsure (1)..(599): unsure at all n locations
tggatgccgaatcgaatctagatatagcatccaaattatacgaacgatgggaggttaaacatcacaaaacatatgttaaagaattcatagattcattaaatttgtaagaagaatttaataaagctttcaagaatctaacgctagcaagttaattattcatgagaaactaggtaattttaatttatagagagactcttagcgtttagtatgtgaggcatgaaataatttggaaagaacgaatagatttgggaaagatcgtgaaaatgtgaataaatcaacttttacttttccaattataaatattgttagattatgatcctttgattagtgtaggtacttttataagatgctggtaacttggatacatgtttctcgaatgaatgatttgtgaaattagtgcataggcttaggaattagaatcaacttttcgtacatgtgattatttgatggaccaccaatatattataacaaagcaaacttaggaccatccaaccatccaatcaatatcaactaaaatgtacatacatagctacatcaatatctatatttatgtgtgtatttgcanatactcaataacatgtgcatttctagagagccta

SEQ ID NO: 74101 - DNA, 8235 bp, Arabidopsis thaliana landsberg
  unsure (1)..(8235): unsure at all n locations
acaaagaataaatacctcagggttcacaaactgatcaagtgtgtttccgtatctctcagcaaataaagatctgaggtcgcgtagctcagggacttcagagactctagcggctgcatatacaagggaggagatggcctcgcggcactcatcagggcaccggctgctcaagcaaaacccaatatttatttagatgaatggaatccatgcaagtaaattaaacaagtttagggttagtttttacatggatttctgtaatagagagacattggatgcaacacagttgcagaattgctccaaaaactcataacaagccagcctccttttctcctctataagcccttctgcctgtcacacaaacacatgccatcagaaccatctctctatgtacttactcatgtgacttataacttaaaacaggggccaagaatttcttaagcaacaattcactctgttataaccagctggtgacagcatcagaatgaaatatatctatttctttttttttgcattgcttccatctatacccaaaatagaaccaattaacaaagatttaccgaaaccatcgtacgttgaccctctttcagaaaagaaaaacaaaagaaaaaataatcattctgatggaaatgtaattgctttcacgttcggaaaaccaataagatcccgtgattcattaagtcgatagaggacatgaataacgtgtctataactccaaacaaacaaaaaagacgcaatagaggctgccatatgcatgtaataaatgggggtaaaagaaaatgatattaccctgccatatgcattgtaatcgaggctgttcttgagaagatcgacaatgtcgttcttgagatatttgcaaaccgagtttttcttcctcttcaccgtgtctactcttgtcttcgttatcttgaccaacgacttgctgagaaatataattaaaaacaatcaacgaatgaaaccaggaaaacggaaaataagcagagacttaccatttcgtataaaacttgggtttgaacagcccatcaaacattttgcctttcgaaaaaaaaacagacaaggttgtcttcttcttcttcttctttttgtttttttgttttgttgttttttttttgggggttttgttatctctctctctttcttcgtgcaagagaaagagagagacagagagaagaaatgtggtccttttgagaaagatggcgctttaaggtaagggaagggcttttataaggaagagagaggaggtaatgaaaaagaagagaagcgaccttggcttggctcggtcttacatgagatctgaagaaacggacttgtatcgcaagaaaaccatggaaccctgtctccccgcttttttatccacctctctttctctctctctacgtacatgtacatgtattgatttagagctgtaattactaaaacagggtggagtttccgcacgataagggtgttgactagggtttgtttcggtattcaattcttattttttccgttaaaactctttgttatttcgcaagtgagtcagtgatgatgacgaatcaattcaatcattatgttctctcatatatatggtttacttcaattccatcatctcattcattcattcattcaaaacatgtgaccattttatttgaaattgttaattgttatatataaccatggatggacacaagtgttggagaaccccaattgggcccataataaaagccaagcccatatgacaaggtatgcctgtacatctttagggggtttatatgtctctgatgagtacaacaaaatctgaatatggttgatgagcttgaattatatattgtcttaattccttcgaaaacataagtaaatcatttggtaacttgacgtctctctactcaacctttttttttgttggcgttcttgtctctttgtatagaaaaagatgttcatatgtttgtgtactctacgttacttcttcttcttcttcatgtgacgatgatggggattacgtgcaccccttcttccttaaacaaaatccattagggagttactttttgttttgatagtgtagttgtagtggagcactgagagttatcaaatgaatgaggatctcttgaataataaagaattggagtgtggaattaggatggatctaatttcattaattaaagaggagcatgattatcattttttgttaatttaatttaataatggttaatgtgaaaaacagaggaaactagaagaagagagttttggcaggagatgtaggtggcgggagtgggttgggcgagagagatgatggtgacggtgcagctccaaatcttctctaatcttttgacacttttctataaaactccccaaactgattctctctgactgcctcataagtcattataatagtttcccccggattgctttttctttctttttgctaatcatcatcggtttcttctaatcaaaaaaaaaaaacaaaaaaaaaagagggacaacgttcgtacaatcccatccttggtatggatttctggccggagtttatggcgaccagctggggaagagagttcgtcgccggtggtttcggtggcgtcgccggcatcatctccggctaccccttggacaccctcagaattcgccagcaacagagctcgaaatctggatctgccttctccattctccggcggatgctcgccgttgagggtcccacctctctctacagaggcatggctgcgcctttggcctccgtcacttttcaggttctttttcaaagattcaccttacttttgatcacgtcgcaggaatatataaaaagattcccctactttttgatcacatctcaggatattattccataaagcaaacgaaaagatgctttcttgattcacctcttttgtgtaagatcattcatttcattactctcatacagtattatattgttgcagaatgctatggtattccagatatacgccatattctctcgctcttttgattcctctgttcctctggtagagcctccttcctacagaggcgttgctcttggtggtgttgccaccggtgctgttcagagcctcttgctcacccctgtcgagctcatcaagattcgtctccagcttcagcagactaagtccggtcccatcaccttggccaagagcatccttaggagacagggccttcaggggctttacagaggcctcaccatcaccgtgctccgagatgctcccgctcatggcctctacttctggacctatgagtacgtcagagaaaggcttcaccccggctgcagaaagaccggacaagaaaacctcaggaccatgctcgtggctggtggccttgctggagtggccagctgggtcgcttgttatcctcttgatgtcgtcaagaccagactccaacaaggtcatggggcttacgagggcattgccgattgttttcgcaagagcgtcaaacaggaaggctatacggttctctggcgtggcctcgggactgcagttgccagggcctttgtggtcaacggtgctatctttgctgcttatgaggtcgccttgcggtgtctattcaatcaatcgccatccccagatattgtcacaggagattgagtgagtaaagggcaaagaaggttcattagttgcagtctggacctgtgaatgtagttaatattagcacatagtttgagatggatttggattgcatagcattggtcaaacaaatctgactcgctttagggatcaggcagtttactaatcacagttgatcatagagacgttccagaaatgattacaaaccccaaagaaaacagatgaaatgaaaattctgttactatatacttctctctccacttctttgctaatggtttttgtagatactcaaaataagagtgccaaggaagtcctccaacatgttcccatagacacggtcactaatgctgattggtttcggatgaattttcaacatttttatgtttaaagaattggtgcaacagtctgtgaacatctccatagcctttggtggaataaataagacgatctttgatccactttgggagcttgttggatggatgagaatgagatgttcttttggatggatcattagaatatcgagcatctaccagtaaaatggatgcatagtccttttcgtgtctgattgccctacctgaaaaacaagccgggaagaacattctgtttcagtcccattatcaattaataaaacacaacctccacttatatcgtcacatatagttgaaaccacaaactcaccgattgattggttaactgctttcatacacagattttcatagtattctttccctctccttttgcagctctttaacacgccaaatcctgcttgaacatctccactgtagtaagaatcatcaaccaaagtcacagaaggttttatggaatctgaatctgcacgaccttctatatgctttattctctctaacaactctatgtcagacgggctgggatacggcaaaccaaccatcacaacacaccgacacatgctgtcgctgaagttgattccttctgacaccttcccaccaaccacagctagcattattgcccctctttcgctttctatcacttccttgtagtctctgagaacagcttctacttcagtgtttttcctgggttctctgaacacacgcttcttcttcactattcttctgagtatccctgagttactccacgctgtgtgcacctgtgtttcatactcaaaggaggagaagaagacgataattccttcaggaaccactgccacaaggttgctcattaagagtcctaactcctgtatctgccaaccatacccagaaagtcaaaatcataggttactctcagtactctttctgaatcccattaatgttaaaggaaagaaacatatgagaaaacgagcgtcatttggattactcaccattcctattgagcttcttgaactgtggctaaagtcaaaagactgaccagaaggaccatgtgaaactgcaattggcattatgctctcaggaggaacaatgtgactacatgagaagaactgcagctgatttgatggtagccatggaaagagtcgttcccttgtctcttctataggttgaagagtcccaccggccaatatgacagcatgcgcttcatccaccacctacaaattggtttgattaactattacattgttgaactcagagataaagaaactcatgtatgaaagggccaacctctgaaaataacttcgctccagtgagcatgacatatttaatgtaccctccatgttggccagaggtagacgaactcgtccttgagattattatccgcccatcaccattgttattagtgagcgccaccaacatatcagaaaacgctctaaaacttgttaacttgctcatttcttcatgagccactggatctttctgcaacatagcagcgactctctctccatatccactgacctggacgcacagttgactagcaaagttaaaaaaagggaaatggacaggagaaaaatgttggacaagcgaaaggggaaaatattaagaaccaattcaccttatgaatgatattgctttcctttatataggcgagtaacttgaccaaatttatattgtctatattgagagaaaacaaaaagtcatatattgccattgaacaagcaccacaaggcttgcttttagaggggttttcagtatcaagaccaacatttacgctactcagattcctatcactagcaagaggtttgaggaaagctcgggtaagaatcaacataatttggatatatctcctgtttccagctcccaagagattctggaatcttcccagataactctctatgctgcaatgtatatcctccaactgcaatacaaatcatttaaaaacatgactccacgtatggcctgacacagagaacccaatagcaatgcaaaagtccatccaaacaacatgtgctcagaaagctgatgaaactgaaatttatacctgtgacactgttagttttgcatcgtgcatactgagaagagtgtcagccaaattgtgagcctcgtctatgataacaacactatttttcaagcttaggccaagagattctcgtgacgactttgatagaagagattgatatggaagaataacaagatcagctgccggggccattcttctagaaccgtagtatggacaagttctcatctctcgtccaagctgaacaagatcctcaatgtccatggcttcttgttgaaaactctcagccttgaattctctctgtagtttatgttttctaagcattgggcatctgcaagaagctttggttcgtactattcttacatttgcacctaaattctgaaatgttgaagcttccattaggtagcaaaaatcttacttttactctacttagctaaatgaccattaacaatgacgaaacaagcagatattcatttaatttggaagctttgattcagaattcagaggctaccagcaatgcaagacggaacacacttttatatatagataaatcatctcataaaacaagttgataaagtgtaccttctttttagagacttgagatatcttcttcttttgcaagtccaagcacctctcgttaattcgggtcacattcccaagcttaagaacatctgtacatgagctatggtaagtgtaagtaaatacgaagcaaacaatgaaaaagaacaaggagaaatggtggggcaccttcgtttatgcacaagttctttcgggagccgagacacacaactttgagttttttggcaaagacagtctttctcaactccttgacaaactgggaaagctgtgaatgtgtgcggctgcaaaagaaaaccttgaagcctccttgttcgtcatccgagcagtcattctcatcttcctcatcctctgatgaactactgtcaaaacctcgggcaggttttcttttagagttgcctccgcccggagatgattcatcttggctttcgtattcatccaacaaaaattcttgatcgtttagctcatcagccttttccccttccgtgaaaacttccttagcatgcttcctgagagaaaatggggatttggtgtttttgatgctcttgtcaccattggctccatctgcttcgttgagagtaaaattcctcatccaatcgggctcgtcctcatcatcgtttccatcaaccttatgggattcttcggtcaatcctgagtttcgtttctccttgcggtcagtaagccactggagagcactgcagataatgcttagagattttccagtccctaagagagagagaaagagagagagagatcaaaccctaagtgagtctacttacttactactgagtaataactgatccaatgtggaaaaaaaaatatatatatataccagtggggctttcgagcatggagacgcctcccttatcgagaaattgatagagcgcattcatgaaatcgatctggatcgnnnnnnnnnnnnnnnnnnnnnnnnnnnnntctcgtatctccgtcattgaggtcgtcacagtaagggaaatcagttccggtttggagggtttgatggcattttgccgccgatttcgaagaagacgagcctgtttggacgtaagaatactctattctataggggacattgaatagcccaaccactaagctcaaacgatagaaataaaagttaagcccaattaatagatgggcctatgtgacagaggtcaagccagcactgttaatgggcctattaatgtatgagatccaaccccttcaattcccctctctctctctcgtctcttcttcactctcgtcgtctcttcttcaattgcagctagagagccatggcctcctccttcaacgaagaaaccgccaagaagttgcttacccaggtctgtaatttatctatgcttccttcactctcatctctaatttccccgatttcattttcgtagcttcttttgctgatggttgaaggttgagttctacttcagtgacagtaatctacccacagacggatttctcaacagggaagtcaccaagagcaaagatggccgtatcctgtatacatatatattgttgtagcatacagatatagttgaaaagttattccttagatgcccgaaactagtggttagtttgcctctggtttgttccttctctcgtatgaggaacctccttggcctcggtaacatcaatagagaagacatccctccgaggattgtggaggaagttgctaatctcttgcgcacctctgattttcttaaagtttccaataatggtactagtgctttccctccctttggtttgtttgtcaattcttctggtgtgggatata

SEQ ID NO: 74102 - DNA, 463 bp, Arabidopsis thaliana landsberg
aatgtttttcttcactcttacatcatcaaagctcattttttttgctaataccaaagctatacctttaacatgactgttttgtctgtatatgtgcaaatgttttgtctgtcttctttgagaagttcactcatgaacaaagatgaagactttaaaaaaaattcttgagcatagctttaagatgaaacataaatggaagttaacattgctaataaaaggttgaagttatgtatccaacaacaacaacctcaagttctcaaaagcttaatttaaaaacaactctcatttgcaattgcattacatgcttagattgaagttatgacataagaaaaaaagttgagaagaaaattgcagatttaaagggacttagttcttctagctctgcttcaacagatgcttaatggactcgaagtcaggatcagatcagatcataccagcataccctgctgtatcgaaaagcactgct

SEQ ID NO: 74103 - DNA, 535 bp, Arabidopsis thaliana landsberg
  unsure (1)..(535): unsure at all n locations
ggccgatcacgatcgggaagcggaattccgaattggccagcgcatatttgttttcgttccgtgcattctggcggtagcccctcaggttgttgctgacggtctggaaaccgaatgtctcctggcctacaggtgtaggcgggctggcattctggtaattgagccagttgtcgacaccccccataaagtaaaggatcttttgtttgccgccgctgtgtgctgcggcgagccggaaggcccagatcaggttcttgtatattttgaagtaattccgcgcatcaaagccgaaattgtacacgcccccgcctttgtcgttcatctgcatcatatactcggcaaacaccttgtaacggaaaccattgcggatattggtcgtgannnnnnnnnnnnnnnnnnnnnnnnnnnnnnnccggctcatcgtccagtatttcctgctggacgggaaaataagggtaaaggtatcgatggctgtaaaattgagcaggtcctggcgcaggccaagctggaaacggaagctgcgcatacggtccagcgggta

SEQ ID NO: 74104 - DNA, 557 bp, Arabidopsis thaliana landsberg
gttagaatttttaaacgtgattttatacggacatctagatttgtttggatttcaatttaaattgttttttttggtttatatatttagttatttacatgttggttagtgttttattttatgtaagatattttcttacaatatctgtatatctatccacatctaatacatttagattttaaaatatcacatacggttaggatttgtattccaaataagtgggcatatacaaaggagtgggcatatagtattataccctataagtaataacaggtcatttaaaaatttgaatagcttattccaaattaatttcatccatagaaaaaaacctaattaatgtgacagctgagctgaccatatattgttttttttggcacaaccattgtgtttatataaatcttatgattttatttcaaacgtactataaggatttaggaaacgaacaaataaaatgggaaacggctcctcttttaatattgaccagccattctgtgtcctgttcaattatcgactagccatatttcccaaatttcctcattgtccattgatttcaattattt

SEQ ID NO: 74105 - DNA, 417 bp, Arabidopsis thaliana landsberg
  unsure (1)..(417): unsure at all n locations
caacagcgtccatttttgcagcctctaaaatgatatcttgaagagcatcacgagttggctgcaggcgnnnnnnnnnnnnnnnnnnnntggtttccagcagcttttcctcacgagttttgctctcaacacgaactgaagcagaaactttcacttgcttctccggaagcgtggccccaagatccaccagtcgtgttcttagacgttccgtagttaccatccttccccagcttaactggatcatatctactgaagttctcattctccatagttaatgatctgtggagattcggacctctgtagctgctgctgccattctcattcttctttggcaaatggccttgagcaaaattactgattccttgctttatagatgcacttccaatacccaccacctcactaaggaacgatttattttca

SEQ ID NO: 74106 - DNA, 450 bp, Arabidopsis thaliana landsberg
  unsure (1)..(450): unsure at all n locations
atccgaagcgcgcccccatgttctacgacgactgatttttgggcgtggcaagcgcgtgccctacgggcgcgcgagcactctggtcgccgcaagcgcgaggggaccgatggctttgaggccttccccttccatgtgcgaagcgctgcgcggcgctcagctcgcgcgccgtcagctggccctccacgatcgcgacatggcccactgcgtcctggggaatgaagaatgcgtggccggccatgggcacgcgcaagccctgtgcgtcggcatgggcctgcgctcgcagttcgagccagcagccggcgcgctcgcagacgcggctcaccacgcccgtgcacttgatgatctttccaaggtgcggctcggcgtccgccatgaccgccccgacctccagggtgctctccaagcacctncagtggacggccgaacgcgcgctccgcgctggctactgac

SEQ ID NO: 74107 - DNA, 190 bp, Arabidopsis thaliana landsberg
actattcctcgggaacagaacggactaagctgaatcatctgtcactaacatagcttaaagtgacaatgatggctctgtctttcattattccataaccattagagcctatagagccagattaatatcactgatcagtcacactaccgtggagaatgaaactatcagcttcttggcgagatccacgactcct

SEQ ID NO: 74108 - DNA, 472 bp, Arabidopsis thaliana landsberg
  unsure (1)..(472): unsure at all n locations
tgagcaaaaaacatattagaataaaggtagactaactttaacaaacgatttcctttataaacaaaatactcacttttctttaaaccaaaggacaataaaaatccaaaaaaaaactaaacataaactaacattttgagttttaatgcagaagactgaagaaatgacagctatttaatttaaacataaacaaaaaaaatagtcagcttattcacacactccatattaaaaacaaaaacgcggataaaatggtaaattcggcatgacaacacatccataatcagacaaaacaatccgaaagtgttcccctggcatcccacaggctcgccttcttgtttaattgaacagctgttttaatggcaatatcgtaaatttagtaataacgacgagcccagatttagtccgtattttaatttaaccactttgtcacccattagttagtagnnctctcatttttttttcttattattattat

SEQ ID NO: 74109 - DNA, 246 bp, Arabidopsis thaliana landsberg
aaggtggtggagtgaagaatgggattgttggaatgctggtgggaagattgaatgggaagcagtttgcttttgatatcgccaagatacctattcgagagcggttgttttgtgactccctcctgctgcataaaaaattgcccaggaccgttgtccttgaaaccaccttacttcgatgcaaaactcgctatcctgtaacagaaacgcactgtctaatgggtttccacctttttctacaagacaagacac

SEQ ID NO: 74110 - DNA, 611 bp, Arabidopsis thaliana landsberg
ggaccccattaatgcgagtttcttatctgaactcatctagatttttgcaatgatgtcaaaaagaccgagggtggggtgttccctacacgataagtaaatagacaagcaccccacgtaagatacagaaattgacaacattctcaactgcactgaattgataatccacaaatgataattcaatagctgctacatatccatttcaaaagactatttctcagtactaacaatagaattagtttctgaaaagtaagtacctcaagactgatacattcttctctttcgtgcataaactacaaaattcgatcaagaagtacacctattttttgaagaattaaaaacacatcagtctaactcacccaggaaacactatggttttggcaaagatatattgtatgcgtctatacaagattagctctagtttctttaaccaaatgcctgaattaaactgcaatcccttcaatgaattttgactatgaccaatgccttaatatctgaatacgcgtgcagacacaaatggttggaactctttatctaagaacctaaatgacggaccttgccaaatcaaaaacgtctcatgaattcactaaataacatttccatacatacttctg

SEQ ID NO: 74111 - DNA, 507 bp, Arabidopsis thaliana landsberg
ggaagtgcggaaagagcattgaatcccacacgtctcttattactcgagggtggcatgggcgctcgtaaggttatattggatcgaatcacgctacagtaccctgacacagcttgtcaattttgcgaacttcaaggccgcggtttctgagggagcgcttgcggaaagatgcgcctcatcgcgacctcatagcatcccgagataagcctgtgtgctgaaaagtattagactcaggtcagggtggtctctaaagtaacgcctaagcgatacgcgagtgtgaagcttcatccacgacgccaagaagtatagagcggatcaatgctgctggagcttgccccgcccagagtttaccaagctcgacgacgttcaacgaaagcaaaaaaccgaatggcaaaagacaccggtggtccccggcacgcagcagcaatgcgctgctccgtgctattcgctggggacgacacactcacttggttgaagctggttagcgaagacgacccgttgggcttttac

SEQ ID NO: 74112 - DNA, 608 bp, Arabidopsis thaliana landsberg
tagcttgaaagctagctgagactatgcaactaggaacataaccgaatacctccagataaaaatcatttatagaggcatacaaaagtgcacgatgctccccagagttctacgaattcaagcaaaatggagctatttacttataataacatagtgtgattgtatttttcttactaacataacgtatgatgaataacgttatttgtgtgctacaccttaatttggtgtagatcacatgggagtcctacatgtacgtatccctcggccctcgccagtggtttgaatttaaaagggaattatatcagggagacgtgaaagccaattcattcgtgaacaaaacatagaatgagtaaaaaacttgatctaagcatgatgaaaaatgagtctattgggcctgcctttactgcccacataaagcccgcgacaaaatcgaacgtccagctaaatgaaaaaagaagaattacttcttattgctaacatcatactgcattaactaatatgaattgatttctctaccactcactacaccgatatttacccagccggtgtgtgctccacgaaacccgtcggcgcaactcgactcgccgccgcttatagattcgatcatcatc

SEQ ID NO: 74113 - DNA, 651 bp, Arabidopsis thaliana landsberg
agatccgaatctgataccataaaccccaaagatccttatcaaaaattctgaaattggaaaatgcgcacattatccaaaaagcaggatcatacaaacataagcgaatgaataaaccatgcaataaaaaacgaagactaataatctccaagcttacctaagaaaactccaatgggtagatagatttagatcttgttgtctcgggtcaatccccggaaattattacccgttgaaaatttcaccggagaccggcatggagtcaaaaggtagagaaagaaagagagaagagagagagtggactgggaacagccagaaactgaaaaaatggtaaaaagagaagaagaagaagaagaaaggtagggttgggtaatataaacaagtgaagaagccaaacaagagacaagaagcttttgtattaatgtctcttccataaaacttttttaaaaataaaattaatagtgtctttcattctaatcctaaacttttagatatttacatttttccccaaaacatagattgtctaatttgcgaagaattgtggaacttgttttgatcaacaataaaagaaagaaaaaaaaaaaaaataaaaagagccaaagagattcggtagctcaaacttgtacgttcctttgattccagttgctgctgaataac

SEQ ID NO: 74114 - DNA, 1017 bp, Arabidopsis thaliana landsberg
tttatcaagcgtgaactctggccaaactgagtatcaaatggttagtgctgtttctgctttttcacaagtctcctgtttatagtgacttaccagggagttgtgcttagctttggtctccctttttagcaatcaggttgtagaactgtcccccatgaggctgaataaaagatgctggatatgcttccataatccgtcattaggggttttgggataagactagtccacagttcttttccgtcatgagtgactcaaccatcactagtctgccatagttgtacatgttacaggcagggtttgaaatttccatggcagattttgatcctgttggcagatgagaaacctcggtaaaacaaattctctgtgatccatgaagaacagtgcctgctctatctggacgtcttacctgtgtttgccgatacgattagaagagctatgattttcttcctatttgatggctctgccaagtgaagttatttccttgaagagaaacctgaccgatgttgcagcgggtttctctttctgccacccctgggttaaatttccagattgtcgtaacttaatttttgttgttgttaggctatcacagtcttacatccacatactgctctgttgtttaggcttgagccctgtttgtaaatttgaggaaaacagatagctcagctacacatgatgtttcagtatagtgagacgtcactgggatctcagttactaaatttacaagttctcacgaataagccatggatcttttaattttatcaagatttttgtttccttgtcatttcaattctttgcagtactttaacgatcagagaaagataaacaatagttatagatatcaaatgattgttttcttttcttgatccattatttatacaatggacaatgaggaagaagacaacagataacagagcgttccattaatgtttatgattcatatcaagcaacactgaaggacgtagcagcattctcaacgaacttcctagcttctacgaaccacctataggctcctgcttgagc

SEQ ID NO: 74115 - DNA, 592 bp, Arabidopsis thaliana landsberg
cagcaatgtcggggaggcagtgtacatgcaatatgtgatgtggatcgatggagtgattgtagatttgggtggggagattatagagtccacgacacgcatgatgataagaccaccaccatcatcatcaccattaccatcaccttccaaggatgatgatgttgccattacaagacctgagttttcacagaaggagatttcttttcttctcaagcttctctctcagttgatacaacattgatatctctgttttttcgttttcttttatcccaagtttctttttagggtttgattttcttattgatttaattattattctgggtgtattacccaatagttggaattgtaaataattataaatttatttctttttacaaggattaactttctcaaaagaaaatcagctattttttaattaatcgaaaaatttagaaaatatatacgtgattatcttttatataagcttttaagatatgtcacccaaaacaagctaagcccaagatggatctagactttgaaactctcatttagggcaaaaaaatgtttttaggttgtggtatggattttgaatcttttttttgaagcaaatattctt

SEQ ID NO: 74116 - DNA, 642 bp, Arabidopsis thaliana landsberg
cataacggcgtttctgtagttaatatcgataggaactaaactaacgcaagtcaaattttctgattaaaattagtcgttaatttcgcttaatggtataaagtatattttaagaaggaataaaatatgctaataagcccccacggtttccatttctggtaacaagaataccattcaacgtctcgatcagcagcaacgttgaatcgttgatatctatatataaaagtatagaaccaaggggtaatttggtcattccagttctaacccacttctattacaagagcagtttactacgtaaaaacgaccggccttccactttcccgaaaacagccagcgcccgcacgtagagatttactgcatattcagttttcagtaaataaatagtccacaaaattagtggccttgcgtgtaaaaaattaaatttcgagatgctgttgataaatgtatttattgcaaataagaaatcagatagcctttaatagttgacaaaaaatagccttttatatttacaagttcgtgtatttgttaataacgtgggattaatgagtttaatgtaatcgtgacaaaaacaaaagtgggattagggtaatcgtgtgaatgtggacacttcttcttcacggcaaaaggcacaagacgcaacaaata

SEQ ID NO: 74117 - DNA, 561 bp, Arabidopsis thaliana landsberg
acaggccaatccgttcatggcgcttgatccacccaccttgctttctatctccattgccctggctggcgcggccgggttgtacctggcgatcgagtggcgcagcgttcgcgattcatcgctgctgttctggagtgcaggctttgccaccatcacgattggttccaccctggccttgctgcgcggcatcggtctggtgctgatcggtatctggttcgccaacggtttgctggtggtggcgcactggttcttcctgatgggggtgttgcgcttcacccaggtgcggctgtcgcgtatctggttatcggtcgtgctggtgtggttcgccttgctgctgttgcctgtggggccgcagtggtcgaaggtaatgctgatggtcaactcgttgctggtggcgctgttgacgctcaaggccagctggctgttgcggccgcatggcaagttcgtgagtgttggcgccgtgcagatgcgctttgtgttgctggttatggggtgttctatgtggccaggcgaatattgcgatcacgccgggacgctgattgactggccactttcgggggctga

SEQ ID NO: 74118 - DNA, 596 bp, Arabidopsis thaliana landsberg
caaagagaacccttatttttgtcaaaccgtgtcgtgtaatattttataaatgatcgtatatagaagtttctagggatggcactaaattaattaagcagtagaatagatccaagaaatagtcttttataattggaatgttgaattcgacgtcagtcatataaaaatgatctgattctcgttgaagcatttgattgaacatattgcattgtgaatttatctttatttgatgacccttgttgttataaataatcttgcctttctttcttcttatagtctaaagctctattcttagacaaagattgtggttcatgcattctttctataattttttttttaatctttctatagtttatatcatgttgataaaaaaaaacctataaaacccaaaaccggtttaaaagtaaccgattaatttctttatggtgtcttggttttcgatatgctttagtaattttaaatgttttatatttgctgattttatagtgttaagttattttttatttactttaagttttaggtggcgaacactggcgtattgtgttcactttctcttggaaatgaacactgagaatcgtggatctctatgaacctttttt

SEQ ID NO: 74119 - DNA, 492 bp, Arabidopsis thaliana landsberg
  unsure (1)..(492): unsure at all n locations
aatacgaaatgaaaaaaaatgtatatagagataaacacaagaatatcgttaattataatctctttgcattattatttggtggatctaaatgtcgtatgtgcctatgtggcaattctatgttaaaaacaacaacaaaaaattggcttataatctcttttgttggtatggtattttcttacactttaatcattaacaaatcataaatatttacaattggtggtcgttgacaacgaatatacgtgaaaaatataaccacaaaacatttgaagttttgaacactcaaaaaagtaaaactcaacaaatttagagtattatcttaaaatcgtttttttttcgttaagggagttttcttaaaaccattcaaaagatctaatatagactatatatactaatttgctggtcaatttaatgccataatacatttccgtaactagtttgatagtgatggagactaaagacaccaactaatatctattaaacctanattttgac

SEQ ID NO: 74120 - DNA, 510 bp, Arabidopsis thaliana landsberg
  unsure (1)..(510): unsure at all n locations
aaaaccaattagatctcagaaaggaaaacataaaacttgtggttcaatggatttggtttactatgttaacaggaatttaacccacagttataataactggaattgaccagaatttaaccaacaaaatacaacttgatgaaaacaaacattttttcttttgcactctacgttcaaagttacaacatgcttcctcttgcgacttgtcttccaagcaacagtccactccatttggcttgaaagaaaccgtcgtcgacaactcgacatggacatctctcaaactcatcggatcacttaatcaagtctcttgaccgcacagtttgaaatacgatcctctcaatccggtaacttgatccccgcaatgatgagataataaccggttaagtataaccgaaccggagaagacatggacaagagaaaagaagaaccaaacttttatgtgctgttcgtttctccattcaaatcatctagttgaatggagatgaatattgatattcattnggagcaatttaa

SEQ ID NO: 74121 - DNA, 418 bp, Arabidopsis thaliana landsberg
gggggagtagtctggaagaagcaggtcccaactggatactcatgatggtttatagcacgcctcaacttggcgagttttttctccctatcaggcgaacccggaaaaggcttcacaaaatcgcaaagagcattatagtaatcatctacctccttttttagtagatctagggtaaaactttgcagttcgtcaaatgttaattctccaagtgtagaaggttgtagggagaatcctttagaatcaccaacttccttccaccttttatcaatcttataaaagcactcataaatactttcaacatattctagaagatcagcacaggaacgaccaagtccttcctacaaaacaaaggtttaaaatatcaatatgatctaatgataattacagaatctcaagagtttaatatatatatttaatcacc

SEQ ID NO: 74122 - DNA, 403 bp, Arabidopsis thaliana landsberg
gaaatttggttctgattccgtctaattttgaacagaatctctgtttatctattatgtgtttcaactgtttttgaatgattctttgaatcttgttttagctgtactgttcctgagaagaaaaagcttgaagatgagaatagcattgattcttctctggatgcttctcaacgcctcaagctcgtgagtgtccttttgatttatgatatttcaaagctcatttagaacaactgattcttagtttctcttaacttgtttaatacaagacttaacttgttgcggcgataaatcttttgaaatgaagaaggatctatcccctgatgtaaaattcaagagctctctgaagcaagaggtttgtatattgaacttatgtgtagctagctctctgtcttttagtcaagatcat

SEQ ID NO: 74123 - DNA, 606 bp, Arabidopsis thaliana landsberg
acgcccttgaacactggaaaagtttttttcagccggaaacttaaacgcttgcagatgaggctgcaaacagtgcgcctgcgggcccgtttatcagtgaatcctttgctccgcgatacagaatccggcccccagcctatccgtatcctttctgaaaaaccgctgctgcagttgcataacacgtatatcatagcttccgcgaataatggttttatattggtacaccagcagctggcacatgagcgggtattgtatgaaaggtatggagtggcagcgcatggaaaaaaaatgaccacacaacagaccatgttccccgcaacgctggaactgggccatgcagatgccgccctgcttaccgatatgctgcccgacctgcaggccatcggctaccaggtagagcctttcgggaataacagttttgtaatacagggcattcccgctgatatggaagcgggcaatgaaaaacattctatagaactgctgatagagcagttcaaacatttcagcagtgatatcaaattcagcaaacgcgaaaagctggtacgctgcatggcccggcagcaggccataaggcagggcaaccactctctcaaaaaaggaaaatggttt

SEQ ID NO: 74124 - DNA, 240 bp, Arabidopsis thaliana landsberg
aagactttatcccaaaactagagttatggacccttattaagtcaagaccccatccctcttcataatggtcgaatcatccataggaaaaaaaaaagcacttctagcccctccacaattcatatctttgggttttgaagaaaacatacatctatactaatcaacatgaacatacatatattcttaattattttttttaactaaagcttcttaccttaccataaattaaacatttcgaaacat

SEQ ID NO: 74125 - DNA, 611 bp, Arabidopsis thaliana landsberg
ggccaaaaagcctgcatcgggcgcaaaggcattgttgcggtttttaaatgtaaagctgctgccaaggcccgctggcttgtacccctttctcccctgcacatcctgtttatcaaatgccccgccggcccggtagctgatatcccatactttctggttctcaaataccagtcccacgaaaatattcctgcccaccttacgcatcaggtgcgcatatatataatattgtttaaagcgataggcttcttcggcgctgtcggccgtggttttcccaagcccccagaatttatccgggaaagaactgaaggaaaactgctcattcaggatatatcgttcttttttaaaatattgggagccgttgatcgccaccaccagctgtttcttggtggaatagatccccagcgcctgcacattggaagtacgcgaaacagtatctgaatgaaagggccggaaagtaaacgaagccgcggtaccgaatgaccagccggtttctatggatttggagatcaccggtaatacgagcaggtgctttttacgggcagaatcaggcttctgcgcatggcacgcgaattcaggaagaaggatttgccataaataccaggttaaaaaaaaaa

SEQ ID NO: 74126 - DNA, 580 bp, Arabidopsis thaliana landsberg
  unsure (1)..(580): unsure at all n locations
ccatataaacacaatggtgggagttgaatatgttcatcatttcactcgattgctgttctttttcctttattcgttttagctttcttctattcttataaatttaaggattttttaagataattgtttagtaaaaggttggtatgttagctttacccacttcttaattaataactaattaagttgataaaaattcaaaacagttggtgatacacccttaatcactacagtgaatccaatagtaattaaaagccatgttagttttataatggggtcctttgcatgagaagaataatagtatatgtttttccaagtggtttagaaataaaatcaaatttatgtttcatctattttgagtaccgactgtgtttgaacaaacaaaaaataaactttagggttttaaatagaggatcaattatcatgataaactgagaaaatggtttcataagttatagaaattaactaaaacaccacaaagagaattggtttctcgataactcatgttatgtgctaaattgtgtattntacttttctataaagaacaaccaaaanaagccaggcgagtggaggtcaaatcaaatat

SEQ ID NO: 74127 - DNA, 349 bp, Arabidopsis thaliana landsberg
  unsure (1)..(349): unsure at all n locations
tggtggcgtactgcggatcagcattaccaatgtttttcgagactttcggccccagaaacacgaacctggacctggggagcaccaaccctggaatatatgggtgtgccgtaaacatcaaccagctccacagtgacataggctacggcatcaacatccgcctcgatatgcggattgttagcgtgaccggtgcatatgctgtcacacccgctgtgtacaatacccaacgcccggccgatttnnnnnnnnnnnnnnnnnnnnnnnnnnnnnnnnnnnnnnnnnnnngtagagaatctgtggacaaatatttcggtccgactgtcttactataaaagcatgtgccgatttagaa

SEQ ID NO: 74128 - DNA, 277 bp, Arabidopsis thaliana landsberg
aatccattttgaattactgaaacttgaaaattcgatcctatatgatgttgtcgattcataagatgacaaaagacatatatctttttggtccaaaattcgatccttcaaatttgtgacaagcaaatttccattataaaaaagtttacttaatttggtccaaaaaatattaaattggtccaaagcatatcaaaatgattcatctatgttttcctgcaacctataatccataagacaaagcagttgtggaattttggtgtcgtatatagaatatactttt

SEQ ID NO: 74129 - DNA, 424 bp, Arabidopsis thaliana landsberg
caaatttatactttgaaattatagtagtactaaaccattagtccattcggccactgtatgatgacctctcttccacgtgacattttttctgcaccacaacaaaagctcctctagtggatatggatgtgacgattaattatccttctttcgacctttatggctttgtctcattaaactataaagttttgttgcatatatgtagtaataatctcttggagttaaaaaaaaagtagctagctataatcttcaagacttcaagtcatgacaccaaaatacatcaaatccattcaaacatatgattaggtgcatgtaactttgttcactcgaaaagcatacaattcacgagagaaaaatcataacaatggcaaaatgataattagtacagaaagacaaaaattaacatggaaaagctaaagatatgaca

SEQ ID NO: 74130 - DNA, 343 bp, Arabidopsis thaliana landsberg
gggcactggagagcagggcgcctgctacattctctatggaagtgaaacagttattgattccaattaattccgcaaaacggtccctcagtaaaactaagtttgggttagttgtgaaccaaggagtaaagcatgcttttaaactgaatggacctgacaaaggtgcttcatatatagaagcaagatatccagtattattatttaaacagtatatgacaacatgggtggagaagatctatggaataattcgagatgcttggaaaaaagaattatcaccggttctgggaacatgcattcaggtgagagattcaaagcaggtggatactgatgttggtaagctagatta

SEQ ID NO: 74131 - DNA, 527 bp, Arabidopsis thaliana landsberg
ttttatactatttaaagatatttggtttctaacattattttttgtcaataatttttgacaggtgggtcttcttaacgtggatggttactacaactcgctgttaacgtttattgataaggctgtggacgaaggatttatatccccaatggctcgtcgaatcatcgtctcagctccaaacgctaaagagttggttcgacaactcgaggtatatttcgagcctcatattcgtgccaatataagacattcgatacatggttcatttgttgatggtacgtactctaaaaatgatgttataggaatatgaaccggagtttgatgagataacatcaaaattggtttgggatgaagtggaccggataagttatgtaccgggttcggaggtagctaccgctacgtaaggatgtattatggggagtttattttttggtaaaagcagtgtacagcggaaattaagttgtttaacatcaaaaggtaagggcggaaaagaagacaaagaaagtattggggtcgttttgataaacattatt

SEQ ID NO: 74132 - DNA, 561 bp, Arabidopsis thaliana landsberg
gacctgtgccgccgcgacgccgaccgcatcgcgcctgttcctttccgccgccggcaccgccccctgctgcagcctgcaactcatcgaactggcccggcagggcaagcgggtactgctgctggtggccggcaatgccgccgcccatgaacacggcggcgcgctcgatgccctggcggcgcacggcatcccgttccaggtagtgccgggcgtcgacagcctggcggcgccagcgcccgcctgaagcatcggccctccacccttaccgcccattccaccatgcagccccaccgcgtccatcaccagatccttcgcagccaccatctgttcgagcccttgagcgaagcgcaactcgacaccctgctggaaacggcccggctgctcaatgtcgacaagggcgaaaaactgttccaccagggcgaacccgcccatgccttctactttgtgatcgccggcacggtaaaaatctatcgcctgacgccggacggccaggaaaaagtcttcgacgtgatcgggcgccgccagaccttcgccgaagccatgatgctgatggacacccccgac

SEQ ID NO: 74133 - DNA, 539 bp, Arabidopsis thaliana landsberg
  unsure (1)..(539): unsure at all n locations
aatcattattggtaatatatgactatatgtaacatatctggtatatatatgattagtttgtgggggaggctgacgtcagctgatggtggagtggccatgagcctctatacctctgtggttaacgaagaatcgcgccagaaattcatcgatcagcttaacgaggtaatgaatcagactagataacaattattatgtcattgcttttacatatatatcaaaacttcttaatggttatgtttttgcagattgcgagaatcgccatctcgaatcctctattcacaccaagcgatttcaacacattgttcataaggtttattaaggtagaaaactaaacaagaatagttaattaacattaagaaagtaatgattaattcagatgaaattatcgaaaactgaaaaatttgttgtctattatttatagggtgttggaatagcagctgcattggcgtgcttcattgnnnnnnnnnnnnnnnnnnnnnnnnnnnnnnnnnnnnnntccaagaagcaaaaaactaactgatccgattttgcttatttac

SEQ ID NO: 74134 - DNA, 441 bp, Arabidopsis thaliana landsberg
  unsure (1)..(441): unsure at all n locations
nnnnnnnnnnnnnnnnnnnnnnnnnnnnnnnnnnnnnnnnnnnnnnnnnnnnnnnnnnnnnnnnnnnnnnnnnnnnnnnnnnnnnnnnnnnnnnnnnnnnnnnnnnnnnnnnnnnnnnnnnnnnnnnnnnnnnnnnnnnnnnnnnnnnnnnnnnnnnnnnnnnnnnnnnnnnnnnnnnnnnnnnnnnnnnnnnnnnnnnnnnnnnnnnnnnnnnnnnnnnnnnnnnnnnnnnnnnnnnnnnnnnnnnnnnnnnnnnnnnnnnnnnnnnnnnnnnnnnnnnnnnnnnnnnnnnnnnnnnnnnnnnnnnnnnnnnnnnnnnnnnnnnnnnnnnnnnnnncgcgtgtggagcggtgacttgcgtgtcgggcactgttccgcttggtcgctaactgacggtcgagagataggccatggggatgttgcatggggctgcttcttact

SEQ ID NO: 74135 - DNA, 554 bp, Arabidopsis thaliana landsberg
gcagattgtatccccagatcgatagtcaattaccgtttcggttcgtttcttgcagtccaagcaagtagttaccggcattgcgagttgtataaatattctctatggcgagggttgatgggttttgtggggtttatataccaaaggaaggagctgggaaggtggaaatttttttttttcccaacaagatttgggtttatccttcttatttttttccttaaactatgttaattatattaatttttgttagatttgataattaatcagcataaagttgtcagttaaatgttcatgataggattgggttttgctttggttcctcattaatgtacttatatttctttaaatattcaaaatatttccatgtttatagatttgactattaataagcctaaataagattccaatctctgtatcgccaaattaagtgtgaaaaggacaatgctatgtctttaatatgatccatgaaccatttccatacacagtacatggtactttataatatctaccaaacgtttcaataaatgtgaggaaagatttgaggtgattcatgaagc

SEQ ID NO: 74136 - DNA, 538 bp, Arabidopsis thaliana landsberg
attatacttcatttgacggaacatcatggagatttttcaccttgtgcgagggcatacattgatgattgggagggactgcgtcactaccatcggcgactttcggataagcaatataaatataataaaccgggcatcaagaaggcaccctgggatcatgaaaccttgtgtatgaacgtaattgacccttttgggaacaggctatcgtttaacgaaaaggaatagattgcaataccaattgactttaaaagttgcatcgatcaataaccgatttgtttgtcatcaaccaatatgggaataatgcagggtattataaaaaagtttaagttcagaggtaatgcggttgttcttaaagcacctccgtcaattgaaagagatttgatgcagcttggcttcacgacaagccttgatagaaaaattaaaggcaccaatactttggcttttgtaaataacaggaaagatctgatagcctttcttaaaaacgacctgaaaaatgttgaaccggaccgcgttttatggtttgcctatccaaaaggaacat

SEQ ID NO: 74137 - DNA, 538 bp, Arabidopsis thaliana landsberg
  unsure (1)..(538): unsure at all n locations
tctaagcagggtggttttccccgctccattgtggccaacgagcccgatacgttcacccttctttatgtccaagttgatgccatcgagagatcttacgatccggcggccattggcctcgtcgatgcgagatccgaccatgcctcgcagaaggttccgcttcagcgaacgactgctgctgtctaagatcgggatgtcgaggcatacgttgtcgagtcgcacgcctggcgtggtgagcagggtcatatccagaaaatcagcctggtctcggccttcatacaggcgatgagggctagagcgccggtaaacatcgtcagacagaatgcaatggcgaaggagaggagcggaatagtgccgttcagcaggggctcgcgcacacattcaacaagatggaagaacgggttgagcactattacccaatgatgcgaacccaaggaggagggctcccatataataggggtcgcanaaaaagcgacttgcaagacgcttgcgacagcaggaggaacgtcgcggaatcgagcgccaatgacggcgatcaaca

SEQ ID NO: 74138 - DNA, 372 bp, Arabidopsis thaliana landsberg
  unsure (1)..(372): unsure at all n locations
tctccctcttaccctaaaaaccacatttcttaacttcctcaatattataaagatttgcttcaccctttaattttaccctcaaccccagaaacaaaaaccccttcctccacgagggcatacagaaatatcaaagacccaatctttctttcacttccccaatctctagatgacaatctaacgatacagttccttttagatcgattaccaaatacaaaggatcaatttttcttacatgaacactctgttgtaatggcagaggtgaatctagaactgagtcttttatgtacagagagcaacgttgatgatgagggcatgattgntgacgaaactccgatagaaatttcgattcgtcagatgggtttttctcaatcg

SEQ ID NO: 74139 - DNA, 529 bp, Arabidopsis thaliana landsberg
gcctcgcggagcagcgctccgcctctgcccagtcctcatcttcctgttccctttggccaagacgatcccagggaagtgcggcgttgccgggaggcacgtgggcgatgtggcgatcaaaatcctcacaaaattcgctgtagcttttccctatgttctccccctggctgcgcagatagagcgttgtcatgagaagttcccaccttccggcggggtgctcagggttcgctgttacgtagcgttgccagaagggagcagctcggtgggcattgctcacgttcgcgcgcccgaagccagcgaccagacggccacaccagggccaaatccaattgagacggttagcctgagccagcaaaccactgatttcgcgaaacgctgctctgctgtcgccaaggttgaagagaacgttggcgcgccagccaatgaccgaagatgtccgacccttgttctgatcggagaagacgacttggtcgaaatgatgcaaggcgtcctcgtatttgccaaggcggacatagtgcatgcccatggcgtt

SEQ ID NO: 74140 - DNA, 221 bp, Arabidopsis thaliana landsberg
aaaccaacacaagggttaatgggattgttaccacaagtgactatagcatagtgtccctcaacattggtatttaacattgcgattgactcatgctacactgttgggatagacacaattgattccttgctgtcttactagcttaggggactactatttgggagggcatgtgcctatactgataataatataatagtaacattatgtgataaatgaagtagaca

SEQ ID NO: 74141 - DNA, 500 bp, Arabidopsis thaliana landsberg
  unsure (1)..(500): unsure at all n locations
gccagcaggctgacgccaagaaacagagccgcggtcgttatttttttgcaaggcatggtcatcatttggatgatcctcttgaggtgaaatggcacgaacactgtttggtgcgcgcgcgcttcaccctattgcctcgcgcttggtcggggcaaatgcgtcgaggtcgtccgttcagacttcaannnnnnnnnnnnnnnnnnnnnnnnnnnnnnnnnnnnnnnnnnnnnnnnnnnnnnnnnccctgcacgaccacgcggtggttgtggcgatccgacacgagggtgtcgaaggcactgccggccgcgccggtgcgcgggtcgctggcggcgtagaccacgcgggtgacgcgggcatgcaccagcgccatggcgcacatggcgcatggctccagcgtgacgtacaacgtggcgcctgccggaagcggtgattgccgatggttttgcaggccgcgcgcagggccacgatttcggcgtgccgccgtgggatcggcaagggatgat

SEQ ID NO: 74142 - DNA, 364 bp, Arabidopsis thaliana landsberg
gcaaaaacaaaggaaaccacaaaacaggaggcgcatgcaaacatgcttcccccagaggagaccaggggaaacgggaaagggtgatacaggaaacacaacaaccgcacaagaagaaagggacagaggacagaagaacagaaaccgacaaaggaaaacaccataagcaaacaaaaggaaaacctggaagaagcagaaaaaacagcgtcctaaccaaagactggagcagcacaggcccacgccagcacacgcacaaccaacacaggagggtggacctcacacggcaaatcaaaaacatgaccagccatggatcctcgcaggggaaacagagcctagcgctaaaagatcaggcacaactccaacccac

SEQ ID NO: 74143 - DNA, 123 bp, Arabidopsis thaliana landsberg
gatagatgtaacaatttgaaccaaaggcctttttagtgattagctagctagtttctttgatcttagtcggcgaaagaggattccttcatgttcactaaggccaaaccccaaggagaaaacacc

SEQ ID NO: 74144 - DNA, 623 bp, Arabidopsis thaliana landsberg
  unsure (1)..(623): unsure at all n locations
actggcagggattgatcaccacctaccgggaagcctgtgatattgctgcagattttggattaacataccagatgcacccctgtgccggtgtgctaagcgccagcacggatgcattcctgtatttttccgatgcagtaaacagacccaacctccgctttaacctcgatacggccaaccagtttttcctgaaagacaatcttatgctttcattgctgcggctgcaggaccatattgattatatccatctttcagataatggcggtcataaagtggaacaccttgtgccgggcgatggtatcatatgctgggatgcttttttccaggcactcgcagatattcagttccagggccattatggtattgatgtaggaggagctgaatcgaaggttggaaatattcatacggcttatacccaaacagcacaatggttgcagaaaaggatatcggataaccaacttcaaatgcagcacacatgagcagggtggcaaaaaatatactcacaatacttttcatctgcagttgcctnnnnnnnnnnnnnnnnnnnnnnnnnnnnnnnnnnnnnnnattgtccgtntcgaaacgggtagccgataaactgatccgtgatacacgttttgcatata

SEQ ID NO: 74145 - DNA, 279 bp, Arabidopsis thaliana landsberg
ctgagacgcgtgtgtggagctttttgagactatccgacactaacttcatagttcgtacgagaatagctcagactttaaaatcggtcctaatctgactggctcaacggagctgaggtttcacagacatcaactgctgtaacctataggcatccaaggatagtacccttgctcgaccagacacactgacgaaaacagacaagtgaactaaagggagcgtcttagctaactctgcatatgagaccagatattggattaacccctaacggatatgcgtgacgc

SEQ ID NO: 74146 - DNA, 406 bp, Arabidopsis thaliana landsberg
  unsure (1)..(406): unsure at all n locations
gatgcgttacaatacacctgcttgtgcacaatctctttgttaagcgaaggagggggttatttaataggagatcttcagtcacatccgccacacgcactttagggaataacaatcacacatgctatctacctaacataagatggagaacaaaactcatatggaagataagcacagaccaaaccattaaaacaacatcctgggacgcaaaccttatcaataataccaagctatagatatgttatataacacatatcctgacacgctattgaggatatatattcatctacattgacctcttactttgacacaaagcggatctagacaaagtctttacttccttatgcaaacacagtactctttcgagnnnnnnnnnnnnnnnnnnnnnnnnnnnnnnnnnnnnaatata

SEQ ID NO: 74147 - DNA, 455 bp, Arabidopsis thaliana landsberg
gcggtggcacccgtgctggtgttcatcctggtcatttcctttatcgccaaccaccgccacggccaggagacggggatccgcccgatcctctggctgtacctgttgggtaccttcggcgccgcggtagtcgcggtggttgccagcatgctgttcccgtcgaacctggtgctgagcaccggcgacgctacgctgagcgcgccgggcggcatcaccgaggtgctgcagaacctgctgctgagtgcggtcgacaacccgatcaacgccctgctcaacgccaacttcatcggtgtgctgacctgggccatcggcctgggcgtggccctgcgccatgccggcgaaaccacccgcaccgtggtcgaggacctgtccaatggcgtgaccctgatcgtgcgcgtggtcatccgcttcgccccgctgggcatcttcggcctggtcagcgccacgctggcccagtc

SEQ ID NO: 74148 - DNA, 460 bp, Arabidopsis thaliana landsberg
tactgcccatcgggcgtaaataccgggttattgagcaggctttaattttctttggtcaccggcaccgcatgggaggcgtgacggtccatggtccagatattgtcacctccgcctgcatcactgcaaaaagtgatttttttaccatcggggctgtacctgggctgcacttcccaggcccttcctcctctcaggagcctggcatcaccaccggccgcaggcatctcataaatatcgcccagcaggtcgaatactatgtattttccatcggggctcacatccaggttcatccaggtaccttctgcaagcgtaaagcttgcttctttcgaaggcccatgtgtttgggtcacatcccattttttgtccttacccgtttgagcaagcgcctgaagggccgccagcgtgaggcaacccgcgaatatctttttcatcataattttcttaccaggaatggtgagttgtt

SEQ ID NO: 74149 - DNA, 821 bp, Arabidopsis thaliana landsberg
tgagattatgaaagaatggcatgttcatcaataatgaaattaggcaatctaaggactttgatcatttgtttcgcattgagctaatattaatcttctacgtttcctattttcattatacatgcgaatgttccaacaattctatttgaaaattgttaatgataagtgtgaaaactcctgcatacactgcaacgagacaacaaaggttgtctctggcattattcttattccttctcactccccatgttcttcaatatttgtcttttcatatagaaattatttaacattctaaacaaataaattattaaaaattggttacacaatcagtatagactatagaatttaaactaaaattttatgaaactctttacttccaaaattatgtctgtagctggcaatattagttttttatagttgagatttttcttttttttttttggaatgacgaaacccatgtggcgttcatttttgtaagttagaagacaaggttagtttatacaactaataatgaattcattattgtacaagtcaaaatatttgtatattcagtttcttgggcagtgcataaggaaatctaggagcgtctcgtggtttgatagaatacttataaaaatatacgttactcttactatacaaactatttttattccattatccatttttttaaataataatatagttttgttcatcctggaattcacgtagagccaatgattgtcgccatcgtggcaccctcggtgatcaaatgttttgtacggtaggacccattcttttttatcttattcgggccatccatgcgggtacatactttcaacaaacgaaaa

SEQ ID NO: 74150 - DNA, 451 bp, Arabidopsis thaliana landsberg
agaagcccatactgtggacctaaacctcattaagcttctcatttgcctacgacatctctactggttagattaggcttaatgtcactaaatatgcattttactcaaatgtttttgacgttggttctatactaatattccttttatgtcgctacaacatatttaagtcactcaatttatgtcagttttttcttcagatggccatctttaatatgtaatttcgcataacaattacacttactaagaattagtctagattttttacagaactcgttttaaatccagttaagtggtctctctctggtgtataaaagcgaagacctactctgttttgtactcagttgactttataactgtatccgcatcatagggatgtgaagcctgaattacagcggatgggggctggggaaaatttggtttggcagctatatataaagtgttgtagaattttgga

SEQ ID NO: 74151 - DNA, 549 bp, Arabidopsis thaliana landsberg
cagtaggagtaactgagaagatggataatcttcttctttgcttttcaacaacagagacaaaagaaaggagtaggcaatttcgagttattggatagttttggcttcattgaagcagtcttttcgaaccagactcactttggttagaaaattcggtcggagtcttatccgactctgacagtaccaatgtaataaaagcccataaagatcccttgtttgggcctaagaaagccaataaaaatacccatctacataatcagtaatcatcaagcctattgatccttctttttcctttttctttttgatcaaaaaactatggatccttcttagttcttacaaatacaagtacaatacaacttccacccactatagcaaatcgagtgcaagcttctgtgctaggttggatcgagagtttatgttgattattgttagttggttcctagatcggagattctgtttgcaggctattacacttcaagtttgcacatgaacaacaaccacagctagacgaccgcacacgaatcttgtcatataactaaaaccagtcaaagt

SEQ ID NO: 74152 - DNA, 549 bp, Arabidopsis thaliana landsberg
ggacgcccgaaacaccgcttcatcgaaattctcacgagcggcacgaccggtccgccgaaaccgttcacggtcgagttttcgctgatcgcccgtcaccacatcggcaccgtcagcgatctgtcgcaggcgacgccgtcgctgctgtgctttccgctcggcaacatcaccggcatctattcgacgctgccgccgatgatcaagggccagcgcgtcgtactgctcgaccgcttcagcgtcgaaggctggcacgattacgtgaagcgtttccgtccgctgcacagcggcctgccgccggccggcgtgcagatggtgctcgacgcgaacattccgcgcgaagacctcgccagcctggcgcggcctcggcaccggcgccgcgccgctcgaccccgcggtgcagcgcgcgttcgaggaacgctacggattcccgacctgctgtcgtacggcgccaccgaattcgggggccggtgacgggcgatgaccgtcgacctgcacgcgcaatggggccaggccaaggtcggaagcgttggccgtgccctgccggcgcgcact

SEQ ID NO: 74153 - DNA, 538 bp, Arabidopsis thaliana landsberg
gaaaactacggcggcatcccctgacgcggcgagatggggttgatgctgacggagattgtgaaatggaattcgttcgccgcttcctgaaaatttttgatgaagccggcgacgcggtcggccatggggcggtccttgcaatcgctgtggccgttgatgccggcgtagaggccgggcacccagcagaaaccggcgccggaatcggaggtgaggaaactgaagctgtcgatcacgggggcggccgtccacatcgcgtggagcgcgtcgcgatacaatttcaacgtttccggctgatcgacgcagggagcgaagcgcgggacgcgggcgcgattcggctgatcgacgcgcgggccgcgcaatttcggatacgcgcggaagaaggcttcggggagggtttggggttcgtcggaattccagtgtcccttgaggccgagtttttggagaacctggccccgttccgcgatgatgtgctggacgtgggggcgtagtccagatcgacgaatggctgaagctcggcgggcggaaaaatttgagaatgttt

SEQ ID NO: 74154 - DNA, 421 bp, Arabidopsis thaliana landsberg
  unsure (1)..(421): unsure at all n locations
gttgaaaagaatagtttgaaaagtgtttttgatgtttttgttatcagtagttttgaggctgcggtgccagtaaatctattgtcatttccttacagattaaattttactatatgataaatatatatttttattaattatatttgttattgtttagaccgttacaatattaccaaccaatgtaacattttataatgaaatcataatgttttactgtcatttatatcatactttaaaacaaaacaaatatcatatatttacacttttgagcactcatatttttttctaactgctaaaatatttttatatatcctattataactttgttataatttagttnttactaatagaacttctcgattgacaaatggaacagactgagtcatgtgagaatatttcaatttccatagccaatcatgatcat

SEQ ID NO: 74155 - DNA, 293 bp, Arabidopsis thaliana landsberg
aataagccaaggaacataacaccaaacactttatcctctttttctctccctctctccctctctcgggctctgggtcgctccctaactccctctctccctcaaccaaaagcaaacaaacccttgagatgacgtaaaagaaaagaactgactttgcttatgcgttcttaccaattcaagaaaaagagcttatgattcctatcctccataaaaaaattgctctcccttacccacagatgaaaccattgtatggaagtttgcactgcgagacgcatataggggtggatgcgggagtg

SEQ ID NO: 74156 - DNA, 498 bp, Arabidopsis thaliana landsberg
ccccactaaggctgctgagttcgcccggtcggaggctatacttttcttgccctcacaggaccgcttcaaagccgggctggccacattgaaacccgctcgtgtggctcgcggcgctcccgaggtgatgtccacgccagacggcgcccgaattgcacagcttacgcaaagcaagacgaaattagagatcacgatcgacaagaaagcgacgcccgagttcgccgccttcgtactcgaacaactgcccgcgctttatcaggcgcatcgctcgaagactgaactaaaacagggagagtaattcgcaaaagaaaagagccccctcaacgtagccggcgcggaagcccttctgtctctgtagcaagaacagaatcgcatttcctcgaatttccgtcaagcgttttggcaccgttttggtgagttctctttctttgcctgctgaaaggtgacacgatgctgactggaaatgtgacgacgccctttgggcggcgggcgatgaccgct

SEQ ID NO: 74157 - DNA, 458 bp, Arabidopsis thaliana landsberg
  unsure (1)..(458): unsure at all n locations
nnnnnnnnnnnnnnnnnnnnnnnnnnnnnnnnnnnnnnnnnnnnnnnnnnnnnnnnnnnnnnnnnnnnnnnnnnnnnnnnnnnnnnnnnnnnnnnnnnnnnnnnnnnnnnnnnnnnnnnnnnnnnnnnnnnnnnnnnnnnnnnnnnnnnnnnnnnnnnnnnnnnnnnnnnnnnnnnnnnnnnnnnnnnnnnnnnnnnnnnnnnnnnnnnnnnnnnnnnnnnnnnnnnnnnnnnnnnnnnnnnnnnnnnnnnnnnnnnnnnnnnnnnnnnnnnnnnnnnnnnnnnnnnnnnnnnnnaatttccatttataaatgacggaaaatcattggaaaaacgacaatacccatgttggtataaaattgtagttgctatctggttcaataacaaatcaactgaatttctaactaaaattgctggaccttttttctctcgtttaggttgattgttcttttcatttgg

SEQ ID NO: 74158 - DNA, 143 bp, Arabidopsis thaliana landsberg
ttgggccaacaatctgatttatttcatttgtttcccagtaacgatatgctcttctgtataatatataattatttcttttgtctgaagggtgagctgaatccatctctataggtcatggaggatgaaagtccaccaaagagcct

SEQ ID NO: 74159 - DNA, 383 bp, Arabidopsis thaliana landsberg
  unsure (1)..(383): unsure at all n locations
gaattgtcataggcgttgacaatttcttccgttnnnnnnnnnnnnnnnnnnnnnnnnnnnnnnnnnnnnnnnnnnnnnnnnnnnnnnnnnnnnnnnnnnnnnnnnataggcgggaccatggctgccgatcatgtgcaggacgatcgttgcgtttgtcttgatgttggcaagctcctttttcaaagccttgaccagaatatcgtcttcgcaatcacctgcctcgcaaaaacggctgtcgttgccgtcctgcatttggacggtctggacacgatcggcgacgcccttgcttccggtgttgttgtcgagccagtcaacctgcaagccggcgtgtttcaacacattcagaaggttttcagagccgagaaatttggaatgggagtagg

SEQ ID NO: 74160 - DNA, 620 bp, Arabidopsis thaliana landsberg
  unsure (1)..(620): unsure at all n locations
aaagaaagaaacagaaacnctcattnncgngtaaagaaacagattaagagagcagatatagacccctttatacgccgccaacggacccagcaaacattagaataatattaaaaggggaaccggnnnacccnccacataagnnggagagacaggcaactattaacacttcatctcgaaaacacttttatcattgcctagtttttgtgtgtctctttgttttaagttttttaactgaattaatttgatacaaaatgtccaataatagccattggtgattcagtctagtaactcaaactgaaatcttggttgactccaaaatagtaatggtttgatctatatagttttgttcgtttaattttggctagtgattgcaaattagcaacagaggatgtttggtattccgttgctgatttagtaacacatttncggtgattaacaataataaaagaacactacattctattgttttaatcgctaatggccaaatttcgttgtcggaatatcatgttactggtttataacaaacataatttgtcgtaaacaaataatgacgatggaatccaaaattggaacatcaacttacatcggatgctcgtcgaacgtgaggcccaaagcactta

SEQ ID NO: 74161 - DNA, 593 bp, Arabidopsis thaliana landsberg
  unsure (1)..(593): unsure at all n locations
cccatagagaaaagatagaatactcgagtttagaatgagctcngtgtatttgtgtggaaaaaagnatnnntatcaatgtcctataatcattgggtgttggggactggagccctgagggccagcagaaagaatggaaacaggcaacctcgggaggtaggagtattatccccttttctttgcatttaagtgcaacttgatgttcnnnnnnnnnnnnnnnnnnnnnnngaggcctccccttctctgaggacaaaggaaaggtttgatttcccaggaagggtgagactgagggactcagaggcaaggagggaggacaaactgcgattggtatgtaaacacattaataccaatatttgtatttgaaaaataggtattcaacatgtgctattcctttgagaccatgattttcaaagttgtcctacccccacccccaattccatttatctctagagcattaggagcaagacatgattagtcactgaatgcattttttcattaacttcccgtgaaaaagtgatttttcccccaattagccttaaaactatataatataattcntgtagagtactactaaactaaagtatatttctttaaaa

SEQ ID NO: 74162 - DNA, 448 bp, Arabidopsis thaliana landsberg
tatacaaaaattttgctccatttttaaacttacaaaacaaactgatgggatacgggggatttatacggcatacattgtgagtctgtgagataaaccactgtcgttcaacatgagttttagatgaatacctcctaatatgccaatttagagcggtgacttaacgaatgtgccgaaggtaattaattcaattaaagaagatgaaactcttggagcaatgcacgcatcgtccacttgaaataatttatctagtgggaaagagcgctactgttacctaccaactaactcatttattgactctatatatatcccttttttcttatcaattgctctttccttataactatgaccttatttcaaatttacaaattctcagacattgcgtaacgataccgacagatattggtcttctctttcaatgagaaaaatcactctgagaaatattattgac

SEQ ID NO: 74163 - DNA, 409 bp, Arabidopsis thaliana landsberg
aatccttataattaattcaaatgaccgggatcttcttatatttcggatcgaaaaatccttcttgtctaaaaaacgacccgtttacacttaatgatttaagcgatttatcgctgtatttctgcttactatatgaaaatgaatctattgtgtacatgttccacgtggaacatgtacaattttataaaaggttccacgtgaaacctcatattgcaaacagatctccaaaatcatggcccgatccgcgcaatccgtgttgaaatctgcgatctttgcaacatgttccccgaatatgatgtgatcgttgccggtgccggtcatgccggctgtgaagcggcagctgctgcggccaatatgggcagcaaggttttgctgattaccatgaatatgcagactattgcccagatgagct

SEQ ID NO: 74164 - DNA, 572 bp, Arabidopsis thaliana landsberg
  unsure (1)..(572): unsure at all n locations
aacctcagtgacaccaacaacttgttttctgtatctttagtctctccctctgacaatatttaaaaataaataaagatgaaaaaatgtgagcatccttaaaagtttaacctcattgattcgaggccaaacaaagaaaactcattttcttttaaaaacgcaacattttttaaaaataggtgctccctttgaagtccactcaatatccctttttagaatctagatattttttggacactcaatcgatattccgaaacttatgtgtatttattatttaattttctttgtttttgaaatattgataaatttattgtatatttttcatattagatacaaatttatctgtaaataaatcatcgccataaattttaaagatttgcctggcatcatgcgttatgtgacaactaacaaccaacaaaggttacatgccgtaagatccattcttttactctgcctatatcagaaaaattaaattattgaccaaatattttagatntctttccgtgtaatgcggataattgaataaaagcattcacatggtttcttcctcctgacatgcacgaaagcaatttaaa

SEQ ID NO: 74165 - DNA, 467 bp, Arabidopsis thaliana landsberg
gcgagaatgacaaagacagcaaggcgcacgtcactttatttttaccatccgtcgccgtggccaattggaaagggagctcctgcgcccataaggaatgattgaaccacgcaagatcaatgtcaatctaccgccacggtcaaaagatgagccgccatagaaagccaattgcggatgacttcctcggaaagtttgccggtaagctgaaagcttgccagctcttgatagacccagaggtcagtgtgtgacatgctcatcacgttgattttcatggtgcagcctggacaataacagtgagcttgaccgatcaacacaaaaccggtcccacacataccgccaatggtttgcactccaaaaatgtaagccttcttctccttcactttcttctgcgccttcaacgcgcacatcaacggcgacagggcgcacttgctcatcaacgccaacttgcccctgtctctttctgatgttaa

SEQ ID NO: 74166 - DNA, 535 bp, Arabidopsis thaliana landsberg
  unsure (1)..(535): unsure at all n locations
ggcagagctgggagtattatcgcatggcgcggtgctggaatatgataatttttcccgcaagcgtattcctcttcgctgcaggccaattcgggttccgggtattcggtgtggtattatggagtgcggcgatctcttccgtggtaggcgcggcgtatacttctatatcattcctcaaaacactgcacccgctgatagcgaagtatgagcggctgagcatctctgtattcatcgtactctccacctgcatttttgtgatcataggtaagccgagacagttgttattattcgcgggactggccaatggatttatcctgccgctggcgctgggtgtattgttggtagcctgtaccaggtcgcagatcatgaaagggtacaaacatcctgtatggatgcaggcagcggggtgggcggtagtggtggtgatggatgngatgaactgtgtggctgttatggactggatggcatgaagattgtatccatcataaccatatcatgaagcagatactgattgtacgacatgccaagagcagctggg

SEQ ID NO: 74167 - DNA, 573 bp, Arabidopsis thaliana landsberg
  unsure (1)..(573): unsure at all n locations
tcatgaagaaaaatatctctctcgatgattatactttatattatcgacacttgtgcacgtggttgattctgaaggaacggacaaaataaaaatgttattttataattgtagcgtgatggtgatgtgatgtgtacatatacattaatcttctgtaataatatatggtaagcctacgctttctcaattacatttgtctatagttactgtcacttgtccttaccacattatataaacaaactacataattcattagaaagtcatagaagaaaataaaataaaaactcctctaattgtctctgaactagaaaaaccgaattaacgtgtgacttaataactggaagcgagttcccgccaagagcgttcacatgataactaaccgccacgtgtcttgatggcaataataagtaaccaaaaaaaacgaagaggcagacgaaaaaaaaagagtcgaatcttcaacatttatggctctgattttcctgccgccgtgaaaattagtagccaacatttatttcacattcgcataacgaaacgaatcaataaatcgctcacangtacttgttcatataccccttt

SEQ ID NO: 74168 - DNA, 588 bp, Arabidopsis thaliana landsberg
  unsure (1)..(588): unsure at all n locations
aaggcggccagatcgtagataaacagatcgtctcagncttaaatcggtgctggataaaaagatacaggctgatatgtaagcgcaaccgataccgaattaaaaaagagcgcctgttgcaggcgctcttttttaatttcggataatcagcctgcccaaacacccatgttcagtttctgtttccggtgggaccaccgctttattaaccttttcattgttttacatgctgtacctactttttttcattttttttgtttatatgctttgttacgttttttttttttgttttttctttttttttcttattctattctatttcctttttgtgttttgattttttttattttattttttctttcttgtgttttttgatattttatttattttcatctctctatcttttttttctttcctcttataactctttttttttattctttttgttctttccttctttttctttttcatcttgtcttttttatttctttatttatcttctctttttatttactttatttttttttctcttcgtacttctttttttatcctatttatttctctattgtattcattctttttcttgttgtttct

SEQ ID NO: 74169 - DNA, 509 bp, Arabidopsis thaliana landsberg
  unsure (1)..(509): unsure at all n locations
cagtacaaaagcgccgaatgccagcagccagagcctttccctttttatattgcccagcaacaggtctaccacaagggggcctgcagatgccagcaggaagatgaacaaaggcggccgcagcaatatgatgccgaagaccaaccggttccagtcggctttggcaatgcctttgcccaataagccaaagccaaatgaaaaatacctgaaccaggtattgatccaccgagcacgctgtttgaccaattgttcgggcttggatgttttttcatcatacactactgcccgctcgttataggcaatgcggtaaccgcgcgatacgatctctctctgcaataccttatcaaatcccgcgccgttgatatcgagcgattcaaggcatttcgtggtacaattgctccgtaaatgccattcctgaaccggccagcgttgctgaagacccgatttggaacaacagttttgccgtttaaaaatgattagtgattttacctggcnnnnnnnnnnnnnnnnng

SEQ ID NO: 74170 - DNA, 330 bp, Arabidopsis thaliana landsberg
tgattaaatattcacgattcacaacctgaacttatcaatacttttctttaaacaacattgactatcatagacaaggaaagcctatatataattatgactaagcatatatcgctactatgatacggtatcatacgcactgattttcatacgatcattctcaaacttgaagctataaaaactcattataccaaaaccaaattcaaatttcataatactaacatacgaactagctgtactctactgccaaaactgaaatatccacatctataagatgcaccaaagaatattaatgctacaatgtcacactatcactcaaccccttagccacct

SEQ ID NO: 74171 - DNA, 323 bp, Arabidopsis thaliana landsberg
agtaattatcatcactaggcacaactctacctaattacttttaatcaaatccggatactccctaatagcttcagatatcgaacagaagataacaccagacttctctgaagtcttcctatgagtagtagcaatcgaaacactatcgataaccgcatcaaccgcaacattagccaaacgtttctgctctgttaagggaacacctaacttatcgaaatactcaagaagctgaggatcaacttcatctaaactattcaaagttggtttctttttatgagcagcgttataacacatttcctgtaaatttggtaaggatttctcatttt

SEQ ID NO: 74172 - DNA, 609 bp, Arabidopsis thaliana landsberg
aataccattaacgagttagcattgtagtgccgattgcatttcttctctattttctcaacttcaatgcaagttcaacaaaatataataaatcatgttacaatataatattataaaagttaaactcatggacttttcttatctcggcttatcctttactccaacttaagttatatttttttcttaagataatggtgggggtatagagttgactaaagaaaaatattcactgtatacatataattaaattgcaaattgtttgacattcgctagaaaataaactaattaatcagataccgccattgtttaagcaaaaggttaatgttattttccactagtttttgttccctataaattaagtcaaccatttccataattattttcaggtaacaattactccaaaatgctactatcattcaatgattctaaatatgatagtagcattttggagtaatcattttcagacatttatacgtcaaaaaaataaatgtaaaagaggattaaaatatgcaatcattacgtttatttatctaactttctgtttgatatttcgatattttttatacacaatttcatatatgagtaaattgcagtaaaaatgtcacggtattt

SEQ ID NO: 74173 - DNA, 606 bp, Arabidopsis thaliana landsberg
  unsure (1)..(606): unsure at all n locations
ggcccaacgtattgctcttgacgttatcaagttttaacattagtttgatctaatttctatcacttatgttgcaacttacaaagttggtggttatattgtgaaatttataaatgatttggaagaaaaagaaatcaaataattactactataataaatcagtatataagagaccttgggaaaagtatttaaaaatgtagaatcttcttggattaacttcaatgttttgtgtggtggagtttggatcttacatgatcatttgggacaaagctagttttcatcaaagggatgcaattgaagaacatactaaacatatataatcgaaaactgatataaaaaaacataaacacaaaggtttgttttgagttttgaccttattatcaagtgatgaaagaatgtaaaacttagtttttaatgatgttgataacctcttttgatttaaataaattcttttaatgtgtgatttatgctcaaaactaaatttttctaatgttntcatattatttaattttgcccttgttaactctcatggatgttgccatgttgatttgattgagctttggattggaattcattncgtatgtaagaatatttcgtgattatagaact

SEQ ID NO: 74174 - DNA, 3156 bp, Arabidopsis thaliana landsberg
gaatcttcttctcctttgacataattcctaatctcaaaagtaatgatttttaaaattcacaaatttcaacccttaacttattcctttgtcaaggcaacaatatgagtaaaattacttgagtgttaatattatatcatcagaaacataaaaagaaagaaaaaagagacagctttaagatgtaccaactccaacattacagaaacagtagagatatctgcaaaaaacccaacttggggcccctcgccattactattttattattttttccttttttctgctctgtttcgttgcctgaattcttgcatcagtctctttctctctctcttctctcttctctttgtgtaagcaaagaaccaatctttagataatttaggaaactcttcattattcctcttgcaagctcgaatgatcgccgccttgttcccttgatacctcgaatccttttcttcttccagcctcagtatcacttcaatcttctcgggtacctccaccttcttacattcctttgttacaatctttttccaaattcgacattagctttgtactaagttagggttccttacttgtgggttttcactgttctgtcttatttctttgttgagattctttttcgatttgataggtttatcagattcagagtaactctgttgttttctccacactttattagactggataaattagtttaatcaaatataaggcaaaaaggaaactagaaagcagaaacatctgttgagagaatgtgctcaagtcaagtctctgtttaaatttacttccttttcttcagttttccacaagaattgactgaatctagtcatgtctgtcttctcagactaataagtcaaaaagtcaatgcttttctatgtctgttctatcagaaaactttgtgttcctttctttttttccatataatacacagaaaagtctgaatatttttactaatccaattgataacactatcaaggaaccaacactctttttaaaagtcatgaaagattataatgttgatatgtgtgtgttttgtgttttgtgttcttcagcttgatagttaaatggatcctgttcctgttcgatgtcttcttaacagtatatctcggtatcttcatctggttgcgtgccagactataagatttaatcctattcaaacatgtattggaaatatggttctcttgttgaagctcttgaaaccgttgctcgatgaagttgttgattgcaagataccttctgatgactgtttatataaaggatgtgaagaccttgattctgttgttaaccaggctcgggagttcttagaggactggtcaccaaagttgagcaagttgtttggtgtaagttgatgatataagctaccatttcagtttttctgcagctttcagcattattcactgcatcgttgttgtgcaggtgtttcaatgcgaggttttgttgggaaaggtccagacttgttcgttggagattagtcgcatacttcttcagttatcacagtcaagtccggttacttcaagcgtacaaagtgttgaggtaaactagaatttcttcatttctttagccctctgtgtcttatatgcagccacttgtactaatctcttggaacggtttcagcgctgcgtgcaggagactgagagttttaagcaagaggggacattaatggaactcatggagaatgctttacggaatcagaaagatgatattacctctttggataacaatcatctggaaagcataattcaaatgcttggattgatatcaaaccaagatctcttaaaggaaagcattactgtggagaaagagaggataagatcccaggccagtaagtcagaagaagatatggaacaaaccgaacagttgatagaactcgtcttgtgcatccgtgaacacatgcttaaaactgagtttcttgaagtggctaaaggtatctcgatacccccgtatttccggtgtcctttgtcaacagaactcatgctggatccggtaatagtagcttcaggacagacatttgacagaacatccattaagaaatggcttgataacgggttagctgtttgtccaaggacgcggcaggtgctgactcatcaagaactcattcccaattacacggttaaggctatgatagcgagttggttggaggcaaacaggatcaaccttgctactaactcttgtcatcagtatgatggtggtgatgcttcatccatggctaataatatgggttctcaagactttaaccgcaccgaaagttttcgtttttctttacggagtagcagttttacctcaagatcatctcttgaaactggaaatgggtttgagaaactgaagatcaacgtgcctgccagtttatgcggggaatctcaaagcaaggatcttgaaatattcgagcttttgtctccggggcagtcttacactcacagcaggagtgaatcagtttgcagtgttgtctcgtccgttgattatgtaccttcggtgacacatgagacagaaagtatactagggaatcaccaaagctccagtgagatgtctcccaagaaaatcttagaaagttcaaacaatgtaaatcatgagcatagcgcagcaaagacttatgagtgttctgtacatgatttagatgattcaggaacaatgacgacttcacataccataaaattggtagaagatcttaaaagcgggtctaacaaagtgaagactgctgctgcagctgaaatacgtcatctcaccattaacagcattgaaaatcgtgttcacatcgggcgttgtggtgctattactccactgctgtcacttttatactcagaagaaaagctaactcaagaacacgcagtcacggctcttttgaatctttccatcagtgaactaaacaaagccatgattgtggaagtcggggcgatagaaccgcttgttcatgttttgaacacaggaaatgacagagccaaagagaattcagcagcatcattgttcagtctgtctgttctgcaggtcaacagagaacgaataggccagtctaacgcagcgatacaagctctggtgaatcttcttggtaaaggaacatttagaggaaagaaagacgccgcctctgctttgttcaatctatcgattactcatgataacaaggcccgtatcgtgcaagctaaggcggttaagtaccttgtggagctgttagaccca

SEQ ID NO: 74175 - DNA, 292 bp, Arabidopsis thaliana landsberg
ttactatttaaaatcattccaagtaacatactcttaaacttgagatattcacgcaaattgtaaattaatctcacgaatatacacgtacattgtaaattatatggcatttttttatgattaacacaccccatgcatatcacgatatatgttaagcatgcagtcattcctaatgcaatgcgatttaatttggtcatatatatatatatatattttggagagataaattaactgactttcgtttttgttttttttttttaataaaatggtactttatatacatctttgatagtct

SEQ ID NO: 74176 - DNA, 352 bp, Arabidopsis thaliana landsberg
  unsure (1)..(352): unsure at all n locations
nnnnnnnnnnnnnnnnnnnnnnnnnnnnnnnnnnnnnnnnnnnnnnnnnnnnnnnnnnnnnnnnnnnnnnnnngcgtntggtgggtttttttttcgctaagccccatgccccagtatcttttttttctttgtccatcaatccttgggggggggtgctacatttttccttttttttctttctatttcatttctttcctttttgctctcttctttcttttacttttatctcattattttttttttctctcttctttccgtttctttattctttatttttttttttattcttcctcctttttctcttttttttctttctttttctttcttccctgttttttcttgcctttatttc

SEQ ID NO: 74177 - DNA, 559 bp, Arabidopsis thaliana landsberg
  unsure (1)..(559): unsure at all n locations
ttttcgacaagcaaggctttggctttatacttgaaatgggagtgttcttttatttgatttcttcgtctacttacgtgttgggggggttgggccgttagctgcttactaccaaatacccttacgtcacattcttatggttagtactgtgtcttattgcttgctgtgtgatgatgatgataatggcattaatcaaaagattgtgtttgcctctatggtgtagatatatgatgacatgggtttgtctaatggtgtcttgagacttcaaccaaaaggtgggcatagccaacacaatgggtaagtaatatctctgaattgggaagtgatgtatataggttctattggtttagggagtaaacnnnnnnnnnnnnnnnnnnnntaaagttgcaaggaacagactcctgcaatcttatttccgagtgactgttgaatttgttcaacttctaacttagtacttactcttgaggaagagagatgctattttgaaaggacacaaaacttcaagatccaggttttatggataatgatgaatagaatcgaattcaatagtataaagcatttt

SEQ ID NO: 74178 - DNA, 495 bp, Arabidopsis thaliana landsberg
ggccacatcccgctgctattcgtcagcgacgtcaccggcttcatggttttctttgacgtggagcaggtgggcatcgccaagggcgggggcaagatgatcaccgcgatgagctcggcgcgcgtgcccaagtacacgctcaacatcggcgcgtcctacggcgccgggtacctggccatgtgcggccggccgttcaagcccacggcgatcttcgcctggcccaacggccgctcggcgatcatgggccccgatcaggcagcgatggtgctggccctggtgcgcgaagccaacctcaaggccgagggcaagacctggaccgtcgaggagcaggaggccttcaaggcacccacgcgcaagatctacgaggacttccagggcgcgcacaacttcgccagccacggctggatcgacggcgtgatcgacccgctggaaacccgcgccacactcgcgctgttgatggaactcgccgcccgcgtgccggcgcgcgagacgaacttc

SEQ ID NO: 74179 - DNA, 424 bp, Arabidopsis thaliana landsberg
aacccttacaactaaggggtatgaacgatacttttttttcattttgctgtaggtgactgtacgtgcaggtcctaaccatgtactttatctatagctatagaactgatagaggtcgtctcggttttcctgagcgatccgcgaggggatagaaaccgtacgactagatcaagggaataagtagggtgaaaggaggaaggacgccaatataatactatggaccgcgaggccccacggcgcacttcctatgtgaacgaccggcttcgtgtcgggggaacgcacttgatcatagcatgacactgagatggggtcataattggtcttacacgatcgggcaagatatctatgaggtctaatggccaacggccatcgcgaaccattaagattggatagctagtgctcctactgtgaggggttttctctaaca

SEQ ID NO: 74180 - DNA, 458 bp, Arabidopsis thaliana landsberg
ggacccatcctgtttgcgatatgatcatatatgcataatgtttgcatttaaataaaatcaagatatatttttatagcggagtgctttttctttttgccttttttttcagcaaaagctcaaattcctaattgtttgatcaaacttagtgttccttctgtttttagaaacataacgttttggattttacacaaattaataaaaaataattctttattttttattactccttggatcataaaaaatgatcttcagaggttttcattttgcatgaaaaagatcgcttttctgcaaaatctatcactcagtgttaataaattgtgaaattctaaaatcattaattgagaaattaacattttgatgagtcactattgcgtaataggtatgacttatgagacatggtttagtatgaatgcatagtacatttataactaaacattaaatgttcttctttattgatg

SEQ ID NO: 74181 - DNA, 573 bp, Arabidopsis thaliana landsberg
  unsure (1)..(573): unsure at all n locations
tctttttnnnnnnnnnnnnnnnnnnnnnnnnnnnnnnnnnnnnnnnnnnnnnnnnagcgtccggtggcactgtacataccaacatggcatagtaaactatattaaatatttaagtttggtttatattctttctagtaatctttgaaatattgtaagagataatgcttctaataaataacattggatttattggaattaatgtattgaaaaaactatgcaaatactacagtgtattttggaacgaccaaaatgatatatgtaaactttcgttctagtcttctacatagtgtaataggatagcggacaaggttgatcgactctaaacattatgggtacgtaattccgcagtggttacagtctactgtcgaggccaaactggtaattaaacgtttgaagtttagagaaatattttgatgatgagtaccacaatcaaagatgataggtgttaatcactgtaaaaatgttgattgaatactacgaatgcagaacatatacatatttttaatctctttggaanttttggttttggttttatcatttttgaatacacgaagagctcaggtatatttcata

SEQ ID NO: 74182 - DNA, 504 bp, Arabidopsis thaliana landsberg
  unsure (1)..(504): unsure at all n locations
acccaacagtcggacaccgattgcgaaaccccaggtacgcgcgttagaaacgaccccaacagcgggccccgacagacaaggaagaccgcaaacccccccgccaaacagggaaagaagaggaagagcaccnaaccccgagggacccgagacgagaaacaccggaggaaagacgacagcaccaaacagccgcccanccaaagaaggcaacgggcgcacaaaaccaaagccaacaaagcaaaacgggagccgagacgaaaaaacagaaacagcaaaaacgaagaacgaggaaggacaaaagaaagagagacgaggaaccagacagacggcagagcccangcacgagaacccaacgccaaccgggcccgcagcancagcgnacgggcagacanaaaanancccagcaaccacagaganaccgangacaanacccccccncanacagcncaagcagagaggaaancacgcgccagccgagcaaggaaacaccncagccagcgaagaaga

SEQ ID NO: 74183 - DNA, 490 bp, Arabidopsis thaliana landsberg
  unsure (1)..(490): unsure at all n locations
acttgcggcatgcggtcgtggnnnnnnnnnnnnnnnnnnnnnnnnnnnnnnnnnnnnnnnnnnnnnnnnnnnnnnnnnnnnnnnnnnnnnnnnnnnnnnnnnnnnnnnnnnaagtcgaccgacgtcaccgaccacggcgggtcagacccagagtttgaatgaagagtgnnnnnnnnnnnnnnnnnnnnnnnnnnnnnnnnnnnnnnnnnnnnnnnnnnnnnnnnnnnnnnnnnnnnnnnnnnnnnnnnnnnnnnnnnnnnngaatattcttcttcatgcagaatatatccccacccgtttttagtgcgctttttacatgagagaagaacgaggatattcaggctgcgcccccacattgcccattctcacttctgattaccgacaggcaaacnnnnnnnnnnnnnnnnnnnnnnnnnnnnnnnnnnnnnnncattggcggcacatgacaggcgcatgtaatgttcagaactgaaaggaggaagacagggcg

SEQ ID NO: 74184 - DNA, 272 bp, Arabidopsis thaliana landsberg
  unsure (1)..(272): unsure at all n locations
taccaaaaaaaacaagaatgttgagggatgatcacctggacttcctgggtggtcttttatcctactgctacttttgcccaagcgctctnnnnnnnnnnnnnnnnnnnnnnnnnnnnnnnnnnnnnnnnnnnnnnnnnnnnnnnnnnnnnnnnnnnnnnnnnnnnnnnnnnnnnnnnnnnnnnnnnttgattaacccttcgcctggggtcccaccctccatggacggataccccatctagccataacccttagtgcacattggtttgcgcatg

SEQ ID NO: 74185 - DNA, 365 bp, Arabidopsis thaliana landsberg
atgaacaagaagttctaaaagaaaatggtcttcaagtagtaattctcgacatgtcttgtaagcacatcccacattctatcatgatatactaatttatagaaaatgttttattgtatatatagtagaggtactgaatcttacatgtaacaaaatattggtgaaggcgtgatgggcgtagatacatcaggagtagttgcacttgaagaactacatcaagagctagcttctaatgacatccgggtacatctttatttctcaatcaaatattattcattcactatagttacatatgtgggttcattggattttcaaattaccaatatttgttttatgtttgtgggctgcagttagtcatcgctagtccc

SEQ ID NO: 74186 - DNA, 548 bp, Arabidopsis thaliana landsberg
  unsure (1)..(548): unsure at all n locations
agcccgccgtgatagcccagattctggctccnnnnnnnnnnnnnnnnnnnnnnnnnnnnnnnnnnnnnnnnnnnnnnnnnnnnnnnnnnnnnnnnnnnnnncgcctcgaaggtcatcgccgcgctggccgcatgcagctggcccgacagggtctgcagcgattgctgcagcgccgccgtgctggacacatgctggagactcgccgcgccggagacgaactcgctgccgaccggcgagacgcccgtcgaactgcctgaacccagctgcccgttgagctgttcaaacgcgccctgcacgcgctgcgcagcaccgaacgacgccgcggtatagctggtgcccgatacctgggtcacattcacctgctgcacgtcgagccacgcgctgttcgcgtcgtaattgagggtggcggtgagcaacacgttgctcggcgtgttcaacacgctgaaggtgccggtgaggccgccattcgcgtcgagcacgtcagtgtgcgaattgacggtgtaatcgctggtggtgtcgtacacgtacagctcgccgccactgagcgt

SEQ ID NO: 74187 - DNA, 273 bp, Arabidopsis thaliana landsberg
atacatgaaatttaggacattaacattcattttcttttttctatcgcctgtagatacaataggaggagggagtgttaccgctgccaagcgcaagaagaaagacggaagcgccgagacaataatggaaccttgcctacccacggcgagagacggatgccaaccaacaacaaaatgatacgaaaaagtgaaggaacaaatttcatatgattgcgatgacttgcacaaacccacgaagtaaagcatagattacatgatctaaacaaatcattatca

SEQ ID NO: 74188 - DNA, 606 bp, Arabidopsis thaliana landsberg
aactacatttgctcagcaaccatccacaaattttttgcttcttcatcgtctccataatgttctgggtgcggtatctctcacatttttctgataatatatctcacatttttaaattaatagtcctaacattatctctctcaacaatatgtgctcagaaatatagatgtccatcctcttgtcctactttttgctacttcattttcattctcttgtctcttcgtgtagatttgtagggaatagtttggaggagtggtcatacgcgtatataactttatcgtaataactaaaacattgtatatgataaggccctatagaaaaaaaaaatagaaaaaaaatgatcatatataatacttacaaccagaacaggttaggcttatttgttttgagacacttggcaagcctaagatcattcccaacttattttgtttaattttcaactccaaatctagtaatttcaaatgtctaaccacataattcgtcctatcaatctattaaacatttaccacatttgcttagctagctctgtttgattcactttgtccacattggtcaaatttgtattaccgtctagagctaagttttaatggttaaccacatttataacac

SEQ ID NO: 74189 - DNA, 114 bp, Arabidopsis thaliana landsberg
  unsure (1)..(114): unsure at all n locations
ccaggccagaaacgccccagcaaccagccagaaagagagggagccacggccgaagagagcaaagacgnaggcggaccagggggagaacacgaacaaacgcanggccaccgaacg

SEQ ID NO: 74190 - DNA, 179 bp, Arabidopsis thaliana landsberg
aatctatgctttttcttctcgggcaattagggcttttagatcttatttgtagtaagatgatgatcaagtgttgtttctttattaagacgttctttcgaaaccaccagatcctatctgcatatgcaaccactctggtgatgctcctctactgtattccctcgtagactgcgacccgaact

SEQ ID NO: 74191 - DNA, 611 bp, Arabidopsis thaliana landsberg
  unsure (1)..(611): unsure at all n locations
ctgtttttgcggtgacttgaaagggagaatatatttcatgcttgatccaagccgtatacgtacatggacaggggcgtcgtagtctcaaatatatatgcacaaaagtgaatagatcgcataccgacccatacctaaaatgctagctttgaagctatacatagctttagaaagtgaccatcatcgtcatcgttacttgttactttgttagacctacaccattcctcgtccaaaaatctatcaaatatggagaccgccacatattttagattattaagcttatattgaagggttttatatttctttcttgcgtacatttctctttcgttttctctaatgatttaagttagattagagaggtcaataacgtatgcagttaaccttttccatttcccgttattgtggaaacctcagtttgactacatactccgaccactttttagtgatatttaacacaaaaagaacttttgaaaaactaatttatcggtgtgactntntttgttcgcttgtgcaattttttccaacacttntccataagtttaccatgtaacatatattagtatttagaggtagtatatttctacanatatgtgcacagctagctagcattactt

SEQ ID NO: 74192 - DNA, 608 bp, Arabidopsis thaliana landsberg
acaaaacatgtagttggattttatatctaatttcatataatttacatattgatgtataatagctagattttgggatcaccagttacaataagtcactaagatttgtcaatagattccaataaatgtatcatttttcctaacgaagaaacagttactatagttagttaactgaatcatattttagtatggttatattgattgatcaaaccatccttaaccgaactatccaaatcacaaaatcaaacccaaaaccaaaagaagaaaacaaatataaatagaatttctactatttttggtcaaatataatccacgtgttcctaatcatctcctacatcaatggaagtacagcttgggctttcgataaccatacattgtaccttactattttttcccatttgatttctttaggctttttttatgtaacttgtcactatatattttgacatactcaacattatccatattctcttgtgaaagtatatataaatgtacattggataggaagcacattaaaacacaagaaactaaaattttgcatcaatgaaaggaacatgggctcctctcagtcctatgttgatgtatatgttcaatgaaccatatcatagaga

SEQ ID NO: 74193 - DNA, 582 bp, Arabidopsis thaliana landsberg
  unsure (1)..(582): unsure at all n locations
cggcgagtagcctgagtcgggtctacgcgagggggtcgagttcaaactctgttaatgcccgttgtacgactggtccaagatcactagtagactcatgccaattataaagctctcttaagcccgtcactcttcctgaagaatccagccaatcatgaaccgcttctggattcagaattctcaaaataggagcatctcttgggaaagttcgcggaagctctgtccttaaagtcaatattctttgatcagaaagcttgatgccaacgtcaaatattccctggtcaccttgcgagcgatttgccacagatggaatcacccgagtgagagaagcaatttgctcattcctgttcattttagcccaaagcacacggtaaaggaactgacgacaactttgcgataagtctatgaaggatatttgacgcaatgtttccataaactaaacatatgcattaaataatatttttctttgagtaatctggtccttgtcttcgcaacccgcccaacacgtntttccaactacatagataccctggctcataatagatcatggaatctagataggcgctcaaatacttaatgtcatct

SEQ ID NO: 74194 - DNA, 481 bp, Arabidopsis thaliana landsberg
  unsure (1)..(481): unsure at all n locations
agccaacggccgcatcatgacaggcttcgcttggctggttgcacgacttggcggtcagtctttannnnnnnnnnnnnnnnnnnnnnnnnnnnnnnnnnnnnnnnnnnnnnnnnnnnnnnnnctgtaagcgacgcttacacggatactgggcatgctccgcatagattgcacatcaagatcaaggcaatgggtggaagtgacgcacgctgcacggaagcacaggtggatactcagttcaacaacagccaatagaaacccaaccacatgagcttnnnnnnnnnnnnnnnnnnnnnnnnnnnnnnaacggagttgacggggttgccccgtgtcacgttgacacaaagtgatccaattcatttggaggggactgattatcatcaatacatatcccctcctatcactaggaggtgctaaccactgacctcacggtcatagagcttaccgtccgacgttcgactctatacatatggtgggcgctggt

SEQ ID NO: 74195 - DNA, 546 bp, Arabidopsis thaliana landsberg
  unsure (1)..(546): unsure at all n locations
tcctggtagacccgcgacgccatgccgccgccaagcagcgtggcgagcgcggtctgttgcgtaatagtccttatcggtgcgggaaaggccttcgaagccaagcacgacatggctctgctccagttccttttcgacgcgcacttcgccgcctttgtaggcggcgggcatgatgtcggatttcgtatccgccggcaggttcgacagcgaatcctgcacgcgcttcacgatgtcggcgtgctcgagattgcccgaggccgaaaccacaaggcgnnnnnnnnnnnnnnnnnnnnnnnnnnnnnnngccagcgtctcgcggctcatattctgcacgatttcggtcttgccgaggatcggcgcgccgagcgtctggttcgggaaagaaacttcctgatgcagatcgaacacccagtcgtcgggcgtatcgagcgtcatgccgatttcctgcacgatcaccgaacgctcgcgggcgatctcttcttcgggcaggacagggttctggataatatcggccagcacgttgagcgcgagcggcatatcctcgcgcag

SEQ ID NO: 74196 - DNA, 564 bp, Arabidopsis thaliana landsberg
  unsure (1)..(564): unsure at all n locations
ggagatacaggcactgctgcaccggtttcttcctttatgattataaaaaaagacagtatcacctcgggcaaagcttttaaacaggtttataaggttttaatgagtgcccgttgtatgaattgtcatccggccggagatgttccgctgcaaggtgacgacagccatctacataccatgtttccacggcggggtattgacggcaaaggtttgtatgcaatgaagtgctcgaattgccatcaggctaccaatacgcccggtctgcatacgccgccgggaaaccccaactggcatcttcccccggccgatatgaaaatggtgtttcagggcaaaacacctcatcaannnnnnnnnnnnnnnnnnnnnnncaagacaaacggcaacaaggatattaaaaagttgattgcacatgccgatgacgggttggtccttgctgcgtggaatccgggcgaaggtcgcacgctttcgccgatgagccatgccgatttcaaaaaagcctggataacctggctaaccaccggagcttatgcgccgaaaggaaataagactgtgatgaacgattaaatc

SEQ ID NO: 74197 - DNA, 178 bp, Arabidopsis thaliana landsberg
aagagcgtaattacatctcaaccccaaattcttcagaagatctctcttcaccacagaattgcggattagacgaaggagcttcagcttcaagcagtagcaccataaattctgatcatcaaaataatcaagggtttgtgttttacccttccggggaaaccattgaagatcataattcttt

SEQ ID NO: 74198 - DNA, 1558 bp, Arabidopsis thaliana landsberg
attgtttatggaaaccagcacaaagcttaaaatacgtgccagtccaaagttataacttcttttgctagagttctggacggggaatgagagtatgctgtatgcattatagttctatatattttacgaaatgtacaacattgtacaagttcatgggaatttgcttaaattttaagatcaagaagaatctagataaagggaatgagagagtacatatcaaagttgatatatacaaagccaatttggagtcctgaccagcctaataattaaccttttaccaaacaaatcgattatcacaaaagagaaaatcagacacctacctaatgttccagggaaaagcagtaatgaggtataatgggcattaagaattatgtctatcagaatgagaatcattacatcaaagaatgaaaccgatcgagaccaaatatgtagatgataacactgaggaaatgaaaaggctgcggcaaagtaatcgtgggtccaactcatacttattgaaattattgaaatcagatcatatgtttgaggaaaagaaaaacataaaccaaaaggagatacttttctcatctagattgaataagtggatagatatatattgatacgctccggatacaaacatttggctttgattttactaactctaataccttttgctttaatttctcttgatcatatgtatgacacacaagcgaggctctaagctaagtgcaacaataaacaaagaacaattaagttgttcatgttgaccaaaacaaatggtgtttgggaataatctcttcaaaactaatatcaacagtcttcttttcagagatgtagtaaaaatagtgttataactcaaaactagttcacaataacatcatcagacatagtttcttaacctgaaatatttcatttgttggccttcgcagatagaaactgtgactctctgtgtctcagttcttcagttccatttattgatttcctgaattgcttgtttctgcagcaagacgagcactttccttctcaaagaaatcgaattcttggagtatcttagcaagcttgtttgcgttgtcttcttttatattcgcagggaccttctcttcgtaagtagacacactcatcatcttctgcaacttctctttttgtctgatgaaacaagaaataaaaatgtcaaaggaggaaatctcaggaaactaacatgagattcaagcatcttgttttgattcagtgacgggtctaaggacttacttttgtagttcaccaatcttgtttctgattttttcttgatcagcttctgtgttaatggctccgtccactttaagatatactttgaggttctcgttcaccgtctcaactgaagatccaggtggtgctgcatgttgtccttttgacacaacctataccaaagccccatagaaactcagaaatgatacacgaaacaatagataaaccgtaagacataaattgaagatagaatttacctctaaggatgatagatttgcaagggttctgatctccaactcgtgagactgaacaatttcagatgttacgttgtgtgtcacgcagagcaaaagcaggtaac

SEQ ID NO: 74199 - DNA, 500 bp, Arabidopsis thaliana landsberg
gctccatgggagcttctccattgtatcgtgctacgaaattttggttgactttatttgctatttggttttactttaatttgacttatttgcttctgtttgctttcattttagaccatatgggttgactttgctttatatttggctttactttgatttggtttattcacttcagtgagcttttattctagaccatatctcgtgggttgtttttcagacaattttaatttagatgttgcttaccaaatttattttcagtgtctttattcatctatttttttaatcaacactatatgaaaatttagaggagaaaaagtcacgaattctgaaaataattcagttaatatagggactactattagtgtcaaatagtttgtcaattatgaaagatgatgattgatttgtcataataaaatgcgatgaagctaggaagatgacttagtcggaaatgagaaccgattgataacgatgttttagttataactatagacagtcttggaacg

SEQ ID NO: 74200 - DNA, 353 bp, Arabidopsis thaliana landsberg
gaagccctctgactaaagaacgtttcctttgaagacagagcgcactggcccaagggaactggtgagggtgtagcaaccattacctgacctttcacctcaggatacgtagaattgaagctatcacgctcagccttatgaactttgatagctatagccattgaccagtgaacacgaccgcatcgagacacgatcatcaatgaatgccatctttaatggttagcaaaccaaaacaaacagctctgaatacatcctgactatgaccggacaagtcttaccatataatctactatccggttgggagggtacaagcggacattagaaagcttcataaacgatgcaccgaatttagtgag

SEQ ID NO: 74201 - DNA, 481 bp, Arabidopsis thaliana landsberg
  unsure (1)..(481): unsure at all n locations
gaacagaagcnaaggagcaggcgaaagatttattcgcccaaccgccccggaaaagaaacagcacacagggacggacgcacaacgcccccggcgggaacacagactccagaagaaccaccaccgggtcacgcacaaaaaaccggaatcacgacgcgagaaacgcgccaacggagagaaaaaacgccaaccccccccgcagcacgaggaacccaaccggaaaaaacgaagccaagacgcccgaacccgaaccgccccaggagcaaccgaggaacgaaacaacccgcgagaacagcaaacagggacgcgccccaggcacagaaccggcagacacgaccggggccgacacgcaccacgtggagaagcaagcacaagatgcggtgccgaacgaaccagggccaatggcagcccagggagaaacaacaccacaaagccactgggaaccgatcgccgaagaaaccaacgagaggccccaagagcgcag

SEQ ID NO: 74202 - DNA, 526 bp, Arabidopsis thaliana landsberg
  unsure (1)..(526): unsure at all n locations
ctacaagaccgatactcgatctccccttcgatgaatagccggtctcctttcttcacgtactcaccgataatctccgcggtcttgccccaaccaaccagcctatgccaggccgtcttctcctgctgctctccgtccttgtccttccaggtgcgagaagttgcaagagacagattagcgacctgcgtggaccccacctggcgaatctcggcgtcagtcccgacgttgcccagaagggtcacccgattgatactacgtgccatgtactgctcctagttaaatggttattcctgcctcgatcgatccagcaacttcaacagctctccatctggagcgtgttccctcaaccagtcctcgaacttctccgcgaagctgagagcgaaggcattgaactgttcatctgtggccagctcgtgcagtttctcgatctggtccttgacgactacgccgtatgcgtgcagttctcgttcattcagcggaatggggatgctcgtgtccatttacactctnctatgtgaatgataaacac

SEQ ID NO: 74203 - DNA, 479 bp, Arabidopsis thaliana landsberg
gaacttcgtgctttcgccgcaaggccaggccctgctcttcaactttcaaggtgatgcgcctgccagtcaacaaagaggcctacaaaaacgcgcccgcgggcatacccaatcccttcgaaggccacatcaaggccagcgtccatttcgattcggacctttcccagtcgcgctacaacgttgtcaattccctgtacgacgtcatgatcacctatcgcttcagcgaactgcgcgcagccgtcaaagccatcgacgaggccgaggcggccctgaagggctcgcccaagcccgaggccaagaagctgctcgacgaggccaaggggctggtgtatggcgtgcctatcaccgacaagcaggccagcgacaaagacttcagcgccatcttcaagggcaagcgcaagaaggccacggacaaggtcacggtgcgccaggccgagatcgaaaaagactgggacaaccacgccgtggcgaactatcgcaag

SEQ ID NO: 74204 - DNA, 1041 bp, Arabidopsis thaliana landsberg
agatggcaccttctttaagctaacatgactaagcgaaagagtagttgctaagatgtcatggaagacaagatccgtcaatttaggtccatgatatatactaaacttggagaggctagcgcaagagtgaagaatagtcttgaaaccagcatctgttacccgacaaaagccaccaagacaaatgctttccattcccaagcatttgtcagcaagaaaaagcattccttgatcactaactcgccggaagtaagtagggtgaaactcctggctacggattagagacaggtgcttcagcttaccattctgattgatctcatgaagcccaaaatccgtgaggtctgatacttgtcttggatcctcaagaggcgcgtctcttatgtccaaatctatcaaagatggaagagatttcgatatcgccttaaccacagcatcagtaatacaatccactgagaggcgcaaccgctggacattttgtagcacagtagatgtagtaactcggttgctgtcttgccccgagatttcagttgatgtgagtagctgagtcatcatccttgacgtgatgtgtcctagctccagatgagtcaatctatcagataccaatccaaaaatgcgaccatcaccaggacgcagatacaatgagaggtcaaacatgagtgctaagacctgccaaatacaacacatatggcatgattccattacacagacaatcaacactagataataagatcaaaagagaatctattaaggattcaaacctctaaatgggagcaaccattaagtaaatcctccaaagcacaacggctaatacttcgaccaactttctctgctactgaacccaaacataggagcctgaagtttaccaatccgtcagacacagcaacagaaagattcctcatattatagcagatgcatcatcacacacatacctcaaatccttgcatttcctaccaatttcggagatgagatctccgctgaaatcccgacaattgtgaagagaaatctccctcaaagaaggacgtaccaatatatcaatagctgaattac

SEQ ID NO: 74205 - DNA, 578 bp, Arabidopsis thaliana landsberg
gaatatatgccaaaactaattaatatcttatccacatttcttttcaaacgattcccttggtctacatttttttgcacattaataatatattattataaacatatatacaaaaatcacgtaaatttgtgagaacacatatacatgagttgcttaatcgaataatatgacaagttaacgaattgattctcgcccgacaaaaggcattaaattaagataatggtttccgttggcttattttgtgaatctaatcaatctttccggccaaatatttagtaaattattacttgaagcaacataacccttacatcatttttttggaaatttcatattttacaaaataagaaaaaaaaaaattggtcagcaattaattactttttctagtacaatgacttggttaatcatgatctagctagttctagtgtttccttgtcgggatttattggcatataattataacaacacatagatttggttccttctgagatttcaaattgagtttttgttgctgctctgtccaaagatatgttaaagatctaagtgattgaagtcaaaatttataagatgtattcttgacgact

SEQ ID NO: 74206 - DNA, 573 bp, Arabidopsis thaliana landsberg
  unsure (1)..(573): unsure at all n locations
gagggagacatctgtcaatacccggattntaatcagatttttttttgtatgggtctcttatcggtttatctgatcaggggtttggatagaatgaaccttgcttaagtttccaaaaatctgaagatatacgatnncacgaaattgacatttcacnnnnnnnnnnnnnnnnnnnnnnnnnnnnnnnnnnnnnnnnnnnnnnnnnnnnnnnnnnnnnnnnnnnnnnnnnnnnnnnnnnnnnnnnnnnnnnnnnnnnnnnnnnnnnnnnnnnnnnnnnnnnnnnnnnnnnnnnnnnnnnnnnnnnnnnnnnnnnnnnnnnnnnnnnnnnnnnnnnnnnnnnnnnnnnnnnnnnnnnnnnnnnnnnnnnnnnnnnnnnnnnnnnnnnnnnnnnnnnnnnnnnnnnnnnnnnnnnnnnnnnnnnnnnnnnnnnnnnnnnnnnnnnnnnnnnnnnnnnnnnnnnnnnnnnnnnnnnnnnnnnnnnnnnnnnnnnnnnnnnnnnnnnnnnnnnnnnnnnnnnnnnnnnnnnnnnnnnnnnnnnnnnnnnnnnnnnnnnnnnnnnnnnnnnnnnnnnnnnnn

SEQ ID NO: 74207 - DNA, 343 bp, Arabidopsis thaliana landsberg
  unsure (1)..(343): unsure at all n locations
aaaaaaaaaaaaaaaaaggagggacgcatcccattgtccttaaaagcacatggcctcggggggggggatagttgtatcctgcggagtcccnnnnnnnnnnnnnnnnnnnnnnnnnnnnnnnnnnnnnnnnnnnnnnnnnnnnnnnnnnnnnnnnnnnnnnnnnnnnnnnnnnnnnggaccgacctccgctaatgagacattaacccggataaaggctccaataaaatggaaaaaggaggagtatgagnnnnnnnnnnnnnnnnnngcccctaatccccttttatgcggcttttggccttcctgttttggctaaccacaaaaacgctggagaaagcaaaaaatg

SEQ ID NO: 74208 - DNA, 466 bp, Arabidopsis thaliana landsberg
  unsure (1)..(466): unsure at all n locations
acccaatctaccacctccagcccaaccttcattctaacccgaaaaaannnccaacacggggccagggacaacgccataatcccaagaaacaaacagagcgaaaacaaagcgaaccaaaactacaatcaaacccacccagagaccaatcgcgaacaccaaattctcaaaaaaagaaccgatgaggaccgcaaaaaaaccggcaataccaaccacaacggcaaacgacggcgcaagccaaccaaaacaagcaaagctacaagccgtgccttacccaataccggaaactaacaaaagcccaaagcccaaccgcagaaacagctagaaacaatgcagaaaatgccgaaagacgcccaaacggcggcggcggcgcacaagagagaaggcaacagggccggagccaacgaagcctcaaaagcgagtacgacaaagaaggaatgacctcacacacacatcataaaagcagcga

SEQ ID NO: 74209 - DNA, 397 bp, Arabidopsis thaliana landsberg
agggccgcacgcacgcggcgccgcgcgcattcccgcctacgtcttgctgggcgaaactgttgtagggattggtgagcgaagcggtgcccgcggtgtcggtgagcgggcaggtggtggtcagcggagattctgtcccttgcgagggcgggctcgttggtatcgcgccgccgcccgaagaggagagcgcgccccgcgtgcctgtgctctcggctttcgtgcaagatggcgagttccgcatcgaaggggtcacgcccggtgagtacgcggtgaccgtgaattgtgccggtcacgttgagccccaagggcccacgcgcattgaggtgaagtccttttccctggaagggctgcggtggctttttcggcctggactggggctgctagtttctgtggtggatga

SEQ ID NO: 74210 - DNA, 439 bp, Arabidopsis thaliana landsberg
aaacagactgcggtgaattaacccttgtactgaatcctacattacatctacttaaggatctagtagttagaggaggaggaaaaaatgtttaactgtgtagcatctgcaatagcttatggacctggtgttatcctgaggtgatgcagatcggatactatcttttcttcacacatgcaagagtggatcgatgcaaagtttggttccaaaaaaaaaaaaagtcatagccaccacaagatgaggctaaacccattacttgtagtacatatgcctttgcgaagcattgtggaacgtcttggtcatatttgtattgaatttttcaggagtgtcctgcaaaagactcgtatgtgacgcacttacccattgcaagagtttgtataaacgtatatggaggagactaatacatcttggcttgacgcacactaggacttacaaattgatg

SEQ ID NO: 74211 - DNA, 577 bp, Arabidopsis thaliana landsberg
  unsure (1)..(577): unsure at all n locations
acaatccggcagagattcctgttgcgatggcggtgttggaaccctctttataccatttatnnnnnnnnnnnnnnnnnnnnnnnnnnnnnnnnnnnnnnnnnnnnnnnnnnnnnnnnnnnnnnnnnnnnnnnnnnnnnnnnnnnnnnnnnnnnnnnnnnnnnnnnnnnnnnnnnnnnnnnnncgtaaggatcgagttnnnnnnnnnnnnnnnnnnnnnnnnnnnnnnnnnnnnnnnnnnnnnnnnnnnnnnnnnnnnnnnnnnnnnnnnnnnnntccatttgtaagaagcgtaacctgcggggagcgttagggtaacaccattgatgtccgtaacgcaagctgccgttacagcaggcacctccactgggttaaccggtgtgacagnnnnnnnnnnnnnnnnnnnnngagttccgaaccatgcattcgccagaatcgtcaaagctctgagggttccttctttgtcattcacacccttgcctacgaagtgcgtgccatcgacacgattaggtacgagaagatctgtatcgggacccggataagtagggttaaaatcccggttgagtactgccgtttgcgc

SEQ ID NO: 74212 - DNA, 265 bp, Arabidopsis thaliana landsberg
taacacattgaatcattctgataattatttctgtggttcccttttaggaggttaccaatacaagctacctttcagtttgaaaagttttgcttgcaatgattgtatggagggagttatctggtgtatgagttgtgtgtattcatatgattatagggaagcttatgattgcattaaaccactcaaagttgtgtgtggaaacttcttcttttttaacaaggctgggttattagtgagtgtttcattatcttattttttgctttctact

SEQ ID NO: 74213 - DNA, 429 bp, Arabidopsis thaliana landsberg
aaatgagctcaagatctctttgcgcgagatatggaatgaacatttgacatttcagcgtagagctgcctaacgggcaaagtatacgcaactttctagatcatgtccacctgatttaaagaaactacatatcaaccctggagaactgcatctactggacaagcaactcgatggtgttgaggttcgctagcataaaacacagcgttgactgacttactaacgctaacgggatcatgactaaaaaaaagaaaaaatcactaatgcaggctgaacatcaaaggaatagacaaccggcttaaaaaggaacagtttcgtgatagagaccatcgaagatcagaaagagagctatatgctggggaaggacgacaatgttcattgtccaattgaggaagacgttgttaccggaccgtggagaatgacgatgttaagacc

SEQ ID NO: 74214 - DNA, 403 bp, Arabidopsis thaliana landsberg
aaacgatttttttctctgtttgtgtttggtgtttggattttttgttatcaaaatttaaaatttattaacattgggaggggatttgaaaataaaataaaatacacactcaaattgaaattaaaaaactgaactgcctaacctcacattcaaaagtcaaccataaaacaaattttcctctcactcatagccagactttatattgggccgggctgtgtagcagcgactaattaaaaatacacagggattttgggtcgggcccgagtcactgtgttctttgataaggttcagattgtactactacaatcattgtagtcattattcatccgggcgaatcggtcttgacgtaggttccctgctgaaaatgaaactgttcatttggaaaatgaagatgtacattttcttc

SEQ ID NO: 74215 - DNA, 506 bp, Arabidopsis thaliana landsberg
  unsure (1)..(506): unsure at all n locations
tctcttcttttgtctgtcctactgtctgtgtcaatttcctgttttgatcctcaagtgacttgcgtaattcctcgcgagttacattctcagtggcataccgtttcaactcttcttcaaatcttttccgagctgcctctgttacctttagcttctcggttagagcatttttctcttttcctaccttctgtatcattcacaaagaaaacggcatcacttgttaagtgagcaatacaatttggacaaatggaatagagtaaacgatacaaggcacaataactgtaatataaagatctgatcgttattcattttctgcaaacatttactccatattttatttcaagtctgtaccttgagttcatcacgctttcgggttttttgcaaagcaagttgcgtctctgcttcgtgaaggcgatccaaaagagttttcttttcagacgagagcttatctatctcatcttgacgttctgatcggatccattccagctgactctccacatncctaaact

SEQ ID NO: 74216 - DNA, 568 bp, Arabidopsis thaliana landsberg
catcactttctcgataatttaaggtttcagaggaattttaatttatttagggttctttatgcttctaataatgattctttatttgttacaactttaaggaaatattttattaactatttaattgctttcttatattacttttgttttttcttcacatcatgtgtcacattaagttgcatttgttctgactcaaaagaaccgatgtttgcttttaaggtttcgtattagaatcacttaactgtgcaagtggtcgatttgacccttatcattattttttattacttatcaaaatgcagatttaagcgtacattaagcttagaaaatagggagttaatacgtctaattaacttattaattctttcttaaaaactattgcagtgtaaaaggtactattgagaggtacaagaaggcaatatcggacaattctaacaccggatcggtggcagaaattaatgcacaggtaacttaatattacacgcatgctgtcaattaatatatgaaaataatacgacaccattattcatacttttactctttctatatttttgtagattatcaacaagaatca

SEQ ID NO: 74217 - DNA, 301 bp, Arabidopsis thaliana landsberg
gctgattacattttgacattatgggaataattagggttggggggctactggaattgaatctttgaattggtttcgggtgcttggtcgttcaggactcaaactccattgtgttaatctaatttctgattgcatcaaattgtgtaaaccatattattatcgattctgaagatattcaaaaggaagcttttctttgagtgagatattgattatcagagaagactttaattttcaccatgttatatgcttattgaaatctctaacgtttggtgccacaggaacattaacaaaagattttacaact

SEQ ID NO: 74218 - DNA, 124 bp, Arabidopsis thaliana landsberg
caaacaacgggcaaggaaaaaaagaacacgccaagactagcccaaaaaggggccaacccggcgaagccaaaacgagagaaagacgacccgaacacacggaccaagggacagaatggcgaccaaa

SEQ ID NO: 74219 - DNA, 631 bp, Arabidopsis thaliana landsberg
tttggtgtgggggacatttacacgatgcgacaataaaaggtacggatgttttatagatacgagtatttttcttttttcccccacctataattatctgcattacatgatatagctaagtgggaattactaagacctaattaagaaagaaaaaacaccaactttttgttaagatctttccattaatggattcttattttaatgagaaaattcgtttgattcttttgatgggctagtgtgacctaaatagtctaaagaagcctatctaatcactttgacatttattcatcaggtattatcgtgataaataaattattggctaaatacattactcagcagatatataggtatgaaaaccacaaacgaaatcattgaatatatgctgtttggaccttaaatatacgtttgcataagcaaagtgagctatatcaggggttaaaaagaaaattttcttttttgatagtccaaaattttacaacagtgaaaatgggttttgtcaaaatcaaaacaaccatttgaactcatgttcgagtgtatcacccacatttttttagattgctaatctccaaacaagaaaaagagacagattttaaaccccttttaaattcttttcaaaatttggtaaccagttttc

SEQ ID NO: 74220 - DNA, 233 bp, Arabidopsis thaliana landsberg
tggccggagttttcctctagaacgagttactgttgcttttgttttttcttgtgtattaatatgtggtgtaagagagtgtttccatgtgaagtggattcaggttctttatgatggatgcatctagatgtgacctgatatattatttagccgaaaaagatagatatcgaagtgaagaaatttattgtgacataatgcatatatcattacaggcattaactggcctattgggtatc

SEQ ID NO: 74221 - DNA, 269 bp, Arabidopsis thaliana landsberg
ccacctctcgttttgtatataagggggtttgtctgaataattttattaaggagtaaggattaggaagaaaaggggggttgtagtagtcagtcactcaagtcatgatgcttatatatgttagatcttgtgaagttatgtatctctaaaagtttatatatagaagctgtttaatattcctctctaatggtttgacttcaccgtatatattatcagtattcttagttttgcatcagttgacataagtagcttttgacttttgatgaatgact

SEQ ID NO: 74222 - DNA, 733 bp, Arabidopsis thaliana landsberg
ggaccttgctcattggtgcgtaattattttctctatctcgaaaactttttaatttgatatttatatgttttatataatttaatatataaatatttgtagaacatgatttggttcgtggttctatgatcacacattcggaggtatcctcgagacacgatggatttaatcaaatggttataactttttttggggttaataattggtcataacttatagatgtggtttctttcttctactattacttttctttaccctattataaaatccgtcatgataatttaaagaaaaaacaaggcaaattaaattcctgcaattaacagaattcgaatcttgatgattttatggatgttttaatatatacccaaaaaagtggatgattatatggatttttttgtagatgtcaaatggttcaattttaaactgtaaaaagagtaggcatgcttatattttggattactgaactgaaccaactaatcttcgaatatacttagatttctagttctgttcattaatatacagtttcaaatttatgtttgaaaaagatacaaaaaattggatagtcatagttttgaacttgttctattcctaatgcagcggacagaccgttctaattttgaccggatgggtgttagcgatattttctgaaaaatttaagtcggtgagttcaatattactgttacaagaaagtaacgtttctagaaaaccaagaaatttgaaatggcaaaaaatccaa

SEQ ID NO: 74223 - DNA, 538 bp, Arabidopsis thaliana landsberg
aggcaaggccgaagatccatcgggaacgatctcgatacgttccaccttctccttcgggatggcactgacatccacagcgtgggagaacccgccgtaggccatgcggtggccattgagcagagtcaaggtcgcatctggtcccagcccgcgcagattcatgcctgagccgccggtgacgttttgatctctgggtcccccctgagatgtgcccgccgccaatcccggattctgccccccagagaagttctgggggatgctgcgtatcacctcgccaagatccgtgaaaccttccgcccggatctgctcgctgccaatcgtgatgaccggtgatgccgtagtgccaccacgaatccgtgtcccggtcaccgtcaaggtcgacagttccgtcacccccggtgctgccggcgacgtggtcgttgccgggcgggtggaggaggtatggctcccgggcccggcacttgcctgtgagcgcgtgatgacgaccgtggtgccgctgaccttccggtaggcaagaccactgccttgcagcattcgatcg

SEQ ID NO: 74224 - DNA, 617 bp, Arabidopsis thaliana landsberg
ttgcaacttcctgtagcatgtttcttagcggtggatatggatccactcactgtgttttcttttctatagaggcgggagtctcctcattcacgaggtgatgagagccgtcgctgtttttgatgaagacaaaaatgtatcaaaaaccagtcgcaacacagcttacttcattggcgtgaatggtaacttcagagaaaagtggatcttggagaaattacaacagtcagagagattttcccgcatgccttctcttatgttccaagttctgtgctttttgagtctggatctgatgagaaacgttaaaaactttcttacctttggcatcaactttacttgttttcctattcggttccaagactcatttcctttggcaccagctatgcttgaatattctccggcgagatataccagtttcttgagtcttttctattcaggtatgtttcaaacttagtcttgattccttgcctatcttttctttcccatttaaacctaacattttagtgtccttcctttacccaattaattcgggttctctttattttttggggccttcccccccctctagtttttttccttatttccgaatccattttctcatggagccctttctcgggaattta

SEQ ID NO: 74225 - DNA, 521 bp, Arabidopsis thaliana landsberg
atagttattccccgcgccgctgacgccggacgcgagttgcggaccgttgttcgattcgatcttgatctgcggccgcttgagcgtccgcgcgagtgcgatcttcgcttcgaggcggtcgacgccgctaagcgattcctgaatcaccgcggcgatccgatcgtcacgcaacgccggcatctgcgcggcgagcgtcgacgattgcttcaactccaccgtgccgacaagctgatcgccatcgagacggatatcggccttcaaactggcttctcccggagcgaccgtgaccgccagcttgtcggcgcgcccgagcgtgcgatgggcgagattgagctgcggcacgtcgaccaccagcgagtcgtgcggaacctcggtccgacgatcaagctctacggtgagcaagccgtcgacggcgccggtggtgcgaatgcatagttgcagcggtcgctcgtggagcttccgttccgacgcgacgtcagtcagcagaccggtgaacgccatcgcctggccgtcgagtccggcgt

SEQ ID NO: 74226 - DNA, 259 bp, Arabidopsis thaliana landsberg
ccaaaataagcatggcataagaactaaatataaccttttattaacaattacaaaaacgcccatgacgcggggttcactttaaaactgcatgggcgaatgaataatgagcccaactcataagtggctacatcgctcgtccattcgctacagaaggcacacccctcgcaccctacgatatgtctagagggattggctctgtgtcaatggaatcttatcataatctatgcataaccaaacgcagaggtttatgcatatcata

SEQ ID NO: 74227 - DNA, 266 bp, Arabidopsis thaliana landsberg
aaaagattctctgaattatattgagctgagttataaacatattctagtttccaatgggtgtacaattcatcacagattgacctttttaattttgctgtacagaaaatatttgacaacatcctcaatggtaaaatgccctggccagatgttcctggtgaaatgtcttatgaagctcaggatttgattaacaggtctgttttgaggattctgctcccgttttcatatcatccgtctttcccacagtcccattcatgtttctctaagca

SEQ ID NO: 74228 - DNA, 290 bp, Arabidopsis thaliana landsberg
  unsure (1)..(290): unsure at all n locations
ggcttnaccatcaaagccnggggaanaaagaagaagcnnngccaccggactcgcagccaaaaatttctatatgccccangnancanccagcataagaacgagaaacgcaacaggaccccggaggcccaaagcaggagccagggaccaaagcccgggacccacggcccagaacccagggccaagggcccagggccaagagcccacggaccagggcccacggccccgggcaaaggaaccagggcccaggggccagggcacaggggcacgagcccaggacccgggacccaggg

SEQ ID NO: 74229 - DNA, 556 bp, Arabidopsis thaliana landsberg
gatgcagcttgagctcttggggaaatgacaagtgtgagaatttggtatttagtgtgcttaattttacttagatcaatgaacactctgattactgattgttatttgattttgggatgaaacaggtaatgtgcttctcttgagaaacaacttgaatctaaatcctgactgttatgaggtttctcaagagagattgatgtccctcgtggtcgacagactcattgattccaatagtaaagtcaatgtaaataagctggcttcttatctttgcctgttctttatattatcttgtggcttgaatctatgtgaatcttttattcttctcaatggcagaacaaagatgaaggatatattgagaatcagcaacagaacattgctgatgcaattgatcttctttcacgccttactactggaattgatgtcaatattaaattcaggaggttaatactttgtcagctgtttctgcttataataggtagaaattcataagttaattatcatgagtgtttacctggttgcaggattgatgattttgaagtcacacctggatgtgcaatat

SEQ ID NO: 74230 - DNA, 551 bp, Arabidopsis thaliana landsberg
cggtccccagcaccgcgcgcccgcacacgaggccgctcgattggacctcgcactccgcgcgcccctgggaggcgcgccacgtggtggcgtcgtcgtaggagacggcgccgaaggtgtcgatcgacacgctctcgcgcgggccggcgtcggtgatctccggggtggtgccaatgccgtagccggtgcaccacgcggcgccgtccgcgtcgaggccgcagtaggagtcgctggtgcccgtcgcgatctcggcgatgcccgcgacgtcggcggcccacgccgtccacacctcgtcggagtcggtcgtgccgttgccgagctgccccgagtagttccagtagccgaggcaggtggggacgccgtccacggccgcgcaggcggtgttgccctcctcgatgttggtcgtcgccgagatcaacgcctgggtgacaccggacagcccggtcgacgtgaaggtggagccgtaggtctcggtgtagatgcggcccgcgcagtaaaggtcgccggcgtcgacgtagcatgcggtctgatcgcccatggcgaccgcgatgcgc

SEQ ID NO: 74231 - DNA, 609 bp, Arabidopsis thaliana landsberg
  unsure (1)..(609): unsure at all n locations
cgaagaattagtttgctgaaggccagaacagtatcgcatgattttatatggtgtgcaatattttatccttggggttggcgataaatccatgcaaaaattagccttggcattgagacactaaaaaaggannnnnnnnnnnnnnnnnnnnnnnnnnnnnnnnnnnnnnnnnnnnnnnnnnnnnnnnnaaaagtcaactgggacaccccgatttggagacagctaacatcttcacgtcacacacaccaccaactcgccaaccaccgtctacacttagcatttgtgctaatcgaccactcgcttagctgaactaagcgactgtaaccacattttattcccttgttgtattctagagtatcctaggccctactcacttgtctaaatactgtgctatacccaataaacttcatttaaactattctctctattgcagttaccttgatcaagtaattgcgagtgctttaatttggggagaaagcatcagtgacgaaagtcaagtcgaatagcaacagtgaaaagggaagtcaacaaactcaacggggaccagaagcataagtgataagttgctaggaaccctgttaaaaccctacattaatacaataaacatgaata

SEQ ID NO: 74232 - DNA, 609 bp, Arabidopsis thaliana landsberg
tacattagaaagaatttgtactaatacctttttttttaagagccaacgcttgcagatgttctgtactatagcttctcctttttgttaatcaaacaattcccaccgtttccagtatagagaggcttatgctttttaacactacaagtcttattgtggtgctttcaatcttgccttggaggagatgcagctgttgtttctctcgctgtacctgcaacaaccgagttttagacaactttgaagatgatgagagagttcttaatttgctgatcagaatcaaggctaaccattgggctggctttctccggtaggtgtttgtacagttgtaggttgcggcggttcttgagtctgaattagatcctctgtttggctatcatcgggagacaaaacttttagctgctcctcagtgatctttgagtaatcctcggatgtgtaagcttttggtgattgtgaatcatctgcggttttcaatgaaatcattcttacctatgttcactactccatttcatgaatatgaagaatattattaaacattaaaacacttgcagtaggtttcaaaattgcccctgcttgaagagctttttatctagaagaataaacctacttttttat

SEQ ID NO: 74233 - DNA, 616 bp, Arabidopsis thaliana landsberg
  unsure (1)..(616): unsure at all n locations
cgagaacgcgttcttcgcgtaaacgatgtagcggccggctgcgtcgtttatgcggcgggtgcggccgatcgcatcgcgtgttggcgagatgcttgacgatgtcctcctcttcgacgaaacgctcgatctcgcgctccatcgagtcgggaatcttgaagccgtcggcgccnnnnnnnnnnnnnnnnnnnnnnnnnnnnnnnntgtgcgaggccgagatgatcacgcccgcgtccacgcgcatgttgcgcgccagaaagccgatgcccggcgtgggcnnnnnnnnnnnnnnnnnnnnnnnnnnnnnnnnnnnnnnnnnnncgctcgccaaggcctgctcgaccatgtagcccgacagccgcgtgtctttgccgatcagaaccatgggcttgtgatttccgcggcgcggagtccggcgcaggatcagaccgagcgcctggcccaccttcagcacgatctcgggagtcatcgggaacttgttggcggtaccgcggatgccgtcggtgccgaaaagcttgcgggccattatctcttcttctgtggcgttcccgcgcggtcgtggtcgcgcgactggcgcatgaccacggtgaactcgttcggctcgaccgtaatacgcgcg

SEQ ID NO: 74234 - DNA, 410 bp, Arabidopsis thaliana landsberg
ggaacaacacgcagcatggatatcgccatcgagcatggctcttttcccgcagatggtgatcgttgatcatagcggtgaagaaaccgtgcgcgaggtgctcgaccgcggcttttgggccgcctttaccatttacccgtttacaaaaatgggcaacgaacgaatggttgaagtagtgaagcaatatggaccaaaaaacataatgatcaattccgccgccgactggggcatcagcgatcccctcgccgtgccgaaaacagccgcgctcatgaaacagcatggccttagcgacgaaaccgtcgggctcgttacctacagcaatgccatcgccgctttcggtcagagtggacagatcaatgaatcggatttcgcaactgcagcgatcgatcagagtcaaaaattcagtggcaata

SEQ ID NO: 74235 - DNA, 512 bp, Arabidopsis thaliana landsberg
  unsure (1)..(512): unsure at all n locations
gccgattataaccacacccgggcgccggtgacaggcagcatttccttagggcggcgtggaatgcgaaaaaccgaggcgtgacccgcccgctgccttagtgcaaggccttgcgggcgaaatgccgaggccggaagccgcacaggtacaggcagccgaaataggtcacgatgcccgccagtaccagagcccccaggcgcaccaggcgctcgagcatgttgccctgctcccaggccggcaggtaatgcatgccggccagcaataccgccgacatcagcccnnnnnnnnnnnnnnnnnnnagcaggaacatcgcccagcctggctgcggctggaacagctgctgnnnnnnnnnnnnnnnnnncagcaggccggcgttcaggcaggcccccaggctgatcgccagggccaggccggcatgcgcgagcgggccgatcagggccaggttgaacagttgggtgcagaccagggtgaataccgcgatcttcaccggtgtacggatattctgctgcgcatag

SEQ ID NO: 74236 - DNA, 695 bp, Arabidopsis thaliana landsberg
ctgttaaatatgatccattacttgctcggtaacccctattatcggtattcatttctataaacaaaacttgatgtattaaggcctatggactatacatgtgggtttagcttcaaactatttacgcatgtccttctcaagagatcatgttacagagctgcagaaaaaaagaaaatagaaaatacttttttgtcataatccaaaaccaacagatttgattgccattggcacctaactttggactagacaatcgcatatgcattgatcgtttgttcacacataatgtgtatataatatacagagtctacaacgacgagattctattacataaataggaatcttacgcacataacttgatgatgaaattatattttacacaatttctgaccaataatgtgctataattaaactgtgacaagacaactagaggtaatcacacgtacgtacaccatctgtcaacgcggcattttaagttttttattcactatcgtagtatcgctgaccttttaatattatcacaaaatactaacattccattacttgcgcttcacttctttatttttcttttgcttttcttgtttgaccaatcatacaagaatgtgcatactttcatacatgatatatcatatatatacacgctcatatatacatttcaaaacttaaaccgcctttttaaaatccaaaatttataaaaccct

SEQ ID NO: 74237 - DNA, 486 bp, Arabidopsis thaliana landsberg
cttttaaggaaccttgaacatccaaacattgggccgtactttgggagggcgacagcttttaatcaacctttttatatatcctcagcgtacatatatataacctacctacccaaggcagagtgcctgaaaattcattgatcaattctgtgataagtgcatgtacaggtagaagatcgttactttatatacctgaaatatgtgcacccgggttcaataaacaaatatatccgtgatcattgcggtaccaacacagaatatgtggttcataagcttactcgtaacattatgtctgggctggcttatatccacaataaaaagactgtccttaggtaaaggcacaatatcacctgtatcaatcttggcgaagattgtcctagtgtagaacctaaacatataggatcccctatccttgctagcaaggatatcaaaaggcctaatgggctcgtagacgcatatggggttgtcaagcttgatgactccagcatg

SEQ ID NO: 74238 - DNA, 592 bp, Arabidopsis thaliana landsberg
tattttcaattatttttccctattaaattgagattattgttatttaagaaaatgcccaaacttaattttcggggttgaaaattttgtttaaaaataaataaaatataagaaaagaaagaaaagtataatttgggttaaggggtttgaatatgattgatttgaatcgtcgtcgaaatgtatacgtcacctaacgcttttgttgctatactagtatcattaagtggaaattttaaagtcattaaaactcttctcatttttgtatttctaaaagagtcttaaggggtttgaatatgatttaaattatcttacaagtgtaaatgccatctaacgcttttgttgttatactagtattatttagtaataagatgctaaagtcactcaaactccagaatcaataatactccaagctatacatattagaattctaaaatagtatgaacactttcgataataaaaataccaaacttatttgggacactaaataagtttgggccgaaaatatttaaaagcccaatttaaactaaaattcatttaggctcttctcttctactaccttcttctatcgagccacaccgaatgaaatcagtgaact

SEQ ID NO: 74239 - DNA, 277 bp, Arabidopsis thaliana landsberg
catcactttctaagtgaggtttttagttttacgtccgccatgtgttctatgtaatgcctagctgagaaagttcttgccttgtctttattaatctttgagaatagaaaagacgaattcgtctagcgatcatctgatatataggatactacaatttatcacttgaactgttgttgttgttgctgtccttgctttgattctcaaagaaagctgattgcattactctccattccattatcagatattagaacatgcttattgaacggacattttcttggac

SEQ ID NO: 74240 - DNA, 450 bp, Arabidopsis thaliana landsberg
ggggaatgagtagattgaagtgacaaagacaaaagaagggtaagaaaaagcatgtacctttctccttgtgatgtgtcggattgaaacgggacctcattgaaataatgaagagaagcaacaccgcagatgtggaaagtaacaaaagtacagaagcagaaggcatcctcaatgtaggcatagatggtaattgcagatgtggttgaatgaaaggcggtggagaagtcgaaaggacagaaagagcaataataatacagaggaacaaccaagcaaaaacatcgaggtaccactttggaaaactcggtctgtctttctcgttactgacatctatgctcggttcctcaccaatgataccgagatcttcgtaagttcctagtaactctgaatcaacaacccctttctttcctggaattgccaagaaatcaagctcaatcacaactgtccatctaacga

SEQ ID NO: 74241 - DNA, 433 bp, Arabidopsis thaliana landsberg
  unsure (1)..(433): unsure at all n locations
gtcgatggggatcggctcgccgagctccctctgaagcatttcgttcggatcttcgcccgctttcagctcgggcacggtctcgccctcgaaggtctgccggcgaaccgtgccgttcttgctgcggatgaccgctttggggcgcacgccgaggacgnnnnnnnnnnnnnnnnnnnnnnnnnnnnnnnnnnnnnnnnnnnnnnnnnnnnnnnnnnnnnnnnnnnnnnnnnnnnnnnnngcgctgaagggggtttcgacgtcggcgaggacctcgcgcacgaccagggtagggttcgtgcctccggacccgcgcaggaactcctcgcgcgtgggaaatggcatgggcgaattatgcctaacgtcagagtctccaggctaaggcagtaggtgaattgacgagtaagtcaggaccgcgtctatttggagttagcaatca

SEQ ID NO: 74242 - DNA, 412 bp, Arabidopsis thaliana landsberg
  unsure (1)..(412): unsure at all n locations
cacaactccacccncaataaatgatttcgacatcacatcatacaaatnnnnnnnnnnnnnnnnnnnnnnnnnnnnnnnnnnnnnnnnnnaatcaatgtatattatctaacacatatgcattaaaaaaaccgttcaataatatatgacgaatctacaaacactatacattaaatttcaaaataaacacaatatatcttcttacaaatacacaccactaccattcacgtaaaaaaaaaaacaaattttctactcatacaaatacaaaaagacacctaataattagaacctaccaacactctaattcaccgtatatacatattccaacactccttcgtatgataccaatgaaatgatgaccattcccctcccagcataatatactactgataaacagctaaattgtggtgaacta

SEQ ID NO: 74243 - DNA, 411 bp, Arabidopsis thaliana landsberg
acgccacacgctcgatgacgccattcatggacgtctgcgcctcggcatcatgtcctatctggccgatgcggaaggcgcggattgcaatgagctgaaggcggtgctagaggcgacgcagggcaatctcagcgtccacctgcgcaagctggaggaggcgggctatgtcgagatcgtcaagagcttcaaggaccgcaaacccctgacccgcgcccagatcacgcccgcgggccgcaaggccttcgccgcctatctggaggcgctgtcgaaactggtggagcggcggtaaagcccgcgccaccacaggcgatacccgcccgcgcgttcggcctcggtttccggcgcctgcggtttgaccaccagggtcaccgtgacaaaggccagcaccagcagcagcgcccaggcgcccatctt

SEQ ID NO: 74244 - DNA, 304 bp, Arabidopsis thaliana landsberg
ataccctttaggaaacctttccacccctggcaccctttactcgggggatcacccacttttgagaacatgcgcttgcagaaatggatgatgttatattgttcggcacttacatgactggtggttaaatcaccgccaatctcttgttgaagtatgaccaccctatctttccagactcgtcttttacagacgctgcgttgggggatcgagctactatgatcatggcttataccataagatgctgccttccgctaaacgtatcgcatgacaccgagttacactttgtttgggtgaatctgatgggagt

SEQ ID NO: 74245 - DNA, 147 bp, Arabidopsis thaliana landsberg
  unsure (1)..(147): unsure at all n locations
gcaagagcaaagcgcccaagaagaannacaanacacncnccnaagaaaanaaaaaganacnagnnacaccaaaacganaagnagacnaaaggaananancncaccncgccnncnnagacacaagaaacancaagaaaaaacnccacc

SEQ ID NO: 74246 - DNA, 358 bp, Arabidopsis thaliana landsberg
cagctactctatgtgattctggatgattatgtcgcactgtatctttggataagtctgttgaatgacgcttcgacgtgtaaatcaatagattaggtatgacctacaagagcgccatgttcaactgctcttacattgatctgagagacggatcttgatctcttgaactggttcgctgtctggtgtcgtgccatgctagtcatatctgataggacctacataccacgctacattctatacttgagctatttgcacagtgtatgcacattatgtgactgctctgtttcttgttattgctatgagtttctcctgtatgagactatatataatacagcgttgctgctaacatggtatagctaat

SEQ ID NO: 74247 - DNA, 652 bp, Arabidopsis thaliana landsberg
aggccctatgggcttttaagcctacattaaatatcttaacctatcatttatttcgataccttgaagaggaagggagacgaatggatcaaagaaattcttattaacttatcagtgaagcaattcgcttccaattacagaatgaaataaatggatacatgtaatcaaagaacttacatacgaagagatccatacatataacattatcagcatctgtttaaaacaacccaagaaatccattttcaccgcgcaatgaaagcagattagaaggtggctggaccgtggaagaagtgttgttaccgtcatcttcaaacctcatcgctctagacgagtcctcatgactcaccatgttacaattcactattccccattcacttactgccttgcacgtgccaacctcaacccctgatggctgacacgcttgttggtactcgctttctcttggtagaagagccaatgaatagtcatagcctattgaaagaggcttgtgatgaggttgaaacattggtggttgaggatattgatgaacactaatctcttaggcttggtaagctcaacattgagattccttggaagggctttctttccgatgaactacgagcttaagcctattatgctgatgttgagccacatcattcctactttgacagaattt

SEQ ID NO: 74248 - DNA, 512 bp, Arabidopsis thaliana landsberg
  unsure (1)..(512): unsure at all n locations
cctacatccatcatggtcagccatgatcttggcgtgatcacccatatgtgcgcttccatgccgtcatgcagggcngccgcgtcatcgagcggctgacggccgccgacctcgtcgagggccggatttccgaaagccataccagccgtctcgtgctcgccagcaagggctttacccgcgactcgcagggttagcgcgcaccgcgacctcgcggcaaaaaatttccccgatacccatccgagcaagaaagctgatcgcgaaaacagcgtcattttgcaaaaattatagtctataaaatttatagactatatgccattgtctgtcggcggcttcgcctggtcctgacggcgagccctgatgatggaaatggagagggtcgatgaaaagacagatcaagcttggtgcattcctgcccggcggtggccagcatatcgcttcctggcgccacccggaccagccggctgacggnnnnnnnnnnnnnnnnnnnnnnnnnnnnnnnnnnnggcgggcgagcg

SEQ ID NO: 74249 - DNA, 516 bp, Arabidopsis thaliana landsberg
  unsure (1)..(516): unsure at all n locations
gcgcacgaggtttcaatcacttcgtcggcactttcatttagataatcgagaacctgacttaacggcacgatccgcttccctctgctgtacgaccgccaaaccggctaagccgcttttgccgttcttgcaagcggattagccttgacctccaaagccttgtccaccagatgacatacatgacgatgcccgccttcctgcctgccgatattgaggcaatcatcttcgactgcgacggccccctggccgatacattcggcgcccatttccgcgcctttcgtgacatcctggcggactatcaggtcgcctttgatgcagaattttaccacgcccgcctgggcctgtcgcgctaccagttgctggaggatctgaagcagacgcaaggcaagccctttgatgaannnnnnnnnnnnnnnnnnnnnnccgcggcatttcttaagcatctgtcggctattcggccaattccttacacgcacgacattctgcgcagccaatatggacggctcaagctggccgtcg

SEQ ID NO: 74250 - DNA, 359 bp, Arabidopsis thaliana landsberg
agggaatacctgacagacttcaagtatctcttttttcttcaatcatttggccacctttggggggggggtgccttgatgctcgttgtcttcttccctctcatttcattgctgatcagacactgtcttcttatggtctccatcattgctacccatgacatttttctcgccttgttgattgtcgtcgcgtaagactctaagaagtttgtggacacatcttcacacattgattcgcacgtgaagaatgcacgactactcttttgaggattcttctgtataacagccttatacacacctttaccaaatgctgcgtggatgtgctactgccctattatagtcagtgcttttgataatctttgcca

SEQ ID NO: 74251 - DNA, 471 bp, Arabidopsis thaliana landsberg
agaagtctcacagaaaagtacagtgtcatcatggattgagttctggatggatactgtttacaagaggatagagtagccggtagaatggaaattgttttagtctctgaagtgaagtagttcaactggcacctgtaaaaatatgagaaacctgggtgttgtagccaactctactgagctcacaaccatgggttggagatgttgatgttgacattaatatcaaacgtttcaacggcatttctacgcttggacgttctgacgttgaaactctcaactttaacgcacactttcatttattttcactcgcaatgatcaccatgctagtaaacagtgaattgttggataatggaaatgacccagatgatcaaacattacatgccactgtaggtaatatgacatcaagagcaaaaaagaaaatgattacttggctcgaggcacaagcacttatattgtatcaagagtcacaatctatca

SEQ ID NO: 74252 - DNA, 418 bp, Arabidopsis thaliana landsberg
ggaaaggctcgaattggttgacagggtgaaattttaaatatcgagtcatagattggttgatatctgaagggtgacatctatcaactttcttcaaaagattatcaataaaaattggactgttcttgctcatactctctgcaaccatatactgtaaacccctagtggaatagaaataatccaacattgcttcctcagctaatttcctaacagtgggagtgattttaaacccatttcgggttctcttcactttcgatatctcactgcaaacttcgttaccggtgacggtggcgaaagatctaggggtttgggcacatcggaggagaaacccagttccagaaattgagggtattaattgggtttctagagaaagttgtgatacccatttgagaacagacttgaatctactagggttttgccc

SEQ ID NO: 74253 - DNA, 588 bp, Arabidopsis thaliana landsberg
  unsure (1)..(588): unsure at all n locations
cgaaacggcacgtcggaatgaatagcacggcgggggtgggccgtaaatgcagaaggggtggactgcaaatccgaccacaacaaattgttaacggataacatggtgttaatataagaaaggggttgtgaaaaaagcggacgacagggcagcaggagggcggggccagggcgggggcactgggcggagcataaaactcaggggtgggatcgcgagggagggcggcgaagaggagtgacataacaacagagaaaaataataacggaacgcaacggcggctgccaaaaaaggagtggggacttggggccgcaaagcacaaagctggaatcgaagcaaagcaggacggaaggccgaagggtacgcacaaaccgcagaaccacacaaaaacaccgggtggcgagacgcccgcaatgaaattttggaatgaaggggcatgttgttaaagcgaagtgtgggtctgtgtgaaaggcncttttaaacgttaaagtaaaagacttattaaatgtattaagcttaacggtgcgtccacaacgtacgtgaattcagggtaggtgtatggaaatacgtagaaatatatgtgttgcggtaagt

SEQ ID NO: 74254 - DNA, 545 bp, Arabidopsis thaliana landsberg
cttcgatatggttggtcgtcactgtaaacattttagagtaaaagaatatctgaatattgaatcaattatgaatttgctatttaaaattagtgatatttatagattttgccatttatacacagaaattttagtttaatattaatacagtacatcagtcatcgtaaaacggaggcataacactatacaccttcaattaacaaataaccatttactacaattaaagactttttagtggtatttatagattttatgaatctataagatttttgaaatgtaaaggaatttgataagaaagaactaattaccctcaaagtggctaaatacctcccaaacaaattaatttggtttaaagctggaaataatgttttgaagtcaaacaatgattcaatcacggaagcctaccaaaaaaataaaatgatccaatcacggaagacggcagttaacaaacgccgttaaagaaactgatcacaccgtaagactcgagccaaatataattaacggagtaggctgcttcttcacaccttcgttacttgcctatactctct

SEQ ID NO: 74255 - DNA, 285 bp, Arabidopsis thaliana landsberg
  unsure (1)..(285): unsure at all n locations
tgaatgacgaacatttgcgtaagcatcngccaagganganngcaggaaacaataacgaaagngggcggctcgaaaacgaccagacaccgccctagncacaaccataaacgacgccgaccagggaacagcggacggggcgnagaggacaacgcaggcaccgcaagagaaaacaaagaacacgggagccggggggagcaagggcgcacggcggaaaccgaaaggaacagacgggagggcaccaccaggagaggagccagcgcgccaaanggacgcagcacggggaaa

SEQ ID NO: 74256 - DNA, 112 bp, Arabidopsis thaliana landsberg
aaaaccaagcaaaaaagagaagaggagagacaaccaacaaaaagagaaacaaccccacgcgggaacgacacaccacacgaccacagacagaaagaacgaccaaagacagacg

SEQ ID NO: 74257 - DNA, 1116 bp, Arabidopsis thaliana landsberg
ggatggagactctcgttccatgtttctgtaatgcatgttgggttgtttcatgcaagatatgctgtatataaacactcatttgtgaaagtttctaaactgtgaatcgcgctacaggcaatgctccgaggagtaggaggagaagaacgaaccaaacgacattatcagccctttgaggaagctcttagttttgttattgtttttgtagccaaattctccattcttattccattttcacttatctcttgttccttatagaccttataagttttttattcatgtatacaaattatattggcatcaagaagtatctttaaaatctaaatctcaaatcaccaggactatggatttgtgcaattcgtggaaccaacttgcagcttgtatccattctcttaaccaataaaaaaagaaagaaagatcaatttgataaatttctcagccacaaattctacatttaggttttagcatatcgaaggctcaatcacaaatacaatagatagactagagattccagcgtcacgtgagttttatctataaataaaggaccaaaaatcaaatcccgagggcattttcgtaatccaacataaaacccttaaacttcaagtctcatttttaaacaaatcatgttcacaagtctcttcttcttctctgtttctctatctcttgctcatctttctcctgaaccatggcggcggcaacaacaacaacaacaacatcttcttcgatctccttcttcaccaaaccatctccttcctcctccaaatcaccattaccaatctccagattctccctcccattctccctaaaccccaacaaatcatcctcctcctcccgccgccgcggtatcaaatccagctctccctcctccatctccgccgtgctcaacacaaccaccaatgtcacaaccactccctctccaaccaaacctaccaaacccgaaacattcatctcccgattcgctccagatcaaccccgcaaaggcgctgatatcctcgtcgaagctttagaacgtcaaggcgtagaaaccgtattcgcttaccctggaggtgcatcaatggagattcaccaagccttaacccgctcttccttaatcccgaacgttcttcctcgtaacgaaca

SEQ ID NO: 74258 - DNA, 1092 bp, Arabidopsis thaliana landsberg
gatgcgttgttagatagtgttcctcttgtagcaatcacaggacaagtccctcgtcgtatgattggtacagatgcgtttcaagagactccgattgttgaggtaacgcgttcgattacgaagcataactatcttgtgatggatgttgaagatatccctaggattattgaggaagctttctttttagctacttctggtagacctggacctgttttggttgatgttcctaaagatattcaacaacagcttgcgattcctaattgggaacaggctatgagattacctggttatatgtctaggatgcctaaacctccggaagattctcatttggagcagattgttaggttgatttctgagtctaagaagcctgtgttgtatgttggtggtggttgtttgaattctagcgatgaattgggtaggtttgttgagcttacggggatccctgttgcgagtacgttgatggggctgggatcttatccttgtgatgatgagttgtcgttacatatgcttggaatgcatgggacggtgtatgcgaattacgctgtggagcatagtgatttgttgttggcgtttggggtgaggtttgatgatcgcgtcacgggtaagcttgaggcttttgctagtagggctaagattgttcatattgatattgactctgctgagattgggaagaataagactcctcatgtgtctgtgtgtggtgatgtcaagctggctttgcaagggatgaataaggttcttgagaaccgagctgaggagcttaagcttgattttggagtttggaggaatgagttgaacgtacagaaacagaagtttccgttgagctttaagacgtttggggaagctattcctccacagtatgcgattaaggtccttgatgagttgactgatggaaaagccattataagtactggtgtcgggcaacatcaaatgtgggcggcgcagttctacaattacaagaagccaaggcagtggctatcatcaggaggccttggagctatgggttttggacttcctgctgccattggagcgtatgttgctaaccctgatgcaatagttgtggatattgacggagatggaagctttataatgaat

SEQ ID NO: 74259 - DNA, 506 bp, Arabidopsis thaliana landsberg
ggggtgatgggtggttattatttcagggtaacatttagtttcaattttcaaaaaaaaaaaaaaaacgatttgtttaattttaccaacaaggaggaaaaaaaaaaaaagaggaggaggtggtggtgacagcacacgaaatggacggttgggtataagccaattctgtaatcttcttgttaacacctcctttttctcctccgtttatcctcaaattaaaagtcaatcatatcaaatcccaaatcctcccagatgtttttatcatcttcttcttcctgaagatttgatttcattttcctctctttcagatccctattctcatggcttctggatcttactggtgctatagttgtagccgatgcgtttgggtttccgattcaatctcttgccctgattgcgacggtggtttcctcgaactcatccaagagcctttcgatttcacaccttccgattccttcaccaccaccaccaccactcaacattgcagccccactcgcttccctcctcct

SEQ ID NO: 74260 - DNA, 553 bp, Arabidopsis thaliana landsberg
aaaaagaatcacagataacttcaacttagtataatttgtagggagaagactgttggagcatcaagcagtggacttgtggtggtctttaccgccactagaataggtttcgagtactgtattgatgtttaactgtattgtatatgtatttaattttctattccctgccatcataaatcaagctttggaaaagtctcaaacatgtataatgtctttcgtacacaatgttttacgttcttttttttttgttttcatttcaatataatgatagaagttttttttgtgtagcacagatatgtaaagataatcagattgaaactagctagagaaccaaaaatatttaaatgcaaacaaaattaaagattttatatatgaattacgtaagaggaaacaaaactaaaccaaagtaggaagaacatgttcagtatagagtaactctttacaaactatttcttattgataacaaacttgatttattctcacgccaccgcataaaaaaagagtatttttaactacgaaaaccattatctaacgatatgataatgttaaaaaaact

SEQ ID NO: 74261 - DNA, 341 bp, Arabidopsis thaliana landsberg
gcccaggtttggccgaccgaacaggaaccgctgaccgggtccgaggattggtctccacagggtagaaaccgtcgcccatgtctaatcaaaatcccctacacgattagatacaaaagctttgtgacaagcattggctgcaaaaagtcgtgtgaaccaaaaacctattaataaatgcgaacacattccaactaactcccaaaaaaaataaacttggatcacaagagaagctgcacctaatcctaacattgagagcttaaaaaaacccatataagcccaaaatgtgaggaatgcttgagcatgccacatataggtcgcactataaatcagaaccaaaagcccaa

SEQ ID NO: 74262 - DNA, 403 bp, Arabidopsis thaliana landsberg
ggggaatttgcacgcgtcgtcgcacccaatgttctgtttcagatgctgccgcagccggtgaccgaggcggtgagtttggagccgatgaaacaggccgatctggtcgtcgtcaccggctcgcaagccaatgtgcgcgccggctactccagcggtacgccggcgctgggcgtcggcgccggcaacgtcgcggtgatcgtcgatgaaagcgcagactgcgatgacgctgcgcaaaagatcatgcgctcgaagattttcgacaacgcgaccagttgctcgtcggaaaacagcgtgatcatccacgccgccgtgtatgaccgcatgctcagggcactgaccgctgtcggcggcgcgctgctgaccgcggaggaaaaaaccgcactgcaggccgcgatgtttcccggcg

SEQ ID NO: 74263 - DNA, 448 bp, Arabidopsis thaliana landsberg
atttgatcacttacttgtgaatcccctggcggagcattagaacaggatatgttagataatggaactattgtcttgagattatctaaaattgtcaactcttggaactggttatgctacttagtcttcatgaagtcttgttatctggatcacagttggtcgacgggcggttcgtgttccttgacacaacaaaagctgcaaaacacattccaccagacaccaagcccaatcatgcctgtggtgatagctgatacttctcttttgccaacttgttaggttaaagtatgagactcacaataccttcataccagtttcgaggttatttggatttggggagttagttgcatctaacacctagagttaggagctttgagtcagcatagaccatttttgcgttctgcgctagaccatgtatacatggcacgtgactcgggagtgtttcagttctttg

SEQ ID NO: 74264 - DNA, 545 bp, Arabidopsis thaliana landsberg
  unsure (1)..(545): unsure at all n locations
aggacaccaggcctttggccgtctccttcgggttctcctacgtgtatatcgcgccgnccacgggggcgcgcggccagttctccggcaggatgccgacccccgcgaccgacacgccgagcgccggccggcccgggtcgctcgccaccacgcccggctcgggcgtcgccgtgatcgtcttggtctcgccattgcggacgacggtgaacgtgagcggagcgctgccagcgtcgctgctcacgtatgctaggaaggcatcggcatcgacggacgagaacggctccgcatccggcacgccgacgacctgcgtgaccgcgtcccccggcatgagcccggaacgggccgcaggcgtgcccggcagcacgttggccaccatgaggcgcacatcggaggcccgggagactttctcaagcgcaagcgcgcgcggtgtacccataacgagcgtcgccgtgatgaggacgtacgcaagcacgaggttaatggcgacgccggcaccagcgtgagggcttgggcaagcctcgccgcccagaaggcctgtgcgtgcaagc

SEQ ID NO: 74265 - DNA, 673 bp, Arabidopsis thaliana landsberg
  unsure (1)..(673): unsure at all n locations
ggattttgtagggtttgtcatttgtcatttgtgaatgattaaactaaaccaaagcttctaaaaagatttgagaggttagtttagtaaaattgattttataggccaatgaaaaagggaagaagagaagggttttatgggctaaaagagagcgcacgtgtgcatcgcattctcttcttcttttgcttttgttgagttgcgtaatgacttttacgtgtatccctcgtgcgtgtgtacgaatgcgaccctttacctttctttgtctcttgagaagttggatattcacttttacattatttaaacactatatcagtaacataaatgaagtatagaaaaacctatcaaacatattttgaatgtttttattctaatgctttgaaaaagaaaaagaaaaaatatatatatcataatacttaagtactatggaatacgtaatatacaattatttttgtatgtgaatatccaatttcatttgcaatgttaatatacattttttagattttatcatcaatcatggcaaaatatagtcttttgaatagatgagcatatccttagtagaagccactcgaagcaatcatggatgtcttccaatgaccatctnaacattaagtcattattgggaactttaagaagtgtataacaaatacttagatgtattatgaggatgctcttaaat

SEQ ID NO: 74266 - DNA, 564 bp, Arabidopsis thaliana landsberg
  unsure (1)..(564): unsure at all n locations
atatttgatagcaatagttttgtgtattatataaaaaaatgttgatactaatacatgtatatactttccacagatccgtacgagtcccacatttgtgaatttattatttaatcaaataaataaaaaagtattgcaatcatatgaccacatcagtctacagagctggtccaaatccagccgtcttttgtatctgaccaaagtccatcaattatcattcaaatcgtacttttaattttcaattagaactattttgttctatataattaatgtagccaccgtccactacaaatcaatctcataactcattactcaataatcaccaaacaaagaatttgagcgtattggtttcgcattgtatcgaatttgttttaactgattttaaaatcagcagttaaattagcaagaaactatgagaagagataaaggctatagntctatttttttatttttttctaagtttacgcagatgtttttaaatactgatgtctatattagcttaagcaaaggttgatagtgagacaggtgatatacaatcattacangtataacccagtccagcaccaa

SEQ ID NO: 74267 - DNA, 403 bp, Arabidopsis thaliana landsberg
  unsure (1)..(403): unsure at all n locations
gaacgcgcgcaccgagctagggatggacggccggggtcaagttttctataccttatggctagggtgggagcttgtttggccacctggagactatagtggactaccgaactccatgatcaaggctnnnnnnnnnnnnnnnnnnnnnnnnnnnnnnnnnnnnnnnnnnnnnnnnnnnnnnnnnnnnnnnnnnnnnnnnnnnnnnnnnnnnnnnnnnnnnnnnnnnnnnnnnnnnnnnnnnnnnnnnnnnnnnnnnnnnnnnnnnnnnnnnnnnnnnnnnnnnnnnnnnnnnnnnnnnnnnnnnnnnnnnnnnnnnnnnnnnnnnnnnnnnnnnnnnnnnnnnnnnnnnnnnnnnnnnnnnnnnnnnnnnnnnnnnnnnnnnnnnnnnnnnnnnnnnnnnnnnnnn

SEQ ID NO: 74268 - DNA, 585 bp, Arabidopsis thaliana landsberg
  unsure (1)..(585): unsure at all n locations
ttccgttaaactccattgctaaactttaatctttattggctttttctgtcgggtttttacgcaggacaagaannnnnnnnnnnnnnnnnnnnnnnnnnnnnnnnnnnnnnnnnnnnnnnnnnnnnntgattactattccgaagataaagagagaaactttaccatatgggcactcactgctggtattctgatcagagttgcctccattgtttatcagagattaccgaagtttcaagaacgtaagccgagtttctggaatcagcctaactgattcttgacttgatctgattgagaaaaatgaaactttcatgtataataagcgatacaaatcgaatcttctttaaatgtgtttcaagaatctatctttactctaagtgaaaacctcgtaaaacttctcggtaacgagaattcccgaatccatagactccaatggatcttttctgagtctgtgtcttaaacagttcggtataacaataccaacatcttctgctgtaacttgatctcttcttggagtgctgcagtgctctagctgctctgtttattacatgtctnctctaatccatcaacgncagctagcacagactt

SEQ ID NO: 74269 - DNA, 430 bp, Arabidopsis thaliana landsberg
ctagcagactcgtgcaggattcctccacagactgaagtgcggggacaactgggttccgggaacgacctccggacttggagcgggagaaagtttaccggttccgagaatctggatccggattggaatcgtgagaaaagttaccggtccgaggattttcgaccatagtggaaatgtcataaaatctatcggatccgggaatcgcgacctgacgacaatcgcgaccggtcgggatttgcgaccagtggtgaaatgcgccaggtcgaacttatcgaccggtccgaggatttgcgaccaggagggaatgttgaaaaattatcggtccgaggatcgcgccaggtcggacttatcaccggtccgagattctcgaccaggacgagaaatcgtgaccaggtcgaacttatcatcgggtcaaaatttgatttttttgacc

SEQ ID NO: 74270 - DNA, 155 bp, Arabidopsis thaliana landsberg
catttcacctgaaggagtcaaaggctgatccgggaaaggttagtgccattgtggaatggccagtacctactcatctctagtaatgttcgtagctcccatagacaagcctcattctaccgttgcctcattcgcaacttcatctccacttcacctat

SEQ ID NO: 74271 - DNA, 572 bp, Arabidopsis thaliana landsberg
  unsure (1)..(572): unsure at all n locations
aaacaaaaaactatatttgcaaatattgatgaacttaaaaacaccaattacgaaaccttaccagtttggtcgatcataattcgtcttgctctgattctgtttcctttttcaccagaattggcgttaatattagtttcaacgcacatcatttagtgtatgtgagaccaaccaaatacatagctttcagaaaaccggaaatatacctggcatagatgaccatcgtaactaaacgaattcgtaaacattaactttgattggagaaaattggtctaaattgtattgaacctctaaaacagtaattggaagacaaacataactaaataataataattaaaagaaaagagcaaagcaccacttacatctcataatgaacttgtgtaaataattagtatggagtccactttagttntatgaagtgcttatgattcttttgctactgccatctgcatatacatcaaatctaagttagaggacgtttgtgattttaaacatgcaatcaagacgaatatactaaagatgagtttgtggaaaagagttttagagaaacgaacctatggtagttatttttcaaa

SEQ ID NO: 74272 - DNA, 386 bp, Arabidopsis thaliana landsberg
ggggcggggccccaggatataaaacccctttgccaaccaccagaaaccaggggcccggagggccccgaaaaagcgatggcccccggcccgaaaggggaaccaaaaaaaggcggaaaaaaagggccgcaagaaaaaccaccaggacccccgaagccaggggcggagccaaacccaacccaaaaccacgaggagggggggcccgggccaaacccagggaaaaccccgggaaaaacaaaggccaaaaggctcccaaaacccgccagccactaagccacagggaaaaaacctggcgagaagaaccccccaggcgggggaaccacaccccacaaggcaagggggacccccaccggaccggcactgggaaaggccaagggcccaaggcgcga

SEQ ID NO: 74273 - DNA, 231 bp, Arabidopsis thaliana landsberg
cggcatctcgactcggtgcgctcaacgcggcgatcattgccggcaatccgccggagcggtggatcgttcagttgcaggcgttctgggacaccatctgtcggccgccgttgctgcccgctccgttcgccacgtcgctcttcgacggcatgagctggccgttgccggagcagaacgggttgagcggtaaggccgcacatgacgcgatgatcgagggccaggctgggttcttcc

SEQ ID NO: 74274 - DNA, 936 bp, Arabidopsis thaliana landsberg
atcatgtatgtttcaaattttatgaattgcaataattattaaaatttttaaaaatcaaatgtttatatattttttaaaaacctcaacttaagagcttacgattggacattgccaaacatttaaacttttatccaaacttttaacttcaaaactttcaaatcaattataaaaatattgctaagaatctttgctaagaattcaccagtatagattctctaacaaatcttggcataatcattattattaaaaaaaactttttgtagagttcttgttttttcctttatagtttatttttctttctctttttctttttttttgacagaatctaacaattttttaataaaaatttaaaaatataacactatatatgtatcagttaactaacataaaagatagattaaatgaccaatggaggaggtgacggctccgacgatggtggctccaacgatggtggtgagttcggcaacagtgtgaatctagtgagggcatgcggtggatccggcgagtggttctcgcgaggatggtggcttggaggacggcggtggtggtgaggacactggtagctccggcgagggcagtggttccaatgaggatggtggcttggagttggaggactgcggtagtggtgatgaagatgacggcggtagtggtggttccgccgatagcgaaactgtggtggtgatggttgttgtggtggtggttaatggtgatagtagcgaggataaaattgtcatattatatattatacatcaactctaatataaactttattgtatatgttagtttcttcatcatttgctattgcaagttatttctctctctaaagatttgatgtaatttaaggcttacttagccattttgcacgacgcaaataatctaataccgcaaagttcgtgattacgcaaataacattatctaaatggccaaaaataactc

SEQ ID NO: 74275 - DNA, 451 bp, Arabidopsis thaliana landsberg
tctgaaactggttattgctttgcaggcaaggaaaggatgttgtgattgacattaaattcggattttatgacaggaatctaaaacagggccttacttgcagaggtaaaatgacaactatgcatgggactgatgataatatattcgaggcattgtggtaattgatgtttgggtatgtgttactgaacaaacaggaccttacttagagaggtatgaaaaaaagtttctctacatgctatatgtaaaggtgataccatggtgcgatctaaactcactcaccctgcttaaaagacaactcggggtggacatactcagaacaggccataccactatttcggatgtgcatcacttatctatgttaccactatttagagttggtatcattgttgcttgacaccacgcaacactgttcacacaagtacatatattgccactctactatataattatctct

SEQ ID NO: 74276 - DNA, 197 bp, Arabidopsis thaliana landsberg
tatcgggtcaaggaataaaggaattcaaagaaataatgctggttttataagcatattcggtgcagaagataatttgattatccatgcatattctccattaaagagtaagaaaggtcttttcttcttgtgtgcaagaatatacaaaaacaaaaagcatagatagagtggagaagtggtcggtgtgatggcttttttat

SEQ ID NO: 74277 - DNA, 598 bp, Arabidopsis thaliana landsberg
caaacttcacatcatcttgattgcttgtagctttagcttttgtttgtgaagttatttcctaacacatattatgattgagtgctttatagtattagcgccttatcttttgtcctttgatgactatccagctttgctgttgcataattaaccgtgatttgctgcattcgttttcttttttcttgatgcttttaattgggtacatgtgaccctaattttctaaatcttctgatcttaactgattccctgacttaaagtatatgaacacctccagttaaaaactaaagctgcctgctttctgagtgtttagtagcctttacacgtaagaaaccgcacagggaacaatcttaatcatgattaatttaaataaagtgacatttctaatctaataattttcataatcccacttgctccatactaatcaatcatgtttagtttaataaaattcctctattctgataaaactttcttttatcgtccattgcatttgcaacccattatcaaactccacctggaaatgtttctttaattgacttcttcatggtactttggagaataagggttttatgggttgtgtataaaacacttgatatcttgagat

SEQ ID NO: 74278 - DNA, 321 bp, Arabidopsis thaliana landsberg
gcaaaaagaaatgggcgcccgcactagcctatatcgatagtgggccgagccccacccagccgcggggtgggcctgttacaacggtcgccggctggccgcgcaacgggaccggcctggctgcgggtgaccgccgtcgtccaggtgcgccccccattggccgacacgcggaaggacggggtcgtcgaatcccgcgcccccaccgcgacgacggtgtcaccggacgcgcccacctggctgaagaccggcgcgcgcagcaagcttgccggatccgccgcggcgcctgcaccgctcgcggtcccgggtccaggaacgccgccgtgt

SEQ ID NO: 74279 - DNA, 580 bp, Arabidopsis thaliana landsberg
ttatacttccgataaaatggtcgggtgtaaaataacatctggagggcgaaatgtaccaaaagctttttttgttaagaagaaaacaaatactagcaagagcctgacaaaactgttcccactcgaacaagagctattcaattgtgcacgtgtttctttaggcttgaatttaaccagttaagtcagttttatatgagacgaaagatagatgaacttgatttcagccactcacgttggcgataccgtcttttcttgcttgcacacaaaataatgacggaattgaacaaaaataacggcgccgttctataaattatatgagccaacataattgattggtagcacgcaaaaaagatgacttaagaaaaggaacaaccgttttttgtcttcatgacttcaccgtccaaagaactcgtgggttatacaagagatttttttccagatgtatacaaacattttgttgttgatgttgcaatgtaatagttatacaagatttctatgataattctgacaaataaaggtttctattttttttttgaaaaatttactgtaagtggacgagaaatttcataacttattttgctcc

SEQ ID NO: 74280 - DNA, 576 bp, Arabidopsis thaliana landsberg
tttattgtgcctcctataacagactcacgcgttatatatgacactggcgcactactctccagtgatcatactttcattcacatgactttgaccccatatgacataaccatctgaagctactttagcaccaggaacaattttgatcacgtcattcttgtgtatcaatcggccatcaatctcctctataccagtcacattgctttccttgtccaaactcaacaatataagagtgtcgggtgccaagttcataagctttgcgatcgcttgagatgtttttcctttacccatagcctccagatattatcctagtatgataaaggaaatgagcatggcactagtctcaaagaaatctactcccttgaaatcaggagaggttgcaggtcttagcgctgcgcttaatgaatagtaataagctgcatttgtccccagagcaatcagaacatccatattagccgatcctcggcgtaaagccttgtaagagccacgataaaatctccaaccaatgacaaactggacaggaatagccaaaacacaccttatgatttctacaaacgggagcatattgatgaccttaaa

SEQ ID NO: 74281 - DNA, 463 bp, Arabidopsis thaliana landsberg
aatatattgtcaaaattattgtgggatctttttaaaacttttgtcaaaaatatggttggatagactgacactgattcattgtggttccgacttttgtctgctcggaaaaattttgatcgttatgtatccccactttgaatgcaatctcgaggcagtctatatatttgtaatggcgaagttacacacgtatacatatcatatggcatctagatttcttgaaattaatctctaaaagtatctttttaaatccaaaagaaggaagaaaatttcaaagacaaagaaaggagagcatatatccaacgtcaaaggggccacgatgatgaatggaagacagaactaccattcctaccttgacccatattcactgactaacgagcctatgccttctgcgcattgtaatgtttcaattaaacatcgatatctaaatcatctcattgttatcacatcacaccatatcgttgaa

SEQ ID NO: 74282 - DNA, 446 bp, Arabidopsis thaliana landsberg
ctgtggattacaaataattgcgtccatatatcttatgcacttatatagactagataccatgatacttgcgcttaaataattgaacacatccgccgaacacaaatcatggtcacatccacatgaattctttcattacttttggttgagatacaagtcccaacgggtcaataggaatcttgcactactttaattgtatatagcttattgcctatacagccaatactcagcttggcacacaaatcaaatataactaaaaacactccagtaatcagaaagaaaccaatagaactgcacggaaaacaaacttttttgagtaaccaatgtatttttaaactgtgcaaatacaaaagaagagtctgattacacaagtttaaattatgatccgggcaaatagaatctctcttcatagggctctgaaacgtataataaatgattaatagctggac

SEQ ID NO: 74283 - DNA, 208 bp, Arabidopsis thaliana landsberg
ggcgctgctctgccagcatcgcacatcacatttcattatgggtcctggacgtcatttgggacaggcgccacgttcaaacgtatatccaacgcgtggtccaactacactagcacatactttgcctcgagtcgagagtgcagaaccaaatgatgaagacagaaaagctactgttgcgagtaagaatacagactttgctgcgctggctgac

SEQ ID NO: 74284 - DNA, 144 bp, Arabidopsis thaliana landsberg
gccccgttcgcctgtctcactgttatatgactatgccatgaatgtgagaacggacctatgagcatgctgatttgcacgttttgcagcaatgacaagcgtgaacgcaaacatttactgctacacatgcgagagaagggcaagcct

SEQ ID NO: 74285 - DNA, 517 bp, Arabidopsis thaliana landsberg
  unsure (1)..(517): unsure at all n locations
agctgggtatagatcaggataaataaaccgcattactggtggagaaatgggccgctttttgaactttctctctttatagatttcccataagtgcggcgctcgtggctaaaatagataacctctccttacgtgtagattcaaggccatnnnnnnnnnnnnnnnnnnnnnnnnnnnnnnnnnnnnnnnnnnnnnnnnnnnnnnnnnnnnnnnnnnnnnnnnnnnnnnnnnnnnnnnnnnnnnnnnnnnnnnnnnnnnnnnnnnnnnnnnnnnnnnnnnnnnnnnnnnnnnnnnnnnnnnnnnnnnnnnnnnnnnnnnnnnnnnnnnnnnnnnnnnnnnnnnnnnnnnnnnnnnnnnnnnnnnnnnnnnnnnnnnnnnnnnnnnnnnnnnnnnnnnnnnnnnnnnnnnnnnnnnnnnnnnnnnnnnnnnnnnnnnnnnnnnnnnnnnnnnnnnnnnnnnnnnnnnnnnnnnnnnnnnnnnnnnnnnnnnnnnnnnnnnnnnnnnnnnnnnnnnnctttct

SEQ ID NO: 74286 - DNA, 608 bp, Arabidopsis thaliana landsberg
  unsure (1)..(608): unsure at all n locations
gagtcaaaaaatgtagcggcggacgaggaagaattgcnnnnnnnnnnnnnnnnnnnnnnnnnnnnnnnncttctacctttcttaatctgccaccggtttcttggatcatccgtgggatcaccatcaaaatcaccaaaatgttgctagaagatcttagaaaatatgttatcatgatccacaaaagtgatgttaccacttgattagatttttgttgtaaaaacacataaaaatgaaaagtctcattattttgcatatgaatccagataggaaaaaaataaaacaactaattacattcatttgaatgaacaaaataaaacagacataaccaatactatctacttatatacaaatgtatgtccaactcgactctcctattcctgaaaaataagtcgattggaaaaataagttcaatgatgaaaattattttttcgtcaataaaggatatttagtccatgctgtgaaaaaaatggaaatatttacaaagatttgagaagttggaaaacagcataatgctcatgagataataacaccttcgaagtctttttcctttatgtagctctcgcttgtacgtcaagactcacagaaatcgaactgtccactttattttt

SEQ ID NO: 74287 - DNA, 431 bp, Arabidopsis thaliana landsberg
  unsure (1)..(431): unsure at all n locations
nnnnnnnnnnnnnnnnnnnnnnnnnnnnnnnnnnnnnnnnnnnnnnnnnnnnnnnnnnnnnnnnnnnnnnnnnnnnnnnnnnnnnnnnnnnnnnnnnnnnnnnnnnnnnnnnnnnnnnnnnnnnnnnnnnnnnnnnnnnnnnnnnnnnnnnnnnnnnnnnnnnnnnnnnnnnnnnnnnnnnnnnnnnnnnnnnnnnnnnnnnnnnnnnnnnnnnnnnnnnnnnnnnnnnnnnnnnnnnnnnnnnnnnnnnnnnnnnnnnnnnnnnnnnnnnnnnnnnnnnnnnnnnnnnnnnnnnnnaaaaccgtttcctcatatttaccccatacaatttgtcctctcaggtgcattcctcatttcataccttttttattaccctttaagcttaatcgtctctcttaaccttccctttgatgtatattatactaaatccc

SEQ ID NO: 74288 - DNA, 474 bp, Arabidopsis thaliana landsberg
attaacacatctacttgttgcggtctaagttatggtaatttcttctcacttttatttactagttgaattgtttgtttgtttgttttgactcaaggaagagtcattgagtgtggtttgttgtacatttgtgttttcttgttctgatgaataaaaaactctgatttcgtttgacaattttaatggttgtttgtttttccttctccagaccttataagcatgagatggagctgcgataagagtatcaagctccgtgtctacttatcttagtactcactttggtcaacatttaggagtttatgtaattagtaacttttgctaagctttcttagagaaaagaggtcatgatactaagaaagtatttctttgatatgaacacttttaattttgaagttcataacatctacaaacttgttgatctatttacttgggacataattggaactaaatggcctgtgtgatatctttgtagatcaa

SEQ ID NO: 74289 - DNA, 599 bp, Arabidopsis thaliana landsberg
  unsure (1)..(599): unsure at all n locations
aaattatagattttaataaaatcagtactgccaaagtgatcagggccaagcaagcaataggctgacataacctagagttgtgacttgtgattgtattggttcttttaccaaatgatccaaaacattgattatctacttaagtacttttccggcgtttttaatggcagttctacaaaacataaagataaaattaaataacgttggcttagtataatgagattaatcttgattactagnnnnnnnnnnnnnnnnnnnggtctcaccacgattatctatatatatatatatatgcttatagcttttagttttagtagctagtctatccatgacaaaattcatcaatgagaatattcattaggatccttctgcttccgtaaatgcacgagaatacacacgtataaatagtttcttcttaggaaaaatactactatatagcaaaacatatacatttatatcttcaaaataaaattacgagattgataaaactctaaatgttattctgtcttaagactatttgacccaattactcttaaaatatattagtggttggtctgatatagaatatatcttgtcaacatttatcctctttaattatcaaa

SEQ ID NO: 74290 - DNA, 451 bp, Arabidopsis thaliana landsberg
aaaccggagatttcgattaaggttgaatttattgtggtccttgtggaatggaagagaagtggttgttgttgtcgggaaggagaatggcatcaagagctgacctttaagatagcttctgtttgacccatgagactttttaactaaagctcactgttttcatacccggactcaaaccggctcgattgctaatttgaggactattcggtttggtttcttacagcaaaccggacctgatattaaagttctatacccggcggcgggagaatttgtcaacgaagctaatgtctctagatagggttaggtgaggtttttttttggtctggcacgtttttttcttttttttgggaatcctaagccaaaatccagattcatttcataatcacggaactgtttttccatcgattgagagctcattgccttatgcggcgggctactagagatgttttatgat

SEQ ID NO: 74291 - DNA, 876 bp, Arabidopsis thaliana landsberg
gagaagataaaccgtcaaagtaacatttaaaacattattaatttatatagaaataaattagtgtcatacactattttaaattggtacaaaatagtcaacaaaaaggaacaaggagagattgagattaaaaacaatggaaggaggagggagaagagtattcagtaattacgatctacaacaagtgacatcgtcgtcgacgacgattcaagagaatatgaacttcctcgttccttttgaagaaaccaatgtcttaacctttttctcttcttcttcttcctcttctctttcttctccttctttccccattcacaactcttcctccactactactactcatgcacctctagggttttctaataatcttcaggtctttgatctctctttctttatatacatatataaaaagatcttgtttaattttatttgaagtatttattgatcttgatttggaaggtctaatatgattttttgtagggtggaggacccttgggatcaaaggtggttaatgatgatcaggagaattttagaggtggaactaacaatgatgctcattctaattcttggtaatttacatcgttggattaaaagatgaatccatttcttcttcttgttcatgttaatttattctctttttttcttcgtcaataactgattaattaattaaacttttatatctcccttgcattttttttgtgatccaatagaactatagactatatatttacactaagacttatgagaaaggattaaacctaaggtataagtataaacaatgtctctaagacattagagtgtactcaggtggagatcaaatagtggaagtggagatatgaagaacaaagtgaagataaggaggaaaataagagagccgagatt

SEQ ID NO: 74292 - DNA, 581 bp, Arabidopsis thaliana landsberg
ctgtacgaggacccaaatctgttcactacaatcttgaatcaagagatcagaaggctgtcgacccttttattgctttcttgattgactacaagatgagatcagctaatctggattaatgttattcatacaagtgacttgttgttcattatttattaggttatacgggtgaaatggtcgcttcatgctagagaagagattgtgttcgagcttcttcagcaactaaaaggcaatagaacaaaagacttgctagaaggaataaaaaagagcacccgcgatatgatcaatgaacaagaggccgtgcgaggtcggttattcactatccaagatgtcatgcaaaacacggttcgagcatggttacaggttagatttttcatattcggagatgatgacataagtacataactctccaagtcatcttaattttttatttggcttgattaggaccagagcctcacggtcacacataacctaggaatctttggaggagtcggtcttttgattacaatagtgaccggtctatttggaaataacgtagatgggataccaagtgccaaagatttttcacaagccttttgcgcttt

SEQ ID NO: 74293 - DNA, 403 bp, Arabidopsis thaliana landsberg
aaaacgtaaggatgagtatttattattcagaattcaaacatcataaataaagatttctaatttattttttcattcgcctatccaggccgaccttacctagttataaataaacgggtcattgtaataaaactccgtacttaaaaaggagacttgcattaactaatcacccaccacgttttgtcttgactgagaattaattgaatgatattttcattggactttcttacatgaggagatttcgtattaaaaatcaaacttagggtttttttcattaaaagtctttaatgggaccttcgggcttcccagcagcccatatacacagcgatttctacacactccacaggtccatattcgacctacggaatcgattcaccggctaacacaaaacctacctagaaaggtt

SEQ ID NO: 74294 - DNA, 262 bp, Arabidopsis thaliana landsberg
  unsure (1)..(262): unsure at all n locations
cccccttggatgggccgggctccgacaattttgagngtagctcgcctccacgctccaaagaatgggggcgccgtattttttactcaccgataccgccgtcttcataaggcttggaactgntgtattgacactcgctttagtcaaaatccggccttggttattccaaagttcggtctgaacttcaacggtttgatcgagttgacttactcgttgaagcgtgaccttaaccggaatatgtcaatgaccatttgttttgagtgga

SEQ ID NO: 74295 - DNA, 418 bp, Arabidopsis thaliana landsberg
ctatttagcgggtatgtgactatgtgtatatattgcggaggattgggggaaaatgtgatttttttgaattgttaggggtgtgacggtcttaaacattacacacatgccttatggtcttagttagaggagttcacgtagagagaaacctgtcctaatggtttcaaagaataaagcttgatgtgacgctccctggggtacttccattgccttgcttgtgattagactaccttgttttgatagattgggatggtgttttgaggaggaacactttcgcatgtttattgaaagctgagtgactgtcactaccggccgtgatttagggttcggcttagtttgccaggggagatgttgttgtatgctcatgctgacgccttatatgtttgaaatctgattgcttccaacgagtgtctgatgaaac

SEQ ID NO: 74296 - DNA, 552 bp, Arabidopsis thaliana landsberg
gtcaaattcttttgtggtcttcttttacttcaatccttcttttggttttatcgaaagcaagtatataatagggataagaaaaataaatgggatgacgagagagaggagggtggggaatggtcaaaggagaaggacaatgatttggccctcttttgtttcttcagtacttttatttcagtctccttttattttccatatattatcactaatcttatcatcttttttgctattcatagcaaaaacacgatccatatctatgcttaaacagactttgatagccaaaagctgtcatgaagttttatagtattaagtgataactatctatgaaacttttccttaaacttttatttgagttatcaagacttgaggaaatgatccttcaatttggcgaaataccgataagttatatcatatgcggcaaaagaaaagttagaaaagttcacaactctttgattactaggtaaggaagaagctatagtatagggtcaaaatgttctatttggttcaatcacagcatatgttttgtcattttatataattattatatattag

SEQ ID NO: 74297 - DNA, 523 bp, Arabidopsis thaliana landsberg
cagctatcgttaaggccggtgtacacgtcgaggcccgcgttgctttcgttgctgccgatgtcttttccggctgagcgggaagctcgccgggatggtgcccacttcctggccgttggcgtacaccgtgatctgggtgccgtcgtccacgtaggtcagataggtccacgtgttgagcggcgccgtgtagttgaccgagtaatcctcgacgtagaacgaggtcgcccccaccagtccggacgtgccgttctgctggatcttcagtgagctgttgccctcggcccgcgggccgtcgatcaggttcgcgctgcccgaggtcgcgctcgggtccacccaggcgccgaccgcccacggtgcgggcaggttgggggcggatgtcgtgatcggcgataccgtcccgtcgaacttcgccgcgtcgccggccttgcccggcaccagtgtcgtcgtgcccgtgatcgttccgctgaagccgtcgctcccgctgtcctggacgacctcgtcactctcggaattgaacgtccagtca

SEQ ID NO: 74298 - DNA, 241 bp, Arabidopsis thaliana landsberg
tggagaaccaagaaggttagtgttgtagactgatgattaacagaagcttttccccgaagaaagctggctgacaccatattctacagggaataagttgattgaggatggtgaaccgctagcagcaagggaagaaagagtatctgaatgtgacgaggaggggaaggtggaaatggtgggcgaaggggtagttaaaaaaagcttaaaggaagcatgggtgaatctgacttcatttgtgaagagg

SEQ ID NO: 74299 - DNA, 534 bp, Arabidopsis thaliana landsberg
ctatatacctattttaaccgtgtggtagtatcgacattttggacgtggcatgtctgcgagttttaaaatttcgatttacttggtcatttgttttaggaattattttatattgctttatgagcagtttgcgagttaggcgagtatcaatttttcgtaatttccttctggctatgaatctgaaatggaagtttgatatatgtaatatgtaaataggtaaatgtgtgtgttgcacctaaagtagtttaacaatcggtgaaaggcgataattgttcccaaggaaataaacatattctgccaagttaatattattcttctttaagacttgaaggctgaagtttagaatgattccatacatcctcgagagtgaatctggcaatggaaagagtataaatcttaatctagactgaaatttcacagattgcatgaaaattgctatgtgattcttttcaccatcgtactctctatttggaatgacttaccatggcacgatctcgtgctgtagctgtgttttctagctacattgaattacaacct

SEQ ID NO: 74300 - DNA, 616 bp, Arabidopsis thaliana landsberg
  unsure (1)..(616): unsure at all n locations
tgagtctgttctaaaaaaactattttattttcctttccaaaaaaaaattaaccactaacaaaactacaattttattttttataataatttttaaaatgaaaaatatacagaactagtttcgatgatgcagtctcctgcatgagttcaagatgatggttcaagttcaacatatacagaactagtttggaatgctctgtattttattttcttatttttctattttttctatttattatttatgtaactctaaggcggattatttatcttgttactttaaattattattttttgaaattacttttttaatcttttgaagtcatttttgtgaacatattttttaaaattattaattattaattaatgtgtggttgattaaaaaaacggaaaaataccaaaaaaaatgtgtaattgacttttttttatctacagctaacattaatttttattttccaagaaagttttgttcatccaaaattgaaaattatttcaaacatttagacataacctttgatgcattcaattagcaaaaatctcaaacagatgatcacttgtatattanttttttgaaccattctattaaaaacaccattaacataaaattatgcataactgaaac

SEQ ID NO: 74301 - DNA, 479 bp, Arabidopsis thaliana landsberg
tatgaacataagcgcgtatttatcattcataaagattgccggtgaatacttattttttatccaccagaaatacaatttggtaggctgctttatgatataatgctttgcaccattgtgactcgtttatgagtattatatatatccactattcgcaatggcccacgatttcttgggtgtcaatatgacgacacatatcctattctgactagtgaatccaaacgtaagcacagtaagtgaatcttggttacatatgtgtatagagcccagttgaaatataaaatacaagtgtatgacttcacacagacaacgcagatacgtcataggctgattatttaactatatgttcactatggggcagcttaggatcgtttatgcagatataatttgaaggtctgatcagatgaactatatactgggaagaaaaaaaaaaaacatgtcggaccaacccaacctagacctgcctagcatgtaacacgatg

SEQ ID NO: 74302 - DNA, 655 bp, Arabidopsis thaliana landsberg
actattgttaagaagaagcttaaatatcgacaaccttatcattattatcatcacttgtatggttcgtatttgtattcttctccatagcaagttccaagcgaagaagattaagtacacacaaaaagaagataattgttaaaaagcttttgaggttttagtttttttggttgggttgaggaacttgctctgatatatatatatataatatatgtttctatgtcaaagacagaacatagagagtttcaagtgaactccaagacaagcaagagctagacacaatactttgaaaaaaataacattattgattttgtgatttgaagaagaaaaagagaaactacaattgctttgtcttaaacccaggaaagtgtagtttgcttgaattaaaatagaaggcttcaattgtggtcatagacaagcatgtgaaagaacgaaagaattcaaagctgaagctcaggtttcgttttcctacttgtgtttattaaaccttacaatgcaagtaaacctattttttaaggtttcaaaatggtttctatcctcagaaggttcacattgatctaaccaaattgttgtactagataaggtttaaaagctactttatacaaaagagtcaataatcaacaatttgtgatgtaaattttgtaagatacttataaag

SEQ ID NO: 74303 - DNA, 283 bp, Arabidopsis thaliana landsberg
ctctggacaaattagggttcgctcgatttccataaaacaagcaagtggagatatttcttcttctctatataattatgtaagtttaaatgatacctctgtttctttgggagtgacctgctacaatccacaaggagcaccgaatgtctggatatatacctccttcattagatgacaaaggcgaggcagcctatattagatatcggaaagctctattttacaagagcaagtgaggcttacaatttggctagggctcttcctgggcccgtaattttgtacgaatttg

SEQ ID NO: 74304 - DNA, 503 bp, Arabidopsis thaliana landsberg
gaattttgtcggcagtgaatcaagacctacagcagtaccagatgattttttggactttccgccgatataattggctatatagcgacgggatggtcgggtagaggctctgtgccggtagattaatggatccgcgaatggtaccgccctggatgacagaatgggtgagttgatgctcgattaattgttgtctcagaaaacacggaaggtaggtaaaacctcgtggtctgcccggcggagatcgatgaggacataattcttgccagcgatattcttactgtccttcatcatctccaatgctgcctgacgtgtcatggccacaggggccttgttgagtggaggagggtaggcagcatgccagggcgtgtgggcatcagtagaggccatcttggatgagcagatgcagttgaccggctggaatgtgagatttatgcgaggacgggcgcctaaccttatgagagattttgtgatgctcattacaatcttggaggggggagggagggtat

SEQ ID NO: 74305 - DNA, 598 bp, Arabidopsis thaliana landsberg
tgggacgcagaagaactgcggaacgtgtagttgatgagcgcttcgagctcgtgctcgaacgatcccgggcggcccgctttcatcgccgcgatgtgggcgtcggtggagatcgcggccgctttgcgcatcgccgtcagctcttcgggacgcttgtgcaggcgcagctcgtggagggcgaggcgcgggtcgacgacggcgcgaggcggccgcttgccgcgcttctccgtcttacggagcttcgcgatcgtgtgcgtgacgagcagatccatttcgtcgtcgaggccgaggctgtagtgcagctcctcgcagttcgcgacgagctcggcaagcttgcccgccagctcgctcgacggatacgcgatatcggcgccgtacttcgcctgcgcgccttcgatgcctgcgcggcggccgtcccacgtctccatctccggatcgcgcggccgcacgaacatcacgacgcgctctttctccgcgccgggtcgcaggacgagcgtcgcgtcgggctcgacgaagccggtcaggtacaagagatccgagagctggcgaaacggatgaaacgcatcaccgttgcgcagcccgctccgcagcgagcgaataa

SEQ ID NO: 74306 - DNA, 600 bp, Arabidopsis thaliana landsberg
gacctgcgatatatgtagatgctgtatcttcttgaatacctgactggacagtgcctcccggtattcaaccagagggtaatgaggttccataggctggttcccagtgcagcgtactgagatttggtgctctttgcattattaaaagttgactctggttgtcgaatccttttactgacaccaaccttagattgcttagtttcgggaatgtctctggtaagaatattgcctgtgaattattactgacggcaaagtccatcttatcgaggatcaattcattcgtctttgagcatgcttcccaaaatgcctccatatctcgaagtgaaaccgagccataccgcaccaggatgcgcctgagtcccctacattgagacaaagatttccaaagagccattggtgagctgttgcgaaaaccagttagcgtaaggcgctccatggtcccgctattcctctgaatcaaccccgcgatggctggcatctgttctagagattgccttgacgtgacagatgcgttctctatctccagagacgttatcctggagcactgaacagaataaaaagcgatattctcacactacagaggcgcagatatcgaatatgctc

SEQ ID NO: 74307 - DNA, 123 bp, Arabidopsis thaliana landsberg
agttgggaaagtccgaaggccatcgtctcatatgattgcggcgctgtgttcacaagagacagaatttcatatgatggaggtggaaagtggtccacacacctgttttaggcctgatctatggaa

SEQ ID NO: 74308 - DNA, 231 bp, Arabidopsis thaliana landsberg
caaagaggagatgatttcaggatgggcaatgggacgagcgttcggaggcccatgttctgtctataagaattcaaatataaacgttaagaccgacatatttaagagcaattattacattagttagctaattaatgcaaatcattgtatataaacatgaggaccccccccccccccgagcatggcgtttagagtgaggggggtaaagcatgtaagaggctcctttggtataca

SEQ ID NO: 74309 - DNA, 138 bp, Arabidopsis thaliana landsberg
tgaaagtaaaaacaaaagacactgcacattcgtttaaagtagaaaccatgacactcgagattataattttcaaaaaaacagaagacgatataggccaccagtcgaatacagccacgacacgacagcaacaaagactga

SEQ ID NO: 74310 - DNA, 682 bp, Arabidopsis thaliana landsberg
ccctaaaatttgacgagtttgagtttgttatataacttggactttgattgtattggaattatccaattattttatggatttactgttgactttagcctattattcaaaccaaattataaaaagtctgttattttataattgattttaaatcttataaccaaacctaaaaatcaagttccaaaaacaaaaccaaatcaaaattttattcggtttaatttgggcagaattttaaaaattcgaaaaaacgaaaaaccaaaacaattgaaccaattaaactgattaaattgaatgcctattgttactttaaacaataatacaacatcataataagatcaatgagactttgaccatcttcatattcactttcaaaagattttcttcactcatcttcattttcaactactaaataaagattttctcttattttctcttcctctatacttagaattctctatttttagtttacattaacatttagaattctccattttagaggttggagaaaaacccaactccaaaatagagttattctaatttgaaagaaaattggacatatttaagagcatcttcaactcatgtttttttttttttaattttgaacttggatttccctccaatccatttctctgtttcttttaattctataacgaaatattttaaatatatattatatttaggtatt

SEQ ID NO: 74311 - DNA, 639 bp, Arabidopsis thaliana landsberg
ggtgaagaataaagtagcgcccccgttccgcatcgcagaatttgatatcatcttcgggcagggtatttccaaaaccggtgagatcattgatctcggcgtccaatatgatattgtacaaaaaagcggctcctggtttagttatgatggcaacaaactgggacagggacgtgaagccgtccgccagctgctgctggataatcctgaaatggcgaatgagatagaagcgaagatcagggcaaagttggcagaattggtggtgtaaaaatgattattctaaggccagaagcctgtctcttaccaataaacaggcgcctatattgtctgcctgctctcccaagtcagacatcgcctgacatcttaagcttcgtgccgtttttaaaaaataaactggatacgttcccgaattacagttgaatctcagggtctttggaagcatcatattaaataatccccatttaaagggggtcgaattcgacgcctttctgtttgaagcaagcagcaactcctttactttgcctccattaaaatggattgaagcaacaaatgccaaaggaatcatttcaagcgtgttaacgactacgaaaaatttcttaatagatttcattaaattattaaaaaatggatcaaaatacgtaattt

SEQ ID NO: 74312 - DNA, 639 bp, Arabidopsis thaliana landsberg
  unsure (1)..(639): unsure at all n locations
tgcaaattcattaaccggtgatggctataacttacaaccaaagaattggttattcaaagaaaaataataagcaaatctgtttacaatacagtcaaacgtcaattgaccaatcaattcacgaaaaactacacactatacaccaaacgaataattggggaggagaagcactaagattagtcgaactcccacgaccatatgtctaggttttgtataccaagttaatttttttatttgatttacaaatttatgtactcaattatatacccaaccatcacaaatacgattttaaattaatggcggacctcgccaatataaaatgaagacttattacagccaaaaaaaattggatgagtcaaaaggtcagagaatcttaatgaacagcgaggacatgagtgtttaagattgggtccagcttggtccaagtgttaaacaattacaaaagaggttggtccattattaatatgcacattttcttttattatgtaattgattttgctctatcttttttagtcgactctaaatcacatactagtatttatgatacgagttgttttgtattttaatatattaaattttattatttggcatgactcttctagctggtgggactattcattcatntcaaaatatatctaaaat

SEQ ID NO: 74313 - DNA, 238 bp, Arabidopsis thaliana landsberg
atcacaaagactggacctttacctcaatgattgctttttgggatctccatagattcatgatgatgttctacatttgatttaaaaataaatcttaataccaattttacaagcatatttgtccttacctagagatatcttattcatgaaagtaaaaaggttaccttgaaagaatcccaagaagaaaagaggaaaacgattttggatcctggagttgcacaacaaacataagattttgcaa

SEQ ID NO: 74314 - DNA, 479 bp, Arabidopsis thaliana landsberg
  unsure (1)..(479): unsure at all n locations
cgctcatgttaggttgtgcataccaccactgtttggatctttaatttctccctcgcgttaaatggctgcacccacactgggctctcctggttggctatgccttctggaaagcctttcacgctgttgaagacatgcccttgaagagactgtgagacccagtctctctctctctttcatttcctgactatgacaagaannnnnnnnnnnnnnnnnnnacgttagccacaatgtgaccacacagggtcaaagcaacaaggccaactgaccatggacagaacatcctaaaactgtgagccaaaatacacctgtgctctttatcagttactgccagcatttccataaaaatggaaacttgactaacatgcacagaacattctctagcttcttccgtgcccagctcctgcttgtctgtctatagaccatctcagctgatgtctcatacaagaaacctttcttgatggtcccccagcacacttaca

SEQ ID NO: 74315 - DNA, 574 bp, Arabidopsis thaliana landsberg
  unsure (1)..(574): unsure at all n locations
atgaaaactatagaaacaaatgtcctattttaatatgattttaacttataacaatttgtattgtcttggatacattaattatatagtagggccgatgctaacgttcatgaatagagaatcccagtataatggtgaaactataatcatgacgtccacaaagaaagattgcaacttgtagtggtcggggaaccttaaacctcaactttaccttaaccattggaggaaaaattctataatgaactttaactttaatgtatttgctgctttcttgacttatattgctaacatcatttcaagtagagggatcaattcattaacatgtacagctttttaatcagtggatctctctaagtaaatatcttcctccatttcatggatttttttacatgtcatattcaccttgattacagtcactttcgaatattacttataacggaaataatatgtttttttttttgctttacacatttctggttgaatacgcnattcgtaatttcctatgtgacacctgaaatcttgtatctttcttaaagttatagactagctttttggggatctaaacaatctttagcta

SEQ ID NO: 74316 - DNA, 449 bp, Arabidopsis thaliana landsberg
  unsure (1)..(449): unsure at all n locations
gtatcaccggtgccactgctggtggccttgtgcgctattcttctgctacgcgccgtggcgcgccaggcccaggtcatgccattcctgttcacgctggccctggtattcctgagctatgccggtttcggcatcagcctgtggcccaacatcgtgccgcccgacatctcgatctgggcggctgcctcgccgccgcagagccagggattcacgctggtgggtgcgctcttcatcatcccgctcatactcggttatacgatctgggcctactacgtgttccgcggcaaggtgaggcacggcgagggctatcacnnnnnnnnnnnnnnnnnnnnnntgctcaatggagaaaaaagcgggctgggctgattttgctctggtttgccggcgttgcagctctaggtttagcgccctgcctgttgcgctgactaatgcaagcggccgtcctgtttgcc

SEQ ID NO: 74317 - DNA, 508 bp, Arabidopsis thaliana landsberg
acttgtgaagaagaaccttatagtcgtaatgtttatatatggccatgtatccatagcgtagtggtagtaacatcaccaataggagtccacgctcctcctgcatttgctgctataaccacaactgctcctaaaagtcttgccataggttatattgaacacacatactaacgttaatacgacattcacatcataatgttccatataaagagaattgtttttaagggaatagaaaataactattcaaaatatagaatctcttaaaaatgaatgtcacggattggtgtttctttaatattcactatagagaccaatatttcctcagtgtgagcagcttaaagccttgactgaaaacaacaaaaaaactaaccaaaaaggtacaactattaaattttcgtacttgcggtattctgatggaggaattagtcttctcagtagcgacaccattacaatagtagatgttaggttgtcaagacagagctgaggaaaaggtcgcgaaaccatctgaaaa

SEQ ID NO: 74318 - DNA, 557 bp, Arabidopsis thaliana landsberg
gagcacggaatctccataatcaaaatacatgatcggagctttctcactatcaaaagctttccggcgacaaaaccaaccatctcctccttatctccaccatgatctcactccactcatcagccattaaagcctctctctacggctctttcccttcttcgttacgatcaacactctctgtttccttctctgctggatctcttattcggcttccttccgtcggcaagcgcaatctctccgtcgtcgtttcctctggaagagactcctcgatgtcatcaaacaatgtttctcgcggatcgtcttcaaaggttcgtccttttgtatatttcttgtatggtgtatataccctcgattgatttaggtcatgaaagatctgaaaactctgttcttgtcaattgttgatgttttgattctttggcatgtgggtgcaattagtttgcctgctcaagctgataacttgccattatcatctaattgtctcgtctatcgttttttacacctggccaggttgctgctgaatctttcttcaggagtgtcttagggcagatggaaactgttac

SEQ ID NO: 74319 - DNA, 605 bp, Arabidopsis thaliana landsberg
cacattagtactgtgccaaagaagtatgataatgcagcaacagaaagatttgccgttatacttcttcaaaagtggcgcctggagagttgccattatatccacattaaaagacacatgcacagaggttagtaggctgcagtttatgcgttggtctaaacctaaccataagaaacaaaaacaatgaagagatttacctgaatggcaagaaaagtagccatacacatgcagtttccaatcaagcataaaactccaatgtgccattgctcaaatccaagatcgagaaaaccagagactaaccaaccagtaggctcaggttgacctttagcactgatttcattgttcatcgcaaagtctgcatctttatctcctaacaaggccggacctcgaaatacaaccatgaagacagcacccataacacacacaagtgtgcctccaaccttagtttgaccttcgattctcaacaaattcactctttctgtactgcataccaagtaggagacatcaaaaaaccaaaactgaagccatatctaagaagagaacccttataaagaatcatactcaccccatcatgacagccaagagaaaggtgaagaccgggatggatg

SEQ ID NO: 74320 - DNA, 180 bp, Arabidopsis thaliana landsberg
  unsure (1)..(180): unsure at all n locations
gaaaaaccacaacangcaccaagncngcccaccaacaacagaagaaagggcacaaagcagcacnagggggcgcggaaaccgccagggccggagcnnccgaacagccgaaacagaaagccaccaaagccaagacccccccaaaaggaaggaacccaaaccaaccccccagcaagccgcgag

SEQ ID NO: 74321 - DNA, 215 bp, Arabidopsis thaliana landsberg
  unsure (1)..(215): unsure at all n locations
aagtnnnnnnnnnnnnnnnnnnnnnnnnnnnnnnnnnnnnnnnnnnnnnnnnnnnnnnnnnnnnnnnnnnnnnnnnnnnnnnnnnnnnnnnnnnnnnnnnnnnnnnnnnnnnngtaattgagcttgcgtaatatggcatagtgttctgcggaaatgttatcgtcacaattcacacaaatacaaccaagatactggtaagctggggtgctatgagt

SEQ ID NO: 74322 - DNA, 512 bp, Arabidopsis thaliana landsberg
ggattcgcggctcggccgcgggctgcggcggcgcctgcggttgcaattgctgcaactggttgccggggccggggatctgctgtgccatggcgcctggagcgaacgcgagcaacaacaacggcaagaatgaggttttcacgatgattctctttggaggcgagcccacggccatcccggcgggccatgcggcgcgccggcgatgcgtggaagcgtcgaggaagcggccccgcgcatgcggcggccgggaattcggaaggatcaggcggaaggcgcgtccgggtgtcctgcggcgcaggcgcggatccggatgggcggagagatgggcgtcgacgaatcggcaaccggcgacgtgccggctgcattcgggaactccgtgtgactagcgcatggggcgctcgagccaatgaatgccgcgtgaaaccgccgggcggcgcgcggcgcggcgcgctcagtcgaggaacagatcgggcagctagggttgtccgggctggaccgcgtagcgggagagatca

SEQ ID NO: 74323 - DNA, 333 bp, Arabidopsis thaliana landsberg
gtaaaaaacaaaaatgagaggttgtagatgagtgaagagaccggtgagtctttcttttgctcagttgtaagcgtcactgaggcccaatgtgttcatgcatgcggactatgaaagggagtgctctatcactgagagtttttaagggacactttcattcagatagagacgaagaccattctaggcaaggctgggaaagacttaacaaatgtattgagttggggtaggtggcatggctgattctgcatcgcaccgctttgccatatgaatgaatattggtgaaagcttgcgcttttaacgctgtcatgcgaacgaaaggaccaatgacttggacac

SEQ ID NO: 74324 - DNA, 218 bp, Arabidopsis thaliana landsberg
  unsure (1)..(218): unsure at all n locations
gaacgaccccagaacaacgaaacggagagagcgaaccggcgaaagggcaaagaccgagccccgcgaaaagagccaggagagggcagagaccaaagggcggagagggaaacaaacccgaggcgaccaaagcaccctacggaagcccacgncgacagaccaagngcacggaaacacgagcaccaacccccgaccatgaaggaaacgaacagccaacacaa

SEQ ID NO: 74325 - DNA, 556 bp, Arabidopsis thaliana landsberg
tttgtggtagatgatactcctgaaagaagttcttcaaagcgaaggagacgttccaatttgttgtttaattcaaccccaccttctggttcttcaagaaggtaaaccaaaaatcgattcttttttctttagggttcttcagatttagcgaaattgtcaaatgatttttttgaaattagtatcctttttggattccaggaagcagcgtgttaagcaaagtcttgttccgttacctgttattgatcttgataaagtaatcagacatgaaggtacttcatgaaattagtttgttggaaacattaggatcaatgaaattagtgacagagataagtttttgttgaagttttggaatctgttttggttgtagaagaaaaatctgcagagaagaagaaaaagaagagagagatggaaacagaaacaaaagaagagaagaaaatagataaagatgagaagagtttgtcagatcatgttgtgcttccttgcatagataagcttcgagatgaattgtcttgcgcggtatgtatctgaatcttgaggctgagactgttttgtttttttg

SEQ ID NO: 74326 - DNA, 505 bp, Arabidopsis thaliana landsberg
  unsure (1)..(505): unsure at all n locations
taacttcttaataatacttactattaatcgtgtatacaaagagacgaagaaggaagatcagcttattgttgacccttgcgttgaccaaaacatccgaagagcaaacaaagtccaattgaacaatgaacacaatctaccacaaactagtttggtttactttttagcctggcttgagttttaagctacagaacaaaattagaagacttcgatttataccggtgggactcgcttttgaaactgacataaccgattacgtcatctttcttgtgtcattaatgcttatgtcatagctaataatttctaccgttcagaatatattttcttatatggtaattagagatatgaattgtttagtgttaaagattgagattctcttgagcacttaaacagaaaaaaacaattccctaagaaaaataccttccttttttttggtttggaaaaagagattcaaagtcaatatacacagccaccgaacaaatactctatataaatncaatgaaagcag

SEQ ID NO: 74327 - DNA, 531 bp, Arabidopsis thaliana landsberg
ttccttaagttaacccctaaatatgttacgttttaaaactatctaatcacgttctaatacacatcatacatcatacatgatacagaaacacatatattcctccgtgctgtaacacgggtctgatcttagtaaaatagtggagagaagaatattcttctggataccttttaatattccccaaaacttctgaatcttcttctcaatttttctcgacattttctcatcgaaagctctcttcctttccctttttggcgctcaatacaatcatgacgttagagagttacgccggcgatgttcacacggtaccacaatcggagaactcgatggaggagagaggcggcggtgagcttttcgtgccacctcttaacttcgctatggtcgataatggaattttccgttctggttttcctgaacccgtcagtttcagctttctccaggctttgcgtctcaaatcatcatgtaatttctcttaatttcattctctttgtccttaaataggtcagcttcgtcgtcttaatcgcaaatagtcgc

SEQ ID NO: 74328 - DNA, 545 bp, Arabidopsis thaliana landsberg
ccgcgatgcgccagtagctggtggagaaccagctggccgagagcgagggcgtgctgaccaggctgatcagtttgaccacctcctgcagcatcgcctcggcgcccgccacgatccagctgctcgtcgtggacagcccgatcttggctgccgccctgaacggcaggctgaagagcgagccgagcagactcgcgggggtgagaagcgcggtcacttcgccgtcgtcccgaggtgctggaagaagttcacgagccccggcgccgcgccgatcatcacgccgccgcggcggacaccaaagcggccatccggccacgggctgcgtggtggtggctgttggtgtgtgaggcgaccgcccagacggccgctccgatgaaggcccccagcagggcgatggcgagtgcccacgcatccgcaccgttgaccaactgctggaggacgttgctgccaggcaggtcctgggcgttgggggtggcggacaccccagcgaatatcgcgggcatgaagctccttgaatctaattggatctaattgacgcggacgaacaatat

SEQ ID NO: 74329 - DNA, 464 bp, Arabidopsis thaliana landsberg
cgccacggcatcacgccagccctggtagcggcgttggcgttcctgcttttctttgcgcgggtagaattcgcgttcgcagggccggtgttcggcaatcgcttccagtgaatcgtacagccctgcccccagcgcggccaggtaggcggcccccagcgcggtggtttcagtaaccgccgggcggtcgacccgcacccccagcacatccgccagcgtctggccaagccagttgttgaccaccatgccgccgtccacgcgcagcgccgtgggacgttgcccgcaatcggcggccatggcctccagcagatcacgggactggtagcacaccgcttccaggccggcggtgaccacctcggcgataccggtatcccgggtcaggccaagcagcgcgccacgcgcattcgggttccaccagggcgcacccagcccggtgaacgccggcaccagatagacgccgccggcggaac

SEQ ID NO: 74330 - DNA, 622 bp, Arabidopsis thaliana landsberg
ttgtctttgacgggtttaatgatggacatagggaatgtttaattaatgctgaatgttgaatgaactccttgtgtgaaaaggtataaagtttcatcctaatttggttcaacaaactataaaccttaggtatatattgggcgaagtgaccagtagaacattatccctcctcagtaactatgctgtttctgcatgttagtgccgggagggggccgctttaatcaggtgtctcgtctaaagtattatataataaaaaaccgatgcagaacatcggattaatgtgcccaggacgagactcgaactcgtaagtcttgcgacatacgcccctcaaacgtacgtgtataccaattccaccacctgggcttgagtgccgcaaagatatataaatatgaattgcgtatataacccgttcgaagcaggttttgtgatcaaatcgatagggaatctaaattccgaggcaatggccttacctttctccatcatgttctcatcttcctcctcgtaataccattttacatgcatgtttttgcccatttcaataaccctacgggtatttatgaggatctccagcaccattttatgcgaaatggaattgaagtaaccaagtctacatgtaattcgggca

SEQ ID NO: 74331 - DNA, 328 bp, Arabidopsis thaliana landsberg
atatggtaatgaagccatgcatattggtgggttaacaaagtatctaaacactttgcagccatacgactgagggtacaactcacatgccatttccatcaccactaacagaaccaaaccttgggccgatactagcacaacgcgtgcatgaatgtactacacatacaccatcatttccagcgacacgtaccatagtatacaacggttacttgtcagcacatacgcttgcgcatataagagatggataccgaaaggtagaatttccataaggcggtgtaacagacacatggacggagagaaagcaatatcggaccgagttacggaggattcg

SEQ ID NO: 74332 - DNA, 615 bp, Arabidopsis thaliana landsberg
cctgggtgtctttatgatggcttcatcaactgtccaccttttattggcatccacgcgaagaggcgcatttggatgcctgcgcaatgcttccactatctccacatcttcatcagtacccagtttgatcttgtatacaggccagggttttgctttcattttatccaccatcttgtctatggtgtctatgcctatggtgtaatcggtaaccggggttgtatcccatgaagtatcccatagctggtacaatggcttccctttcattttaccgaaaagatcccagcaggccatatccagcgcgcaaaccaggaagggatcattgggtaacaggtggtgcaggtaatgccagtaccgctccggatcagtaagcgcaaatttttccaccatcggcttgtttgcttccagtgttgcgatcattgtttacacggttacatcataatacacaatagcaggcgcttctgcataaccgatatgttcccccaactgggatgccaccagcagcgcacgctggtgcgtattggtacgcccgtcgcaatagtcaaggatatttcaaaggagctgagagatcgatatgagtgcatgagatgaaaataaagtcaataatgaacagctgtagct

SEQ ID NO: 74333 - DNA, 295 bp, Arabidopsis thaliana landsberg
atctacattcatacaaaccggaaagcgtgctttacaatccattccagggtgggccacccaaagacattgatgactatccgtcccgcctagtgggggaccagccggtgcgaatccacgtgctataggtctacactaccatatgtatatacacatgtaagcttcatgtatacacagatgcagacaggactattctaaaacgtatgagagtatatatatagtggatcaaaggagatatcttgcaacacaccggtgctaccaccagcggatggttcacacggccaagtaacccctgggg

SEQ ID NO: 74334 - DNA, 596 bp, Arabidopsis thaliana landsberg
gccggggcggaaccaatcaaccgagcgcgtcttcaacttcgctgcgaaagcggccggtatcggcaaccagatcgacgaagaacgaggcgccgttcgcgcgcaacgcggcgagcacatcgagcgccggcccggacaattccgattccgcatccggagccgattgccagtgtcctgcgaattcacgcggcagcagcacgatcggcgtggcgcgcaccggcgcgcttttgcgcgcagagtcgctgctgccctgcggccgctgccagatcacgcgcccgctcgcgcatagctggacgagccagtgcccctcgtaccaacgcatacgcgccggcagaatgtcactctcccaagcgctggcggcaaccgggaaaccttcaagctgcgcgagcaccagttcaagggcggccgcgccttcacgcttggtgctgccgatcagtccctgccagtcgaacaggaagcgcatgaatgccgccgccggcaccggctggaatgcggcgcgctagcgatctcgcgtgtagcgatgaatgcgcgcgaggcggcggcgctcgcaccattcggtgtcacgcgcggcgatcgcttccggcgtgaacgcgccgcgc

SEQ ID NO: 74335 - DNA, 612 bp, Arabidopsis thaliana landsberg
  unsure (1)..(612): unsure at all n locations
agagaagaaacaaaagagtcgctcgtttccgattttatcttttatttattggtccaaaacattgtgtgacaaagcgtactacttgttaaaagagctctccattttgcagtttgtctctacattttctctactttaatgtttcttttctctcttatctcttcattgatcactcgtttcgtttataaattgctaaacctctttttcagaaagggaccgccaaagatagcctacttgctacattattataacacactgcttcgagtggggcaaaactctccaccgcgaataatctaaaaaaactagatttctcaataaacaaaaaaaaaaggacgttcatgcatgaacccatcacgactaccttttcatataccaaaaccatcatgtacactcttatcgttcttcttctcctttggccctttagattggataaatgttcatttgagatatttccgacttttcctcggaaattgtgtattagatgtgtgatatcatactgctgatatcatcatgtacacacttgatgaattctcagtcacaataatatgctaattgtacgtcgtataaaactaaatagtgtttgttcaagaaatatntgtttgttcaatacttttt

SEQ ID NO: 74336 - DNA, 496 bp, Arabidopsis thaliana landsberg
tatttgtttccaattatttgcaacctaaaaaatagaacgatgtcgttcgttctcttcgtttcattggaatttttttttattgaggattgaggtaacgaagggggaaacccaaagtttcgatctttttgctaggctagatatcttatattcttattatctataaagaagactgttttgatgtttttatgggtgccatttgagctctgttggcattggcataaaactgagagatatagactcgttttggtgctctttgaatccatagttccgatgtgtgccaaatgcattgtggaggaaaccaggttctcaacgctgatattgtttcttccctaaggttttttcttaagatacgagggatctcaagttagtaaattgttcttcttgaggagtgagtgatatgtgagttcttgagaaattggaagggctttgatcttggtattgtgttataatccaaccatcttactgctgctatttattgggatctgtactcacattg

SEQ ID NO: 74337 - DNA, 405 bp, Arabidopsis thaliana landsberg
aacagatatatagcgtcatactgcctaaacaatttgcctaatcttttcaagcggtgacattgtctccttgatatgtaactgtatgtttaattatcattcgccatcaagaatctaattctgtatatatcaagatttgagcccttgcgggacaaggacaacaaatgctcaacaatattgaacatatatgagtctttatctttataaccaaaccgaataaagatggcattttacgcagtaaagctatgtgaaatgaattatggaggagatttaactacctttccgcttgcctgcctaatattccaatgaatcataacttacatgcatttcacaaaggacgttttaatacaatgcaataaagagtccatgtgaaccccacggaaaagaaaacatatcatacctggatat

SEQ ID NO: 74338 - DNA, 390 bp, Arabidopsis thaliana landsberg
acaaggagaacgggtttggcaattgacgttacttcatggcttccaagcagcaagaaatcgagggatggggcagaagactagtctgagaggacgtgtcaacggagctgatactctaatgttgcagacctcttggtcagcacaatccgatctagggaataggagtcgagagaatcagctgactagcacttttagaagcagccaaagctggaggctaaaggtctcactctctgtatctcaagcgtacattactactaaaaactcttcaactacataaatggtgaggatgaacatttctgcttactcggctaaatcgttttactacctgagctttatgcggtgaaaattacgtgttctctgagaactgtatgcagatctggatttttgttatgt

SEQ ID NO: 74339 - DNA, 298 bp, Arabidopsis thaliana landsberg
atttctaaatcgttgaaagacatttacttgcttactgtacgcatttttcctttgtatcgcactttttatgaaccggtttgcttaagaaataaacgcgagttgcataaaaatataacgaattaaattgactttagattctaaccttgtataatagggtaaaaaccaaatatttatgtatgatatttttaagcataataaccctcttcttttactccaattttccagtctctgagatatacaatggttcaatgaacgcttcttaaaaactcaaatgtgccccttgagtgaccaccgagtg

SEQ ID NO: 74340 - DNA, 607 bp, Arabidopsis thaliana landsberg
  unsure (1)..(607): unsure at all n locations
gagcatggatttggttaagaaaaccagattcattgccaaatttaaaagcattatcaaaagggtttggagaagagggaacattgagaagacaacccttgttgttgttagttgacaagaactgattttgctgagaagggtcaagactaaaagcttgagaaggagaacaagaagaagaagaatcaatagagtgttgaagaagaagattatcattagggttaaaaggaaaaccaccaaagtatctgaaatctggctgattctgtaacatctgaagatcttgtggatgtggttggttactactaaaccaatcaccttcaagcataggcttaaactgagaagaaccatcttcttgattccttccccatgaaccttcctcgttctcttccctttctccaccaccaccgtttaaccaaacccctccaccattgtttccgtcaagacccatcgccaaagttgacacctttaccccaaagtctgaacctttagaggaaaattctgcanagttgagacctttaactgaaatttggaagcttgaagacaattctgcaaaagttgaaaacaaaagatatatacttttgatattcagagactttggaaaagtaaaaaagag

SEQ ID NO: 74341 - DNA, 507 bp, Arabidopsis thaliana landsberg
tatatctagagaaatatgatgagttttttcttttgtaataaaattggattcttttctactctattctaggattatctattgcattacgttctggctttattatacatatatgaaaggtttaataatcatgacatgggatgggatggatttaattagcgatgattatcggatttagattcaatgtcttcaattgcttaattttcctcatgacaacttttttgggtccctaaccacaggattgaagcaaccatattatttaatcttaaattactgaataggatctaagcgtagctaacactaattgtggtgagacttaatatgcttgaacaaaaaaacactaactcaaatggaatgttataaaacccacaagccgaccaccggctcttcctcaacaaactccaaatctatgaaaattatctattcagatcatatatattcagacataccaagtcaccaaccctatatagagatcgcgctaatgtcctcatcacatctacaggccagcac

SEQ ID NO: 74342 - DNA, 506 bp, Arabidopsis thaliana landsberg
ccactgtgcatctgtaccgcgtgccggccgtttcggatttcgcggtgcgggcccgcggctttatcggcctttacggggtcggggtgaccaccgcggagatctgcgaccgcgacggcttcatcggcacatccgcacaaacattgctggtggtcagggccgaaatgtgaccgtcaacgcggtctcggcgcaggggcgtgcgcctggacgcaccacccgctggtcctgtagtttgccagcaggtagtgaccgccctgagaccgacgtttacgaagagatcaacgaccgcgacggcgtgtcctccaccgaggacggactcaggcatattaagttatggagtgcggacatccttgtcaggagcccccgatacctacggggagcggcggactacgtctgaagcagacggcaagcttcccacgtatcctgaccagctgatccaagtccggagagggaaatggcatgcaccaacgagagttgaccgacgaggaggtcctgaaggagctcgagcc

SEQ ID NO: 74343 - DNA, 538 bp, Arabidopsis thaliana landsberg
cctctgcggtgctcatgcgtgcacctgggcgccgcgaagctggcgcttacgccgggcatttaccatctgtgtggcaagtgcgatcttcttggcgcgatccttgccgaatgccttacccgtcgccattagttcgcggaactcaggctccgtaaggttgctcttggcattgctgcatcggtagcagcatgcaacccaattggctcgatcatctcgcccccctcgacccaagggcgatttgtggtcggctgtgagagaggttgaaacccctccgacattcgtcatcggcacactgcagtaatagcagttgcgctggccggacgcccagaagtgcaggcgaacactgcggtaagaacgttggttccccatacctttattctcttacgaaaccccttctccaccaagggaaatagcccttgcgtcgggggattgtggctgtagaatcgaggccatccgcgcaggccatggctgagtggatcggagtacagtgcggcgaccgaggcctcacggattcttgccgtcggaatggcacacaaaatcg

SEQ ID NO: 74344 - DNA, 459 bp, Arabidopsis thaliana landsberg
cgcccacccttgacctgggcttcaccttcttcactttccttttctccttcgcgatcggcgccctgggggcggggcgccttgacacgcgctggatcaccaccacgcggcgctggacgctcctcgcctggttcttcctcacctgcgggatcatcttcgggatgatgtgggcgtacgaggagctcgggtggggcggctactggttctgggacccggtggagaacgcctcgctcctcccctggctcaccggtacggcattcctgcactcggtgatgatccaggagaagcgcgggatgttgaagatgtggaacatctacctcatcctggggaccttcctcctcagcatcttcgccaccttcctgacgcgctcggggctcatcgagtcggtgcactccttcgcggagaacacgacgatcgcgtacatcttcctgggctttctcaccgcggtgacgctggcgtgcg

SEQ ID NO: 74345 - DNA, 327 bp, Arabidopsis thaliana landsberg
  unsure (1)..(327): unsure at all n locations
gacgcatagccgtcgaattcgattgcgcgcgttcttataagaaatagattgaatcgtgccatcggatatgactcnnnnnnnnnnnnnnnnnnngtttgaacgccaaggttacgatttatttgcaatactgaataacggccatccgnnnnnnnnnnnnnnnnnnnnngattatggttttgtgggtcatgcattgcgtctagattgaccgctgatccgcaatgttgaagggcgtcattactcagaggcgcgacatgatatttatgagcctgtcagtatagagccacgcatacttgatccacaggccattcctcgagataacctactatg

SEQ ID NO: 74346 - DNA, 590 bp, Arabidopsis thaliana landsberg
  unsure (1)..(590): unsure at all n locations
gctgaaattctctatcgcagcaaaacgttcttcagcccgtactgttccatcatggcgttcatacgaatacctacgaagctccataaaatcctgtatttgttataagctacatgtcagtgtagtcaatgatgcacagatgttatagaacaaaaaatagctctataagaaaacctgcaaaatgtcaagtgttgaggtcatttgggaaaagaggaggacacgatggccactatcatggagccttttgagcaattgatccaaaaccaaaagcttaccacttgcctgtcagaacgcaattattagtgaacaaaaccttttttattcaatgaaaacttatagcgaggtgttagtgaacaattgggatacctgaacaaggtgttcaccctcttcaaaaggctctggttcgatacctggaaataagtaaggggtggctacatgcttttcttagctgtatcacctgctcaaggaaatagatagggagataaacaaaaatcacatatatttcactaaacatacaatntatgaaatangagttaagtgataataaacatcagaaactaactcacaatantttggtaagacgtatgatttga

SEQ ID NO: 74347 - DNA, 491 bp, Arabidopsis thaliana landsberg
attaaatatagaaaaagaggaaaataaaggagagattctctgaaattagtttttgtataaaatatttccttttaccttacattgcaacggctggtcctctaaagcattaaatctttcatttgactattactagtgatattttaatcaatagagaatacatacacatcgaagtaaatagcaatgcatcttccaatgttagcaggttactcatgcattcttcagagtcttttactctatgcgttaattccaaagatcctatttcaccaatcacaatatcacacagtaaaaaggatgagaccaagaagatcctatcttcttactgatatctttgtagattgtatacattctacaaaaaaatatgggcagtactacaatctaatctcatttatattaaatataactatctaaattaaaacatatatacttgtgaaacaattagtttaagaaagcgaaaagtatcatgatttgggctgtatatatatactatcaca

SEQ ID NO: 74348 - DNA, 513 bp, Arabidopsis thaliana landsberg
  unsure (1)..(513): unsure at all n locations
caacgggtttacgattctcggaagagcgcgccgatgagcgccgccaacttcgatcaggacttgggccttaagctggcctacgaggattgcgttcgccagctttggccgctgatggcctacagtcgcaaggacgctgcgatggccgtaccgacgtaccccaccgacgacgcggcgaacggcaacgactaacaggtccaacgctaactgctaaactttaaaggctgcacacgatgacaacgcaacccgcacacgcaaagttcagaccccccagcgcagcgcaccgctggctgtcgtgtgcagcctctgttacagttatgccgctctatcctaatacggaaagtgaagcggcgctcaagggtacgcgcgatcaccgcgcatttnnnnnnnnnnnnnnnnnnnnnnnnnnnnnnnnnncgggcgacgtggatagcgacctggctgtcatgggtgcccttgagtgggttaacaagaaacgcgctgaatacgggaaagactgtaaagtctacgccgagc

SEQ ID NO: 74349 - DNA, 599 bp, Arabidopsis thaliana landsberg
ccacaaacaaagtaccgaagtgattctttatatgattttttcacatccccaaatcataatttctccccctctcaacttcaaaagaaaaagcactaacaatagtgcgaaaatgaccaattcataattgatattgatcagtggacttacttggtcaaaaatgttactgtatcccttggtctaaattttcaataatttagctaagtaaactgtgtaaagagacaaaaacaaaactcaacttctgttttgttctacatttctcctgttttgtcttttcatgttttattcttcttctatcttaaatctgaatgtgaactttaaaaagggcagcttacagatgaatttcaatctctacttacttgtaacagctgaaaataatctaaacccatcatcatcaatgatagattctgaaccaataaaccaaaaactcagatctcaagatatgttttaagggggtctctcacagttcatgtgaaatcgtttggcttcccaacattgatgctctcttctgctaaaaactctgtaatggccttcttttgccatcctttgaagctcctgtgatacagaaaaacaaaccccgttactcgtaatccaatgcgagt

SEQ ID NO: 74350 - DNA, 451 bp, Arabidopsis thaliana landsberg
  unsure (1)..(451): unsure at all n locations
tcatttataatctctatggatgacgcgtagtgcttttattttcggattatttatttggatcaaaaatctacttacttattatgagcgaagaataatctactatataaccggaaaaaatctcttgaaagagtaactctttctttgataggagtttcagcagttgtttctattgtaccctttgcagcttctttgttcggtccattgcttaaaaagacagatcaagtttggcgtgtgattggtnnnnnnnnnnnnnnnnnnnnnnnnnnnacagtacttgtaacatatgaagatgcataacctttgaaatgggctggtacaacagcacagactggcgcatggttacgtaaaatcacggaagaaaaatttgaagcattcttgaataaatggttcttatttaggctgccctgtgcgttggcaggaaaaaacagatctttttttatgtccatgccat

SEQ ID NO: 74351 - DNA, 530 bp, Arabidopsis thaliana landsberg
  unsure (1)..(530): unsure at all n locations
cgcaggagcttgaccgaggcctcgtccagcggttcggattggccgcgccgcagggcgcggnnnnnnnnnnnnnnnnnnnnnnnnnnnnnnnnnnnnnnnnnnnnnnnnnnnnnnnnnnnntcccacagccggcgcacttcgcggttgcggccttcgctgatggtgacgcggaaccagctgtggctgccgctgccgctgaccggcgtgatggcattgaagcgggccgggccgtcttccagttcgacaccggccttgagctgttcgaggacttcctcgggcacttcgccgtgcacgcggcacaggtattcgcgttcgatgccggtcttggggtgcatcagcgcgttggcgaggtcgccgtcggtggtcagcagcagcaggccggtggtgttgatgtccaggcggccgacggtgatccagcgcgcgccgagcactttcggcagctgctcgaacacggtcgggcggccttcggtgtcgtcgcgggtgaccagctcgccctcgggctttgtgtagacgatgacgtcagcgctgtc

SEQ ID NO: 74352 - DNA, 396 bp, Arabidopsis thaliana landsberg
gaggatttttgagttgtgtgagggattttgagagagtttttgtggggatttaaatgagggagagtttacgggttattcacagcttaggcctacacttacttattcgttttttttatttttatgggagtaatgatagataaatgttttattatgaaaatcaaatacagatctaaaaattctattttgtagggtgttgtttataaatgatatgtcttaatagttagcatagtgtgcataatacatttgattatattttagtttttggtcaaactatagctagtcagattttaattattataatatttgtgtctttaaccgaacaacttttatatgagcttattgggagatatattgtagtttttgaagataaatttgaggtacccttttcttcattaa

SEQ ID NO: 74353 - DNA, 536 bp, Arabidopsis thaliana landsberg
cattatttatccggaactccatccaaaaaaataaaaaaaattactaaagtgaaataccaaatttattcataactacacaaaatttctcaaaaagggcaatgaaaatctatctaagccaaattcaactggtgagagtaccgggaatccaacccttacccgctattacccgtgtgccgatatccgatacggatagcccagttaccaaacaattagctaaaagctacccaaaacggctagaaatcaggtctaaaatccaaaccttacgaaattagaaagtgctatagcgattttagatatgcgaaataaccaaactctacccgtaatttctcgctaattactctggataatagttttataccctaattacccggatcggaaccttacccggtatcacccgaatctgattattaccaaacaaatagttttcaaaccccatggctaaagactaattcagagctatacctttagagaaattaccaggagctgccacaatctcaccggagctaaaccgaaccaaagtataagccaccggggaa

SEQ ID NO: 74354 - DNA, 316 bp, Arabidopsis thaliana landsberg
ctggctctcctcgctctttgtgaccagcccgtccccttggttgtggacctgctggtttataaaccggatcagcgtgaaatgtgtatatacacttatgcacagctctaattatatgacgagggagtgagctacaccaggagagagatagcatcgccgagactaaacacgcccttggtggaatgtcctgactctgccactctaagcactgcaccaacatcacattgggctagcatcctcagggcccactgtagcgcttcgatttcattgaacaccttactcgccctcgtccacgccaaacatgagctgtcacgtcaag

SEQ ID NO: 74355 - DNA, 565 bp, Arabidopsis thaliana landsberg
catcgaacaacttattggcataacccaagaagccaaattttatataagaatccaaaattcgattggatacttatttatctgagatggaaccacatttaatagcgtaacagtgagtgagtgaaagcttttggaaagagtttaaagagctctctagtagagaggctaacaacgctctcattcatctgtttctctgtgttcatatgatgtcaacatcaaagagtttttttatttattcatgtatattttaaatatgcattgtttgccaaataatcagtttactattaacttttgccccaaaaaaaataaaaatcagcttattattaatttctaggtacctgaatttacctagtaatggattatcaagtggctagttagcttgatatatttgtgtcaataacccttaagtggatcaataatggcttaattaagtaaatcaaaaaaacacatttgaagtttgagttatacgtaaaattgtatttcttttcaattagaccggaaaaaaataccttagtttttttttatctagaattcggtcatgggtgtcaggacataattgatgtagtct

SEQ ID NO: 74356 - DNA, 549 bp, Arabidopsis thaliana landsberg
  unsure (1)..(549): unsure at all n locations
ttatcttgttgcttcttaaattttccatcgactgtatcagaaaagcaccaaaaggtaaggtgaaacatacgtaattttcttacaatcaaacgccgcactatagttttgaatggaaacatattacagataaaagggaaaatattttattctattattcttctaactttctcaaagtttacagtatattaagaaaagtttatagatatggacttgagacaagtcctccaaattcattctctatggacaaagaaaacgtcagcagatgtgcatattattctttgttttttctttgtcaactatatagaaattattcgaaattaaaatttttaagcatatattatctgcaaacagatgtggatctcattgtccatatcatttattttacttttctcatattttatagatagcagtaactagtaagtattaaagagctaaaagtagtcatagtagtaaatgtaattatgtattttctcacataattcatttcagaaaaaaatatatcatacaaaatatctatttggttaagtntattattatgtagggattcaa

SEQ ID NO: 74357 - DNA, 585 bp, Arabidopsis thaliana landsberg
  unsure (1)..(585): unsure at all n locations
gcgnnnnnnnnnnnnnnnnnnnnnnnnnnnnnnnnnnnnnnnnnnnnnnnnnnnnnnnnnnnnnnnnnnnnnnnnnnnnnnnnnnnnnnnnnnnnnnnnnnnnnnnnnnnnnnnnnnnnnnnnnnnnnnnnnnnnnnnnnnnnnnnnnnnnnnnnnnnnnnnnnnnnnnnnnnnnnnnnnnnnnnnnnnnnnnnnnnnnnnnnnnnnnnnnnnnnnnnnnnnnnnnnnnnnnnnnnnnnnnnnnnnnnnnnnnnnnnnnnnnnnnnnnnnnnnnnnnnnnnnnnnnnnnnnnnnnnnnnnnnnnnnnnnnnnnnnnnnnnnnnnnnnnnnnnnnnnnnnnnnnnnnnnnnnnnnnnnnnnnnnnnnnnnnnnnnnnnnnnnnnnnnngcgctggccctgcgcgaggccctgaaagagacccggccgttcgtcgaggtgttgttcggccgcgaagccgaggccgaaccgctcgacacaccggaacgcaaggccggtttcaagaagcgtctgcgggccctggcggcgcagatcgaggacaaggacctggccgatgcctatcgccaggacatgctggaacgctatgac

SEQ ID NO: 74358 - DNA, 495 bp, Arabidopsis thaliana landsberg
gagatcgcgagcgaattcttcggccgggtggcgacgcggcggagcttcgacatgctgatcgacaagcccgttgggcatcaacacgaaaccccgtggcatcaggatctggcgtacgcgcagcgtccgacggcgccagctggttacttcgaggaccatcagaccctccagttttggattgcgctcgacgatgctgatgtggaaaacggctgcatgcagctcatcccaggcccgcaccgcgagcccttgctcgagcatcgggttgtgtcgggcgatccggatgatgagggtcggctgctgggcttggtcgaccccgcggtgcagctcgatctctcggcggccgtggtgggagcgattcccgctggcggatgcacggtccatctgccgacgactccgcattacaccggtcccaatcagaccaccgatcgtcgtcggcgggcctacatcgtcaacatcgggcccgcctgatccggccccggctgggctgggcagcggagc

SEQ ID NO: 74359 - DNA, 450 bp, Arabidopsis thaliana landsberg
  unsure (1)..(450): unsure at all n locations
gttgggtaaaactttaggactttttaactgttataccgggaggccaaactgggggtggggtacattttcagaaagctgaaccaaagcccttcctggaaagaagtatgacggtggcacttttgcatggactttatgccgacagnnnnnnnnnnnnnnnnnnnnnnnnnnnnnnnnnnnnnnnnnnnnnnnnnnnnnnnnnnnnnnnnnnnnnnnnnnnnnnnnnnnnnnnnnnnnnnnnnnnnnnnnnnnnnnnnnnnnnnnnnnnnnnnnnnnnnnnnnnnnnnnnnnnnnnnnnnnnnnnnnnnnnnnnnnnnnnnnnnnnnnnnnnnnnnnnnnnnnnnnnnnnnnnnnnnnnnnnnnnnnnnnnnnnnnnnnnnnnnnnnnnnnnnnnnnnnnnnnnnnnnnnnnnnnnnnnnnnnnnnnnnnnnnnnnnnnnnnnnnnnnnnnnnn

SEQ ID NO: 74360 - DNA, 276 bp, Arabidopsis thaliana landsberg
aaccaacaaacaacaaaaagaaagaaaaaacaccagtactcataaaaaaacaaataacttaaattttaaaatattttaaagaattcataataatgaaactaaattctattttctgataaatatacataatattttaacacctctatttataacaattaaccttatacaacatataattattatatattaatagatgcttcgtaggcatatttaattcaaacttaacatcctaaaatctttattaaataaatttaaaaaattttatcacaaaacatt

SEQ ID NO: 74361 - DNA, 338 bp, Arabidopsis thaliana landsberg
cggctctcgctctttttctcagattcaaacccctgggatataccatgtaaaggatgacttctgcagctctacggccggggataccttctgatgggtatcaaatccggcgaaagcctgtttccaaccccaatctcaggggaacgggcagtgcacaagctcaacaaggaccgtcgcacaccacaggccctccatcgttagtgccgccgccgctgtcacggcctccatcttacaatgatttatacggagctgcactgccggtatctcgaccagacacatcgttaagaccgcgaacagccggtgccaccagtttatcagcaccggcatcaccatcaccgtcg

SEQ ID NO: 74362 - DNA, 583 bp, Arabidopsis thaliana landsberg
  unsure (1)..(583): unsure at all n locations
gaatcattgtngatcgatttctaagaaagttctaattaggctgtgacagtgacttatgctatgtgtatgataagagttttcttgagtacatgatatatgaattaagatcaggaaaaaaaaaaaaaaaaacaaacaaatcttatgaattgcttaacaaaacttgaatttcttttctttaatttccttcgatataaaaattcatgaaatatttcaatgtctgtaaaatctgaacttgcaatctttatccaagcttaattccctcaaatttatacgctatttaagttaaagatgagttgttaaaatcagatgagacttgtgtataaatactttgagatctgtgttctctttcgttcactccaaagagcatcctattaagttgctaaagagagagacgccaatggctgtaaagcaaaaggtctgtgttactggtgcaggagggtttattgcttcatggctcgtcaagtttcttctctctcgtggctacactgtccatggaaccgttcgagatccttgtaagggataagatagaaaacaaatcctctcttttttgtgaactttngaatattctctgtttcttgagttt

SEQ ID NO: 74363 - DNA, 498 bp, Arabidopsis thaliana landsberg
ttgatcttttcgagatcggactccgccccgccaccgatcttccacacagccgtttgccgacccaagcgcagtaggctctcgcatcgcaccagtccacgcattcgacgggccagtttgccctgcctatcgggtcccaccagctcttggggcatttcatatcttcacccattccctcggtggtctgcggctcgaaggtaaggttggtagacttgcagagcgactcctgccccgagacatcgccgttcgtggactctagaaaagcggcgtactgcgcctgcgtcacctcggcgcgatcgatgcagtatggtatcccggaaggggacgtcaccgtcaccatggccgtccccttgcccttggggcactcactgcccagtcccccgccggcgcccgaagtcccaccgccattgcccgctgcggcacctccagaacccccgcccgacgaggtggctcccgaggccccgccctggccgcttgagccgccggcgggcgctcctgaac

SEQ ID NO: 74364 - DNA, 608 bp, Arabidopsis thaliana landsberg
attttcgttttcgattatttggttagtttctagatattatattcaaaagtagtttacgtgtaggagtataaaaacattaaatgtaaaattggaatagctcaacatatttatttgttttgttaaacattccaacataatagtgtgtgtgatgtaattttgattgaaatacgacaaaaagaagattttttgaatgtaataaaaacgaaataaaaatggtggttgatgggtgcgtggtggagctttggggatagtgaaagaggcggccttgtgcgctttgcggagtccaaagcagagcctctgtttttgcctctctcttttttttttggccttttcaaattatgaattaatctattcggttgatcaatttatcccctatactaattattaaatttatatttttaccatgtttagaaattgttaaatttatttttgctataaattattgtgattagtatgatgggatttttggcattgactttcaattgataaatcacaacagaagataaatacacattgaagtgatgatataaggctcgatttgatgtttatatgaacttagaaaattttgttttaaagatagaagtcttctccgaagagaggttgaagtc

SEQ ID NO: 74365 - DNA, 221 bp, Arabidopsis thaliana landsberg
aaaaaagggagggggagggaagggaagagagaggaacggaacaagaagggagacaggaggacacggggagggaggggaaaaaggggagggaagaggggaaagggggaggagaaagggaggcaggaaggagggggaaaggagaggggggagaacaaaaaggggaggaagggggaaggggagggggagaagggggcaagcgagatgaaggggagagagaacga

SEQ ID NO: 74366 - DNA, 593 bp, Arabidopsis thaliana landsberg
cgaaacgcataaggaaatgaaagaaagacagaaagcctgaataacaatgaggtcccgtctccggtgtatttatataactgatataactgccgatgatgggaattgtatttatattgtagattctcactccattccaggactattctcccactttaccaatcactatctttttttaataattattttttcaaaatattttgaaagataataatctttttatacatttgtttcattataataaaatctttcacgtcattatgaaaaattatttacaatggaaatgaaagttactctcaatcgattgcgaaatggcttgctggccggtttcctggtcatcgccggcaatctttccgtatcagcccagcaatcccatttgatcaggggtacggtcacatctgcggataatgaacccctggcaggtgtcaccgtcacggaaaccggtcattcttatggtaccaccacagatatcggaggcgcttattctctcaaggtaagtccgggggatactttattattcaagtacctcgggtatagtgagcaacgtataaaggtcgggacgcagtcagaagtgaatgtatttctgtcacccacac

SEQ ID NO: 74367 - DNA, 184 bp, Arabidopsis thaliana landsberg
ggaaaggggagaaacggagaggcaaaaaaaaaaagggaagaagaaaagttaaggaaaaaaaaggaggagaaaaagggaggaggaggaaaggaaaaagaaggaaaaaaaaaaaagggaaggaagaggggaaaggagggagaaaggagagaaaaaaagggaaagagaaaggaaggaaagggaaaag

SEQ ID NO: 74368 - DNA, 519 bp, Arabidopsis thaliana landsberg
tggctaatgtgagcgcccggctcgcgcgcgtacgcaacgggctgacgccacgtgagtggacaggttctgtcgggatggccgcgacgatcgtcgccctgcacgtggtcggctggctgatgctggccgcggcggccggcggtcgttatcacatcagtaacaccgagatcttcggcttggggaccggcgccctcgcctacaccctgggcatgcggcacgcgttcgacgccgaccacatggccgagatcgacaacaccacccgcaagctggtcagcgagggcaagcggccgctggcggtcgggttcttcttctccctcggccattcctccgtcatgttcatcctcgcggtgctgctgaacttcggcatccgcgggctggacgagcaggtaaagaacggcagttccagcctgcagtacaccaccaatatcgtgggcacctgcgtgtccgggttcttcctgttcctgatcgccgcgttcaacatcgtgatcctcttcggcatcctcaagatcttccgggagatgc

SEQ ID NO: 74369 - DNA, 594 bp, Arabidopsis thaliana landsberg
aggatgaagatagacaaaaagtcaaaatacaatgctctttggcctcaatatgacaacaactctcctttatctactcgtataaaaatcttatacttagcttccaagttccaacatgttgaaagtggttataatattttatttttaatcaaatatatttaacttgaaataagtatttttaatttatattttaaatactttttttactcagaattttttttattgttaatttctagaagtcgtaattttaaaattaacaaactattgtcactttcttttgttaatatatatcttctgtaatcatgtattgttaatttatatttctaataaaatgtttctaatattttgacccaaaaaaaaactaacacattatattggaagtgccatattgaaattaccatttctttagtcaaaagtgtatgtttgaaataatttgaccaaagcaaacatatatgtttagcaaaaacgtctatttattttattaaacaaaatagtaaataaagagaaagtcgtacaaaccaaacgtcatgaaactacttgaaaaagttttgaaaattgcgaataagcagcagcattatattattttatcaaaattta

SEQ ID NO: 74370 - DNA, 548 bp, Arabidopsis thaliana landsberg
aaaaggacaaagccgtaagcgttatttgaggtgggaaaagttgtgacgtgtgcgaaatcgccagtgtcacatggcaagtgtgagtctttactctttttaaaacaaatatcgtatcatatagatttggtatcattaaggataataattagctctaggtttgttattacgccatcaccaatttttttatattattaaaatatcttttcaagtatgtgtgtcgttttgatactcctccaccattcaatttgcaaccttcgatagaaatagtgactacaaatggttgtctttgacactgacactgacactgcctgtcactgtcccaaagtcggtttaatttatccttcccaccacatcatcgaatcatcatcatcattattattattgtatgtttaattgtgactatcacatccattaattatttgcattgacaattgaaaacgtactaataaattttcccaacggtacattgctttggagatatccttgtgtctttattttgcattttacacgtaaaaaccatacattttaacgtattatatggaaataga

SEQ ID NO: 74371 - DNA, 597 bp, Arabidopsis thaliana landsberg
  unsure (1)..(597): unsure at all n locations
atataccattaacatacagagtagataattttttaattgaaaataaaaatgtataaacaattagatgagagatctcttttttggggtaggcatgagagtttttttcaaaacaagagcatatatatgaagttctaatagtttagggtggagtagataacaaaaactaaaaaataatgaagccactattgcagctaccgtcactaactcatgtaacacattgatatttcatacatttatttctatatatgatgaggtaagaaaaactaaagaaacataacagcgaaaatagacatataataagatgagaataggaatggatcaatcaacatcctcaattctgtgtgttctctaactaattggcccccacgaggaccgtataattgtacagccacgccgcatccgattccttttctcttgatagacataatagcaagctcgctcatttcgnatttctattttatattattatactataaattaaaaacattgcaatcatatctttaatagaaatattttttagttacacaatttgnatgtnctttcttcttcttctttttttcttttaaatgtgaatttttaaaaaattagttattagtc

SEQ ID NO: 74372 - DNA, 1696 bp, Arabidopsis thaliana landsberg
gatcttccaagcttctttatcatcccaactattcctgctcccgctaaacgagccgctcgttccgcgactacatcgcatacttcaactacaacttctctcgccgcaagagttgaatccattatctgcatatggttcacacaagatattcaagatttgtttgtttttaatacaaacgcaaaaagactatcgaaatttctaaagcgaatgagtctctatgaagcttacaccgaaaacttccttgagctttttgtttacaatctcccgttcttcggatatatcttgatgcattgcagccatatctggagacctaaaacatgctcggaaaaccgcagtttagtctatagtttcataacttagtctaaaagaagtatatagttaaggtaccataaaatgtaaggaattgtgagttttggaggtagtgtatctccaaagagagcagattcttcagacatttttagtaacactcttcttactatctcccctaagtatcttcctgacaccatcttctcaaatatcttcaaacagagaaacagacaaatttctcaaaacacactatagaaagtactaatcggtatgtgttcttactcgatgtccgggattcaagctttccgcgtcaagagaagcatcgaactcggttataggaagatggcaagatctgaaatctccccactctgtgctaacaacctataatcttaccaagtacaaccacttgatataaaaactttggaaagctctatgatattgaactaagtgtgttgaaagtatcttaacatacgatctcttgtggctcacgtatcgcagatttccacctcgatatctcttgagcttgttcaatgtaagcagcgatggttcccatacctaatgatactgcagccacagagtccttgtgataataccttcctgcagccaattcatctatagtattatccacctgatttcaaaaaccagattctcaaaagatacattaaaagtcttagattaatcgtcattgcggattatctttagacttgcttaccagcgctgtgttcatccgaattttcagaccgtgtgtttccagtgattcattcatatcattcaccaaatctttcaaaaccttctcatcatcgtcatttgctaaactcttcctatgtatcgacgagattgaatgtgacccaatctgctcaacagagcgcgtcaacgtaaacccgagattcttcacttcttctgcttctccaccgggattcatcgcaagaaatttaacaagctccaacgatatgaaatcgcacaactcctggatccaaataaaactccagcttcatgtaacctaacgtgttaatcaagaaatcttgtatctctattcataccttgaaagaaccatttaaaacatcgtcagggatcggaatctcatgcttctgtacatcggaaataggctcttcgttaccacctagcgtcccacgtaacagtaatagttccttgcctctcaagttgactccatagtgtacccctttctcatcactacacgttaaacaccggtaaataacgctcatgtacgagctctctgtatcaaaagacagaggattctgatttacccggaagggagagaaccggtgaatgaaacgagcatgttgagggaaccgcaacactcggcggttaaagaggcggtcatgtcggcgaccaaggcgtccgccaccgcccaaagcttcgaaaccggcgtggg

SEQ ID NO: 74373 - DNA, 530 bp, Arabidopsis thaliana landsberg
  unsure (1)..(530): unsure at all n locations
tatgaagttactaacttttcttttttgttgatttctgaaatttacaattcgaatgaaagaacagggtgtgccgatataatcaccatatggctgattgattactcaatgagcattagtagcatttattatacactgatcgcagcgccatataaaccaccacaatcatttggagcctttcgttctataggtacaaaacaataagatgggaaactaaactagtgtcctctcttatcctgcttttattacatttgactatgtaacccacatcatcaatagaagaataccataatggtttggcatcgatacccatgtcatgtgaccatcaccaaatctgaatgtcatctttacttaacataacacgttcatgtgcataggtgttttaacatgacacttttgtctccatttgacgccggcgcaccatgtatatctatcaaagtcatgttaatttgtcaatgaagccaattagctcatcaaaagctggaccacgatcattttcngtcataatttcatttttctctccactagaatat

SEQ ID NO: 74374 - DNA, 342 bp, Arabidopsis thaliana landsberg
  unsure (1)..(342): unsure at all n locations
nnnnnnnnnnnnnnnnnnnnnnnnnnnnnnnnnnnnnnnnnnnnnnnnnnnnnnnnnnnnnnnnnnnnnnnnnnnnnnnnnnnnnnnnnnnnnnnnnnnnnnnnnnnnnnnnnnntaagagatctccttatctagtatagaattgaggatattctatatatcttataacagaatactgctgacataaatagtggctatcattgatgattaaataagtgagacataaccttaatcctatctatatatctatagggtcatggaatagcatagagttattagagttaaaagcatacgaagtttacttagaattcatgacattgccagggagaagtctagagttta

SEQ ID NO: 74375 - DNA, 336 bp, Arabidopsis thaliana landsberg
cagggcgtcgttcggtgcgtagatgtcgcgtttgcggtacggcagcacttcgattatggtcggtaccgttttggtggcggcactgtcgggcaaccacaacttggcagccagttttatgccgtcgggcatgggaatccagcagtcttcggtttcggtccagcgatgggggaaatccgcgatggttttcatatttatggccggtgtgttggggcagtttgatttattggtggaaacgccatgctacagtttgtagccagcagggtaattctaggcgagttgggttaaaatttgcccattaaatccgcaatgtgttgaacgattttccccatggcagac

SEQ ID NO: 74376 - DNA, 591 bp, Arabidopsis thaliana landsberg
  unsure (1)..(591): unsure at all n locations
tcttttttccttttcttgttgtcatgtcatttgcttgttagtttggatttacctaatatcatgttttttatttttcaatttgtcatgtcactggagtagcaaataatagaaacaaacgtgtattaactatgaagtgattgcgatggactgaacaagtttggtgggttaatttgtccatgaaactcttcaaagagtggtgattacaaggcaaaagtcttaataagagtaannnnnnnnnnnnnnnnnnnnnnnnnnnnncctcacatttatcctcagtaagatttaggtaaacagttctgggatctctccatttagaaaaaaaaaaaaaaacagcttctcttgattgccaagacgaacaatctatggtttgaaactttgaattgttgtgtcaacttaaataggcccttgaggtttctactttgtaagtttcatcaccacaactatagcctcgtccaccttcaccaaaactttcaaatttctaacggaacagtaaaataaacagtgacatacattaaacagaaagaaaattactagagattgatccaaaatgtgtggttaaactaggttcacaaaatgtttcctctttttgag

SEQ ID NO: 74377 - DNA, 528 bp, Arabidopsis thaliana landsberg
  unsure (1)..(528): unsure at all n locations
ccgcagtaggggaaaatagacagtcaataaattgtgtatactatttttgcatttgcatccttagaacttgcttctaacgagcctacgtctttttgttataacttttaaaatcggaccgatccattacattcannactgtccgaagcattnnnnnnnnnnnnnnnnnnnnnnnnnnnnnnnnnnnnnnnnnnnnnnnnnnnnnnnnnnnnnnnnnnnnnnnnnnnnnnnnnnnnnnnnnnnnnnnnnnnnnnnnnnnnnnnnnnnnnnnnnnnnnnnnnnnnnnnnnnnnnnnnnnnnnnnnnnnnnnnnnnnnnnnnnnnnnnnnnnnnnnnnnnnnnnnnnnnnnnnnnnnnnnnnnnnnnnnnnnnnnnnnnnnnnnnnnnnnnnnnnnnnnnnnnnnnnnnnnnnnnnnnnnnnnnnnnnnnnnnnnnnnnnnnnnnnnnnnnnnnnnnnnnnnnnnnnnnnnnnnnnnnnnnnnnnnnnnnnnnnnnnnnnnnnnnnnnnnnnnnnnnnnnnnnnnnnnnnnnn

SEQ ID NO: 74378 - DNA, 599 bp, Arabidopsis thaliana landsberg
ggagcgagcttcgattccccaccggcagctgaccgactcgcccggcttgagcaccaccagtttccttttcgctggcgagggcattcggcgggcaggtcatcggctccacggccagcgctgtccggcgcatcccgggttcgagcgcgtcgccagtgaaggcctgcagccagccgtaggcaccgtccgcccacaggctggtgcgcctgccgccgccggtcaggtggacccacgccagtccgtcggagtcacgttccagcccggtgaacgcgtggtccagcttcgttcccgcgagcgtccgctcggtgcggaagtcgaagtccgtcccggccacgtcctgcggcttgccggacgggataccacgatcgtctgtcgggagccactgatcggcgggcagggtgagctcgcagtcgtccaccgtcggggtcgctatcgtgaggtaagggtgatgtccggtgccccacggcgcggaacggccgcccttgttggacgcggtgacggtgacgtgcagccctgagtccgccgcgaggcggtaggtcacgttcacctgcacggcgaacgggtagcccaactggccgactggcgccgagcggagcgttacc

SEQ ID NO: 74379 - DNA, 375 bp, Arabidopsis thaliana landsberg
atcgaacatgaggagatcttataatatacgcgcaatttcaaaaaggccgacggctgttagtcgaaagccgaagatcaaatagatatggaaaaggaaatcatggaacacggatttagtctcaacagaaggcgttttctgtccacgatgagcctcggaatcggaagcgtggagctgggctcgctgctcatgcccgaactgctgaaaggagggggattagaggaggagggcctcgcaccgggtataccgcatttcgcgcccaaggacaagcgggtgattaacctgatccaaaacggtgcgcccttgcagcaggagcttttagattacaaaccgaagcttcgcgagatgatcgggcaggaaaaaccggcttcggtgcgc

SEQ ID NO: 74380 - DNA, 384 bp, Arabidopsis thaliana landsberg
cctgatttactgccatgtgcactgtcgagcacatgctgggagccatccaccactggccatccttttttatgcggtgcaactctggatacggagcgccaggcgctcaagaacggtcccattaaacaataacccgaaaccttttattttctcttttgccgagaagcgaggtatggcggcatgttgatgtccaggactgcctgtttatcatatacaggggcataaacggtcatcagttttccattcgcctgtgcaaaagcgccgcaggaatacagccaacggccagcacatacaaaatacacatattcttcttcatagagggggtttattggttaatggcagaagccttcatttactttctcggggataccgggatgctatacgatg

SEQ ID NO: 74381 - DNA, 646 bp, Arabidopsis thaliana landsberg
agcagagcggattgtgtgtggtttcttgctttctccttgttcttcgattcgctacctggcgtgttgtcgtaatgttcaataacatagtaaacacacacacacacaccgagaatcgtaaacaataaaagggatgatataagtagtaataaacgtgtatatgataactaactattctgagtaccagggtgattctcatggatctcgttttccttctgaagcgtttgatttcctccatagattacttcaaacccttattcgtcagaccttgttgcgtacccttctgcataagaatgcgacatcacgtcactgctccatcaaagttaagaagagaaccatattttttttgaataacatccaaattacgaatcagaaacaactacacacatatggggaggagactaacccggttttttcgttaggattttaaggctttatatacatcttttgctgatcagaagtggtggcaaaactaactgcagtgactttgcggcctaatcgagatggtgttgagcagaacgagacggtggtcttagagggcagtgatcggatagtctctaaagcgctgaccatttctccgcttttggaagtttactgaagcctaaatttatagagtaagatagtattattcttacgaggagatgataag

SEQ ID NO: 74382 - DNA, 310 bp, Arabidopsis thaliana landsberg
ctctggtgcatcgaggtttattgaggaaataaatctttacttttctaacagaaggggaggtgtcttcgaaaggagaatactgacaggctagcatccaacgaaaaacgaaagatcgatctcattcaaaggggtgaaatctaaatggaacgatatcaacgctagaatacggcgatatggaaaactgcctatgaaactgaagcactatcagtgggcagaaagaagcaacggccagtattacttaggaggaatgatactctatagagaggagagacgggtgacgaccaatgacaagattgagcacacaaccaaa

SEQ ID NO: 74383 - DNA, 588 bp, Arabidopsis thaliana landsberg
ttttcttctacaagtgataaaactttggaatttttgaataagtataattacaacaactacattttattttctgcatataccaaagttatcgaaacatgtatattccgacaaactgaaatcaccggaaaacggtggtgtattgaaacaaagagttgttttaactgaagtttgaaagtaaacaaaagattaaaaagtaatttatagtaatgttaatatttactcatgtttctgctttggtgattagtaataaatcttctaaaatctatatgccattttataaatgcgattaaaaatttaccaattaaaccttatttagaaaaatgtagagaaaacttcaaattatctcctcaagtaggattagatcgagctgcaaattggctctttttattcatttaatttcctccattcctaactgtattggtattgtttactttatttctataagcaacaaaataaaagaatcttgtggacaggtgacaatttatgagtcagccagaattgccacgtgtcggaagatcagttgccgtggtaaaaggtgtttcttagattctcaaaacaaagcagttaaagagaataatatcaaagagt

SEQ ID NO: 74384 - DNA, 470 bp, Arabidopsis thaliana landsberg
  unsure (1)..(470): unsure at all n locations
ggagcagcgttcggattgtgaagcggacatgctcaccgtagaggatgtgagtgcgaaattacaggtttttcagtggatggtacatcaactcatgcgaagcggtcgattggcaagtgtgaagattggtgcgcgacgtttgattccccgacattcgttggatgcctacgagaaacagcttgaagataatgaggaaggtcagtagatggcaggtaagcgagcaaatggcgaagggtcaatctatcaacgacaggacgggcgttgggnnnnnnnnnnnnnnnnnnnnnnnnnngaaggtgagcgtaagcgtgtcacgaagtatggcaagtcccggaaggaggcgcaagagcagttagtctgagtttaggtcaaagaacaacagggtttgcccgttccgagcaaaaattggaaggttgctgagtatttagactactggctgcaatatgccgtcagggtcaaacgagtgggaaacg

SEQ ID NO: 74385 - DNA, 402 bp, Arabidopsis thaliana landsberg
  unsure (1)..(402): unsure at all n locations
catttattgtctttgcaaatcaatactggaagcatggatctagaccgattgattgatcatttaatgtgatttctgaaaaatttcaaaaaactaaacggcgagtttgatgatattaacgctgaagtaaacgcggttttagaaattgttggcgacgacacaaggcctaccgtcacaatgagcnnnnnnnnnnnnnnnnnnnttgcgaccatgggaatttctttttcattggcttattacttttttaaaaaaccattatcaaaaaagcagataggccagcgagtttcctcctaaacttcaagacttcccaatccttttcggtggtggagatatgaatctgtttgggtatgttgccaatggactctgggcattccatgtcagtggtctatcggtcgaccgcttggg

SEQ ID NO: 74386 - DNA, 584 bp, Arabidopsis thaliana landsberg
  unsure (1)..(584): unsure at all n locations
acgcgggaaatattgttacccagttgttgaatggcgcgggcgtaatcgctttggccaaaacttgattttttttcggcataggtgatggaatcttctacagaagcgctcacggcgtgttctgtagattttagaaaattcagatacgcatcaggctgtccgctgctgacatataattgtcttaggctttgaagggcttcattcgcctccggggtatgnnnnnnnnnnnnnnnnnnnnnnnnnnnnnnnnnnnnnnnnnnnnnnnnnnnnnnnnnnnnnnnnnnnnnnnagccgagttttaagagggctttgggtgcatcagggttgccttcctgggcaatgaccttctgcagataaggaatggcttgattatattgctggctgttcatataggtaacggctatttggtaattggcgtcactgttgaaagtagattggggatactgccgggataactgctgcaatacggagaccttactggaattgtccccggtaactacggagatgatgcccttctggtatagcgcatagtcgctgcccggctgcccggaggcgatgacccggatgacagcgcctgtgcattggca

SEQ ID NO: 74387 - DNA, 635 bp, Arabidopsis thaliana landsberg
gactcattcaaaaggtgtggttttgatttttaaaaaacaaaacgaaatctccactttaaaatagtagacaattattttacagcacacataaaaatcggaaatatcagtagtaattaatggagattatacatgcatcaaatgatcccttaatcacacacacacatgaagcaaatatatttagcgtgctaataacctctttatttgatctaatcaatgtgagttgcaatcttcctcatcaatttcaataatgacaaaaagtaacttccaaagaaaggctacaaaaaaacataaacccacataattaaggttactataaaatggttgagtggtgagaaatataaactatctgaatccttttgacaaagcttaaatcaatctttgccttcaatccctcactctcaggtcgtcttttttttttgttataacatgcgagtgatgatgcaatcgaaacaaatggaaatggatgaagcctttgcggcatctttgctgtatgatgatgatcaaacaggtattggtcggcagtttcatcaacaattgtttataacgatacctaatgtcaaccattgacccacccggttcggactagggtgtttttcgtttttcgttttgatgaatcattgatctaattagaatca

SEQ ID NO: 74388 - DNA, 572 bp, Arabidopsis thaliana landsberg
  unsure (1)..(572): unsure at all n locations
gtattcatctgtagattcggagccaacgcttcggttataaagccaaaaacgccaacataggatagggatagtggcaatacagccacatgtataaccgatgatccatatagacaacattgtttgtggatgttcttcatctcttggctcaatcagaacgattatgaccgcagcaatcaagaccaaagtcacaacaaactcgattgaattgcaaatgctttcatttgtgtatggatcacccaattcaacaccctcgtgtggttgctgatcatcgattgatgaagaactaccatcgcttgtaatgtcaatgatatgttcactctcggnnnnnnnnnnnnnnnnnnnnnnnnnnnnnnnnnttttcctatttcttgccgatcaaatgaaaagttcatttagatttgcgttgactcacaaagcatatacctttccttctttgttggtataattattagtacttttttagaccagatcaatactaagtacgttctagtcgtgtaacaaataaaacattattttcgaaaataaaacataaaacattaatgtgtttgattataagaaatgtatttgattat

SEQ ID NO: 74389 - DNA, 639 bp, Arabidopsis thaliana landsberg
ttaattcatttgggaacaccaaactcaacaaaattattttttacaacgattttacaaatgaaaaattagcatagtattccccggctgatttaataaatcatggacttactctaaaaatcaatcctgatcaacatagaaaaatttgactaccaatatttttaatcaatttaatgaaggatatcctagcataaattattaaatttatacaaaacagaatttaaaatcaaggcgaaaaaactgttgggttgaactaattataatttgaaataaatgcaggaaacagacataaaagatagggaaataagtcaataactcttactataactcctagtgatcctttttctgttcccctaatattagactttgaaaaaaccatggtgcttctttactgctttacatgatttttcttacattacttttatgatgcgtacgtataaattatatacacatattatgtagtatatcggtatatatgttatgtattcttgcaaatgctagtccttgtgacccgtcttcatggagctttgaccaaaaccatggtaacactcgaacccaaaatcttcaacaccagattcttgggcataatccaagaacatccaactttcgccgtctgtttttcaatgatcttgccggaaattt

SEQ ID NO: 74390 - DNA, 588 bp, Arabidopsis thaliana landsberg
  unsure (1)..(588): unsure at all n locations
taacactgtcgtggggccgttccaccgggttcgggcacgatgtccaggaaccggtcgtcgtgcagcttcatctgctctttgaaactggccacgccctgcgtcaccgagcttttctggccgccctggccgcgggtggagatcatggcggcgtggcggaagtgcgaatccattttcagctgcgcccggttgtcggcgcgccacaggccgannnnnnnnnnnnnnnnnnnnnnnnnnncggggtggtaggggtctttgatgttctcctgcatcagcttccagtnnnnnnnnnnnnnnnnnnnnnnnnnnnnnnnnnnnnnnnnnncgcggccgttgaacacgcggtcgaaataatgcaggatgtccgggcccaggaacgcttccagcggctcgacctggtggtcgaacgaggcgaacaccacgccgtgccggcaggccacggccagctggttcaggccgtgctcggccggatcgaaatccggcggcatgccgccgttgacgcgcccgtnctgcttgacgccgcgccgcagcggcacgccgatcagccgggcctgcatgtcgtagttccattggtgatacggacacacgaac

SEQ ID NO: 74391 - DNA, 600 bp, Arabidopsis thaliana landsberg
gtgggtgcttgctacgcataagaatgtttgttttaaggctttttttttagaagtttggtggagatattctcagatttttatagttgggtttataatactaataaatgtaatttggttaagtgtgctgcaattttgaattcttctagtgcgatctagggaaagcgcgagttttgatgatcatgaaccccaaccggtacacattcttctcaagatttaattttctatctaattgattgtctctcttttttttccttataaagtgttttcatgttgaaattctctgaggatcttaactgctccatgcgagtgaaccataaattaagttttctttttctatcagaaactagaagtggctttcaggtttcaccagaagccattatgatggaattggtgtatgatgattgttgttcggttctatttcatgtataccctagttgcgtactgtttcaatggaaacatgagtttttttctctgagcatgttggtaatgaagcactgaatccagctgtttggtcttaaaggtctttgatctataatatccctttttgtgttaggtctgaccgattaatgctagttggcattgagtctaccttggaattat

SEQ ID NO: 74392 - DNA, 460 bp, Arabidopsis thaliana landsberg
gcatattttgtttcctggcttatgatctgtggcaggggagataaacaagtagggcagagaatatcggttgtccatgtcgctggaactaagggaagaggatcaacattcgcttttctatctaatatcttacgagctggaggatattctggtgggtgtcagcctacgtagagcattgactatggattaaaggcttactggattttgagtctgaatcgggcatgggtactatacatgagtctttcgatgtatattgcagcccacatattctgaggatcaaaaaacgtaatgcttgtaatggagaacctgtctctacttccactcttaatgatcttttctattcagtcaaaccgatacttgaacaggctattcaagaagaaaatggttctttgagtcattttgaggttactaaacaagcttatcttagaatgctgatttaacacagctccctcttgtatcttat

SEQ ID NO: 74393 - DNA, 465 bp, Arabidopsis thaliana landsberg
gacgcctctgtccctgccgggccgagtgccttcagtacatgcatttttccgttttctccactcctctgccgcgcgcagacggcaccggtttcgcgtgaaatgagcgttttgaccatgctcgttgaacaggcgtcacagattcgtgcgtacctcgtacggcgtgaatacccacaggtaggcacccgcggccaggaacgtgttctagagataccgtactcgtgtgaactcggacaagacgcctgtgacctcgggcaaggcctacggcggtcaagacgaggacaggcccagcccggccacggatggtccgggcctgggagaccgtgctggtctggtccggggcggtgctggcccggtcggcgccggtcctggaccggccggtggcggacccgacgccgtccagcccgatcttgttcggcgggtgcgagagatctgtctcgtgctgcccgaggtcaccgagcgggcaag

SEQ ID NO: 74394 - DNA, 413 bp, Arabidopsis thaliana landsberg
  unsure (1)..(413): unsure at all n locations
ctaggatccgacccgggctttatactncttttttatttcccaaatcaacccaaccgttggggcgcagggggagtttgactccggcaccttcaaatcaagcgtaacctggaaccgagcaataagctgctcaccggaagcagagacaaatacacacgacgcactacggcgagagtaaacctcgacggagagaacactgcatttagccttcttaagagacgtgtcagtctgagacttactcagactaaagcaagcagcgacgggcgagacgttaccggatcaacaccgcgactctgattacgagtcggtgcgcaacagaacgggaacataaacaatctgtcgtgggaaactcttgaacgtgattttacaataccacacaccagaggatacatgctatacagacgggccagatgaag

SEQ ID NO: 74395 - DNA, 527 bp, Arabidopsis thaliana landsberg
cggcgcccagattgtcgatattctggccgaaataacgcggtacttcgttgttataggcgatatagttgcgatagtgcgtgttgggtgcgcatcggcttgcgcgcggcataactcaggccgctccagaaaccgaagcgcatctcgtaaccacggaatttttgctgcgtgaccagggtttcgatctggttgcgatagaccgtgtaattgacctgctggccgggcgaaagggatgcgggatcgatcttgtccagttgcgtcagaacatccgtccagtaggcaagcttggcgtcctgcgcggttttcgacacatcggggaaatgggagcggatgcctttttcgccgctgtcgtcgtcattgtcgccggtcagggatttgcgccatttccactcggtctgccagagcatttcaaaagcagcgtcatttgtggaaacggtgctggggtggtgaatggggcggcggaaatgccggcgtggtcggcacaggccaatgccgctggataagaccgttccaactaagccattttgagc

SEQ ID NO: 74396 - DNA, 549 bp, Arabidopsis thaliana landsberg
ggtcttgcatcggcctgcagaagactttttgtcgatgtacaagcaggctgagcattcgccgggttacggaatttccatcggctaagtgcgatagccacccacaggacggaaatcaggtgcagctgacatcggccgccgacaccgcagcgtcacggcaccttaccgggacacggccaccggcacggctcgaccgccccgccatcgcgggtgccatcgcgttcctcgcgtggctcgggttcgtactcgcccggtggctggtctgggcccgcggccagatcacgctgttcatcatgtccggggtcgtctacagccatccggaccagatgtcgccccgcatcagccacgtgccgctgtcgggctacgacgggcagttctactaccggttcgcgctgaagccgttcaactggcagcccaccgcctacggcatcacgatcgaccggaactaccgctacacccggatcgggtaccccatcgtcgcctggatcggctccctcggccaccccggtgccgtgctcggtgccctagtcgccgtcaatctcgtgtgcgtag

SEQ ID NO: 74397 - DNA, 664 bp, Arabidopsis thaliana landsberg
gggttgatttcattacacgtttgggaggatgcttacgttttctttaaatgaactggccaagccaatctagaccttgatggatacataatcgctatataagaatatatacattgacaactcctttaactcatatagccaataagaaaactagtcacttaattcggttccgatttttcaagggtaattagccgacacactcgtgcactctcttaatctactcttttctctttgatttattatcttcgccatagtatcctcttaatgcctttttttcttttctttgtaactgtccccaaaacaactaacatttaatttttctgtaaagtttatgaaagcttttgaaatatattaatattaaggcttaaacccaaccaaaaaaaacaggtcactattgtttatccctttatatcctacgtaatcgttcttcagggtgaatcaaatcgaaaaggaaaaagaaactaaaagataaatccgcataatcgtatttgcaataaaagcataattgaattgtcaatacacgaaatgatttttataactaaagatagttggttaatacaaatcatgcttctgtaaacttgcacaattagtatactttgaatttgttttactgcgaagtctattttctaatcatcaatttcacgaaataattactaatcatgtgtaa

SEQ ID NO: 74398 - DNA, 483 bp, Arabidopsis thaliana landsberg
gcggtttcctgccatgaaaagtttcgaaagattttttgatttagttccaatagattccggaagaagacccttgaagagatttccatcaaatgcaaggaagctaagttgagagctgctactcaaagccttaataaaattatcaagattttgatctccaccccatactattttgttgaatccaatgttgtacatttctaggaatgggagattgcctagacctggtggtatagtcccttctagaagattgtgcgccgcgcggatcaccttgatgtttgtgagattatgtagagaagctggaatctttccggtgaacttgttgaagcatatgttgaaacccaaaagatttggaagtgtatctcctatgttgctaggaaattgaccccataagttgttggaagcaagaaccaaagagactagggaagagatgttataaatagaaggaggaatagttccagtgagggtatttatagtgagatcaaggac

SEQ ID NO: 74399 - DNA, 352 bp, Arabidopsis thaliana landsberg
tgtgctctccagccctaccatacagatagccgggtctgtgttcaggaaagtaaataaccttctgcctgcctggtggcccaggatatccaagaggaatatgatcatgacaggtgctgcagcaggcctggcggcagcattcaatactccattgggcggtattgtttttgctatggaggagttgagcaaaacacatatcagcttctacaaaacggctattttttctgccgtgatcattgcaggtcttactgcacaatctattattggcccttacctgtatatcggttatcccgacctgagcaacctttctttatccctgatactggtggtcatacttgctgcagtgatatcgggt

SEQ ID NO: 74400 - DNA, 607 bp, Arabidopsis thaliana landsberg
  unsure (1)..(607): unsure at all n locations
gaatctcggcgccagctatctggccacgctgccgtcgctcattcagattctgcagcggctgcgcgcggcgggggaccaaacgggcgatgacctgcccgacacgcccacgctgaccgcgctgctcgaggcgaacgggcgcaatatcgaaacgtggtcgcccggcgagctggcgcgcatggtgcgcggcggccacgtcacgctgctgccgctggcgcagtaccggcgctggttcgagacgctgccgccggccttccgcgccgccgtgacgcaagcgtggggaccgcccgagcgcaacccgctgatgctggcgcgcgacgcgcagggcgagcccgccttcgtgatcccgggcctgcgcttcggcaatgtcttcgtcggcccccagccgctgcgctcgaccttcgcgcgcgcgatggacacctcgcacgacaccatcacgccgccgccgcattcctacctcgcggcctatctctggtaccgccatgccttcggcgccgatgccatggtgcacgtgggccggcacggcacgnnnnnnnnnnnnnnnnnnnnnnnnnnnnnnnnnnnnnnnnnnnnnnnnnnnnnnnnnnnnnnnnnnnnnnncacgcctact

SEQ ID NO: 74401 - DNA, 629 bp, Arabidopsis thaliana landsberg
  unsure (1)..(629): unsure at all n locations
aaatctttaacaaaacattaagctggagacgaacttaaaatggtgatctcaaacaccatgaccaacaaaacataggttatgacttatgagaaatacgatagacgaatcacctttctaaaagattatgtagggttggttttgagcaaagttagtgaaacatttgttttgagcgtccaaaatattctaaaatctacatcatcaaattatttgcaatcaggcttccaaattaattaattctatagtaaaaagcttcaaattttccaaatcattggaaataacgtcaactgtttttacatttgcccccaaaatttcagagccgtcctgcaattatggaagacaaaccacaatctatgtcacatagaacttaccatacatcaaattatgtatgcacattaggttttagtttataagttaaaccaccaatgctcaacttttgaccttcttggagcttcaatccttttctgaagcaatttgacccctttcatttacacaggaaactcagtatggagacaggaatgtttctaacatcgaacatccaaaatcacactttaatattctctacatgctagaagaccataattttcatattatttgatttctagnttttctttttttttcttcaaataact

SEQ ID NO: 74402 - DNA, 485 bp, Arabidopsis thaliana landsberg
  unsure (1)..(485): unsure at all n locations
aagaaaagaatggcgatagaccactaaaatgttcgtttggcccttggcatattctattactccagacgctnnccctgtaggataacttttgaattaaagaaatagttataaaaccgtgaaaatgcctttttcatcctgtcaccggggttatacggagattacatgactaaattatctgcgctcaccctgttcaatacagcccctaaggtcagcacctggtggtcccggagaaatgctgcgaattttttatcctcttcggtcagaggctgatcggcagcaaagactacgatgaccgcttccgcgtacttcagtagttctttggcatccgggccatagctcagcgcaaggctgtctatgagcacaaaatcaaacaaagtgttattctcttttaatgccgcaagcacattatgcctgggtaacgcctcatccggcgtatgatccccgctttcggaacccagcactttgatatactcattatccgagct

SEQ ID NO: 74403 - DNA, 522 bp, Arabidopsis thaliana landsberg
  unsure (1)..(522): unsure at all n locations
ggtgttcttgtatttctgcgtttatctgcgatatctgcgtgaggttttgggcctggcattgccatctgtcctgcgcagcaggttttggatcatggtgttnnnnnnnnnnnnnnnnngcaattggtggctgtatttaaaggcgggtgtgggattcaatcatcggtttatgctgatttgggcagattcctcgctatacctcggaatgacggttggggagtgggttccatgtccaataattttgtgtatggatctctccgtacaaatccgcttcatccgtgttaaccgtaaagcgggaccgcgctaaaatgattttgaacttttattggtgttattggtgccattggtggctgtgtataaaggcgggtgtgggattcaatcataggtttacgctggtttgggcagattcctcgctatacctcggaatgacggttggggagtggggagaagtatgtggaccattctgtgtgagatttggacccaaggtcccattgttgtttttggtgcagttagtggctgtattta

SEQ ID NO: 74404 - DNA, 436 bp, Arabidopsis thaliana landsberg
ccgccgttgccgggaccgtccgggtcggcgaggatctgctggtcgccgcttcgcgccagccggccagggttgcgcgtatcgtcaccatggatggcgaccaggaagcggccatcgccggcgaggcggtcacgctggtgctcgaccgcgagatcgacatctctcggggcgacgtgctggtgcgtccgggcgagacgccggaatattcgaatcagttccaggcgcgactggtgtggatgcaggacgagccggcctttcccggccgctcctatctcatcaagctcggcacgcagcaggtgccggcttcgatcaccgagctcaaataccggaccaacgtcaacacgctggagaagagcccggccaagagcctcgagctcaacgaggtcggcaccgtgacgctggcgaccgacaagccgctggccttcgacgcctttcgcga

SEQ ID NO: 74405 - DNA, 567 bp, Arabidopsis thaliana landsberg
  unsure (1)..(567): unsure at all n locations
aaggtagtcgaactcgaacttaataagttaagttaattggtgacattaacttttaacttttccttgtcgttttggcatgacatgaaatagtgaaactaacttgtccggcattagtttatttccgtcgttggtgatctcttatgatcttagtatttttagggttttaaacttttatttggattttttaaataattattttattattattgttatgatttgtagtcaagtccttttaaatctcttctaaaagactaaaaccaagagattttgatttgtgtgtattaaattcaagacatgctctaaaatatatcctttaaaatcattaaagaatctgatgcttataatgtttttaagaaatttgaattttaaattactttttacatcactaattcaatactttgttatggtttatattttttttattggccgctatcttttgacaatttgctaaaaaaattttttttttaatgcatagtattatgttccaaacttagacgagggtattaattggtctaataaatgaaaacaaaanaaatccggtggtcttatttcatgcttatataattg

SEQ ID NO: 74406 - DNA, 499 bp, Arabidopsis thaliana landsberg
  unsure (1)..(499): unsure at all n locations
caaattctcttgttcaagcttatttgcaatctccacctcnttgtgtttcgaccaactgtttccttcagcgggtttaatcacttgagccaacgaaacttttcctctcacaatgctctggttctgattttggttttggttttgacttgcttccaagtgtttccttctaactcgagtcattggagattcagagtcagccacttcaacgatttcgcttcttccgctttcacggaatctctcaccgttgcttaaaccttgtaatgacgagaaaccgaggtctttcttcgactcggttcnnnnnnnnnnnnnnnnnnnnnnnccaagaaccgcctcaaacgctttcacaatgtgttctttgaaattctcagccgntgatttcgctattggcgaattaaacattaactgcaccgtaggagctgcgaaaactacgaagttagaaaagctttcttttcaatatgaacaatgttctactacgtatatgcatttacctgagccgatacta

SEQ ID NO: 74407 - DNA, 355 bp, Arabidopsis thaliana landsberg
ggataagactataatatctaatttgtcggaatttgaccactcagtagttgactttcacaaatcaagtttgcttctttgcaaaagccaaagtttcgaactttctccaatagagatgagcaagaacaataagaagaagagaagatgggatttgaagaacggagggattctattagaggagctaatcgcttccttcgacggcaaaaccaatccgattcgttgcttctcctccgatcagatccttaaagctaccgacaatttctccgaaagccgaattatctccagctggggatacttcatatggtacaaaggcgtaatcgaagaaagacaagtttcaatcaagaaatggtcgagtcaa

SEQ ID NO: 74408 - DNA, 435 bp, Arabidopsis thaliana landsberg
  unsure (1)..(435): unsure at all n locations
agtttcttctccggaaatagggaatgtgtcaattttaanggacaatctctgcggaaagatgagggatatataaaatggaagcagccgtttttataaatcacagtatgataagtgataacttaataataagtcaacaaataaataaatatgtaacatatccttttgaggagttgacatattaatttacctattttcaactagtgcttgcaacaaaattatcttttaaacgttaatcttatcgatacatcaacaacaatataaaattgactcttctcaacaaaaacttggcaataaaaaaatatcatataagtgatatggacaactctaccggaaacctctatccgaacattctctagacatttcttatatgggctcatttcttatttaaatctctatctactaaaaaggagttaattaggtcccaatctcgaatga

SEQ ID NO: 74409 - DNA, 416 bp, Arabidopsis thaliana landsberg
tagttaatataaaacaaaagctttgagatatatatgcttgtttctttatgtatatttactttacaaatgcttttattatttacaattagtgtgtgaagatttttaaaatagctttttcatataatttctacatagattagtattgtataaatccaaaagatatgtaatctcaatatgtaaaattaatataaatagcgaaaaaatcgcgtcacatagatatgaaatgtactaaattttttaattttattttcagacaaaagacattagcttttacgaagaaaaaaaacacaagagagtactcttgcccattgcaaaacattaccccatctctccatatgagcatcgataataaggatgagttatgttaaccatacttgagagtgttgtttgtgaggctgttaatatttcattttaaa

SEQ ID NO: 74410 - DNA, 501 bp, Arabidopsis thaliana landsberg
tacatctggatcggtaatccatttggatgattttattccaaaaagaaaacccaattacaatattttttttgaagtctagatctagaaatatctttgctattacatattcctctatatatatctatgttttaattcctctacaaataattttttttttgtcaaagctctacaaaacatttctgtttttactttttaaattggaagtcaaaaatatctttgttcaacgtttcttttatatgtagaatgtagactgtagttctctcacttcccggccatttggcttcttttagtattttatcaaaggagataaagaaaaataaaatcgcgacccatatgatatgaagcaggcctcgtctctaatggccacgcagattcattttaatatgaaacggcatgaacttatatattgtttactacaataattagaccatacggtgcaaaaattaaaacagaataagtcatgcatccctccgtctacggtgacgcatgttgatgaacgga

SEQ ID NO: 74411 - DNA, 615 bp, Arabidopsis thaliana landsberg
ttgtcaagtttaactgctgcgtgatcgtaccttttcgaaaccacaccaatacactatatatttctaattctatcaatgtgattactaattatatggtttaattataatacaagtgacatattatgtttaaaacgatttgtatttaatgtaaaattaatttatcttaaacgcacaacatttattagagggaaaactatatgtgaagatatatgaattattttcgaaatgattattggaacgtttcaaaatgaaagaatggagaatattttaaaaatcagaggcttagtagggcgaggccccctctatgccgtgaacgctcacaggagccttacttattttatctctttgtttcaaatcttatcgacggaaaatttctataacccatttaacaaaaaaaaaaaaaattataacccacaaatgattgtataaatagtttacaaaacgataggtatatatgtagatatatatagtactgtctatgcttatatacttttacaacccggtttaatatttatataattaccatttatctcttcataaattatcatattaatttatgtaatagcaacccccaactgtatttataaaaaaaatacattatgcatgtcacattac

SEQ ID NO: 74412 - DNA, 597 bp, Arabidopsis thaliana landsberg
  unsure (1)..(597): unsure at all n locations
gataaaacaaaattagttgaaatgacaatatatgaaaatagagtcacttgttcacgtacgtatggttgtttatatagtcatacaaatacttacacgtctcgtagatcattaaaagctctttaacatgccatgtgtatcctaatatagaaactttcaagttcaccaagacaaaggcaataaatgattaaactacaaatacgtaattatcatattaatattagtccattcattagtacttgtgttcatcatccaaactcttctttttttcatcatccaatctaataaagcatcttgtttctttgttaaactaattaacctttcaaatttatctatatatactgtaacacacttgatcgttggagatattttaagagagaggctcaatcaatattccaaaaatattttaaaaatcttgtgagaatagtgtagaatatcaattcgagtatcatgccaagaaataaataaattagaaccaataatcaaataaactatttatggcgtagataacttcaaatgacaaaaacaatgtaatgggacaaccataaatgtttttttcacttgtgatngaaataaatagtgtgatatcatgtaaaataa

SEQ ID NO: 74413 - DNA, 529 bp, Arabidopsis thaliana landsberg
cccatacccatgcgaatttcacgtgcagcatactaccttacatggttcttctgattgcttttttttgagggatttttcttcctttcaattttagtccgctatcttacctctaaatttataaataactaaatggaaagtgagggaacaagagttcaagagtggtgtcctctatgctaatacgcatatcatatatctatttttggtaatataaaaatgtacaagtacgtagtatgtgtttgtgtagttgaacatataaccaaaaaaatattgacatgcatataacaatgataagttcaaaatgttctactcttgaagcatggcatagggaaaatcgggatataatatattcggggagacaaaaacaatttccaagaattgatgcgctaatataatacagtagttaggcaaaaataatttttaagaagcaagggccaggttcaagttacggctaatttggtgatggaacacgagaaagacatgtgggattattgtttggccataatattaacttttatgtaagctcataatc

SEQ ID NO: 74414 - DNA, 274 bp, Arabidopsis thaliana landsberg
gcccgggttagagtaacgtctttgtgcatgttttaaacatgaacctgctaagtacttatttgttgaggtttgtccttcggtgataagattttaaatttttaagtgatgcagaagcaacatgaaacattacaattgtaatatgacaatttcgaatcgcatggataacaaatagtcaaaacactagtcatattgctcactctaatgggccttatcatttaaatgggccaggccttatcatttaaatgggccaggccttattaaaagagttttccaa

SEQ ID NO: 74415 - DNA, 523 bp, Arabidopsis thaliana landsberg
tgcgcgcactgtactttgtagaaatcaagaacagatgaaacctgttccttaccaagttttcttcttgagtcttgtggtactccgcttccatgttctcaacaaaaagctcccacgtcctggcatcaccctcctcacaaatctgccaaaatgcctttactgtttctgcgacacctctggcatagccttcctcgtcgaccttataggcgtcaatcgcacaccgtgcaacaagagcacgggcttccggtaagtccttgaaatcctgttcgatggtatcataaatatactggattgagtcctctttcaggggctttggcttgatgaatgagtttgcaatatccagaaatcctttgcggaaattgaacgatcttgggatttccttgataccatttctgtagacgaccattgcaacctctccacggagcactgggttcttctctgtcttgaatgcttcagccttctcctcagtcaacggggcttgcggtttctccttctttcctttttttgattttgggttcttctttga

SEQ ID NO: 74416 - DNA, 632 bp, Arabidopsis thaliana landsberg
  unsure (1)..(632): unsure at all n locations
actcatcgatccattcgctataactgcattcattttgaagacaccagagagattttagagaaatacaaaagccaaaacataatgttgaaaatagatgtgtaacttacatgtctatagcttcagtcaaagctacaagaaccagaacaaaaaaaagaatgatcagatacgtaaaccacaaaacccgattctatatcgacttgaaagatcgaagaaacctgtgatagtagtactaaagctttcttcacagnnnnnnnnnnnnnnnnnnnnnnnnnnnnncttcatatcactgagaaaacaaacaacaaaggattcagtgaatgatttcaattgttttcattcacatattgtgattcatcttacatgatgcattcgacactagacccgtgattgcagaaaggacaactaaagattgtgtcaagcttatccattcgcttcgtaggagcaggctttgctcttgatttcctctttcccattggttaagtacctttgccacaaaacacacataaaaatcaatacttttataatgattgagaaaaggtattcaacttaaagaaatctcataatttgctaactcaaataaagaacnaaatcatactttacaatactagagacagatattaggtcttgatcct

SEQ ID NO: 74417 - DNA, 492 bp, Arabidopsis thaliana landsberg
ggatgttaatgtgactgtatccgaagtttatttttgctagcttcaggaaattggtgcgtgtgtccttttctttctccactctctgtctctgtctcttcctcttttgattctccgatggaggctaagttactcaaacccgcgttttacaattccccaaacctcaatcttacgaattcttcaagactcatctcgcgattatcaatctggaacgataaatcaaaagttggactatcttctgggtctctcttcctccgtctctccgcagcttctccgatccggtaatgtgttccgtttatttaccgatcgtcttccattgatataaagaatcataaatcttgttttaaaccggagataacgaaaaaagccaccgcctttaatttgctttgtctgtctcgctgattaaggcattgatgtgatatgggcttattgcgtacagatactctagggggctactaagggtagatgagagtgagtatttgaaacttggaagca

SEQ ID NO: 74418 - DNA, 624 bp, Arabidopsis thaliana landsberg
  unsure (1)..(624): unsure at all n locations
taccctggtgcacgagctgggccagcccaatctcgcgatcgacatcgaccgtgcgaagatcgcgcgctacgggttgaacgtcgacgacatcaacagcctcatcaatgccgcgatcggcggcgacgtggcgaccgaagtggtgcagggcgacaagcagttcgacatggtggtgcggctgcagcagcgcttccgcgacaaccccgaggaaatcggcgacattccggtggcgacgccgggcggccagcagattccgctgaaggaactggcgcatatttccatcgccaacggcgcgtccttcatctatcgcgaaaacggttcgcgctacatcggcgtgcagttctcggtgcaggggcgcgatcttgccggcgcggtggacgacgcgatcgcgcaggtggcgcgcgacgtgaagctgccgcagggttatcaccttgaatggggcggcgaatacaaggaatacaccgcctcgcgcgcacagatgcgcgtgatcctgccgctgacggtgctggtgatctttgccctgctgttcgtgctgtacggcaacttcaagtttccgctgatcacngtggtgggcgtcctgctgtcggcgccggtgggtgcggtgtttgccatgtgggtgaccggcac

SEQ ID NO: 74419 - DNA, 514 bp, Arabidopsis thaliana landsberg
ggccgaccagccgcgagaacttggcggccaggtcgccggtaccgccggtgatgtttagtacacggttgccggcgcgtacgcccgacagctcgatggtgaagcgcttccacaggcggtgcatgccgccggaaagcacgtcgttcatcaggtcgtacttggccgctaccgagtggaacacctcggcgactttcttcgccttctggctttcagggacgtcctggtaaccgaaatgggtggtgggttcggcgtggtcgcctttgcgctggtcgttcatatcgcttcaccggaaaaaattaccgccattctagggcgaacgggcggatttgtcttggcggggtgtgcctgtgggcaggggcgggcataatgcccattatgtcttcatcttcaggaacacccgcatgacccagatcagcgtcgaacgcaaacattccctcggccgcgatgccgcccgtgccaaggctgaagcgctggtcgacaaactgacccgcgagtacgacctcaggccacctgaacg

SEQ ID NO: 74420 - DNA, 505 bp, Arabidopsis thaliana landsberg
  unsure (1)..(505): unsure at all n locations
aacttgtatctagattaaaaggtngatttctatttattcacgcacagatttacttgcaagattgttgatgcctttaatgaagacactcaactcccgggcaagcgctttaagcaatttattggacagaacgcttgatgcatttactacttgaagaaaggtttctttaggaatgaaggttacttccgaatcttcaatagtagccgcagaatccgggtaatgctcctcactgagtatggcatgatatccgagaagttctccctcacggcatatgtagaatatttgttcttgccctcatgagagctgccttatactttttgactttacccgtttttaaatagaagatcccagttgatatttcaccctcccgaaaaagaatttcaccttttttgtacgtattgtgtacacttgactcaaccaacattttcagatgttgcttttaaaacccttcaaaattttatctgttttgaacttgaaattttttagtgaaaacaggcattggggatta

SEQ ID NO: 74421 - DNA, 422 bp, Arabidopsis thaliana landsberg
aaaatcagaatacaatttaccgtttcaaggctcgcttcgaggaagtggatagcttccaagacatatactacgtgaagacttcccattgcataaattttgggaagatgcttactgaccatggagctgcagactgagcatggatgttgaggtgtcttgtcagttatagatgaatcctgttcatactactgctggctgaacagttgtcattctaaaacagagcaagtaactatggtacattagcggtgataacactgatgccttactctgaacggatacttaccaacactcggatctttggactgatcacgaagatggcctccagacacatatgctctagcgatgccataaatttgaccttgtgaccatcagtgcttgcaacattttcaccaactgaaacacaatatatcacagggtgtatataa

SEQ ID NO: 74422 - DNA, 265 bp, Arabidopsis thaliana landsberg
agaaggcatatcaccgttttactattgtaatagaagaaacagaagaagtggtgcgcaagttcgcccgtctgatagagaaacaggtggaagtgctgaaagtatattataacaataacgaagagatcgtttggcaggaactggccttatataaagtgcctacagatgtgatagcggaaaaagtaaaagtggaacgcctcctgcgcgaatacggcgcccgtgccgtggtgatccgcaacgactacaccattttcgaaacctccgggca

SEQ ID NO: 74423 - DNA, 531 bp, Arabidopsis thaliana landsberg
caggatatggatggcattgctttccagcccgcttttttccattacgggattggtaaggtcaacagaaagaatgtgattgtcttcttttaccttgctgctgagcaataaaggtcgttggccatcaatggtcaggatgagtttgtttaaaaaacgggtaccttcatgatagatgccctgcaccatttttccttccgggataatatttcccgaccggtcgaaaagggcaaaagtattggaatggttcagcatgtttacctgattgtcggagttaaccgattccggggaagtatggaactgatcctttacttttactgttgttttttgctccataatcgtttatatttttttacctgtgggttttcggaaaggcttgcggaaagatcattttaggagttcgcaaacggcgcttttttacatccccctgaacaagctgatgatacgggcgtacataattaccggccatcctggaaacggtaaaccgttcttcaaacgcctgacggacacccgcccgggaaagcgcggctaccacag

SEQ ID NO: 74424 - DNA, 563 bp, Arabidopsis thaliana landsberg
acgccccggtttcaggatcatagttggcgagaatgtgattaaagagctcgcgctcgtaaaatgcgatcttgccgggctgggcgtaatcccgataaagggcctcggtgaggcgcatcatatggacggaattgcaggactcggggcccgcagcggtcaggacggcctgatcgaagtcatctgtcgggaaaaaatgctcctctacgctgttgccgccgatgacccagcttctgcggctgacgaccgtcttccagaagtagcgggccgcagcggtataggtctcgtcgcccgtgtagtcgaaaacattttcaaaacccgtaaacttcgatatctgggtattggcatgccacccgttgagaatgtcttttccggctgctgccggctccagcatgcgttcgtcgtggagccgctccgcccatctgagatacttttttttggccgtgacctggtatgcgttcacgaaagattcgctgatcgacccgtgttccgcgatcagaaacttttgcaattccgcccgggaaagcttgttcacgacgctgtccccgaaatagtccgccatttttacc

SEQ ID NO: 74425 - DNA, 607 bp, Arabidopsis thaliana landsberg
  unsure (1)..(607): unsure at all n locations
cgcgacaaacctccacggcgccacacgcggcagataacgctgttcataccagttttcgcccttgagacggatcaggacccggcgggccagccaaccggccacgaacggaatgcccagatacaccagcaccgcgccggcgatcgtcgcgaacggcacgtccaccgccagtcccggcaatccgaacaacggtggcagcatgcccaggaacaaccatgccaacgcgccaaacgtgaccagctggaacagcgcattgaacgccaccagccccgccacgtactggttgtcgccgccggccagctcgttccacaccagcaccatggcgatgcagcgcgccaggccgatcaggatgacaccagccatgaggcccggttcatcatgcaaaaacagcaccgccaggccgaacatcagcagcggtccgaccagccagttctgcaccagcgacagacccagcaggcggcggtcgcggaacaccttcggcagttcctcgtaacgcaccttggccagcggcgggtacatcatcacgatcagtccgatcgcgatgggcagattggtgttgncgacggacaagcggttcagcaccgtcggcagggccggaaaaccccagccc

SEQ ID NO: 74426 - DNA, 577 bp, Arabidopsis thaliana landsberg
aaacagctcccgaaatggctccaaccgccgctcctcggataatcccactttctgtttcttggcctatcaaagctgcagtaagtgctccaagcaatgtgcccactgaagaaggaaacaactttcttagctctacataaaaacccaaagttgcagattctaccctactcaacagtaaagtgatatcaatgatcaaatcaatccaaagcaggacaaaaagcttcataaaagtttccaagaagtggagagacattcttgaaaagaatcaagaaattttaataggaaacaagagaccgacctaaagcgaagaagaaagtcaagaccgccgagagaattgtccctagaacagcggagagggtgaaacgacatgcgtctttaatcctttcgatgaaattctcaagagagggacacgaagagataggacaaaacccacattggaatctagaagggccattattttttttacggaacccgccaaagattaaagagactcgaaacgatctacgggaaaaacaaaaacagagctcatggaggttattcaagagatgagagaaggaagagaaagaagattgaagaaaga

SEQ ID NO: 74427 - DNA, 596 bp, Arabidopsis thaliana landsberg
  unsure (1)..(596): unsure at all n locations
aactcacgcggatcggcggcgtccagaattaacacgcggcgggcatcgcagcttatggaagccctgaagcaacgaacggtcgatgcacgttactcggatggcgcgacggacggacgcgcaaggtagaagcgaaccatggacctggatctccccctttcattcggcgcaagcctcaacgggctcgtcctttccgatgccgaaatgccctccatcgcgtcccgctttcgcatggcgcacgcggcaggctgcttcgactatcttgaatattcgccgaaacagggggaggtcgaagaggtgctccgatggagcagggtattgggccttccggtgcgcgtcggctcgcacgcctacacgatgggacgcgacgaaaaacttgcggaatggcacatccagctttgccactggctcggctcgaagttgcacaacatgcagcttcgcgccaggaacgccgacggcaggttactctcaacgacgagatcgccgcgtattttgtttcgttctcggatctgccgtcgacttacgatgnnnnnnnnnnnnnnnnnnnnnnnnnnnnnnnnnnnnnnnngggagtcgaccgcatcgccgcgtcgcggagc

SEQ ID NO: 74428 - DNA, 348 bp, Arabidopsis thaliana landsberg
tggtccttttttcctaccagagtctttgcccatgagaaaacagaagagcttttgactggaaaagagttaatccttttggttccttaaaattcttaacccgccattcacaaatcggtagtttagccttatgttatttcctggtttatctgggcgcccaggccgagcatagtgactggaactttctcacgatctattgatttcactggatcgatagaatggtgggcatttgtttggcagttggaggtgatctagtggggctggtgcatggaggattgaccatgcttgttgtacccagactatgcaacaacgagagcatatatctgggactcggcttatatgtactaggac

SEQ ID NO: 74429 - DNA, 564 bp, Arabidopsis thaliana landsberg
  unsure (1)..(564): unsure at all n locations
gacggggccgacgccgttgcgcttgacgtggccgcggaacttggcgccgacggcgggaccggtcgctccctcgagccactcggcttcgaacgtctcgggtgagagctcgccgatgcgggtgacgtccgacgcaatgttccagcacgtcatcgcatcggcgtcgacgtggacggtgacggaatcgccgaggttcatcggaacgtgctcgccagctcgatgagggtgcggacgccgaagccggtgccgcccttgacgatctcgccgtcgttctccggagctcgactcgggccggcgatgtcgaggtgcgcccagggcaagccgtcgacgaactcctggaggaacatggcgccggcgatggtgcccgcctggccgggcgccccgatgttcttgatgtcggcgatgtcggagtcgatgtgcttgcggtagatcgcagggagcggcagttcccacaccaactcaccggcgnnnnnnnnnnnnnnnnnnnnnnnnnnnnnnnnnnnnnnngtgttgccgagcaccgccgcgatgcggttaccgagggcgacgacctgcgcgcccgttaac

SEQ ID NO: 74430 - DNA, 570 bp, Arabidopsis thaliana landsberg
  unsure (1)..(570): unsure at all n locations
gcctttgcatacaactatttttgcaaggaataaacaaattaaaaactacttcatattcttatctctttctcataaatggtgaataagtggcctttttccccacttagctttgtctttttgtgcccacagattttaggtatttctacaaattttctaacttttactttcttttcactaagtgtaggtccatatcttgtcatggaggactttacgattacgaatcagaaacaaattgagaaaatcccaactccaagacattttataataagtctgatttgtagtataaggtggtacgaaatggtggtaagaggtaagtcaaattaaaatgtgtggtgagatatcttagtgtgatagaaaatggtggtaccaccttttcttaccaacacactgaaaggttatagtttttgcatggagagaccaaaatagactttttgtgaattaagtgatttagttattttctatgaaaaaaaaaattacgaaatacacaagagttaattttgtgggaaacataggtaagcattttatttaaatttacacttcanaatatgagaataaaacttgaaagaaaat

SEQ ID NO: 74431 - DNA, 492 bp, Arabidopsis thaliana landsberg
  unsure (1)..(492): unsure at all n locations
gcgcacgggcgttcgccggcgaccgatcgtcacgggcaccggtggggaggaggaccggggcgcggtgcggtgggagtgatccacggacggcttcggcacgccgaggtcgcccggcaccgccgccagggccgcctcgccgtagccctggacgcactcgggatcgggcccgtcgagcggaaggccggtgaagaacttggcggccatgcacccgccccggcaggagtcgtagaagccgcaggaccggcaggctcccccggtgtccggggaccgcagcgaggcgaacagctccgaggacttccagacctccgcgaacccgccggtgtcccggacgttcccggcagngaagttctcgtggatggcgaaggggcaggcgtacacgtcgccgacggagtcgatgaggcagacgacgcggccggcgccgcacaggttcagcccgggaagggcggagccgtatgcggacaggtggaagaaggagtcgccggtcagcacgtc

SEQ ID NO: 74432 - DNA, 433 bp, Arabidopsis thaliana landsberg
  unsure (1)..(433): unsure at all n locations
ggagttcccctccgaacacaaagtcgctagaccaatgttttgaaataaagatttcaatacgcgnaatatgggggggtataaggagctgtagggataggcattcctgcgctatacaggacgaactgaagattacaatatggctgataaaacgacgaagtcataagtaacacacaagaacactaaaacacactattgggcgacaggtaaccaaaggaagagagaaccagaaaaaacagtgtctgcaaagagtcaaacacacatatgtgacgatataactgcaaacgaattaaacgaaattactacatcagtaggaaaagtagaccgagtcacacaaaagcgtgcataatgcacgcctgatgcaaagcagatcagactggggacagaacaacagcacagagttagagagctgcatcatttgagatcagtcctgttt

SEQ ID NO: 74433 - DNA, 124 bp, Arabidopsis thaliana landsberg
tacccaccgccgcatcgagaaaggcactaacacagcgacgttatgtgagcaacgacaaacccggccgcgagaccgggggattaaggcccggatatcctcaacaaccaacgcagctaacgacgca

SEQ ID NO: 74434 - DNA, 156 bp, Arabidopsis thaliana landsberg
tgccccaggagtctttgacgagcctgctcacatcttatacaatctgcaagcttgattttttcgcaaagcacttaaatcaattgggaagaaacggctcctatcctggactgcagagattatctgcgacttcgctaagtcactaccaagcgacggcta

SEQ ID NO: 74435 - DNA, 563 bp, Arabidopsis thaliana landsberg
gtgtttaatgagagacatatatagacagtgagattttatttttatatactacttggatgaatcatatttttctttggttgcaacttgtatttttgttaagataatcatttttaataaatttattcattcagtcattgtcaattattttaaagaattcatcgttttaaaaacttgtgctacatgaacaattatgaataattctgtagatgacagaacacaagaattgtcaaaactggtgctctatagagagatatgccacaaaagccatcaacctctgtctttaaagcacaaaactatttttcatcttcatccatgagtaatgatgtattattgaaactgaaatatcgtcaaagtatccaaacacatggggtgccacgggcccataaatcttaattgcctccatgaaatttccaaaattttgtaatttataagatgtacctttcaaatttattggttaccctatttagacctagtccaataattttagttatattgaaattaataggcagtttcttctcttcttttggcaaataatgtcaaggtttgaattgacagagttgatc

SEQ ID NO: 74436 - DNA, 372 bp, Arabidopsis thaliana landsberg
  unsure (1)..(372): unsure at all n locations
aaggggagacaaggggggcatacaccatcaacgcgacatcattctatgaagagacaggagtgaaggacagaactgttttgacgatcgtccagtcccacccctgcgctcggaatccggagcagccacccnnnnnnnnnnnnnnnnnnnnnnnnnnnnnnnnnnnacagggacagaccaacacaccgggctttcggcctatcaagattggattcacagactggctacagaatgcacacgtacccacggaaaagaatcaaagggagatgacaggagagaatgcaccgacgacctagacttcatagggggtcgggaacacctaaattaaccatggaaaaaaacactgtaagagcgtaaaagagaggagatccggac

SEQ ID NO: 74437 - DNA, 583 bp, Arabidopsis thaliana landsberg
  unsure (1)..(583): unsure at all n locations
tggccaagcccgtgcacgaccaggtagtcggcaagatgcggcgggatgttaacgtttatcgtacgttgaaggaaaggttgggttccggggagcagctgccccagcgggtcttttggttgcgtatggaaatgcggccgtagcggtaccctcctgtctgcgagaactgccgtacacgctctgccgctatggtgcgtgcgctctcgactgcttccatgtacgccttggtgccccgccgaagcttcggaagcggtatgggcgtgccgaacttccgctcgttcgcttccctcctctgccgcaaccgcgctaccgtatccgctatccatgccgcccggctttctatgaaatccttggcctgtatatgtgatacccgtcgcggtttggtgaccaccacccgcccgtcgccatgcaccgtcacccgcaggtggcgagcgcgcgggctttcccgtacctcgtacgtcatgcgacggccggngacgcctgccgggcacgggcgctgacaagcgagctggtcatgggggcagtatatccatgcgaaagcgcccaggcatgtggtcctgggcgcgtgcgctagagggggacgagc

SEQ ID NO: 74438 - DNA, 531 bp, Arabidopsis thaliana landsberg
ggtcccgctccatcgaagaaaactttcacccaattaattacaccaggttgtggcatcgagtgcatgtctcttgtgtgaaaaacaattcacaacagcgccattcgctgatccaagaacatattgacctggaactgctccgttatttatctgattccgagacttgaatggtgacaagcgaggggttatgcgggggcccatcccacgctaaggacccttgaatccatcataggggcactctgtaccttcatgcaagtagttttagtacatttgaagtgagatatgttgataattcgcactgccaacattcgagcactgaagtcaaccaaaatcaaccaaaagtcaaccgcacagcatcacaccgcaccgcattgtcgtcgatctcgggaaatattctcctgtagtttaccatgttggctagtttcgtgtccatttccacgtcatattatacgtggtgatcgcttgctcgcacgtgcattatagcttgtgctttctcctgcgagtaacccatctgtgcgttcaggcgggacaaca

SEQ ID NO: 74439 - DNA, 502 bp, Arabidopsis thaliana landsberg
  unsure (1)..(502): unsure at all n locations
acgagttactgggacctcatcgtcgtacatcacgtttcgctttttcaccattgacttgaccggcgagggcggggtgacctcgtccacgccgacaccgttcgagatctacgtcgagaagctcgtctaccagaaccggaactcgatcgacgctatcaccggaccgtggagcgtgtatctcggtgacaccgtcacttacgtgctcgacggggcaaccgcgaccggcggttacgannnnnnnnnnnnnnnnnnnnnnnnnnnnnnnnnnnnnnnnnnnnnnnngtccggcgccgcgacctacacatcgacatcaggcggcacgaacgacaaggtctgggcgnnnnnnnnnnnnnnnnnnnnnnnnncgacgtcagtgaactaccgcacgtgcgtcggtccgaacgtctacgccggcggcaaagccggcgggacagtgaagctcacctacaccgtcaaggtgatcggcaccggctcgtcgacgatgttagcgatgatctacgacttt

SEQ ID NO: 74440 - DNA, 238 bp, Arabidopsis thaliana landsberg
tatttatagttttagtcaattttcacgtttttatgttttcgattagtactaaatattacaagcatattaaaatagtgactaacattagtttttagtgttttattaattattatctttcattcatatttctatacgatattgaatctgaccaaacataaacaatcattcatatatcaatttcgtaaccaaaacactactaccattatgcttctaggcctggtgattggtcacagaaacg

SEQ ID NO: 74441 - DNA, 549 bp, Arabidopsis thaliana landsberg
  unsure (1)..(549): unsure at all n locations
aatgttactcacataactcttattattggtccacttgtcagtgtgaatgtaagaataacatcgtgagaggaaaaaatatgaaataattactagcagcaaataggagctcaatgttgacttcactacaaaattttataattaagagaaaaagagctctcaaatcatataataattatttcaagtacttgtattagcaaatnnnnnnnnnnnnnnnnnnnntgatgctttacgaaaagattaacagattggatgattctctataatcattacttcattattcacaatcattggattgaatcagacagattattccacccggatgatcgtttctaaccaaaaaactcattgacgcgatttaaacataaattaaagaaagtcgttaatataaaattcttgccgacattttagagatttttggatatgaagatgttatctgattagtgtgtaaattcttaaggcatcgtccattataatgaagtaatataagggaaacanaccataggaaacaaagtgaagaacaaaacaagcaaagatcttcttttttttttt

SEQ ID NO: 74442 - DNA, 528 bp, Arabidopsis thaliana landsberg
  unsure (1)..(528): unsure at all n locations
caggggtacagggggtgctgtacgcacggcgcgtttgctgtttgcgccagtcgacgagagcaacgcgggaggagtggtcgtgccgggcgcggccatcccgccctacccggagaactcgttgccgtcgcggcgcctgcgcccgattaagcctcgacgcccaactttttcaacaggcgctgcnnnnnnnnnnnnnnnnnnnnnncgatcacgatgcgacccttcttcggagtgtgcagcaacgccacgcgcgcgcccagatgcgacgtgagcttatgctgaatgctcgcgaccgcggcggcatcctttatgggcacggcggttttcgtggacggacggggggcgacgcctgcgttggccttcgctgagtgcgccagcttttccgtggcgcgcacactcaagcccttctggaatacgcggcgcgcgagcaagggcctttgcggcgcgtcctccatgccgagcagcaccttggcgtgcccgacgctcaggagattttttgcacgaaaccctgcaattggcatcgagccccag

SEQ ID NO: 74443 - DNA, 551 bp, Arabidopsis thaliana landsberg
ccggtcatgacgcaaggagtatagtaggtggtcgtgtatttacagaccggtcgtttgtttcagttcctgtggatcttggggctagcgtaattacaggcattgaggctgatgtgccatctgaaagaatgccagatccatcggtattggtctgtaaccaattaggtctggagttgagcgtgttacatggattctgtcctctttatgatactgtaacagggaaaaaggttcctgcagaattagatgatgctctacaagcagagttcaacagtctaattgacgatgtatatttgctcgttgaggaaataggcaaggaaagagcaaataaaatgtctcttgaggatggtctagaatatggccttcaacggctgagaatgccacatgacaaggtgaacattgacaaatttgggcttctcaattcaagctcaaaaacgggcatcagaggtgcctttatgcaggatgaaagctggacagatgattttttgaatgctttggagcgaagagttatgaattgggatcttgctcacacacatatgggttgtgctgctgtcctc

SEQ ID NO: 74444 - DNA, 379 bp, Arabidopsis thaliana landsberg
ggtggtgctggaactggcgaatggcccggtgacatcggaagccgacaagatcctttccgataagggcgtcgtcgtactgcccgatatcctggccaatgccggcggtgtcaccgtctcctatttcgaatgggtgcagaatcgccagggcttctactgggacctcgaggaaatccatgcccgcctcaagaagatgatggagcgcgaaggccgcgccgtctgggccatcgcccaggatcgcagcgtctcggtgcgttcggctgcctatatccacgctctggggcgtctcgccaccgccatcgaggcccatggcacccagcccttcttcgccggctaggcgccggcgacactgagcgcaggctccctctcccctgaggggaga

SEQ ID NO: 74445 - DNA, 345 bp, Arabidopsis thaliana landsberg
agtcttttggtcagagggtttcattcatggaataagactctgaccatttaatcctaatcatccccttttccttagcttccttctttctccttcacacctgcctgtttctcgcttgcttgctgactctccaatctgcgattcctaaattcactgaacggacccgatgaataagactaatttcggttcctctgcttccggtggcgatcccatgatcagattaacctttgtgcaggttctggagtcggaaaaggtaattgctttttcgctagggttttaagtctgaaattgctgggtttcatatttgcttcgatctcctctggatccgctggtttgggtgatcatgat

SEQ ID NO: 74446 - DNA, 303 bp, Arabidopsis thaliana landsberg
aaaagcccccccaggggcaggggcagggggaaaaaccccaaggacaccgacaaaagcaccagagacaagaaggaccggggaaaccaccgcaaggccgaagacagagaagcgagaagccacgacaacaggaggacgcccggccgaaaaagagaggagaagaaggagaacccgcaagcgaaaaaaaacaacagaggcgaacagaaagcacaccggacgccccacgggcaggaacgcaaacacccacgaaacaacgaaagaagagacaagaaaaggaccagggccgccaaacagagaagcagcgca

SEQ ID NO: 74447 - DNA, 499 bp, Arabidopsis thaliana landsberg
tggaggaataccggatcgtcttaatacgggcaaggacacggtcaagggccgcgcgctgcttggcgtttttgggctgagcctgtgtgtcgatctggaggagccgccctacgggttcgtccaggtgcagggcgccgacgaggtatccgaagacctggactacctggtgaagaccgacactgctattgctgtccgctacatgggcgccgaccgggccgaggaattcggcacgcgcaatgacgattccggtgaactggtggttcacattctgccaggcaaggtcatatacgcgttcaacatgacaggctgactcgtcgagccggatctgctgacggttttgaccggtgcctaacggtgcctgaatgcgcaaggacctaaccggcgagtgcatctctgaagcagcactcccgcactgactgaccgaaaaggtaccgaaaaagaattgcctggtcgccacgggagcgggtagcgtaccggtctcttggacgctgtcaccggcgac

SEQ ID NO: 74448 - DNA, 138 bp, Arabidopsis thaliana landsberg
agttcattgtcagattgtgaaacatgggtttggtggagatgtgtatgttaataatggtttgattcatttgtatgggtcttgtgggcgcttggatttagcccggcacgtgtctgttgtactgcctttccgacgccttct

SEQ ID NO: 74449 - DNA, 503 bp, Arabidopsis thaliana landsberg
actcatcatcctaaactctcacatcaaatcatcacaaaaaaatcgaatttaatcgccaaacatacattagaaaaaaaatcggagctcaaaatcaagaataaactgataagataataagattaaaaaaattacagtttcatcaaatccatttctctacgcttgctcggcgaagacatggattctctcttcttctttctttctgattttttttttttttgtcttctgggaatcaagtggagaaataagataatgtgagagaatccttttcattattttgttttattttattacagatatcgatgatgacgatgatgatgatgatgcgagatgttccaagagaactcattgccgtgttggcaaaaataaaggttcaagtttcaagtttcgacggtaactgaaatttaatattagggccacaaagaaaatgtagacatgatttctgacgtgatatgctcaggacgcttatttgcaaatcaaacaaaacccatcgaaacatttgagat

SEQ ID NO: 74450 - DNA, 614 bp, Arabidopsis thaliana landsberg
  unsure (1)..(614): unsure at all n locations
ggacttaagtccttaagatatagaccctgcgtcatccctgccaatcttgtgcttcctagaaactcttccaaaacagaatcgttattcacagtaacggtcaaaagttgtaaacccttcaactgctccaagatcttgagcaagcagcaatctaatgcagcagcagaaccataaaatcttagaacctgcaacttttgtaattctgaaatcagaccgacgcttcgaagattggaagtggactccaaattcaagtgaatcaatttactcaagactcctaaaccttccggcagatgctttatactcgtccctgataagttgagaagccgcaaagaaaccaacgccgagattccttttggcaactcggtgatttggaagttccaagatagatccaaaaccaccagagtcgacatgaccagaaagaatttaccaacaatatctaccaacctgttattntgaaggaacaaggttacaagatttnnnnnnnnnnnnnnnnnaggatcgtctggtatgttcttaatctcattggtgaacagagacatctttggcacagttgtccaatcggtgacatcaggcagttggcttaaaccagcatctgttttcacaacatatctttctca

SEQ ID NO: 74451 - DNA, 368 bp, Arabidopsis thaliana landsberg
tggacgtcatgacccacaccttgacttgtttttaacacaaaagcgcaactaacgagttcgatccctacagcgggcttggagagggaggaaaagcacctgtgcataagggaaggacctactgaaagctgtacatataagagatattaggggagaagactataggtgcactaacgattgcagtgaaaataccataagaattgacgataccaaacattgaaatgcgcatgctacagggaaaactcaaagggggaagagaggtcggagagggcctattgtctcaggtaccccgacacgggaaggcacatgctgttgcaaaaattgtagcggtttctgctagccaatcatccgaacttaacataacctatatg

SEQ ID NO: 74452 - DNA, 115 bp, Arabidopsis thaliana landsberg
tctaatctcaatgcttaccccttcactctttactcacatcatcctaggaaagcgctttctatcattggcatgtgtatatgacttaaaccatttgcatgtttgtaagataatgcct

SEQ ID NO: 74453 - DNA, 355 bp, Arabidopsis thaliana landsberg
  unsure (1)..(355): unsure at all n locations
ccaaaacccttttttcgaccattctcaccaccgttctcattgatcagctgatacactggatttggggaaacccagtctctcttcgatcccggaacagttagagatcttttctttgtagaacaggagcaaacatcacctattgatttgcagaccaaannnnnnnnnnnnnnnnnnnnnnnnnnnnnnnnnnnnnnnnnnnnnnnncctttaaataaattttgtttcaccatattgattgtaatacaataaaggccgtctacaaatgactcccctgacggaatatcatgttgtgaccctggatgccaaagtagaactaaaatcgaggtcagagttttaacgtttggggaaaaaaatg

SEQ ID NO: 74454 - DNA, 601 bp, Arabidopsis thaliana landsberg
taaaggcgcgctgtgcccgatctataacggcacgcagtttacgccaaccttgtttagtgaacttacgctgacattgaactcgaaccatctggcgggagcaatctacgattgctttgtcgcgctcaatagcggctctccaattcttgtcacggggcctgcgtggaactccgcggtggcgggttctggcgctcgcggcgctggtgccggtacgaccgaacttgagcgtgtgaacgggttgctcgtcaacaagtatgctcttgcccaagcccgcaacggcgcgacgacctatagcatccttgcgcgtcaggcgacctacgttggctcgatctatattgatggcaccaacggtcagatttcggcgcaccgcacggcgggccagtcgcgtaaattcggcgtgtggaattgctacaaccggcgcaagattgtcctgaaggtcacagattccacttcgacatggacctacgacacagtgacggttcggcaatcgaatgccgcgactggttacaaagcaacgccgttcatgggcttgcaggaccggccgatcccggcattctttgccagctattgaccttgatcggatcggcctctggaacaacttcac

SEQ ID NO: 74455 - DNA, 249 bp, Arabidopsis thaliana landsberg
gaataatgatgtgaaggagcaaagaaacggtagagaagttaggtaggccaaagtcatcgcactcttattaccgcttctacttctctatcgaattcatatactaccccatttatcaataaacttacaataattttactgcaccacgtaacctatctattaattacatactatgaatccatcaaaaaatcaccgcctattgagctcatgtaacatttattctcttacttttttatatcattcaattaattt

SEQ ID NO: 74456 - DNA, 167 bp, Arabidopsis thaliana landsberg
aggagcaacctctagatgatttttccattgttgaggattcatctgctgccattgttactactcaatccaattctaattctaattctactgctacttctactggttcttctggtcctgtagctgctgtagaagatgaatatgaaatggtagaagaagatttcatcgaa

SEQ ID NO: 74457 - DNA, 532 bp, Arabidopsis thaliana landsberg
tcaggaacagataatacgtcaagaaaaagctcgtgcagaggctcaaatgctagcaaaaatcagagctgaagaagaaaagaaagaagttgagagaaaggcagccagagaagtagctgaaaaagaagtagcagatcgcaaagctgctgaacaaaaacttgcggaacagaaggctgtgatagagagtgttacggggagttcagctacatcaaatgctcaagctgggggtgagctatcttttatttagtatctattttcatctatgttgctgtggttgttctttctttgtcatattgaagattgtgatctcatttcttactgtgtttatttttttattaatcgtgcaaggtaattcaatccgagctgcagaaagtgctttgatattggagaaccacagattgaaaaagctcgaagaactagaatcaacgaatcaatcgcttaagtcacgttcaaatgaggtatctacattttttttacctttttatctgtctgtctaatcaacatttgctcacaagtcatcttgcttatttactac

SEQ ID NO: 74458 - DNA, 444 bp, Arabidopsis thaliana landsberg
ttggttgattcatttgcttgatgtgattgttgttgttgacgacatgaaaggtgacaattcgtagcgaattttatttgtctccgtacttccctaaattctaagatcgaagtcacagtaggcttaaagttgtttctcttttaaacacaaaataaataaattatgacattgaatctagtatatcgaagtatattaaaaataataaagaaataataactttttacaagataataaatctaactaatattccacaatatgtgatttaatttctagtttgctaagagcttgtggccaagtggggtttgctagtttgtctgtctatagagattcacgggtttcttcgtaacataaacaaaattagtagattagtatcaatttggactgtcagttattatgaattggatgttatatacgacaaattgttaaataatggaatatatctatatg

SEQ ID NO: 74459 - DNA, 500 bp, Arabidopsis thaliana landsberg
ccgacggaaattcactcttctattacagtggctcctttatctttaaaatttccacaaacgcgacttcgggtccgggtcctttcatcacgaacaacaatattgtttcatcatatgcgatgggaatcgatccgtcgaatggtgatatttattttgccgatgcgggtgactactccagtcccgggaatgtttttgtttatgatgccggcggatcgctaaagagtaatttcgtagcaggcatatcaccgacagaatttgtctttcgcgcaaagtagtgtttatgaaagagccacaccagagacagaagttaagtgaggaggactattaccttgaaaatggtctgatggtttttacttcttcctatttgttgaagcgtggttactgctgtcagagcggatgtcgccattgtccttatggatataaaaagaaaagtaacgataagctggagcggcggaaaagattgcgcgcttgctttatataaaatttctcgttttaggtgaata

SEQ ID NO: 74460 - DNA, 330 bp, Arabidopsis thaliana landsberg
acaatactgacggagattttcttttttgtcttcttcggggcgcccctggggaacagggaagatgaaccgctcaccttttttttcaactacaaaatcaaccctccactgcagccgctggtgatagacttaatcgattgcggtgcgggacttgacgatccgtccatgactcccaccgcgtctcttcaccggactgatctgtccaaccacacaaggaacaccgccatcacgtaacaagagaccgaaacgcgaaaatactctcgcgatgacagacgacgaggcccgacaagagaccctgctgatctacccttatactctccaataacctgatca

SEQ ID NO: 74461 - DNA, 371 bp, Arabidopsis thaliana landsberg
  unsure (1)..(371): unsure at all n locations
gcgcgcgctttaaggctgaagnggcgcgcgcggccgattttgggacgccaagacacgaccgacgcgctgggggcctatctggccaacctcaccgaatggccgctcggtatctcctagtatattccagcgcgacttcctgcgcgcgccatcggaagcactctggatcaccagggaacccaaccctacagttcgtgccggtgtacgccgctgacggcaagctgtccgagcatttcatcggcgtggccaacatcgaaccgaaagagccggcgcacattcttaagggctaccagcgcacgatcacatacacacatgatcctctctcttttcccacactcagaagaccagaaaacaccggtgtcggatctgcaaac

SEQ ID NO: 74462 - DNA, 573 bp, Arabidopsis thaliana landsberg
ggcatgaacctcagtttttacggcttgttaattgggaaggcatcaaaaaggttagtaggttaattaaccacagacccataaggtatacagtctacttggtagatgcattgaaacaagcagagttcttaagcaaataacttacatatttctttccctatcgacgttgtctgttgttgcccgttgtttttacttcatcagtcacgttccatccgagattttgacaaccatgctacctgtctagttggaaaattcgaggtattagttctcctccatattatcttaacttctgatgttagttttccaccgcaattggctttgtaatttatatattcatctttgcaatgctcttcataatcaccattaagttctctgttgatttaataaaagtacaacgggttgcacctttatgcagactgtggatacgtattaccgaaaatcgagcagcactcaatacgtaggaaatgtggcggtgccactactctgtataagtgctctagatgatccattatgcacaaaggaagctattccctgggacgaatgcggtaagacgctatctatctcttttaaatctta

SEQ ID NO: 74463 - DNA, 420 bp, Arabidopsis thaliana landsberg
  unsure (1)..(420): unsure at all n locations
cttttgaccggcgcgaaatttctaaagctgaatcaactcaccgttttccatttttctgtgatgctcgacgaacaaggggatataacgtccgtaacggcgtactacaacaaatctttataacctcacgaatgagaggccgtatctttttgcaatataggactcatctaatcgctagagggcaaaaactccagagcatttgattgctctacacatgctcttaataacgatccgcgccattactaatcacattattagtctggaaactatctacgcctaagtgggtaactataatattggcgaatatccagttatgagatcgcgactcgaggcagaaccaactttgtccagtagttattttaatctggtctgtgtcacngggcattatgaaggaatctgcctgtgctgtaaaaatgctgactt

SEQ ID NO: 74464 - DNA, 551 bp, Arabidopsis thaliana landsberg
cgtattacaaaaaggagacagttatgcgatctagtaaaagaggcagagaaagtgtgtgtaaaaaagaggcggtaggcaaaagaaaaaaaaaacaggagggatcgtagacaagaaagaaatttgccacagtggtaagaaaaaaagaaaagaacggatctagacaggaaacctgggcaactgaagacggagcctcagctaaagaggctcagctgtgtcagactgaagtgacttatttgggatacacccttcgaggtgaaaagcagtggctaaaagaagccagaaaaagactgtaactcagatccccaacccaactacaccaaggcaagtaagagaattcttgagtactgctggccttctacagactctagatacctgggttggcgaccttagctgcccagttgtaccccctaaccaaagaaggggaggtgtctgtgtggaccccagatcaccagaaagcctttaaagagattaaaaaggccctactgatggccagcctatgcctgacctaaccaagccttttactctttatgtgaaagagagagcaggggtta

SEQ ID NO: 74465 - DNA, 441 bp, Arabidopsis thaliana landsberg
tatatcagtattcgaatttaacacctttaaatattgaataatatttaatatacaccacatttgtttcgtgatctccgctacccattacaaccagatgcattattatttttatactctcgagtgaaaacaagtaaaaccaattggtttctttttcgacggttcatatatattttatgctcctgcatattaatctattaataataatctgactctttttttgttggcttcctttgactaacttcgaaattacaaaactatgtatcgtcttagctgatttttccctcctacacacttgacccatcggacatcacttgacgatttccactctgatttattctctttcctttacaaaaaatttaaacattacaagccatgtatatttatattatctaagtattaacatgctagtgagaaaaatagttaaattttaagtggaaaaag

SEQ ID NO: 74466 - DNA, 445 bp, Arabidopsis thaliana landsberg
ctagcccttaaattcggttgctgatagttagtaacattacttttctgcttatagttgggacaacatggtttcagcaacatattactctcaaattaccttcgtaggcctatttgttcagttccatgcagaaccaccgcttttaggtgtcattccttttcttcaggcggaaaggcaattgaacctgctgttaaagctgtcaccgtggtgctaacaaagtaagactccttgtttcctatcatcacatgcagaatgaccaccttgtaaaattggaaactatcattatttttatttagttgatcttcatggatctgaatgattgcatagcaatatttgggcatctaactcaaaatgaatgaattaactctactcataaacattgcggacttgagccaaacattgatgtatgcaggccttgtcattaccatggctccccttagggaagttg

SEQ ID NO: 74467 - DNA, 463 bp, Arabidopsis thaliana landsberg
ggcgggccggagcacttccccgtcatcggcggcgaagcccgagttcgccacctttagcaccgtgtaagccggagcgccgtccgccgggtgagcggcgatcgcctcatggcgagcgggatctaatcgctccccagacgcggctatgcgcgcgatgccgtgccgggcgaggatccccttcatctgcgccagcaccgcgctcagccccggatcccctggtgtccattcgcaacagcccggtccacgctgtcgacggactgcagccactcgttcagcaccgacctgcgcgcggtcgcggtacgctggtcgccttcccgctcgacgcgcttgcggtagttgtagactcggccagggcccggcgactcgatcctccgtgcgcgcgagctccttgcgcaacgcggggaccctctcccgtagggcggtaacatcgtcggctacgacagttggctcgggcaccttattaccc

SEQ ID NO: 74468 - DNA, 923 bp, Arabidopsis thaliana landsberg
agcattctgttttgtatatctgaagcacacaagtgagaacaaaatattctaattcaaagacccagcgaaactaatgatacaaaacaaaacgtctaacaaaatgttaaattagcaatacaaatatccagatgcaaatgaaaggtgaaactggttacacaccatcaagatgtcaatgtagaagcataatctctaactacgacttgttttacaagcgcgccgtaggctgtggtggctccagctgctcgttttgggttaactcatggtcacaaaggcttacagggtgtggcggctccagctgctcgtttcgggttaactcatggtcacaaaggcttacagggtgtggcggctccagctgctcgtttctggttaactcttgttcacaaaggcttacaaggtgcggtgactcaaaatggttgtttctggttaactctaggtcatgaaggcttatagagtttggagcatcaaaatcaaatggaaattcaaccggtaatgatttccagtaaagacttggtttccaatccgctcctctcagtaccttcaatatctccttaacaacaatctcacttgccttcgcagtgaaatggatcccatctctgtgaagtaaaacaactcaaggaattagtttaagcaagaatcattttagaactcaaaatgtatcatgaaggtttagtagctcacgtgaagcagctgttcaaccaatcatcttgctgctgtatcgcggtccaaatatcgatacctttcacattgatctctctgcatagatttaacaactcttctgcatatggacggcacaactcgttactccggccttttattgcatctctgagacatgagttatacacaaagctaatgatcaaacttccaaaaccaataccaagaagaacatttaacggatatgtaagacatgtacccaaaaactatct

SEQ ID NO: 74469 - DNA, 692 bp, Arabidopsis thaliana landsberg
atgtgtcggcttactacaaaagataaggagaacaaactgttatgtaattgttttggatttgacatggaccatggtgaatgattccgtaatgtgatccttatgaaaagtctctgtttgcatttatttattaaaacacatctttctatctgttgtaagggacaagtaagattgatgtgttttcaccaaagccttcaagctttgcaatgacatcaaatcttccaattcgttgataaggaattcttctaatgattattgattttctcatacgtgatcttgaaaattcttcagctgcttcgttttaaatacttttttccaaataatctgtaaaacaaaaacttttaaaccacaaatggcaaaatatgcttgaaaaccattaatatatgaatttgtatattttttgatattgaaaatattatcgaatttggactaaataaattatcccaacaacactaattaatcgtgaattattgtaaatcagttggacttgattaattgttagttatatggataattttgcaaaccattccaattgatcgtaaaaatctttagtagacgtctcaaagaaagaaaaactgattatgagagcatcaacaaacgcaaaactagctagtctcattcaagtttatacatgtttttttttctaaaactaggtaactcgccaactcggtagtctttactatcaaccaacgtca

SEQ ID NO: 74470 - DNA, 761 bp, Arabidopsis thaliana landsberg
caccttcaacgcgctgttcgaatccaagcagcagatcatcctcacctgtgaccgctatccgaaggaagtggacaagctggaaccgcgcttgaagtcgcgattgggctgggggctgtcggtggcgatcgagccaccggacttcgagacgcgcgcggcgatcctgctgtccaaggcgcacgacaagggcgtggatgtgagcgaggacgtggcgatgctgctggccaagcgtatccgctccaacgtgcgcgacctggaaggcgcgctcaacacgctggcggcgcgcgccaacttctatggcaagccgatcaccaccgcgttcgccgaggaaaccctgcgcgacctgctggccacgcacgcgcaggcggtgacgatcccgaacatccagaagatcaccgccgactacttcaacgtgcgcctgcaggagctgctgtccaagcgccgcgtgcgctcgctggcacggccgcggcagatcgcgatggcgctgtccaaggaactgaccgatcacagcctgccggaaatcggcgaggccttcggtggccgcgaccacaccacggtgctgcatgcctgtcgcacgatccgcaagttctgcgaaaccgatccgcgcatgcggaaggactgggaacagctgatccgcatcctcaccgggtgatccgcggcagactggcaggcgatttccggtgcggttgggcataaagccttgaaccaaaccggggtaagctggggataataggtggatggatcgagccgcaaatttatccaca

SEQ ID NO: 74471 - DNA, 353 bp, Arabidopsis thaliana landsberg
  unsure (1)..(353): unsure at all n locations
tgaatcccaggctgttcaacgggnnnnnnnnnnnnnnnnnnnnnnnnnnnnnntcgctggggagcgtgccctataatgtaaaacaggcaagggagcatgcttgccatcaaccagctggaaaaagaagaatacgacctgaacatagaagccgaagtgcggatgcgttatttccggtatgtgaaggaggtgaccatgctgaaagccatgagccagggactggtggatgccgagaatgcaatgaagcagatcaggtataaatttgaaaagtcggaagccagtttggatgatcacagtaaagcattgctggcatatgccgacaggaagcaatccgttatggaatcgcagggcgcttt

SEQ ID NO: 74472 - DNA, 497 bp, Arabidopsis thaliana landsberg
  unsure (1)..(497): unsure at all n locations
gatctacgacgccgcctccgtgatcgcccccagcccggtgtcgccggactccaaaattgctaaccgttaacctttgctgtcggcatgggtctgatacattgtgaacagatccgccgcgaacagaccggtctcattgtccccggacgacggacggatttccaggatcgccgaccgtgcgtccgcctaattcttcggcagcagagccagccggnnnnnnnnnnnnnnnnnnnnnnnntgctccttcagctcatacagctccgacttcgccagatccttcatctacggatcggccagcagcgactccgcctaggattgcgcccgctccgccgaccgcagatcggcgatccgtctaccaccggctcaatgttcacaatttcttcgacgccttgacataggcctcgaccgagatcccctaggacagcatacgccgctactccttcgcgcgggccgcgatccggtcgagtttggacgccaggctcatttcagtcgcatccgcc

SEQ ID NO: 74473 - DNA, 106 bp, Arabidopsis thaliana landsberg
aacaagaaggccatgaagactgggtactggcgcacgatgcggcatgacccggcatcgttgccggccttttttaaaagctgagcgaagccgcgcatttcgaggcaac

SEQ ID NO: 74474 - DNA, 421 bp, Arabidopsis thaliana landsberg
  unsure (1)..(421): unsure at all n locations
taagcgggatgctttggtatccctggaattgatgcatcataccgtggttcatcctatgttattcaagtattatctcaaaggcacaggccggggnnnnnnnnnnnnnnnnnnnnnnnnnnnnnnnnnnnnnnnnnnnnnnnnnnnnnnnnnnnnnnnnnnnnnnnnnnnnnnnnnnnnnnnnnnnnnnnnnnnnnnnnnnnnnnnnnnnnnnnnnnnnnnnnnnnnnnnnnnnnnnnnnnnnnnnnnnnnnnnnnnnnnnnnnnnnnnnnnnnnnnnnnnnnnnnnnnnnnnnnnnnnnnnnnnnnnnnnnnnnnnnnnnnnnnnnnnnnnnnnnnnnnnnnnnnnnnnnnnnnnnnnnnnnnnnnnnnnnnnnnnnnnnnnnnnnnnnnnnnnnnnnnnnnnnnnnnnnnnnnnnnnnnnn

SEQ ID NO: 74475 - DNA, 134 bp, Arabidopsis thaliana landsberg
  unsure (1)..(134): unsure at all n locations
ttggccggttgctggnttcacatggccctgattttgtatgacgttaggctttaagtaagtggcagggtcattttggagaagncagttcaagaaacaaacagattcattgcaagggtttgttatggttgggggag

SEQ ID NO: 74476 - DNA, 201 bp, Arabidopsis thaliana landsberg
cgccgggggtggacttatgaggaccgagaacggccactataactcctgcgtaccgaagcatcactaaacatctacttacggcaataacccaaaacaaaactgcgtgccatagacctgatctgtttaggtgttatggatatagatacagtaggggaggaaattatacccgcagaattgaaatgatcctgaacagttgattgt

SEQ ID NO: 74477 - DNA, 556 bp, Arabidopsis thaliana landsberg
  unsure (1)..(556): unsure at all n locations
gcttgccnnnnnnnnnnnnnnnnnnnnnngcgagcgaggtggtggcgggcgcgccgaccaggtctatcttggcctgcaccggcttgccgcccgcggccttcatgatctgctgcgcggcgtcgggcgcggcgccgtcgatggccgccagcgcgcccgcgtccagcgccgcctgccgcttggccggatcgatatcgacgacgatggcgcccgcgccgcccagtgccttgatgagggtcaggctcatcaggcccagtccgcccgcgccgaaaatcaccacgggatgttcgcggtagacgtctgcgccgatcttcttcaatgcggaatacgtcgtcaggcccgagcacgcgtagggcgcgatctgcgcgggatcgaggtcgccgatgtcgatgaggtagcggggatgcggcaccacgatgtggtcggcgtatccgccggcgcgatgcacacccaggcaggccggcgcggtgcagtggttatccatgccggccgcgcacgaggcgcacttgccgtaaccgatccacggatagacgaggtagttgcggtcggtggcaagccc

SEQ ID NO: 74478 - DNA, 128 bp, Arabidopsis thaliana landsberg
  unsure (1)..(128): unsure at all n locations
aaatgcctttttctttgtattcttgtgtttcattgctctcttgactccatgaatgcaaaattaaattacctaggtgattattcacgctatcctacagatattttcgatttttttttgntttattttgt

SEQ ID NO: 74479 - DNA, 525 bp, Arabidopsis thaliana landsberg
agcaaactgataaaaataattagtcttcggataacgtttagtaattagatttactagatatttgatagtgatgaaaggttctgcccaactctacaacatattatagagttttctgccaaaccttttactttttcataacaaaaggctaatcaaaatacctccataatgtaatcaacgtgacacgatgacatcccttctcagctatgtttgtacacaactttctcgaatctgataatttaaacaagagtttcatggttttcgttttattggtaataaccgtttcaaaatttatcaaaagtctagtttgaagtattcatggtgatattgtagagtatagcacatagtcaccaattcttatctttgtttgatggttagaatcatatatggttctggacaagaaggttatatatatacacacacaagcaaccatttgttgctttttggatacaaaacaaaaagcaattaaagtaccaattgattaagcctaaatcgcatcaattgatcttctcatgctaatatgagctt

SEQ ID NO: 74480 - DNA, 606 bp, Arabidopsis thaliana landsberg
gttaccattaaagcagaaattcaggaaatcggtatttcttaaattaagtggctcccaatttaaagtctcaggtgccagagggtagactttaccaacgtcatttcctaattctcccccattaattgcaaagaaacctccgatcgcatcatcagcaatcaacagaaaaggagctatttctccaaattgcttaaatgttttttctaaattccaatcaggtaaagaacgatttaattttttatgacctgagcctaaaatcctaatccaaccattgtcgattaacaaacctcccgactcataaattatagcccccattggagaacgtgtagttacctgtgtcttaaagagtgcatcttttgccttagcctgatctgcaggaagtacttctactttatttttggctgcctttacccaattactaaccagctcccagccaggttcattggtatttattaactcttcgataggacgcatttttacttgagcaaaagttagtttactcactaaaagtaaaataacaacaataaaggtctttggcatataccagaatactctatttttggtattcaatttccataatttaacgaaatatgtacaaaaaataaatat

SEQ ID NO: 74481 - DNA, 208 bp, Arabidopsis thaliana landsberg
gcgagcaccgccaccaaaacgcccggccaacatgggaatgggagccaaagaccaaccgaaccaaatacacagtggaagccaaccaagacgcccggatgagagaaggagccagggcgcaaggacaaacagcaagagccaaagaccagaggcaaggggggcgcaacgcccaacagcccaccaaagaacggaagagaaagaggacgcgacc

SEQ ID NO: 74482 - DNA, 249 bp, Arabidopsis thaliana landsberg
ttctccttcttcgtattacttgtgattaccattaaaactaaaacaaaaaattgtgttttctttggaaggatgagatcttctcttcgtcatttgcggcagctatgtatctcaaaatcaacaactttcctaaggacaagaaggttctacttcgaccgacacattggcttatgtctctctatcgtcatctttttctcacttttttttttcctttcgcgtttgcttttgtaggtttatgtgactggtggagag

SEQ ID NO: 74483 - DNA, 209 bp, Arabidopsis thaliana landsberg
  unsure (1)..(209): unsure at all n locations
nnnnnnnnnnnnnnnnnnnnnnnnnnnnnnnnnnnnnnnnnnnnnnnnnnnnnnnnnnnnnnnnnnnnnnnnnnnnnnnnnnnnnnnnnnnnnnnnnnnnnnnnntatacccgcaaaacaacacacaacagccggaacgacgaacgacaagccccacaaaaagcacaaaggaagcccggaaacaacaccggcagcaacaaaccaacacc

SEQ ID NO: 74484 - DNA, 458 bp, Arabidopsis thaliana landsberg
ggaaatcgttaaagaatgcggtacaacgcgacatgatcaaatgcaccatgctttcatcaaacggtttctgatacataccaacattttatgaagtaaccaccaaaaccaatgacagactttctatgcgaaatgctaacatgtttgtaccatatggaaagcgaacagctcaacgagaccatcactgacaggaacaagaacacgagtgctgaacattggctgccaaaacacatggagagtagattgctcttatgaacaaacaagaaaaaaaggctgacgaaaagagtttttgttaccatgttagatcctgaattaaccaaccacttaggagattttgacatcactacttgttcatgaatcctgccatgagacagaagctttacttattcttgaagaaaatatgaacttgaaggtgggttgaatagatggtaacagtcccgggatagagaggcatgaagaga

SEQ ID NO: 74485 - DNA, 569 bp, Arabidopsis thaliana landsberg
ttttcaaaacttatttaattgaaaataagtctcatataatattttgcagaagtttattactataaaaaaccatatcgactggtcggaaatcagaatataccctatattttttaataccttatttccagaaatatgttaggcataatcttttttttttccagatttttggtagctcagataatcgaatctctgaatctattttgttccaaacgttttctgaaacccaatattattttatttctataattattcactttttaatctatttatttggttgcttgtttaattatgtgtaaatacttaataagttagattttagaagtttttatgagattttgtattatgttattataacattattagatatggttttcaaaaatgactttttgagctcaaattaaaaattgttgacaaaaagaaaaaaacattgttagataaggaaattggtgtttggattttatcgtctattgttagtttattgtttattctagtttgatcacctaaatcatgatctaaggttaatatgtgtatcaaaaatgtttggtgaatttccgaaagaactaactatc

SEQ ID NO: 74486 - DNA, 657 bp, Arabidopsis thaliana landsberg
caggtgcttttcttaaaccgggataacttttttctcttttatagataaaccggagattgactttcagggaaaaaaaattcatcgagagcactatgatcaaaccaccagagctgtgttttggtagcattttcaccctagttagttaatcaacaaatcgatgaactatgtgccccgtgaattgaacctaaattaaaccattaaggatgagatctaaaacactacatgaagacatcaatgctaccaacttacttagaacctcgcttcgacttttagattgttaccaaactaaaaggtgtccaaaaatagtgtcattcactaatttttaccgaactaaagctggtttacatgtttcatttatattactactagaaacagatgcaaaaagtttgtgtacaagaaacagaaccaactgtggttaaaaaacaaatctactgtagaacaataatcatatgtcgaaccaagtctgagatcttcatgaagggaagagcttcttatgatgctcaccactgatcttgtgttaacctgacaatgaaatacacaaatgcacaatattagtcatcttcatgaagcttacacagaacagcaaccgtatgtatactgaaatcaatcaatagtggaaggaaagggaggagaactgtaccatcaaaaacccatcaa

SEQ ID NO: 74487 - DNA, 170 bp, Arabidopsis thaliana landsberg
ggataaaaacaaagaaaacccacccacccaaagcacctaaacgagaaaaaactctccaaccaacccccaaacaacaaaccgtacaacactaccaaaaaacaaacaactgaaccaatactcccacaatactacactaacaaaaaaaagacccacaaaccatatacaccaac

SEQ ID NO: 74488 - DNA, 196 bp, Arabidopsis thaliana landsberg
  unsure (1)..(196): unsure at all n locations
cgatgaaactgtgtcgttttctccttcttcttcttcatcaggtacaacaattacaaatcttagaacgttagngtcagtttagtattagcatctctgtggctttactcttttaatttttatttttggtggaatttttgtttccaaaaatttaaactatattgtgtgaaaattttatcttttctttctctcattcggg

SEQ ID NO: 74489 - DNA, 549 bp, Arabidopsis thaliana landsberg
  unsure (1)..(549): unsure at all n locations
gcaatggaagggaaacgatgccaaccggctgaaacgatgtttaagattaattttgcgccagaccagccaatcccaggcaatgcagagacgcgcggaggccctttggtctgccgccggcggatggcagcatgaggtgatttgaattagccgtcagcgagcgttggcgacaaggcaaagaaagcttccggcttcggttcggggctgcactcggaggggatgagcatttttcaaccaattttctcgattttcttttgccgctcctttacggtcacttttctaacactgaaagtttaattttaccattatgggagctcaatggaaacaagccgggcgcgaagcaaacgcccaaaaacgcggccagatggtcgtgaagctaacccgtgaaatcatggtcgccgccaaattgggcgggccagatccggacttgaatgcgcgtctcgccgccgcggttgaaaaggcgcgaaaaggttccgtcacaaaagataccattgagcggtcgatcaaaanaggagcaggcctcaccgatgagaagatcacttacgaattggt

SEQ ID NO: 74490 - DNA, 495 bp, Arabidopsis thaliana landsberg
  unsure (1)..(495): unsure at all n locations
tagctccccctgcatgtacatgtaaatttcccaggcacctgtctgagttatttgctttttgaaatccgcaccaagtccggaggcatcatcgccaacggcccctcttttccggcgtgcgcttagaaaggtcgtaaacccgccgatgtagtcggtgtcctgttcatgaagattccggtaattggcaatgatggcatccgttgggttccgtccaaaatagtaacggtcggtaaaaccaggcatttcagcatgcaggctcgcccggtaattgtggaacccaatgtattttcccagcaaacccgaatcatttcccagcccattcggaaaacggcctgactgcgaattcagcaggatcaggttggtattcaaagcagacgcattcagaaagataacgcgggcctcgaaatcgagtacctgtttcgtttcagcgtcgatgacgcgaacgccggaagctnttccggtcgactcgtcatannaccaccgatgcacgaccgaatg

SEQ ID NO: 74491 - DNA, 459 bp, Arabidopsis thaliana landsberg
  unsure (1)..(459): unsure at all n locations
gacaaacgcagatgaatctatctatgtaaactttatgaaaatttgtagatttaaataaaaagagatacgttgttcggagaaggtcaccaaatatcctatatacagtatatgaattactagtttaaataacctaattacagttcacaggagttttatatggaggttgtacgtacgtccaatttcataaactcaataatcttagactttttatgtttgtttcaatagaagcgtgtagactaacccgcaattggcaactcgggtgttccgtctgtatctccgcatcgaatgagatacatgcttatgtaatatagttcggcgcctcggcgggtatatttgtatatgcatttagtgattgtgcaaacaaaaatcaaatgatcaaagtagttaatgcctccagtgaagcatctcggaagctgtacacgagaggaagttttcttcaaagaaataatcagntgactc

SEQ ID NO: 74492 - DNA, 517 bp, Arabidopsis thaliana landsberg
ttcgcttatacctatgcccaatcagtaaaaagaaaagcctcacctcggcctacagccaatgacagcctttagtatgtcttactggcccgttactctactacgaaatcttacgtgtcaagtaataaataaatcgaccccacatatgaacgttatagagcagttttccaattttcaacacgcgcttttcagtttttggacaatatcactttttcccttttcaaaatttggacaatatcagttttttcctctttttttccaggaacatatttgcctaggatttggaaaaggaatctatcacttagctaccgtcagatcaacctcaaacataatccaacggttataaataattacagaacattctggaaactcaagtctcagccttataaaaaacaagacttcaacgctctttcttcacaaacctataaacctagctctattctttctctttgctgctcttaaactttttcttagctttttctatcttcgtgtgataatggctggtaaaggagaaggtcct

SEQ ID NO: 74493 - DNA, 562 bp, Arabidopsis thaliana landsberg
tctttgcacggacaatcttatgaacgcgaggtgtttgaattgttcggagtgtgtgttcagttatcaccccgacctgcgtaaactggtattgggcgatgattttgaaggattccctttgcgtaaggattttgaagacccgatcaatatgatcaaactgtaattatttatgtacaccgaaacatcaatcatcagcgataccacactggcaggccccgaaggggaactggtgatcaatgtgggtccgcagcaccccgccacgcatggcgtgctgcacctggtgattacgctgagcggtgaaacgatcaggaagatagaaccacacctggggtatatacaccgctctatagaaaagatgtgcgagagcctcagctaccgccagttcatatatgttaccagccggatggattatctctcatcgcatatcaacaacctcggctgtgcattatgcgtggagaaagcgatgcagatagaggtgccacagcgcgcaaaagtgatacgcacgatcatgagtgaacttacgcgtattgcctcgcacgaactctggctgggcgctatggcgatg

SEQ ID NO: 74494 - DNA, 509 bp, Arabidopsis thaliana landsberg
tttcgcgatgttcagggatatcctgttgggcaagattttcttttagatttttggggcctcaaaccctacgccgggtcgcgcaccgccgccgctgcctgcgcttcacgcgcctgcgcctcggccaaccggtacagctcgatcgtgccatcccaatgctcgatcagcgccgtgcacgactccacccaatccccgcaattgaggtactccacctcccccacctggcgaatctcggcatgatggatatgcccacacaccacgccatgaaaaccacggcgggtgcactcgtgggcaatggcatcctcgaagtcgctgatgaagttcaccgcgcccttgaccttgtgcttcaggtacgccgacagcgaccaatagccgtatccatagcgggcacgccagtggttgagccaacggttgagcaccaaggtgaactcgtaggcacggtcaccgaggaacgccagccagcggtggtaacgggtgattacatcgaactggtcgccatggatcaccagcag

SEQ ID NO: 74495 - DNA, 458 bp, Arabidopsis thaliana landsberg
ggaagcctcattcacccattcgaagagctctgcacgctcccagcgcacgaaatcctcatcgttcattatgatggctttgcgctcgaggatgtcaccggcacggattggcattactcgccctctttctcaggggcgggcttggccagctcttcgcggatcttctcgatggtccatttgtagtgcggcagcttgccgaacttcgccttgtacttctttgccacgacatcgcgctcggcttcgtactgcgccttgtcgtcggctggcttctgctcggcggctggcggcgcgtcgttggtggtgccggcaggaggttgatcggcaggtggctggtcgccaggcgccggagggttggttttatactcgcatcgcccttgtcatacctttttcaccgccggccatggcatccagggcggcgtccatcaagttgtggcgctcttcgtccggcagaacgttccact

SEQ ID NO: 74496 - DNA, 598 bp, Arabidopsis thaliana landsberg
  unsure (1)..(598): unsure at all n locations
aaatgctaaacgcccaatcgaagaaaatggttactttgtacggttttgcttttcctttattccagattgagagaagcgtttcctgagaacgtcaagaacatcttccatcttcacaccccttttagatagaagcaccattgcgtggtataaaacatcagccatctctgatggtgttcttgaaacttcctcattatcctccagtgttctgcataactcgtcagcttcttccctgaagccgaatatcccaataagcttcataagaatctatagctcaaattcaattatacagataaccgacaaagtacctgatctttgagcaaagcagagcgtcatccgtcaacaaccgtcgagtccatgatggtttaccttcttgaggaactgttgattcttctttccgcttggaaatgattgattctagcgagtacaatgctgttaatgctagcttgtttcctgaagcctgtgattcagtangaaagtagttgatattcttcagatttcaattcgtctcttgatacaggaaaaggtaaaaaccaaattcaacaaaggcaaacctcatcattgtttaattgatcaaaaaccgatgtgtagtaacaagtct

SEQ ID NO: 74497 - DNA, 180 bp, Arabidopsis thaliana landsberg
aaggtaactaaaagtaaaacgaatgaaaatataaaatataacaaaagttaaattttttgcagtggagatcatgatatgtgtgtaccatatactggctctgaagcatggactaaggcaatgggatacaaagtggttgatgaatggaggccatggatgtcaaataaccaagtcgccgggtat

SEQ ID NO: 74498 - DNA, 206 bp, Arabidopsis thaliana landsberg
ttcttttatccttagtaatatatttaattagtgaatttattttctcgtaatgagttacaaaattcatatctaattctcttaagatgaactcaattttacttttacactatgagaagttgattcaaaaggaattgaaaagttctggataatatgatgggaatgtgctgaaacagttgtactggactctaggtacagtgccatgatgt

SEQ ID NO: 74499 - DNA, 553 bp, Arabidopsis thaliana landsberg
acaggccggcgttcttggcggcggtgatgagatgcagaatcgtttctttttttatggtttaccttaatgattggggcttgagggtaatgcgaacttgagtagtgcgaagtgtttagatatcgcgaaccagaccgccttcgttccgccccttgcagagcatgaaggtcagcgacggttcgtccgggaatgtctgtgagagcccggccatgagcgccttggcagtagcctcgtcctcgaccacggcgaaaccggtcggcccccaggagctctggccatagcaacagacgccctgcccggccatccaggccagcacgcgtgcgaccgcaggactggcatatcgtccgccttgcgctggggcgaaatgatcgccggtgtgctcctgcaactcgcggatcgccgcgccgaaagtccgcagatcctgctcagccagcgccggcaacgcctgcatcagcacgcgacggcacaacatggccgcgacgtcggccgggaactccggcaggctgcggaaggcttcgatctcctgcgccccatgcacacctgacttggcctgatc

SEQ ID NO: 74500 - DNA, 451 bp, Arabidopsis thaliana landsberg
gcgacatggggctggagttgcgcctgtgcggtgtcaccgtgcgcaagcgcatgtggctggactgcgacgatcccgagctcaacgcccgccaccacagcgcgcagacctggcgtcccagcgacctcgacgagttcgccctgcacgtgcgcggcagcgacggtcggcacgcgctgctggtcgattgcagcgccagcgacgcggtggccgcgcattacccgcgctggctggccgtcggcatgcacgtggtaaccccgaacaagctggtcggcagcgggccgctggagcagtggcacgcgatccgtgccgtctgtgcctacggctcgcgcttacgttacgaaaccaccgactgcgccggcctgccggtggtgcagacgctgtgtgaactgctcgacaccggcgacgaattgcttgacatctagggcaatgttctccggcaccctggactggttgt

SEQ ID NO: 74501 - DNA, 575 bp, Arabidopsis thaliana landsberg
gaagtacacgagacgtaaacaaaataaagtagaaaagaaaagtaaaataattataaatttttctttttgagaatgatgaaagaattgaacattcttcaaaagtaaacaaagaggatgaaataaagagagaaagaaaccgattgatgggagtgaggccatttatataaacaaaatgttatttcaaatgtgactcaattttagatttatttttcttcttaaataccaccgtttattgtatttgacatttgttgtgacacttttggattttatatttttggcgaatgaaatgatttgtcatctaagtgatgataatctacagtccaatgagctaattattcaaataaacagttcaattcgtacaatacatgaccaccacaaattcaacatgcagcatctttaaacttacaacaattttccctcatgatctacgaaaaaaaaatatagttaatccatagccttaggtccatttttttttttgttggaattacattttctaaagaggagtagaacattattgcggggagggtgaaaagaataaattcggcaaacccatatattgaagacatttttttttt

SEQ ID NO: 74502 - DNA, 319 bp, Arabidopsis thaliana landsberg
aatttgcagggtgaggcgttcagtgtctggtggaaatggaactgctggaaagtgaacgacttttcatgatctatatgagaaggaaggtctgaggccttggtatgataatctttgccgtccagtcacagatcttctcccgttgactgctcgtggtgttagaggtgtaactagcaaccctgcggtaattttatcatctatctttgtgcgttcggttttgctttagctctgcgttcgctcatctgcctttactcatccactttttatacatttgcaaatcttccaaaaagccattaccactgcaaatgctttatatgatcaa

SEQ ID NO: 74503 - DNA, 191 bp, Arabidopsis thaliana landsberg
gtctcacgaattttcatcgatgcagagccgaaatagaaagtgacaacctgacttgatatatactgaagatccgaatttattctcaaggcggatagtgagacaacatttgttgcatgagtcgaaccattctcttgaattcaatgcttacacgcatacttcacaccacgatgcattctcctcatcttttccat

SEQ ID NO: 74504 - DNA, 512 bp, Arabidopsis thaliana landsberg
  unsure (1)..(512): unsure at all n locations
cggcttccgttctgcctgtaggaacctgtcggcacctgccttcttcccatcggagctgatccgcaggcggttgactgttttaaaaggggggatcaggggaaggtattttgcatcatcacccagcaggtttaaagatgtattggctgtattcacgccgcggatgaatgagatactttgttgccactgcagccatttccagttgcggggatgtatggtccagccggcttctgcgccataaatttttgcgctgccctgccggtactggtaagtgaaatttcccggaacgatctcgagcggccggccatttgcatcaaaaagtttctgcaggaaaatatagttgctgatactgctgtgaaagagttccaggctgatatccgcatcaggataatccaggaaaagaccgatatcgggctgccagttaaattccggtgcaaaattcctgttgccgatataataaatccgggccccgggatccagcccatcngagccgatctcgggaatggaaggacaac

SEQ ID NO: 74505 - DNA, 586 bp, Arabidopsis thaliana landsberg
tgaaggaaaacaaataaatttatgatttttggtcatcattactcttgttaattattattttgaatacaatttaaaaaaacaaatctctctaaaaataattaaatatctatatactaaaagattggtttttcctagagtaaaatggatattaaactcccacaaaatatcatactataacaacattgcagcctaaagattaataatttatgtgtattaagacataatgaaaaacagctagtccaatgagagaacgagagaaatggggcacagagaataattacgaccgttaccagttggcagtttcaatcgaaaaaatgtaaataacacaaataaataaataacataatgactttttataaatttggggaatatatggttggacacgtgttacataaaccatattgagttgcttcgcaccgaaagatacaactatgagcttttggggtcggcttggctgtcttttgtctggtccgagtccgagaaggccacaactcgtagggtccaatcgaatttactaacaactgctccttaactaattccgtgttccttaacttttttcattacaataattaacctgcacgcgatc

SEQ ID NO: 74506 - DNA, 634 bp, Arabidopsis thaliana landsberg
atgagtgacctcaaagcagagcagaggatgcagtaaaaccacagaacaatgttgcaaatgaaagaacagagaaagagcactaactaactaaacaaagtacaaattgggaatcagtgttaaactaaattaaaaagatccgcaactatttttctgatgtgaatctagtagatggtagtggaggaagataccaacaactagtaaaaggggaaaagaaaccctagtaagggctggaaaaagtgtaccttagacttatcgagtcttttgacggcgacgcgatctccattgggtctgtggatggcgacgtaggtgtagccgaattgaccatggccgagcaacttgccgatggtgtagtgatcgtggaagtctttggagtagccaaaatcggtacgcttgccgcaggggatggagccggttcggcgtttggtagaggccttggtatcgatgggagtaggagcagccttggatttggtctgactgcttcgtctactgctgctagcaccagtgactctaatggcggagaaacagacacccatggctctgatgaatcgagaaagttagaaaagaaagaaattaataaaagaaagagatgaaagaagaaagaagaagaagagaggaaggcagagaaaattttagc

SEQ ID NO: 74507 - DNA, 446 bp, Arabidopsis thaliana landsberg
  unsure (1)..(446): unsure at all n locations
catactnnatgcttggaacctgtttctttgaagcgttttttccatttttttcgggcgcncccganagaacgacagctaaaatgtgatagccctgttccattgaattcaatcaacttttatttctacccaaagtacagcatttgccatgaatgtaatttctctacacgtaacaagaaatatatcacgcttgaactggagttgctatatttctggaaacaaaccttactaactaatttctcaatgtttacagagaaattcttctccggaaatccacaatgaggttgctctccctacaaaataaatgcatacgtcatgggcttggaaagagagataccttacagacaatccaggagaaatttgttatgtaacacctatgaaaagaaccctcttagcataatctgatgccaaatctttggggttttgaaccatttttaacagatgtattc

SEQ ID NO: 74508 - DNA, 431 bp, Arabidopsis thaliana landsberg
agagctaaaatgaaaagaaaatcatttgaaagattaccaattccctttagtagtaatttctgtttttagcaaaaaacacaaaatgcaaaacaattgtcccatccttggtcccaaatgtgacatctgtgaatgctcaggcagtggatgcgaatctcgcttcccaggtaatatatgttcatctatacagtttttgagttcttctacaaatgaacttgagaaaactctaccaatcattctaacaaatcgatttatattttccatttgtcaaagttcatggtctaaatggtttagattcgggttgggttataatactagcctaggtccaaggaccgtgggaccattctagaaaaccgaaacccaaaaactaaatggtacccttaatggaccaatgttgtttctaccaaaccctttttataatcccaagatttacc

SEQ ID NO: 74509 - DNA, 337 bp, Arabidopsis thaliana landsberg
  unsure (1)..(337): unsure at all n locations
gnnnnnnnnnnnnnnnnnnnnnnnnnnnnnnnnnnnnnnnnnnnnnnnnnnnnnnnnnnnnnnnnnnnnnnnnnnnnnnnnnnnnnnnnnnnnnnnnnnnnnnnnnnnnnnnnnnnnnnnnnnnnnnnnnnnnnnnnnnnnnnnnnnnnnnnnnnnnnnnnnnnnnnnnnnnnnnnnnnaccaccaaagaatggaccttatggcgattcttgatcttcatctgctactgcgttggactatgacgctatgtacgaggaacccaaatgcatatcggcgattgttatgtcggattatgataagactgtgttgatgatgaagatgcgaccgagcctattac

SEQ ID NO: 74510 - DNA, 363 bp, Arabidopsis thaliana landsberg
  unsure (1)..(363): unsure at all n locations
cacaattacggccctggcaaatggaatacacaccaggccttccgcttcttccaccnngaaagnanagagacccgaacagagagcaagaacaacagcccccgacacgaagagaacaagaganggaccnccagcaagccacgacccacangaacngagacaaacaaccggaaacaacnacgaancncaccccanccaagaggagagacaaccggcgaggaagaaacagacaacgaaacaaaagccgggagaaacaccnggaaaagaccgccatacaccccagaacaggagagagcggagcacgacccagcacccaagaaccagaaggcaaccgaccaacgaggacgcgccgccaaacagaccaaa

SEQ ID NO: 74511 - DNA, 546 bp, Arabidopsis thaliana landsberg
  unsure (1)..(546): unsure at all n locations
tgcttccagaagtcacggccagcaggaacgggcccgagctcctcactctccacaattcgtccgtcagccttctatgccttgtgctcgtgtcacgaaggcaatggcggcttcgagaagctcctctccggccacctcggggttggctgtgcgcatcatgctgatgccgcggaagagggccacgatgatgcgagcagtctgctcgggtggtacctcgacttcgatgccacgctgcgcgcgttcgacctcgaggatttcggcaatggcgcagatgtcctcttgctcgagttcgttcatccgcgcccgggcggccgggttgcgcagcgcatagaggtggaactccagatagagggcgcccatgttggggacgcggtccaactcgcctccgatgagggacacaaaatccccgattcgtgcttccggcgggatgtcggagccatngatcgtggccttcagcgcggacatctctctggcgtaagagtcctcgaggagtgccaggaagaggtccttcttgttcttgaagttcgaatagacggcacccttggtgaa

SEQ ID NO: 74512 - DNA, 198 bp, Arabidopsis thaliana landsberg
  unsure (1)..(198): unsure at all n locations
gccgaaggcaaaaaagcacacggacaagcgccagaaagcaccggagaccccgccaagaacaaaagggaaggaggggcacgagacgggcagacaagcaaaacccgggccagggcgcgcgacaccacaaagaaacgngaaaaagcncccagcccgccaccaaaaggagggaccacgacgctgaagcagacagcgcagaca

SEQ ID NO: 74513 - DNA, 138 bp, Arabidopsis thaliana landsberg
  unsure (1)..(138): unsure at all n locations
aaagcagacgcggccggggccggaacaaagacacnaccggagaccccgaaannaagaggggaaccacgcaccgcgcaccacagacgaagccccgacgaggaaacagnaccacacccacgaagccaccggacaaggcaa

SEQ ID NO: 74514 - DNA, 582 bp, Arabidopsis thaliana landsberg
cttctcactgcaggagaagtcttattggagaacgtggaattgaatcctgaggcgtttgagtatttgcagcttccaattgctctcaagcaaggtgatagttagtggattgaagtttcgattctgtcagcttttttcgttttctcgggatcaaatcgtttattgtttatataggccgtgttgggaaattgagcattaaaattccatggaagaaacttcatagggatcctgtaaccattatgattgaagatgtctttatatgtgcatcacaacgcaatgatcaagaggtgattactcttgtctagtagcccttttctacatgaaagtgtttgcctctaaaaccatatatgtatattgcttggtcattgcagtggagttcagatgtcgatgagaaaagagagtttgctggtaagaaagctaaacttgcttctgcagaactggcaaaattgtccaggcgtgtcttccgtgagcaaatatacttcttgtcctacaaaatttatctttcctatacaaaatttgttgagttccttcattttttttccagacagtccaggcggaaaatcttatatgtcatatattactggc

SEQ ID NO: 74515 - DNA, 1548 bp, Arabidopsis thaliana landsberg
tctaacgggcgtcaaggtatgtatatgtatggtgtgtctctttgtaatttttaaatgactgtcaatgtgcattggtagattcatagttatgagccacctcagttaattagagaagttacctagaaggctagaattgtttcgtactactgttaataacatgcatcattttagatggcatcattaattaggctattctgtaatatatgcagcaactaagactgttaaaacgttatttttcttaacaggcacgacttttggagaggaccccatctctcagtgatctaaatgagcttgtgtatggacaggtctgaaaatatttttgaataaatagctgtaggagcttcagtagttcattcctgttacttggaacataggttgacatatcatacttttgaatttactgcaggaacatttaggcactgatgattcgtcattcatattttcgttcaaggtactcttaccatttctttatgcccctttaatttttttttagtgtcagatatccactagtcatgtaaaatctaacacgaggcaaatcaaaattatctgtcaggtagcagatgatgcgacattgtatggtgtttgcttacatgtctcggagattgttcagagaccccctggtgtattaagcactgcgtcacccttgcattcatctggaggaggcagtcgttttttggtttctgcacctcgatgctactgcttgttgaccagagtccctttttttgaactacactttgagatgttaaacaggtacataagatgcccctactcttagtagtgctttttccttgcattaaacagagaccgcaaaacatatgctgaaggtcattcacttgttgatgcagtatgattgcacaagagcgtctaaaacgaataaccgaatttgttagtgagatgtctcttgctgctgcatgctatcttccatcaatatccaggaggaatgatcaaattgatagccgtgtttcatcacctcgtagcaaccctgatgattggatggcttctgcaatacctgttgatggagtcatggcactcactgccgcagctgcaggactgataacggatagtgacattgcgaattttgcagaacctcaatctccagatagtgttgtcaccagtgatacttcagatgttagccagatcaaggaaatagaaagagacggaagaaaagttttccattgttacgatgaaaattctcctgaagtatttgagaaccacttggatacccccgaaagaacgtcccagagctatgacaacggccacacttctccagaggttacatgttctgatcctaggacccaaccgatagagcgtaatgaaagctgtgagtctgtgttcaggtaggattcatcaaaaattggccgaaccactctaatctctggaaaagtaatgtggttgtcttttttcagttaatgttatgatgcagtatcattcagatttacatttttatatatggcagttcagctagaagtgtgttgtcagatgatgttgatgaattatcgaatagcgaaaatgattttggagatgatttaatactgttataagcccccc

SEQ ID NO: 74516 - DNA, 470 bp, Arabidopsis thaliana landsberg
  unsure (1)..(470): unsure at all n locations
atacatacataacggatcttaatatgaaaatagagtttaccgtaaactttacactttctcacatgttccatttctgatatattgatgactggcgtgcggtctnnnnnnnnnnnnnnnnnnnnnnnnnnnnnnnnnnnnnnnnnnnnnnnnnnnnnnnnnnnnnnnnnnnnnnnnnnnnnnnnnnnnnnnnnnnnnnnnnnnnnnnnnnnnnnnnnnnnnnnnnnnnnnnnnnnnnnnnnnnnnnnnnnnnnnnnnnnnnnnnnnnnnnnnnnnnnnnnnnnnnnnnnnnnnnnnnnnnnnnnnnnnnnnnnnnnnnnnnnnnnnnnnnnnnnnnnnnnnnnnnnnnnnnnnnnnnnnnnnnnnnnnnnnnnnnnnnnnnnnnnnnnnnnnnnnnnnnnnnnnnnnnnnnnnnnnnnnnnnnnnnnnnnnnnnnnnnnnnnnnnnnnnnnnnnnnnnnnnnnnnnnnnnnn

SEQ ID NO: 74517 - DNA, 545 bp, Arabidopsis thaliana landsberg
tagactactatgctacatcgtttattgaaaatcacaattttttaaaaattttttatttatatgcaataattttataaaagtcgtgggacatcaatcagaatatcaaacaaaactcatccatgtttttatttggcttttaacattcctcggtcgatgttacagtaatggctggtttgaaaaaaaagtgtttttgttacagtattgagaatttgatagttacacacaacaacacaaacaccccaagaaaagagccggccaacttcctccacaatagcaacacaaagcaacaatgactaatataacattcttttaatcttctttttgacaaaaccataaaacatgattgaggtggattttaattttatttttaatttaccggtccaatctactccataattaactatcatcataaggttcagaacacttgcttaaatagccattaaaggaattatactaccattagtttgctgatcttattcttaccgagttactgacaccaagagtactgttgatttttcaggtagaaacatatggctacggtagtt

SEQ ID NO: 74518 - DNA, 358 bp, Arabidopsis thaliana landsberg
  unsure (1)..(358): unsure at all n locations
acatgctcacaaaccgtgtccgtgggcttcggaaccacacgcatttctgcctggagggactatagtcactgcaccgaatcgttactcagaagcattttcgaagaacttggccaaagccaggatatgccaaacgcgaataccctgtgtagccgcaggcataagaccannnnnnnnnnnnnnnnnnnnnnnnnnnnnnnnnnnnnnnnnnnnnnnnnnnnnnnnnnnnnnnnnnnnnnnnnnnnnnnnnnnnnnnnnnnnnnnnnnnnnnnnnnnnnnnnnnnnnnnnnnnnnnnnnnnnnnnnnnnnnnnnnnnnnnnnnnnnnnnnnnnnnnnnnnnnnnnnnnnnnnnnnnnnnnta

SEQ ID NO: 74519 - DNA, 559 bp, Arabidopsis thaliana landsberg
  unsure (1)..(559): unsure at all n locations
ctactgtcctcggcgctgtttgtactccgatcttctgtttcaaagacaagttcttcctccatgagtggatggatctttaggcctggtctatgttgaggcgcgtacataattgcgacatcaaccaggccggcagcaacctgattgaccaagnnnnnnnnnnnnnnnnnnnnnnnnnnnnnnnnnnnnnnnnnnnnnnnnnnnnnnnnnnnnnaaacccaatcaagtagcagcggctgccataagctgacttcgctgccgacggtaaggaccgccgtatgccctggtggcaccgctacctgctgccgcgtgcgttgccatagctgtacgaatgtcggggcatagcnnnnnnnnnnnnnnnnnnnnggggtcagggacgctccgcctttgttgcggacgaaaagcggtcggcccagcaattgctcaagggtgcgaatgcgcgcgctgacggtcgtctggtcgacgtttnnnnnnnnnnnnnnnnnnnnnnnnnnnnnnnnnnnnnngatttctaggaacgttcgggcgagctctatatccatgaatcatgcggcatgaaaat

SEQ ID NO: 74520 - DNA, 732 bp, Arabidopsis thaliana landsberg
cttattaataaaactaactaaccatctcttacaaattgttggaataaattatttttatttttctgttggctctataaaatgaaaatgacctttgttcttcttctttatactcctatatatgttttctccagagagaaagagaaccattgaagttgcgagacttccaattatatatatagttcatgaaagtcctgtgaccatgctctttatttattttatttcactatacgttaaataaatggaaagtagggtaataatcatattgcagcatgattcattttagtggcgtctaagaagcattcattttgagccattaaatctcaaggtagactttcccattaacacaaaagaagaaaaaattggtacgtaatcataccaacatctacaaatctttggtttcaattttgtaacaaagacctagattgttgacaaacaaaaagcaaatacctaaaaggacttttattgacttctataaagatgttttgattgaaatttcatataatttaatagtttcctcaaactatatgcaataaaattataatttgataattacatgtgaaagaaaacatgactctcaaattaatatgagtccattatcaaataaatttttgtgatatggctgtgctgcagaacaactgaatgggcctagaagtaaagttgtttttgagcaaacaaaaaacgaaaatagattttttttttttcttttggggcaacacctcaaaaaaccgaaat

SEQ ID NO: 74521 - DNA, 508 bp, Arabidopsis thaliana landsberg
  unsure (1)..(508): unsure at all n locations
taaatttaattaattatcgcccgatgcgctaggctattaataaaaatttcatttcaaggcttttacttctttccaaccccaaaaaagcaaaaaacaccccgcgatgtaaagccgaagccaacccaaaaccccaatnnnnnnnnnnnnnnnnnnnnnnnnnnnnnnnnnnnnnnnnnnnnnnnnnnnnnnnnnnnnnnnnnnnnnnnnnnnnnnnnnnnnnnnnnnnnnnnnnnnnnnnnnnnnnnnnnnnnnnnnnnnnnnnnnnnnnnnnnnnnnnnnnnnnnnnnnnnnnnnnnnnnnnnnnnnnnnnnnnnnnnnnnnnnnnnnnnnnnnnnnnnnnnnnnnnnnnnnnnnnnnnnnnnnnnnnnnnnnnnnnnnnnnnnnnnnnnnnnnnnnnnnnnnnnnnnnnnnnnnnnnnnnnnnnnnnnnnnnnnnnnnnnnnnnnnnnnnnnnnnnnnnnnnnnnnnnnnnnnnnnnnnnnnnnnnnnnnnnnnnnnnnnnnnnnnnt

SEQ ID NO: 74522 - DNA, 520 bp, Arabidopsis thaliana landsberg
  unsure (1)..(520): unsure at all n locations
agtatctcttggagattttctaagtatatttaaagaactcctacttccttccagngaaaagaancaaaggaaaaagcctgacatatgaaaagaaactatatgccacccatacaaaaatatatatatatataacctaagcgagtgcaagtgttggcataaacaaaaaagcgagtgtaatctcacttcctccaacgatcggccgggattgaaaataaaatactatactaaagtctcttttcaatatatctatataattatactagggttgaggggaaaacaaattatatgaggtcctcaaatttatttattatgaaattaacgcataaaaaacaaagttgtaactcctaaacttttttcattgttcaatatagaaaataatacaaggttactatttaccttcttaggaaaaaaaaaacgtttaaaagaatatctggatatgatgtaaaaaaacatgagagagtcctgcttgtgagcatgatcgatgttcgcacacaagtctttcttataacttttttttttt

SEQ ID NO: 74523 - DNA, 115 bp, Arabidopsis thaliana landsberg
aaatgaaactaggtaggctggtggaaagaccgactctcccacggacctggtggcccttacacatttacgtcatagcataagctataacgaactattgaatacataagagaagaaa

SEQ ID NO: 74524 - DNA, 3129 bp, Arabidopsis thaliana landsberg
  unsure (1)..(3129): unsure at all n locations
ccacaatgctgtgtacacaaatggtgttttagatagaactttgttgtaatgtaaacttcattttaagagtgtctcacttcagatgagttgttgaggaagctactggtgaacttcaacatcttttcgcaaagaattactatagcaacaaagaaagataaatgacttagcagcctttatgttcaaattcaaaacctctcacgaaaatctgaaattctgaatcaccctaaaaccaacatgtacagattcagagctgccacacctgtgagaaccaaagcatacatgagtaataatgctctaaaatatgtaataagatacatgtttactctaaaacatacataaagatatacagatggaaatgatgaagttttgtttaattaccacaagcctggatgatttcattacaatctacacacgtcctcttccccgtctatgtcctcgccctctaccccttcctcttcctcctcctcttccccttccatggccgaagttatcttctgttcttccgtaatcaaacatattcattctgatatccgctgccccggctccaggcatctcctgcccctatacagaaaattacaataacaaagctcttattgtaaccatttctgtatggatgatcccaaaacacaagtaataagccattgaaagacagataaaaagtgtgctaatcaaaataatgagcatatggaagacgggtcatagggataataaaggttgttgtgactcacataagagtcttccagatcaaactgattctgaagctgccatgcaagatcttcatcgcgggtagtgtcgcttggatggttagctgttggaagagcccccccaccagtattcctcttttcccactcatctagtgtaaatactgcagagtcttcttcttctctccccctccctctacctctacctctacccctacctcttcttccttggtattgcctatcatttgaactagaatgtttcatcttctcaagaagtatctgcgcagccgcttggttctgtaaaggaacagcttccaccactgcaacatgggagatgttatttggcgtatagggatgaacgatagatatctgatatctcatctaaggtttcaacgcaattgccagatgaaaatgccaaactaatttaacgctccttaatgttctttgctgtacaatgagcttttgagacgatgagggaaaaagatgatggcaaaccttgtttaggtcgtgtatcggaactgcttcgcttttcctgattttcaacttcgacagatattttcggatcagaatctgcaggattcctctgtatattcttatttgtgcctcttttgttcccatcaacttcactactttcacctttttctccaccggcatgttttacagagctttctgcagcaataggtacattgtttctagaagtcgtcttgttgtaatctgtcaaccaacaaacatatgctgacaagttaaatttttgatgcattggccaaacttccatcacaatactttatgtaagcccacacaaaggaagaacaattcaatagatcataaattttaccacaatgaaaatgcattcactcaagtttaagtattgaaacaatggagacccaacagcgccaatgttggacacaaagccaagggaaaacatagatcagacctctacatgagtcgtcataggttacataaacggatatattgggattttggagctcgggtcaaattactaatatgtttatgctaaagtgcatttggatggnnnnnnnnnnnnnnnnngtcaatgcatatttatgtacactatcaacatgaaatagaaaatggtagatattttatttggtagcaaagattggccaaccgtttcaaagtgaactaaatatgcaacaaattactagaagaaaactgaatgaaaatgatgagaataagaaaatcctgcttaccgcggtgatgggaacctgttcgaatcctcaactcctcaaatggaggagggccatcaccagctttgctttcctgagatcgagccaaactagcgtattttttcttcatctgccattcttcagtgagtgattgcacataaccacccaagacagtcacctcttttggagtcaaacatactagaccatcacgtatcacagccttattttctagacgtacctgccaacgagacagtacaaaatatcaacaatacaaaatgatttatgatttgcataagacaccctctgatgcatgacaaacacatatgtgcactagctttctattgatttagatcttaatccaaactattctatttgcatgagactttcagaaacatagtaaaggagaatttgaattagattgatatggaaatggaactaccttagtaccaggagtgacatcattgttaatcgttggtatatgagagtactcaagcgcggatatttcggtcttcccgtcagtcagagcgaattttagcactcgtttaccagtggaacttcccacaaattcctctgcgctacttcttgtaacatccctaacataacttatctatgctcacaaaagaaaacaaattaacactcaacagcttgaatcaactgcaacaattgagcattctgaaactagtttaaatctaagtatatcagtgagagtgactcattgaattagcgaagacctaatgccaattgttactgactttagctgattgaagcaatgtacctggagaactttggggccttgaagatgagaacacctgcgtaactcggtcgggtccgggagggatttacctccgattaacttaatatccatgttaagcagctccgcctccactgactccacgatggcgcctgttttattgccgccgccgatcaaggaagagatttcagtgaccagggatttcaagtattcgacgtctctgaagcaccagccccgactagttagggcatttatcacgacggtgtgggtgtggtcgccggcggaggagcttgatgttcccaccattgcgttgatgctcttgtcgcgctaaaccaattggggaagacgagattttaatttggagaattgattttggtatggtcaatatcgagttaaactaattactattcactaatgatactttttggcataaaatcgtttgatcaataaagaagaacattnttaacagaaaaactagaanagtaattcg

SEQ ID NO: 74525 - DNA, 5082 bp, Arabidopsis thaliana landsberg
ctaaaagtcggttttgttaggtaatgtttgttgacatttggtctatgtttgtggtagctacataaatcatattcaagggttagagagtgcacggacaacctgaaagactgtgaacaagaactccaggttagtttctaaattttcttattctagtgattgtcattgcataaagattaggcctaatcgaaacaagtgtctattcttttctcgcagttgcttgttaattcagcagctagagaaggcgtggcaggtgctgatgaaggattgggacacgggtatccgtaacacggtcacccgcatgtatgatctgttttgtctaaagtgtagctttgatatgtcttctctttgtgactttccgagtttttttctagtcgagctacactaatttggtacatatttacttgttttggcaagtatgtattcatttcattcgggatgtattattatcatacgaacatgaactaaataattatgttttcaacttgcaactgaaaccaaacaatcaccatacaaagtgtggaagtaaagtctcaaagctttgttagagaagaagtcctagatagtacttacttggctatagttaaaatattttagtagatgaagttgacaaattaactatttctttttgtaatgtttgctttgttctttactaatataaagatacttggctacagtgaaaatgttataaaaagagagaaaagaatagacagttaaattattaaggttgacacaaccatcatctccaccgtccattactcgtcagccgaatgttttttatttgattaagatgtgaacatcatccattgacctatcgttgcttgtaaagccaagttagccaaccaacactcaaatcatcattatacgtgacgatcttaagaacaaccccatttaggatactctatatgtttgtcttctcatataaatttcattatagtaatattaaggcattatccattattcatatatattcttcaaggcatgtttcgtacatcttatagcaaaccagtagcagtaaatagcataagcaaatgtgttcttcttgtcgcatggctctagtggaattccacgtttctccttcttctcttggtaagccgtattgtcaaatcgacgtggatatatatgaatattttagttgttttgacaaagatgattattgaaagagtaattaggtcacttcagtaagagaaaatgttaaagttttaggagtcataaagtttatgtgctagaataaggtaattatacttcgtataaatagtagaagaaaaaaactggtatatcaaaacttcatttagtcaaaataggcatgtgcatgatgcaagtgatttagtaggtcatgttcatgcccatatctactttactgtatttttccctaaacctcaagtaaaaaaactggtatatcaaaacttcatttagtcaaaatgtaattaacttttctttgacctaacaagtgaacttaaaaggttattatattcccaccacaaatttatattttgttagatagctagctcttcttctatatatataacctacaacattgaagttgatcctatcaactcaaaaacaccactccaaaaaaatactaagaaatggaaaaaagccaaagatgtaacaaagacacaaacaccaccattggcttttgccttcttccttctgaactcatacaaaacattctattccatctttgtatacctgagatcatccgaatgaaactactcaataagtatgttttgaccacaatctctgaccggagtttcatccgacaactcaacgatggatcacagagagacacgtggattttcgtctacacgaggcgttggcgccgtgacaacggtgtgcttcacggtttctcggaccgatccgtacgttggttcaagattccggtggctgaaatactcgccggggagattcgtcccggcgaagatttgtatttactaactgctagtggtaatttccttctctttgcttctaatactcatagtggaatcatagccgttgatttggtgggcaagatcgttacaagaatcagctcatgtccgttaggtccacgtggaacttcgtcttggagacgatccggtatgaagcttgtgcctgatccatcaaatcctagtcatttccggtttatgttcgctgagatggtcaataaccgaccggttctgtttacttattattctaacacagccacgtggcatactaaagaaacagaggatacaacaaattgggaggttaagaaaaacagtaatgtattattcttaagcttatcaaatcgacctcacgagagtactgtgatgagcgttgacgatggttcgataataaaccggtttccgaggattttgcggccgaggataaaccaagacgcgatcagacaatgcccgtcgagtgttggattcagtaggaacgatctagagagtcagttgttacatatacatggagatgagtacaaagtggttattagattagacagaattgataattcaaagatgaataaagtgatgaagagtttagaggtttgggaaataagctcaaatggtgagaaatgggagttagtgtcaagagcaccaagtgaagtgatcagcaagaagccttgtggtgtgatgatgggatgcttagagaggagattaggggtgattagagtggctctaatgacgaatcatgaaggtctatggaatataatttggttggattatgacaagcataaggataagtgggagtgggttccactacctgattgtagattcttgcaaggctcaaatatggccgggattagtttctcctctggcctcaccttctctttgtaaagtttttaatatttaaatgtcggtatcaatcatacgaccatacatttcctttttgttatatgattgtagggattaataaatgaatttcacgagggacagtgtcatgactcatgcttgatgatttaagtcaaccacggatgcaaactctccaaaaaattattgaatcacgggcttagaagaagacaagtggaatataattggaaaacaaaaaaagtgttttttttatgtattttttcaggtgtatggatcaacctcatatatacctcaaaataagatctttttagctaaaactcagaatgttctgatggttgaagcaatgtcattctaaagaaacaaacaaaacttgtgaaccagcgttgttgtgcacaaagatggagatccagtcagattgcgtccaacacacgacctcaacctttctttagtaaagagtcttttacgctggccacgtggatctgatacacattggtcttgcgtgtaagtcactaggataggtttgcactaataaagtgcacaaacttatgccaagttcacgcagcctataggtcaaattgtaaatatgatatgatgaaaacatactatttcgcctaagtctcatttttctgagtttggcatgtgtgctcgttctcaacacaagcaactctagtgggtataaaagacatctttaaaagctagcttgagaggagaggatgctctttgaacttataagatagcaaaaaggttggccaatttaagagtgtcataatttttcaaagcgtatctgctttgagctaggtatgtatgattaggttttgtggtgatttcatagcttaaaagtcgatgaaagggttacaactatagaatgccgtgacacattcaaatgctctaaatcaaacaaaaaatcaatacatacctggctcaactgtctcgacagttatgtttcaactgaatggatttagtaaactgacaaaattgtaagactacaactactaataggcacacagaacaatccattcctgctactgttctttcacatttgcattatacaacacaacaaaatcttttgtgcatcactaaaatcttgtaacacagagaacagaaattgattttgtataaatggatatgaggataatgtgaaacagggttttacaaaatttaatactatagaggccagaaaccagaaaaaggtattcacttttactagaaacctcgttaaaatgtaaaaaaggctaagatattcaaaaggttacacacctgaaaaggcaggctgcaaaacaatgacacttctctcatacaacagaagctagtttccccggaaccaactgcgtcaactcctcatcttcctctcccttctcgctatctttctcgctgaccttctcaatgggtttatccaatttgacactctgctgataaccaacacctccacagatagtaaaaagaagacaaaccaaaccaacaggagtggcatgcttatcccaaatcaaaacattgatgacaacagtcaagaacttgttaacaacaccagtgactgtaaaagcagtagcagagatagcattcctagcagcaaatccaaagtaactgataaggaaaccaaacacacacgacgcagccacagaagaaaacgcataaggctcaaacaaattccctctattctcactcaacgccgcgaaaacctcggtgaattctccagtaagaaaccagaacaccggtgctatcatcagagacagtagattattgtagagaaccaatccccaaatgttcaatttaatattagagaccatatgcttaatgtaaaccatttcagtagtaatggtaacaagataagccaaagcccatgaataagccgttagagtaaaagacgagtcagttgcaacatacccaacagctccagcgaggataacgacgagagacaaaaacgtaagtctcgaaggtaaaggctgactacgaaacacagtatcagcgatcgcgactaagagcggtgttagagatcggaagacgatgaaagtatcgacattagcgtgacggaggaggtttgtgtttgtgaagatagcgaggtagaagacgatagctgcagggagaaatttcttagcagtgtcccatgtgaatggatcgtgattgattaaccctgatttgccgagaagatagacggcgacggtgcaggttaggtattgaagagctgtgaggagacctgggtagttgaagtatgtgattgctaatttgttgattacggcaaggaggcttgagcagagtgcgtagccgattacgagactgcttgttgttaattgtttgtttgaatcgaatcgagaggacg

SEQ ID NO: 74526 - DNA, 423 bp, Arabidopsis thaliana landsberg
  unsure (1)..(423): unsure at all n locations
ctattgccgtcctggctgatgtcgctgttgaggcggacgacccaggcgccggagctgaggattttctgcgctttggtcgtgccgcccgcatgcagaccgccggcatccttgatgatcggcaacgtcgacagcacggtcgccgaggtggagnnnnnnnnnnnnnnnnnnnnnnnnnnntgcgcgaggttggacgcaccctgggcggcaaaggccgggtatgctctggttgtcgaagacatgcattgcgatcgcctgaccgtcgacgccgacagcttcgttgatcgcctttgcggagatcttggcgccgcagacgtcggacgcgccggcattcgccacggtgtcggtcactgaattgacgatgccgatatcgatcggatcggccgcaaaggcgttgaaactcacgggcgcggcgaaacctgccgc

SEQ ID NO: 74527 - DNA, 499 bp, Arabidopsis thaliana landsberg
aaatttaaaggatatgacacaatataatagtttgtgatttcaacagaccttacaaaagattgagttccaagattcttttttttactggcgatgaactatgacaaccttttcccaaatgaaaatttgaggcgacgccttatatatgcattaaaaaggtttaaaaggctatgacacaacataatcactagtacaaaccgatggactgacaatttttgtcacatgcagaaataatgtacatatatccataattgcttatatgatatagaatatggctctcaaatatcgtatcccatcaatacaccatattgattcttcaaatatgcaagttatgccgtcctgcaaaaggatttttagaaaagtatgaaagactataggataatgtaatatacgcttattattatttagttacgcgtcttggagattatatacctatatcagaaagttaaaaacaaactttattagagaattaccttttcaaaaaattgatcaaagaacccta

SEQ ID NO: 74528 - DNA, 589 bp, Arabidopsis thaliana landsberg
cgggctgaggaaaacaatgccagcttggcgggaagatattttacgatataccgggggggaacccactaacaatattatcatctttttggaaatgcacttgtaacagagatggaaactgtagaagtaagctcgccaatgctgggataatctgatcgaaccatctctttgattctttctcatcaatcaactgcgagtaccaaaaacttagttccactactcaattcgatttgaagatacactcaaatccaaaagcaatcaccataaagttaaaaagagataattacttcgtcaaagagaaatgcgtacccattagaagcagatggctcgagagtagagaaagataaggatcgtctcatatcgaaaatagcttgccgtagaacctctcctgagtcaacttggctgtgagatggtccttcagacattgcctttaacgcctccaccacacgcggcggccaatacagcgacgacgaacgaattacaagtggaaggtacggaagaattgagttaagatcttcgcgattctccatttttcgatttttctaatctcacagctgttctcaattgcttttgaaacaagtttacgaatcgc

SEQ ID NO: 74529 - DNA, 347 bp, Arabidopsis thaliana landsberg
  unsure (1)..(347): unsure at all n locations
gaccgagtttttttgaagatctcaaattcaaaggtatatttatttattatttatcttcttccatggaaacggaatgacgtttacgcgaatgatcaaaatctttatttcttcttttgttttttcagagacgagccttcttaagtggccaaggattctgaagatagttcatcagctgcgaacgattcctctgggttcgagaaatcttgggttctttaatctcaaatccnnnnnnnnnnnnnnnnnnnnnnnnnnnnnnnnnnnnnnnnnnnnnnnnnnnnnnnnnnnnnnnnnnnnnnnnnngatcaatttcttgatcttttaccccctaatttgtcacttttttttta

SEQ ID NO: 74530 - DNA, 458 bp, Arabidopsis thaliana landsberg
  unsure (1)..(458): unsure at all n locations
ccattatcacatcggtaggaacacttacgggattgaatgtgaacggaacagcaagtgctacatccttaagcgcaactactttgaatgccacaacagtaaacgcgaccacgctgaacggaacgataggcaccggggcacaacccaatatcaccacacttgccggacttaccgcaataacggtaacaggccaggtgaaagcaggtacagtttcggctaccacttttgtgggcgtaacctccctggtgaatattaaaatgtttaccagttctggcacctataccgttcccacagatgtgtatgccatagaggtaaccgtagtangcggtggcggcggtggtggctggtgcggcaagtgatcaatacgaatgggcaatcttctgttggcgccggaggaggcgccggaggtatggtgattaattcatttgtaaccagcccgggaacacaatatgctatacagt

SEQ ID NO: 74531 - DNA, 464 bp, Arabidopsis thaliana landsberg
  unsure (1)..(464): unsure at all n locations
nnnnnnnnnnnnnnnnnnnnnnnnnnnnnnnnnnnnnnnnnnnnnnnnnnnnnnnnnnnnnnnnnnnnnnnnnnnnnnnnnnnnnnnnnnnnnnnnnnnnnnnnnnnnnnnnnncactataaatccaatagaaaaaacagtttctaataattatctccattgaatctcacattggcaaaaaatgtgtaactgtacacttacgcattgtcttcaacttggaccattatgctgtgaatccctgacatctgtatatagtgtgctattttaaatcgattttaactgctgattagcccgtttttctatagaataaacatagagtcgcctatccatactggannnnnnnnnnnnnnnnnnnnnnnnnnnnnnnnnnnnaggaatctcacgtggcttgaacaaattgacttaactctctcagttttattgcttggccatgaggatttagctgacctaattgggccctttct

SEQ ID NO: 74532 - DNA, 191 bp, Arabidopsis thaliana landsberg
agtcttctttcgccatatcgtagtttccttgacttgaaaatgggttcaactctccgagaattattttttttcattaaagacctgctcatatggatacttttatgatcgcttccaggtcttcccactacacaccattaagcaaccactatttgaagctatcaatctcaattttcttgttctgatggggtaat

SEQ ID NO: 74533 - DNA, 585 bp, Arabidopsis thaliana landsberg
gatcgcgatccagaagccgaacaggtggtgcaaattaaacgacaccgcccgtccacgccgccagcgcaaaccgcgcaggaatccgacatttcgcggccaccataaataaatgccgctgagagacagcagcagcattccaactccagcccaaccgacaatggaacggccgctatattgcgggatcgtcagattttcatggaaacggtgcaggaagccgacgagcgaatttcggaattccgccttgtcgagcacctggccggtcgccgggtcgatgtagaccgtaagcaggcgcggccgcccgcccgtgcgctcgccacggcgttcctcgcgcgctgtcaccgtggcgggccaaccggcatcttcgggcatccgcaccgcgatcggctgaaacccttgaccgagagcggccgtcgcgctcgcaagcaacaccgaaggcggctgcgcgggtccggccgttacggcatagcggccagggttgaccaacgcatcgacgtgatcgctccacaccagcggcgcacccgacagcgaaatcggcaccagcagcaccgcatgaccgatgccgagccacatatgaatgttgagcca

SEQ ID NO: 74534 - DNA, 489 bp, Arabidopsis thaliana landsberg
caaaaggatatgaaacggcctcttgcggttgtgcaatggccgataaactttgagcgcccttatggcgatgattatgccttccactattttcagctgtttgctgactattgcaatttggccatcgggaacgcaaagcaggtaaaaatccgattccgcataaacatcattgaggtctgatgaaaacgggcatatgagcgcaagggccagtatttttccggtttgtttattgcgtgaaatgacctggacaattttgtggtgcttcgaaaataatcgccccatggcaaatgccatattgccgctgccaatgatcgcaatattgaactcagtttttggcacgtttgatttgaatgatgcggtaaatgaccgccataagtgtacccaggcacatgatgatgcatccccaccacaaaatgatgatataagggaagatcttcgcgtgcatgacaatgaattccggggttacaaaatcaatttcgaaccgcgcctgtt

SEQ ID NO: 74535 - DNA, 593 bp, Arabidopsis thaliana landsberg
  unsure (1)..(593): unsure at all n locations
tgcggcgaattgcctgcgctcgcggtctgccgccgacaccggaacggccagccttcggcctttgaccgatgttnnnnnnnnnnnnnnnnnnnnnnngacgcaaaagaagattcacggggcgattcgcttcatcggtacggcgcagatcgccgatactcgccggttgctggaaaccctgagcgaacgctttgtcgaacgtggcgggcgatacctgcgtgagcgcgtcgaaaaaatgatcatccgcaagggcgacgcctgggtggtgttgagcgggggtgagcaactgaccgccgacaaggtggtcattgcggccggtatcggctccaaacccctgctggaaagcgtcggtgaggtggtgccgatgatcgccgagcgcggttatcatatccagacggaggatcacgggtggccgaagggcctgccgccggtggtcttcgaagaccggtcgatgatcgtcacggggtttgaaagcgggctgcgcgccgccagcttcgtggaattcaaccgtcaggatgccgcacccgatccgcgcacgtgggcgcgtctgcgcaagcatgtcgctgatctggccctgccgttcaaaggcgagggcg

SEQ ID NO: 74536 - DNA, 414 bp, Arabidopsis thaliana landsberg
ccggccgtgtggtgtaggccttgcccgattcagcatcatagtcgccggcccggcgcttgatcttgcttactcgtgccagcgggcgttcgatagggtgcgaatgggcggcgtcgatggccaggtagaagcgcacccagctttcaccgttgcgcttgaaacgcttgatgtcgcgggcactgagcgaggcggtcttggcgccggtgtcgagcttggcggccacttccaggtccaggtcgcccaggcgtgcatattcgttgagaccgtacacggtcttgcctgcggcctggccaagggccggcagcagggtgaggcagagcagcaataatgcgggtgttagtctcatattcctggcgcggtgcagtgcaaggttcggggctgttttaaagccatgttcaaggccgtgttcaaggcaag

SEQ ID NO: 74537 - DNA, 345 bp, Arabidopsis thaliana landsberg
tctcttatgaataaagtgaataatttcctctcgggatcagagacagggggtggggttatttatgaacccaccacacaccccaacctatttaaccttgttctttcttgatccctctatttagattaatcactccttggactaatgctcataaatggcaaagaacatttgctctgtgtttgcattggcaagctacattgatttggattataaagttgaaggaagaacatacaatgtgaagggtgagaaaaggctcaagcacaattacttagctgatcagatgaagctgtactatgcaagccatgtgacagtaaggttcatgaagctaatgaacttttccaaagacat

SEQ ID NO: 74538 - DNA, 608 bp, Arabidopsis thaliana landsberg
cttgacatgtttggtcgccacttgcgtttacagctcccaatgacaagtcatttttgtcacccaatgccactttatttggcgttccgacgacagacaccacgcctttgaagtcattaccgagctgatccacacaaactgacttggcttgcaacacagtttgctccgccacagcgatggcaccacccgacttttgggaaatggcgccttcagcacgaacatttaaaaccccttgaacactgccagaattcagctgaagatcgcttttgttgaacagcgtggcattgccatccgttgtgctgacagagacagcacctgagaattcattgccaagctgttgcaagtcaattgatttggcctgcaaatcggctgatccacttgcaaccagattggtttgatccacttgagtcaaatcgcccttggcatgcagaagtaaaccgctcgcactgtgaacatcacccacattcaaattgcgcgatgtcagaaaggacggatctgaccctcgctggaggtggctgatacacgtccagagaaatgattgtcagcctgatcgagcgacaccgatttcccaggcaaatcggcgatgccattgacagacatggcagccccat

SEQ ID NO: 74539 - DNA, 598 bp, Arabidopsis thaliana landsberg
  unsure (1)..(598): unsure at all n locations
gcttatctaggtgcgtgtattgggccctgccaattctctcccaaggagaatagaangtatatagaaaggaaaanngaagatgatngattaccatgcgctacgagctctacaatgttggcctagatgtaactagtggacatagactgaagagatacaataaaagaacagataaataagtattacatgtttatgatcgctcttgattcaccaactctttcatcttataacaaatattcatcaattgtcccctagtatctacaccacacctttcttttatcttacaggaagagaaaattgctgaaagattagctagcaagcatttgctataatccattatgcattacctaacttacctagtactccttacaacaatgttctacaccgcgatggcggacgattgctcggtagtgcaaaatgttgagttgctggcggaacaacaggtatggctatgtccaaattacatattaaacatagtgaacctctgagtaatgctgactggagatggcgtatataggcttatgtgagccattcatcattgaataaagtaggattaccgagatcaggactaacttaatatgcgcgaatagaacgtgagtgt

SEQ ID NO: 74540 - DNA, 290 bp, Arabidopsis thaliana landsberg
gtgggtagaggatatgagaaaagcttgacttgaggccaagggcatgcgcgggtataagggtttcgaccgtttcctcatggtaaaagcctgactggggaactcttgttaggagatgcataaccacagtctcatacggtctttaggtacaccctcataggctggcgaagcaaaaagaacctaggttagtggtaaagaggcaaacttgactggaactcagtgtgcctgattgtgttttagagcctgaaccgtaacaggaacatgatagcctacgtgtagctccctgatttgaa

SEQ ID NO: 74541 - DNA, 476 bp, Arabidopsis thaliana landsberg
gcaatggaacgagctgtatggtgaaggattttcgattatagaagacgtcgttgagctactggtggggtaagtttgacaaacgagagaggcgcggccgatttgttcgtttttgatctctctcgtgtccggtttttttttttgaatctcattttggtcgtttaatttataaatttgcgtacagagagaaagggtgttgttcgctttgctgtctaattcattttctttctcaacataagatgaaaaaaacattcgctgtataatctaatacatgcttatgtctatagaggctcggctcttttaacgataacgtcataatgctaaatcttcacggtgtgtgctttgagagtctttagaaaactaagtagtgcattattataaactgatgatctgatatgtttttacgtttcgtaaccaaaaccatagtattgtaactaaagatacgaaaacgaaccgaaataatgctatttaatttactt

SEQ ID NO: 74542 - DNA, 526 bp, Arabidopsis thaliana landsberg
gaaaaaataggaatccatagtaaattgaaagaaccgcgaactggttagcggttaaagaaatgtatccactaccccgcatataagggccgctataacaaaaatatccacatggcaagactgaaacgctgattatcaaacaatattacatgctaatggtaagatttcagcccaattaataatatagtcatggaggaaaaaaaatggagttgaataaattggcaatgatcataatggatatgggtggatcaaaaacgcaataatatatcgtgcgacaaggctacagaaataaagatatcatgcattattccacaacgaccactaaaaacgagaataatacagaactagtaaacgagtatataaggttcgggaatgtcttttaatatataatctagctagtataaatcacataatcctatttcatatgcgagatatgaacaacataatcgtttacttaattgaatcaattattaatacaaattagtttatatgggttagatctacagaaccttaatatttaaactaacaa

SEQ ID NO: 74543 - DNA, 619 bp, Arabidopsis thaliana landsberg
tgagatacttgagttcttttttaaatatcgtcgatttaaagtgaacgtacatagaggatccatggtcaatttcgcaccaccgatcaaggatcatcaagtttatgctttcataaaacgtggccagagttgagtttagcgataaggttcctagatgataagcgcaagaccaattcatcaaaatcgattcacatctcatgtcatgtcctcggccacataggtaagagaatcgatgcatctatgtaatggacttgacaaaagaaaaaagaaaaaaaaaacaaaatttggcaaattattctaaagaaccaaaattacttcgtaactagtgaaagtccttttaagaattcataacttagaaatttgtaagttatatgcgagcaacggaaacattcggatatttttctagtaaaattaaataattagagttttttttaaagaattaacggctagaggagaaattaaattactatgggtatttttttcagcaaaaaaatagttggatttttttttggtgagaaatttcccttttaacaagttccaaaataaaaactgattatagtagaaaaaaagatgggaaattgataatactactttgattttttttatgccttaaatagtatat

SEQ ID NO: 74544 - DNA, 543 bp, Arabidopsis thaliana landsberg
acttgtgaggtgggtttaatacttggtttaacattgtcgctgatgatcaggcatatgcttatgatggtcgacgatgaggagttttatgaaagagagaagccattatcgctacaagatatcaggttgctcatcattatccttaagcaggttagtgttttgattgatctcattttgcagtgtgtaactttgacgtcaagagttttaggtgttatgattaaagacaacataaaatatcaatggcgcgattagctgagccttagattgcaaattgtaacaatcatataataagctagattgactttgcgttttcatatggttgctttgttgcattggtttgactcttggtgaatcttcgctctttcttgtccaggctttatggcagttactgtgggtgaatccacttacgcaacctaacactgggaaatctgtcttcaatgacctcttgaagaagaaccctatttgactgattcataacagggatgggattgtagtctctgagttactttcacaggtatatgctgcaaagaaattatacttcttgac

SEQ ID NO: 74545 - DNA, 555 bp, Arabidopsis thaliana landsberg
  unsure (1)..(555): unsure at all n locations
tctgataaatcaaacattgtaatgatacctttatttaataaaacaacaacattgtaatgatatgagtaagggagttcgtccaacacgcaaccggttcatgccaaacaagcaagctgttcgaaccagggacgtacaatgagtgacacatgtcaacatataagtgatgatagttaaggaaagaaacatcagaacaaatgattaacatgaagaagagactgatgtgtctctgcagccaggcggcgaagcgagtgaaatacacttcttcagttctttttttctatctttcaatacgcaaaaattaaaacagagagcaatctcagtagctaacgtggcgatcggagagtcgagtgcacgtgcaaagtgttttgaagacaaagtcacgccaaaggcagcaccagagagaaataggcgtgaacgacgctgtcctatttttttaagttcaaactcacgngaaatcacacanaatanaacataaattaatgattttataaagttatgctgattaaaaaatactaaaaacttatgtaaatattttgaaactcataagaaaaaaaa

SEQ ID NO: 74546 - DNA, 789 bp, Arabidopsis thaliana landsberg
attaatgtatagttattgctaaatttggagtttttaaaattgacgtcatatttgtttttcaattttgttaatttgatttatgcgttaacattcaaagtagtggatctgattgttcatagagtagaagactataaaaatcttaccagtttaacaaagagttacttcgctgccttaactgatcgcatgttgcttttgttatttcattttttgagtcctttgaaaatattggaagtgtaagcagtaaaagttaaataacattttaagtatcaatttcagttattgttagtgtgtatatcgtattgttttcttatgcaggaggtttacataccactacccaaagaattagaccatatgtctgtttaagtttaccaacttcttagatgttttggtatgataaatggtcttcatttttgggaagcacaagatctcaaggggaaataacgaggagtagaaagttacattaaaatgatatggatttctaatttatatctcactcattgagataaaagggtttcattgtacgcccgaaaaacctaagttgaagttcaagcttattattattgttgatcagattttgtacaaaagttacgttaaagccagcatggatcattgtataatggatctatgatttatcttgttgtagatttgaacaaatttatggcgatttgatttatttttttcaattacctttttaatttctggttttttttttatataaatattgattagttagtttttaaggcaaaaatattagtaacaaaaattttccttaccattctgatctggaat

SEQ ID NO: 74547 - DNA, 317 bp, Arabidopsis thaliana landsberg
  unsure (1)..(317): unsure at all n locations
gcgccanggatgaagggggatgctaaagctcaacacaagnagtagttttgaagaggtgagagaccaaaagggggggttgtacagcgatagttactctcaaccccccgaggagacgctgggtattacgagacaaacaactccgtcgaaccggaatattttctgggttaaccggaatgtcaaaatgagaagatagtgtatgggaacttcaatattgccctatgtcgtaaaatacaatgggaggagctctattatgagagagattgctcgattataaaataaatgaaaaccgaagcgaacggggatctaaggattactgc

SEQ ID NO: 74548 - DNA, 493 bp, Arabidopsis thaliana landsberg
caagtcagtttgacgggacgtcacgctcaacggcgacgttgagtacgatgctgatatctcgatgggggggaggggccaggacgacaattacgcaaacggcgtaacggttgagacctcagttaccggtactcggttcgaggtagagagtgaatcagatgatctcactcttgatggcggtactgacaccagcgagactcatactcttgctacggtagttccagttatctctgacacaagctttgatgtggaccgaaatgaggacggcgatgccggaaccatttcgtacaccttcactgttgaagctgacggagatgaggatgttgtattcgatatcgatgatatcgactacaccgttactggtactgacaccagcatcgcagatgcagcactcagcatgctctcaggagacgctgaggaggactcaggtgagttcaccatcgctgatggcgatgaggcgaccttcgttttcgacgttacctttaccactgaaagt

SEQ ID NO: 74549 - DNA, 570 bp, Arabidopsis thaliana landsberg
  unsure (1)..(570): unsure at all n locations
ctttaattataatgtcacataacaaataactttactacaaaaagaaaattctatgtggttagtgaatttcctgtttccaagaagattatggagacggattatgagttcttcttcatcagatgagatgttaccgcgctttatccccggtcttaggtagttcttccaccgaagtctacagcttttgccacacctcttgagaccttttatgtgtgccaagacaattattgtacgtagaagatataaagacggatcggtagatagagagattagtaccagcttggttagggagagtgctccatttgccttcgccgtgagtggtgatgtaatctctaaggatcttgtcttcatgatcagtccaagctcctctgtttaactcttctttcctcacactagtagttgctctttttcccattctcacttttctctctctttgggntgggtggttggtacaattgtctttagtgttgtgttgagaatgattctgttttggtgttagctgagtatcttatggggagttggtgatatgtccgtacatcagcgcttttaaaccttgtatacacacttgaattt

SEQ ID NO: 74550 - DNA, 553 bp, Arabidopsis thaliana landsberg
cacatagctgctgagagcttaaggaattatgtaatgtaatttttgccctgtccactgggtcgtcagtgatggggttctgctaactccgccacaaggtaattactattctcattttggtgggtttctttcccatgcctttccccactcactcaattaatatttatgtgtctctgcatgctttcaaatctcacaaaacgatacaataggaattaccttcctgcaacttgttttagttactcattatctgtttttaagaaactcaacgctgttgcatcttcctgtggccattcatctaccttttgatggatatttggcgcttgcaaatttcttactttaaaaacatgtatttctcttcatattgctatatattactgcaataatttctctacggtacactatgctcttctttcaacattaaaataattttgatcttatataaaagttacaaggataatagttcctatataatgttcactcagcatcaatacctctgtacgataatcaagataaaataacactgatagtgatatcactaatctacatacccctatac

SEQ ID NO: 74551 - DNA, 556 bp, Arabidopsis thaliana landsberg
  unsure (1)..(556): unsure at all n locations
tttctaaatctctttttatttttttgttggtttccagttttgataatgatctctactanggnaaggtaggcgattacttgaggaggtacttcaatatcttccgtctgcgtctctctctcttcgtcttcttcattacgcgtcttcttctttctcctcttcttctacattagcccctctctctttaattagctgcagctcacctttcactatctcttctttaatattgattgtgaacttgtgtgtgtgcgtacatttggagtttcagagaaaaacagttggattcactccaatacctaacctttcacccatcttcctcattacttcttcagaagaaactgagaaatcttctctgcaaagcttgtaattgcatgttttgatgggagttgtaacgactggatctctctcgaccaacctgttgggttgacttgacccggttgcagacctcggaagctagagattgcgtgtgtgtgtctgaatttacatactgtctactgttttgtcggtactatgaatactggtngacggctcatcgctgtttctcacaataggaatgagt

SEQ ID NO: 74552 - DNA, 256 bp, Arabidopsis thaliana landsberg
  unsure (1)..(256): unsure at all n locations
nnnnnnnnnnnnnnnnnnnnnnnnnnnnnnnnnnnnnnnnnnnnnnnnnnnnnnnnnnnnnnnnnnnnnnnnnnnnnnnnnnnnnnnnnnnnnnnnnnnnnnnnnnnnnnnnnnaacacaggggttcctaccggatctcagacccacgttatgcatggttctccacaccttctaccactattgcatttcgatccaaacctcatcctgccctctcctctctttcatatctcattccacccttcgtatatccccccaa

SEQ ID NO: 74553 - DNA, 357 bp, Arabidopsis thaliana landsberg
attaaagttatatatctaaaaaagaaaaaaatccaatagaatcttggcaaaaaaatacctttgaaagaaatcattttgaatacaaggaaggtatgtatttatcttgtatattcaaccttgtcaagattcactacctaatgcatagatgatagaattcgttgacaaaattatcaatcttttagttaacccaaatcagaaagaaaaaaaaatctagataaagatgtaggaaaggatgattttcttgcaaacaaatctcacgaagagatagattactcaacctaatcataaaccttacataatacaatatataatgttagttgcctaaaacatgtaatttcgttgtctgtgatgatcctc

SEQ ID NO: 74554 - DNA, 301 bp, Arabidopsis thaliana landsberg
aggatatcaagcgggcgcggttaaaatcagttgggggtaccaccacttcatctctcccccaagttttgtccatgatattccgatgctctactatgcgcttaacaacagcgttaaaccactcggagaaatgaacagtttcaagctgaacatcgacataccaattaaccgttaacttaaacttttgaaaacactacttcgcttttaaaacctataaacctataaacgaaacccaacatagctgctaatttcgatgaatcataatactccctcaccatgaaatcaccacattccaagttcaaac

SEQ ID NO: 74555 - DNA, 741 bp, Arabidopsis thaliana landsberg
gtcatttgatctgcgttcacagagacgaaaatggtaattaaaaactacgatggtcataaaaaaaatggaaacaaagaaggcggagattttaatgaattcatagatacacattgaagaaacaaactagttgaacttgtttttccacatcacaacctaactagtgcagtgccaaatagaggaaatttcaaacgttctcctcttcaacgatggctgcatcaaatattttctaaaggatcaatctaagctttaacaccaaacatctcactggatgcataaaatgatccattatcagccaaaaatacaaaacaagaagcggaaaataagagttaacgataagaaaaaccatcagcatttcaacaagaacaatagaattccactctcataatccaatctcactctcaagtcaacgagagaatctcttaaggatcttaattgaatatagcaaaccaacatagatcccatgagtatcctcgtgtactaaataccacaattctacataaacttactcccgaatagaacagttcataagtgcgatctacccagaaactcagtttcaacacgaaagcaatcctaacacagaacccaccataacttaaaaccgatacgaaagcaaacaccatctagaaacacacctaagctcgaaccaatacatagctcaaagtgccccaaacatgaatcacaatttgagaggaccacaaaaaagagggggaaaagttcaaaaaaggggtttttggtaaaaat

SEQ ID NO: 74556 - DNA, 788 bp, Arabidopsis thaliana landsberg
tgtaacattaatacagattttattgtcaatttgttagggtctttagggattgttggtgagaagtctgattttagggttcaacaagggctgaacctgtctatgttgactgttcttgttgttgttgtcgtccctctccatgtttgtgtgtctgtctgtttctgtttgttgtgatgtttggttttgtagcaaagataatctgatatttctcttttatttttgaacaacactgaatctttcttctaaactctaaagacaacaacagatcattaaaaaatgatagaagaagaattcaatgaatttaatgttaataaatcataaaatttctacatgagtttcaataataaacataaattacaaattgttatttgcagattaaaaaaaaaaagaaaagagatgatccagtttggagcttttgagttgatgggacattttgacccacaatgagatttggatctatacagatgcatccattcaagatcggtccaaatctttgaaccgggtcgacccataagcccgaatatgttttttgtttttttctgttatgaactttcaagttgaagagaggagttttagcactttcaggagattaaggaaggattactactcggttggccattgttgctgtctctcttaagctggactttcaatttcttaccgcctaaatggcgaccattcatcatgtcaatagcgttctgcgccgcggcttgtgagtcatagctaacaaaacctgcaaccaacagcaacagcaaaagaatgctttctttttaccttcacaatgaaccagtttt

SEQ ID NO: 74557 - DNA, 500 bp, Arabidopsis thaliana landsberg
caaattcttactttaaatgaagaaagaaaacaaacaatgtattgatttgactcgcaacaatgcaatggtaatgggagcatgtagaaaagagagagaagagtacttagaatatgaattaaaccctaaacgctagatattaataaaattaaaaaaaaaaaaaaaaaaattgtagtacgtacatcatcttccgtcttcatgcttggctccgatcttgacccatcttgatcccttcttgcaaatcccaatgttggattcatcattagaaaaaacagtattgtagctaagtcctccactttcttgctgaagaagcacacacacacaaaatacaaagatatgaataacacataatgtttattcaagaaacataagacttgtaagaaacataagcctcatcacctgatcaagaaaggaactacgttggtacttattagaggaaaacggcgaatgaaatatgggcgatggcacaacttcatgcccattcttctatttaaaagaagcat

SEQ ID NO: 74558 - DNA, 484 bp, Arabidopsis thaliana landsberg
  unsure (1)..(484): unsure at all n locations
ttgaagaacgagaggagtagtaaatctacctgcagttgtttggttgaggattttttngagataantatgtngnangataagaatcttggttcatgtaccatttaggagagagcatgaaggagtttaatgcgttgcgtgacgttttgaagaaaggagtggagaagaagaaagcttcagatgctcaaggtgggaagagacgagccagaggaagaggacgtggaagaggaagaggaggaggaggagggcaaaatgggaaaaaagaagttgtggatttgagaagtttattgatacattgtgctcaagctgttgcagctgatgatcgtaggtgtgcaggtcagttgttaaaacagataagattgcattctacgccgtttggtgatgggaatcagaggttggctcattgttttgctaatggtctcgaggcgaggttagccggtactggaagccagatttacaaagggattgtgagtaaaccgagatccgc

SEQ ID NO: 74559 - DNA, 627 bp, Arabidopsis thaliana landsberg
ggccttattatatatgcatactttcaggcaaacaaaaattcattcgaatattcctacaaatttatgcagtcatttaataaaaatacataaacaaaagcagctagtttatagacaaaatcttcaaataatcaggaaggacgacgatatagattggtgattaatatattagtagtgatcgaatcattgtcacatttatgctattataatactatagttaaatataagtacattaggttaatgtctcgttccttgcggatcaagaatctgtcgggtttaacgacaaatgaaaactccgcaaagtgcgaaattatgtgaatgaataagtatattagttgataagaaaaaggagaataaaatttcatcactttatcaaataaataaataaaagaatacaggattaaaataactataaaaaaaaattagaagatagctagtgatgctatattagggtagtaacttgtcaaacatctagaggctttgcttgcgcatgaatttgccacaaagagcagcagcctacgtgttactagttactacataagtgaccatatcttatttggtgataatgtttgagccttttcatgaattaaatatgtttcatggatatggatctgttatcactatggataa

SEQ ID NO: 74560 - DNA, 135 bp, Arabidopsis thaliana landsberg
ccttgcacggccagtatctgctggattcgcactctacccgatccgatggagacaaccgcccggggggtgctgcgcacgcgggcctggcccgagccgatgcacacccttggggcgacctcggtgacaccgacgctg

SEQ ID NO: 74561 - DNA, 389 bp, Arabidopsis thaliana landsberg
  unsure (1)..(389): unsure at all n locations
cgcatgtagctggcatttatgaaatcgctgtgttccacagggacattgctgcgggtggcataatagttgctggcgatcagtcccagtttgccaaaggtggaaccgatttgcgcatcggctcttttgtaaccggtattgttcagctgtgcatttacaaaaccactggtgaatgcgggggcagacagcgtaattgcattcaccgcaccgccgatggcttcgcctccgtataacgcggaagaaggccccttgatgatctccaggcttttgatggaggtcatattcatttcgaggagtgcattgtggttatatacgccggtggtgcggaggggcaggnnnnnnnnnnnnnnnnnnnnnnnnnnnnnngtggtcatggattgacgtatactcat

SEQ ID NO: 74562 - DNA, 492 bp, Arabidopsis thaliana landsberg
cctccgtgtcaacagtggaattcagtcgagacatgaaatagtcccgcttataggctggctgtctttcttcattcactccttgaaaacgaggaagtccgacgaaataactccggcgcaaattgtcctgctcgggaatattatcgcgcgatttcttccaaccacgcgaaccaaggaaggtgacaaacgcggatcgtaaagccaccgcccatttggagcccagatactgaaacataagactgtcgagtaggtcttcatccatgaacactcggtattttccattcaactgacgacgcatctccacaggtacgccctctgcaggccagctccaactatccagggatgcgatgcgcatattcaaaacgtcagcgacctcctgcgcgacagcactgttccgcatgagctccttaaggatgactgtcttctccttcgacagaagatcacttttcaacagcgactgggagacccaggaacgttcgtctagagtaatccacg

SEQ ID NO: 74563 - DNA, 522 bp, Arabidopsis thaliana landsberg
  unsure (1)..(522): unsure at all n locations
ccacgaattccgttccatgatgcgtgcgctgatcaccttcatgatggaagacccgcgcacgatttccggcgcggtggatacattgtgggttgccaaggcgatcgagcgcattggcgaccatgcaaagaacatcgccgaatatgtgatctatattgtcgaaggcaaggacatccgccataccgactatgccgtttcccgcctggatgaacgtactgccagctaaccgaatatgcccgctgaaaaaccaacgatcctgattgtcgannnnnnnnnnnnnnnnnnnnnnnnnnnnncgttcacgctgaaaggcgccggctggaacgtcgcttccgcgcaaaacgcagccgaagcctgggaattcctgcagcagcgcctgccgcaattgatcctgctggactggatgctgccggatcagagcggnctgcgcctgctgtcgcgcatccgcagcgatcgtcagttcaacgaactgccgatcatcatgctgacggccaagagcatggaagaagacangatcgccggcct

SEQ ID NO: 74564 - DNA, 489 bp, Arabidopsis thaliana landsberg
  unsure (1)..(489): unsure at all n locations
tctttacgtcagtattgcaagtttggaatgttgctctgtcgcgtcccacgcccccataaagggtagcgtacccgcttcagcccttacaactgttcacccacccaatatcatctcgaaacaggtcctccagttctcaggaatccaaaatcattcgccatgccagacccaaacaatccgactgaggcgcccctctccacaaaatctcacgtcctagagaccgctgccgctgcaacccagaacttcacaccagtcaaccagannnnnnnnnnnnnnnnnnncttccacgtctacgctgacgaccccacacgctgtgtcgatgcgaaccattactgtacgcatttgacagagggtacgtctcccggcctcatctaacttttgatcagcttttgaacaaggctgttgtgctgcgcagatatccgccaatgcctcatctacgacagcccgaacaagggcgccccgctaatcggggtcgaatacatggtcttcccc

SEQ ID NO: 74565 - DNA, 285 bp, Arabidopsis thaliana landsberg
ctggaaaacgcccatgtctctgattctgtgtaagcatttttttcacgtcgattgtgtaacaacaagaggggggggtcctttaagcatcgatggcgatgtcaaaactgtttgcaactctcacaataagtatgtgtctctcaagatatgcgtcccaaattgtcacatctcttgaagccttcaccatatctgatcgcccatatctattcctcaatggaagattgaccacaacaaacctgtaacgggctgaaactaccacagatctccgaactctgtttcgtacatcca

SEQ ID NO: 74566 - DNA, 524 bp, Arabidopsis thaliana landsberg
  unsure (1)..(524): unsure at all n locations
aaaggatggaatgcagggaacctggtcaaattggtagcttccctcattcagtgctgcggcggcgtatatgcattttttgctacagccgtaggaaaaaacgcaacaggattgagtgaagcaattgaaacgatcaaacaaactatttcctagatagcttaccttttacaaagccgagcgctttttggaaataagagatcgtctcggtttccagcttgaaaacaaaaataggtaatacaaatactcccattacaagcatggattcaaagcacatttggatccatttgttgtttataagtccctgcgtgaaatggcctgctacaagtgttaccagtgccaaccagatcacgatgaattgattttttgtaaatgggtggatccgataaattctccaaacgaagattaatctccccagattgaatgcaataagtgcaatacttnnnnnnnnnnnnnnnnnnnnngcaccccaaatgggaatgaacaccaaattcagcccgtaaaccagtccgataaggataattcgaaaa

SEQ ID NO: 74567 - DNA, 390 bp, Arabidopsis thaliana landsberg
gggggggataatactagaccctgactatcgcctgtatcataatatggatgaccttgccattactaacacgatcggtgttacagcttcagatggagcccctctcgacatcgccattcagggagagaagatcgcgctcctggcccgatctggctccctggcaaagcacggcaccagagtgagagatgctgggggtggctttattatggtaagttggagcctccaaccgtgacagggccacagtgactgaccagcagccagtccggaggtattgactgccatgtttatctccaggaacctagcctttttggcaagggtacatcgtccgatgactacgagagtggctatcgatcggacatcgcgcgcggcaataccacgagcatcacttttgcc

SEQ ID NO: 74568 - DNA, 600 bp, Arabidopsis thaliana landsberg
  unsure (1)..(600): unsure at all n locations
cgaccaggtaccggttgcaggtgtcgatccaataaggtattcaggtcaagcggtgaggccgattcgcaaacaccgggtgttggtggtgtccaggctgctgcaacgggcgaagcggtaatgttcaccgaagcgcaggccgtggtattgcaaccgcctgtaatggccacgaaatacgtggtgggtgaagtgggactaacnnnnnnnnnnnnnnnnnnnnncactactgttccgccacagctgccctggtaccaggtataactggcgcctgttcccaatgttccgcccacagggttcatggtaatgctgcccgaacacaggttggtactcgaggcattgatggaagttggcgctacgttgagcggatcgatggtaatggtaaccgagacacaggctgtattgttacaggtaccctcggcccgaacaaaataggtggtggtagcggtcggactaacggttatagagcttccgctgcctacggcagttccaccgcacgatccgctgtaccattgccagttggcgcctgttcccaatgaaccaccggtgactgataaagcagtactgctgcctgaacaaatggtggtagcagtagcggttgcagaa

SEQ ID NO: 74569 - DNA, 193 bp, Arabidopsis thaliana landsberg
acaatgttttgagcctccttattgaaatctacttttttaagcattgactcacgaatatctttgacaattccaacctatgcataggataatattgtagagagtatcttaagagcgactgcaaatcaaatacagaggagattaccagtgaagtacggctaaactcatgactaaggaactcaaatatacgggaaac

SEQ ID NO: 74570 - DNA, 556 bp, Arabidopsis thaliana landsberg
atttttttttgtaattttttctttatttacctaataaacctttcatatggttaacgagatagatttagatggaccaatgaacaatatagttaaatccaagaaaattgcttcatattgcatgactcatgagtatatacacatttatagctggaattagtattatctagttcatgagtgtatacatattttatagcttaatgttttatattatctacctaataaactttcattcatatggtaaactagatatagaactaattactaatgatggcaggtaatgaaacagttaactatataagtttgtagaaaaattaaattaagttttaacgtatagatattcatgtgaacaaataatgattattaatacaaaaagttaactaccacatatttgttaatgaaacaggtaactagaccagttagtagaaaaatttaaattaaatactcatgagaacaaataaatgattcgtaatacaaaaagatttaattgtacattttcttttgccagtgtctaccacagaattctaacactttttttctgattgcctaagcatatatc

SEQ ID NO: 74571 - DNA, 499 bp, Arabidopsis thaliana landsberg
  unsure (1)..(499): unsure at all n locations
agagggagatggacagccgaggaagatgagatcctcaccacgtttattcagaccaatggtgaaggttgttggcgatctttgcctaacaaagctggtatatacatctttatataaaaaaaactacctttgctaattgtcgatacatctctcagtttagtaatcgattcgattttaacattcaaagaagtactaatttcttcaagttgttgatgcatgaaaacaaaaaaatgtgccaatatatctaaaaccacaacttgtgaggttatattaatagaaaaaagcgttgtagttatacatgttttaatagttacttaaaaaatgtgtaggattgttgagacgtggaaagagctgtagactaaggtgggtgaactacttaagaagagacttaaaaagaggaaatattacttgcnnnnnnnnnnnnnnnnnnnnnnnnnnnnnnnnnnnnnnnnnnnnnnnnnnnnnnnnnnnnnnnnnnnnnnnnccactcgttcatttatat

SEQ ID NO: 74572 - DNA, 339 bp, Arabidopsis thaliana landsberg
cgagcaaataagggcgggggcgagcaaaacaaaaccaaacggggagacagcgggagaggagacaaaagtctacacagacaataacaaaaccaagaaaaaggaaaaagatggaaaatcctgcgaaaggagccagggaccgacaaagagaggaacgagcgacagaggaaaggaagaggtgaacggagatgaaaaaaaggaccccacggcgagggaacaaaggggaggggacaacgacgatcaccggacaccaagaaaaaaaaagggagacacaaaacagacaagagcggaaactcacgtatgggacttgaaacgcacctgaaaatgaattgcgaaccttat

SEQ ID NO: 74573 - DNA, 580 bp, Arabidopsis thaliana landsberg
ggccccgaagaacgcaaaggcgtggatgtggccgtctacccaagcctcagctaccgccgccggataggttcgtacatagcagccgtcgctatgtggcagatcgagcacgaagaagcgcgccttctgctcgacgccgccgatcaccaccgttgcttcaccgaagtctgcctgcgcatggccgggcggatgagccaggggcacgaatacctcctggcgacgctgatcccgctcgcgcatataatccttgatgatcgtgtagccgccggtgaacccgcactcgttacgaagccggtcgaacacccgcttggcagtatggcgctgcttgcgcggcaccttcaggtcttcttccagccaatgctcgatcgtcgaaacgaatgcatccagcttcggacgccggatcggcgaacgccgctgatagccgggcggtgtcgaataggccatcatcttggccacgctgtcgcgcgatatgttgaaatgcttagctgcctggcgcttcgtcatttcttgcgaaacagccagccgaaccctcagataaagttccacggtgtagatcccctgtcccttctgcgctctttgcaga

SEQ ID NO: 74574 - DNA, 161 bp, Arabidopsis thaliana landsberg
tcgagtaccttgatgtgaaaattgtttccaactttttgaaagatatagatcttaaagccctggggtatcatctaaacaccgctaccagtatcccactacacaccataagcatcactactgaagctttaacttcaattctcttgttctaatgtgagatagat

SEQ ID NO: 74575 - DNA, 579 bp, Arabidopsis thaliana landsberg
  unsure (1)..(579): unsure at all n locations
ggcgcgccacgcgagcggcactgggcgtgggaatcaaccctgctctcggggacgacgagacgaaattgatccaaccctccgacgtggctcgcacggccgtgttcatgatggaccctgcgtcggccaacggtcaactcagcgacgtcgtcctgaacccacagaccatgctggagcgtaaccaaacgtttaacgacgtcaagcgagtggaggaaaaggtcgcctccctcacgtctcccgcgtttaaggacgagcgcgtcgcgttggtcacgggttccggcaagggcatcggtcgtggagtggccatcgagctcgctcggtctgggttccacgtcgtggcgctcactcgcacgcaggccgacttggacacgctcgcggtcgaatgccgcgaagccaaccccacggccaagttcttgggcgtcgccgttgacgtcaccgaccgccccgccctggaaagggccgtgcagcgcgccgtcgacgagtttggtacgctctcttgcgtcgtgtccaacgccgggacgaaccgncgccgagttgcctgccttccgacatcgagacgtgnngctcaagtttgcaagtcga

SEQ ID NO: 74576 - DNA, 473 bp, Arabidopsis thaliana landsberg
  unsure (1)..(473): unsure at all n locations
gctgaacgatcagcgcgtactttcgttggagtcgatgttcctttctcacttgtggatgttgagaatagggcctgtgcttttgaccgattagatggcgttctgagtccggacgctttcaatgttgctgctgtctcagcggctggcttttggggtgtgactttcactcgcttcgacggaggtggctcaggcgatccttcgccattgacgtggccgttagttttcgaaatccgctgccgcttcggcgtcgagatagagggctcgtcgtcaacttctgggtgcttccgtttcattttagctaatgctgcaggaatctgtggagaggacagtagcaaggtaccattgctgcaatgagcaagtcaacaacttgcaaattatanggcacagacgcacggggcctagggacctggaaggaagctccttgggatgtgaatcgacttctgagctctttcgacttagtttccaggtctcgattt

SEQ ID NO: 74577 - DNA, 575 bp, Arabidopsis thaliana landsberg
acaagaaaaaaaaccaaccacttgagtttgttttaattttaattaaatatctcagcttaaacgtagtacggaacaggagaccttctcagatgtttcattttggttcttctgcttcttctgtttttctttgatttccacattatccaactctctcttagcttttgttacccaatagaaaaaaaagcagattcaagatattttaaaatcgttcttcacaaacaaataatacaaaaaaaaaaagccaaatgcatacctttctgcaaaggatccgtgaccttactaacatcatgaactgattcaacctaaaaatccgaaacaataacaaagttactagagagtaaagaagaagaacgaatacaaaaaccataataagaagaagaagaattacatcggtggatgtcgagcatttcttgagcctcctgtccatggtgaagttgagtagatagagctcagcggctgctaggttttcgattgcaagagaagcgagacaccgaaaagaaaatgaaaaaccattttattcatgtctgagctggtgctgccctgttgtggctgagccttgacttttgtgtattata

SEQ ID NO: 74578 - DNA, 140 bp, Arabidopsis thaliana landsberg
  unsure (1)..(140): unsure at all n locations
gctaattctttctgtttcattggtcctannnnnnnnnnnnnnnnnnnnnnnnnnnnngaagtctttctctacacagactatgattcaatggaacggaaatcaaaagagcccgtcttcattcacacaggtccttgtctcta

SEQ ID NO: 74579 - DNA, 126 bp, Arabidopsis thaliana landsberg
acgcacaccaagacagacccccgaccagattaaacatcaacccaggcgaagcaggcccaggaacaagggagccccccatgacccacggacccatcacgcaagaaagggactaccgggcccgccccc

SEQ ID NO: 74580 - DNA, 111 bp, Arabidopsis thaliana landsberg
taactacatattttttggtttttaattaaaacttaatgggaaattttgttgaagagacaattgtctcagttttagtaaagaataaaatagtcatctttccttgaagggatg

SEQ ID NO: 74581 - DNA, 115 bp, Arabidopsis thaliana landsberg
attcattgtatccgtgccaaaggacttagttcaaccattcatactcacacgaacactgttggcgattggatttttatcgagacgttcaaactcaatcatgccactggtcagttct

SEQ ID NO: 74582 - DNA, 593 bp, Arabidopsis thaliana landsberg
cgttgcaagttatggttatcaagacgtaattattatgaaatgatgattactaattatggttagtagtgtcaaagatagaaggaccaattgttggggaataaccaagtaccttaggtgggatgttaggacactcaagacggaactcgtgcatgatccaagtagttttgatcccatttggtgctctgtttctgtagaacactagtgtttttctcatccctaccaattgccttgtacgtggatccatcaccggtcgatcttttcctgttgctttccagtatccgcttactgtcgctctgttcgtgcgatatccagtagcatactttcgatcacggaaactgaagaagtaccattcctttgcgtttaactttgccacatctatacacaacatacaagagatatataatcatcagtaaattcttaaaagtgtttgtcaagatacctatcagtctatcacaatactaactaaatattttttttttaaaacataaaaaatcgtattctaaatattatatataaaagcgtctagtaaatttgaattatggtgactttatggtgattttataccaatttattcaacattaattaattttttg

SEQ ID NO: 74583 - DNA, 323 bp, Arabidopsis thaliana landsberg
aaaacaaatactatattactatttcaaaagtaagatgattattaaagtgaggtttggcaactggaccgaagtaggttggcttcaattagactctcaactcctaaaaaaacaaaatagctgatccgaatcgaacaaaaaatatcatatggctaccctaaataaaaatggtatatggaaaattagtacatataacaaatggtatcaaagctgaggttaatacctcttgggagcgccggatctagattatctggatgatcattagaagcagcagaggattttaaagaagcctcgtcggttatgtaaactttcaagccgagctcacc

SEQ ID NO: 74584 - DNA, 130 bp, Arabidopsis thaliana landsberg
cacccacaaaccgattagcgcaatggccaaccccagcaggccgtcgcaaaccccgtctcaacgcttactcgcaggcaaaatgcgtgaagatggggggccgtagcgcgcccaacgcgcggcggacgctcac

SEQ ID NO: 74585 - DNA, 683 bp, Arabidopsis thaliana landsberg
caaactttttttctagctccaaatatgttcatgaaataataatatcgaaactgtgagttgaagaataaacctcatcaagagctttccgctttaaagaagatgggcagtgcagggtttgtgttttgtccctaggagccaaatgatgaatctcagagctcttttttactggtgcttcagtatttctctccttgcttatggaagagctaaattctggtttcactgcagaactcggttggtctttatttcctccaatggtcctatagtggaagagattagcgaatttgaattaagatattatcgcgagatcccataccaggaactgctgtatgttccttttgtacctttgagttttcactgcacgcagatcagccataatatttccaagtttaggccttcccagagaattcaacttgggcttctgcaaagattcgactccggaactcaaatgattgcttagtttctgagtcaagctagaagcatcaagttttgagctgtgacagaaatccaaaagcaaggaagcttaatgcatgacattctaataaaacttcctagtaatttatacacaatgagtgcacattgggtaatagcctgtttaaggaatcaagagcatggcaagagataacaaacaggtattaaaacgaatttctcaccttatattgatctgcaagatggacttctctcta

SEQ ID NO: 74586 - DNA, 470 bp, Arabidopsis thaliana landsberg
ggggatcaagtgaaaacgcatgtcggggctcacaacagttttagagagcggtttattaagttgggcttaaggggcatgtcgcttagcatccgactccaaaggacttttgagaaacgacaattcagtgattacgactatgatgagataacaaaaagtgaagcgttcgaatctgttgaggatgcgacatattttttggactctgtaatccgatatttaaaggaaaacaaccatttacagtgaattcagtaaaagcttttgcgccggcgacagtcgctaatgtgtcgtgtgggtttgatattttcgggtttgccattcaggagccgggggataccgttgagttatacaagcgggatgagccgggcgttgtcattacggaaattacgggcgatgaaggtcggtgccgcgccaggctgagaagatttcatgacggtggtgatgctggctttacttgaacacctgggtatcacaga

SEQ ID NO: 74587 - DNA, 422 bp, Arabidopsis thaliana landsberg
  unsure (1)..(422): unsure at all n locations
ccggtgactgactccgctgcagcggagtcatcgggtgagatcgcttgggcgttcgggtcccgtgcggcgtccggattgacgcggctgatgatatccctgtagaaatagaaggccttgccttcccgccaggcggaatagagtacgccatctctcataataaagacgtttttcccatcgcaatatccccaggcatcgtgggtatagtagctgctgccggcttccctggtgtagaggatacggcggtcgtcttccagtttaacttcgaaatcgcggatggagggagcgttgnnnnnnnnnnnnnnnnnattgttatatacgcccctggtcagcgtggtatcggtgccgataggggcattcgaccgggaagtattgannnnccggatttcttcgatgctgatgcggtgcaggtctttcttgttgcg

SEQ ID NO: 74588 - DNA, 616 bp, Arabidopsis thaliana landsberg
gttattgttgttgttgttgttttgttcttcttccgtcgaagtttctgagagagagagagagatggagaatagagactttggctctttgaaaagtcgaataaagacgaaaacaaaaagaacctcttcgctttttccctgattttttttttaattttcgttaatcataattaagaggatccagaagcaattaagcatattattatgatgatataatgtaaccctaataatccaagctgagtgtttaatcatatacatcatcatcatatgatcaaccactacacaaacatatatcaaaatgggacaaatatgttagtgatttttaaaacatatacaaagtgaagatgtaatgaaagagagattagacacaaaactctgatcacaattttcaaagaaatgggtagagaattagttgattaacttaatcacctgaattccttaatcttaatcagtttttggacataagtgctcaataatcctacagaataaatagatcaaatatggctacaccacttatgaacattttaacaacataaagaagaagtccttcatcttctctttttgccttccttttatttcatgcagtatcagagagatgtaataatgtcatcaaataatt

SEQ ID NO: 74589 - DNA, 489 bp, Arabidopsis thaliana landsberg
acgcgtcatattccttctttcattctttgtccttttaattacatatttgtcgtaaatgttttttttttttttaaatatactctgatttttcatgaaattttgaggattaggttaaacttttcggtttagaattctttgattattaaatatacacataaatgaagccggcaatttgaagacgtgtctttaaatatgcaacatgctttgtctttgacaacggacgttgcgtctcagaagcaacttctccaaatgttactcgatcaaagttatagacacattcattgtaagattttttaacagacacattcatgaacgtctatgcatgactatacatacatacggattcaaaataatcttaagtaagtaagatatatatacttctcgtccaaaaccctaaatggcgaacatcaatcattttatcagtgaagaccaaaagataaagagaagcaaaaaatcaataaatcccttgatgagattcttacggatttg

SEQ ID NO: 74590 - DNA, 269 bp, Arabidopsis thaliana landsberg
ttcatcgccttcgacttgccaatttgattggatgagacgagaatttttcgctatataaaataacagagcatatcgaaaaattaatgagaactgtctctctcactcaaaactctaaaaatcacaactttcttaaagatcataaactctttatagataccccttcaccatatcactcgactcactaccgcaacactggatctatatccgagaaaaatccctcattttcccgaggaaaactaaaaaaagatttagataacacggataaattg

SEQ ID NO: 74591 - DNA, 609 bp, Arabidopsis thaliana landsberg
  unsure (1)..(609): unsure at all n locations
tccagctccatggattatcgaagacattttttatatgctcaaagctcgggacaatttcgatgaattttggactgttaatataaatatatacaagtgtatgcaaacagaaaatggcgatgcgaaacagtgacaagcggagaaatcgaagaattaaatgaaattgtcgaaatcgaattaaattatgtgtattgttgttgtgcaatcaaatccacatgtttacattgttttcatcgaactcatgtggcttctctattgtataacaaccaatgttaatttaacacgtgttacttaacgactggattggcacgtgtacgtatatgatttgtggattatcactgggtttgcttaaccacctggaccaacctaattacgttaactgtgagatttgaggtttccaccgatctaggagttgatgggcctcaagtgtcttggcccagtaattaatagatcagtttttatccagtaagcaaatttttcgtcaaaaaagaactttttttttttctccacaaagaacaaatttttataagcgaaatataaacgtaactaaagcatttgcattgagtctctctagtctctaccaatatatntgtttgtatattttatactctg

SEQ ID NO: 74592 - DNA, 595 bp, Arabidopsis thaliana landsberg
aaaataaatgagaatacgatttttttttgtctttttgataatgagtcaactttatgtatatggaagatagaatctcaatgttataaaggggtaacaatttataagattaattaaaaaattatgtacaatgtatcacaccatatctgctagctctaaaatgacagttttagaaaataaatgagaatataatatcctttttcttctttttcatagagggtcaactttatgtttatggaggaaagaatctcaatgtttaaaaggagtaacaaatcatacgattaattaatatatttatatacaatgtatcacaccatttatgccagctgtaaaatgacagatgtggaaaataaacgaaaatataatatcatcttcatttttggtctttttcataatgaatcaactttatgttgatagaacataaaatctcaatgtgaaaaagggtgagagaatcttctctacaaattggtcagactttctttcgattcaaatcattattgttttattgataaatgagaatataataatttttcaaaatgagtccactctatgtttatggagtatataatcgcatggtgcaaagggtgataaatctctt

SEQ ID NO: 74593 - DNA, 476 bp, Arabidopsis thaliana landsberg
cggggggataaaaagtaggaaagatgcatactgctctttaatcatgtagacactactaacatattatatggtcgagtaattcttgaaattagagcttctatccccccttactagttttaaacacggtaatcgatctatatattctgcgcgaacagagttatggccgtatcgtaatccttatgtcggtcgcctatcatcctacattttatcttactactcctgagcacgacctgaccattattaaaggcaagcactccttgaggattcattcgtcaagaatctcagatgtactccgcttttcaacctcttttcgaccgatcttcgtcacgaaatttattggatatactccaacaaatgtgcaggggtattgcttttgataccatttttcatcttccaatcagtatcaagcctttcagaaaggatctcctttgctcgcttgctagcctagtgtccgctacttgcaataattatataca

SEQ ID NO: 74594 - DNA, 251 bp, Arabidopsis thaliana landsberg
tattttggaatgacaaggctataggctagagatgccgtatataacataccgctccaaaacataggtactgccgcgtctcattttcaagaatctgaaagcaacatgtacctgcctcaaaataacaaaaaaaacttcaattaagcaaatagaatgatagactgttcatgaacgaaatacactgatagaacctttgactttggaaacagtgtatgacttgagaatgcaaaggaagccaaagtaggctggatgct

SEQ ID NO: 74595 - DNA, 573 bp, Arabidopsis thaliana landsberg
ccggagggtaaatatacatctgtagctatattggtgcatttaaataaaatgatgtttttaattaaagtgtgggaggaaacagaagagaaataagtaatttctttttagaagaggagtataaaacatatatgcatatggggttaattttccaacatgataagatagcatcaaaaattactataacgaaaaaaaactaaagatacgaaatagcaacaaaaatactaaaaatatgaaaaaataaaattaccataaaaactagtgtacacaaaggtcaaaatcttatttacatttgtaattaggatctatatttcaaaaaattgaacatggaccataattgtttttgctatttttgagctggcctgtttttgctattggtaaatggtggtttagttaattattgcataacaaattgaacttgcatcttaagttcggtgcgaatacttagattattcagaaatatgtttttttttaatcgacaatagaactaattaattatagtgccatattgtcgatctataatccatgataccctcgggtccgtgtctatttcctaatttttaggaaatattctca

SEQ ID NO: 74596 - DNA, 566 bp, Arabidopsis thaliana landsberg
gataacaatcacaagattatatgatttgatttttctacacaacactttttcaaatttctagtttttcaaattacttaaattacaatttaaaaacctgaaaatcaggtttgattatttgataattatctttattttatttaaattgagttaactcaatcattagaagaaagtgctaactttgttggacttagatatgaatattgctctatgtatgcctaaagattaatttatatatgtaaattttcgtcacaccttaatagcaacgactagttttcggaatagataaatataagaaattcaaaagataagtctattatattttgttgtttatctgcttgactacttggatctagataaattatttttcaaatcatacatttgcaaaggggactaatttatgtgagtaattcaaaattcaaaagcactctaatcataaatcattttaagtattatgcatttctgctcgagaaagttcggatattaaacaaacaattaccatgtccattatggtttgcgttttgcaagaggaacccattgtggtttccttgtgaaattgggtctttatt

SEQ ID NO: 74597 - DNA, 591 bp, Arabidopsis thaliana landsberg
  unsure (1)..(591): unsure at all n locations
gcgcggttcctggccggcgaggcacgagttcttcaccagttgcctgcatcggcatcagcctttatccacagggcggggcagacgttgccacactgattcgcaacgccgacgcagccatgtaccgctccaaggccaagggccgcaaccgcgtcgaagcctacaccctcgacctcaccgcccaggccagcgaacgcatcgccctggagcacgaactgcgccgcgccatcgagcgnnnnnnnnnnnnnnnnnnnnnnnagcccaagctcagcctcaagacccagagcctggtcggcgccgaagcgctgatccgctggagccacccgacctttggtgaagtgccgccagagcacttcatccacctggcggaagagaacggcaccatcctccagatcggcgactgggtactggaacaggcctgccggcagatgcaggcctggaagatgcactacgaccccttcggcccactgtcgataaacctcgccggcgcccagttacgccacccncaccttgcccggcgcatcgaacagttgctgaagcactaccagattaaggccgcgacctgagctggaatcaccgaaaacttattatgag

SEQ ID NO: 74598 - DNA, 500 bp, Arabidopsis thaliana landsberg
  unsure (1)..(500): unsure at all n locations
gaaagggaaaaaaaaggattcatgatcttggcgaggaaaacctgnacatcggttgatttctggaatgaaagagagtctcccctcatggtaccttggtaaaatcctacagaaacatttggcaagggaccctcgtcagactcaaacagagagatgctaaattagggagtagtctaccattatcgcttggtgtccgctctcgccgttcgacatgagctcgcggaaacccttttctgatttgcctaaacaatagacatgcatattcatgtccttggcactgtggcgagctgctgaagcaatatcggagcaaacagtatccttacttatcactggtgttaggtttacctggcgtgtctgcccacatttggacatcacagtttcttggctctcagtatgtatatctatgcatatatgcacatgtgagaagaggatcggctgaaattacaccctcggggagtgaaaatcttacgaggaatgtttacgaaacgtcaatcttcttacct

SEQ ID NO: 74599 - DNA, 578 bp, Arabidopsis thaliana landsberg
  unsure (1)..(578): unsure at all n locations
aaaacaccaattctacttattggtggggaatcggacattgtttcaaggccagtcgaactccagaagcttgtaagagccctcggtgacactggtaatgataaaaccatggacgaagatgcagatggcagcgttgctgcctccgaagcttccatgcttcccgactctctggctcacgaggagaagctcggcatcgagccgcagcttaaggagaaggtcacaaatgagtccaacggtttaccaagaagcaaacgctcggttaaaacagtcatccttccggcgccggcatctcacgccctcctgtacgaccgtgcgacatacnnnnnnnnnnnnnnnnnnnnnnnnnnnttcgtttcccaacatgcagaccacaggctgaacctcgggtggcaactgcaatatctgaacacgtccggtaaatgggacgtgaagaatctggcgaagtggaagaaggtgcctccagtttccgatcgtattgccaatacattcgtcgcgctcaagatgctgcgtgaagtcgacgaagaacacaacccagttctcttctcagaagcacaccgcgataatatctacactgtgataga

SEQ ID NO: 74600 - DNA, 549 bp, Arabidopsis thaliana landsberg
tcgagccggcgctgctgatcttcgcgtcgcatttccagttcggcgcgctgtgctgcggcgtgatgacgctgcgcgctgcggctacccgaatcccagagctgccagcgcagcaccagcgagaccgtgtcgaaatccgaatccgaatcgacccggtaatcctcaccctgaatcccgtagtcggcggcgatgccgagtgtgggcaagctggcgctgcgggcggcgcgttcgccggcgatcgctgcgtgcaggttttgatccaactgacgcagctccgggcgcgtgcgcggggctgactcggcgcgtgccggcaagcgcaggtcttcaggcttcggaaggttcagaggcgcatcgtcgggttgggcgcgccagaaattcaacagccgctgcgcctgcgctgcacggacgttcgcagcgtcgagctgctgcacggtatcgagatgttcggcttgggcgcgcaaaacgcgatcgcgtgtcgctttgccggcatcaaccaaggattgcgcaacacgcacattttccgccagcaacttctcgctggcttcgaggatg

SEQ ID NO: 74601 - DNA, 372 bp, Arabidopsis thaliana landsberg
  unsure (1)..(372): unsure at all n locations
cagcaggtgcttgagcaggtaaagcagaatggtgattattttgtaagaaactatacaaaacagtttgggggggtggatctaccatcatcagcagtaacacagcaggcaatcgatgcggcagaacattcgcttgcgnnnnnnnnnnnnnnnnnnnnnnnnnnnnnnnnnnnnnnnnnnaggctgtttcacgaaaagcagttgtcttcaccggaaatgatcgaaaccatgcccggcatacaatgctggcgcagacctgtgggtatagaaaaaacaggcttgtatataccgggcggtagtgccccgttattctccaccatactgatgctggccataccccgtgcgaatgccggctgcaaagaagtggtgctttgt

SEQ ID NO: 74602 - DNA, 536 bp, Arabidopsis thaliana landsberg
  unsure (1)..(536): unsure at all n locations
cccaaaatctgaatccagacttttatgttcttctccaccattttcagctttaagataatagtaatacatcccgtggcttgtgtctaatgccttccaatcattgttataattatctgaactaaatatttcatttccccatctgttataaatcacaagcgaagaatttttagccaacattagtttgtctacatttccaacttctgttattttcaagacatcattcaatccatcactattgggtgtaattaaatttggtacagaaagtttttgatgatcaattgaagcaatttttactgaatcaatatctgttacgcagttagtattgttgttatctttcacatataaataatatgtttcaagaatactagatgttgttactgtataatttgatgaggttttttcaacaagatgtttcgttccttttttattccatacatatgtatatgagccagagccaccagaaacgtatgcttttagatctctattagaaccaatacanagtgtgtcgagcggttgttgcgatgaacgtatagtaa

SEQ ID NO: 74603 - DNA, 560 bp, Arabidopsis thaliana landsberg
  unsure (1)..(560): unsure at all n locations
atctcccgatccttgacaatttacattgtttactattaatttataattcccgtatggaaccatttcataattcaaatggttcctttttccttttttgactaattctgatccggtatgcccataaccgatccaacctattggataattactacctgaattcaattgtattaaaaccttgttgaagggagaagccaaaagttccattctgtggtacccattttcatctgtcgtagtggtttctagtgttttagaatcactccctaaaggatctttcgaatcaattttagttctatatagtttaattgagattccttcaattccttctccagtaataggattataaacacgtccatgaacgtaaacgttttttacaaatttggtgcaggaggtgaatgctattaccaataccataaatagtagtatcctcattttaataaagcaaatcgaagatcgttattccattttcattaacaaaaaccgtatcatacttatatatggtcccagagggcctctttatttgcatataaataatatgcttncccatttccattttatcagat

SEQ ID NO: 74604 - DNA, 596 bp, Arabidopsis thaliana landsberg
  unsure (1)..(596): unsure at all n locations
tacctagagaacctcaatgattatcgttaatttgttactgctacaactcgaacgccaattatgggcgtgcccagccatcagtaataccgcattggtgtctttatagtagacacgagctcccacacatacactattagcagctcgccgaagtcatgccgagaccagcggctaagcgcaatcgtttggcgaccaggactctaggggtttcggaccacacccagggtcatggaccacgaagtactgttgaatctagaggaatttcccgttcgccgacaagcgattccgtgggtaattcgcgactagcagacagcgccgacccgtctgatattatacgccaactgaggaaccaaacacccataagcaaagcacatgagtttgcgatcgggtcgtccccaggaaccgaacaaggagttacaggtagccgaccacctacgagggctcgcgggtattcctcgactctttccatagctggacgcanaggggataacggttcgagagtccaagggactcctgcctttgaaagttccatactgagcaancttagacggcgaccccgacaggcgagtattctacatatgatgcaagacgaggacggg

SEQ ID NO: 74605 - DNA, 557 bp, Arabidopsis thaliana landsberg
  unsure (1)..(557): unsure at all n locations
gcgcaagatattaggaataagtcacctattttgttcttatggacaaagaaatattattagtaggacgggataacgttgcgtgagtggctgcatacgtgcatacgcaagatattgaggcagcaacataacaaagtatcggtgagaaatagaagaaatggtaaaggagcatacaatgagcgacccgcgctcgaacgtcgtgctgtnnnnnnnnnnnnnnnnnnnnnnnnnnnnnnnnnnnnnnnnnnnnnnnnnnnnnnnnngtggaagcggtggtttctgattattcggctggcgaggctgatatttcttccggaactgcctttagcaggacgagccgcgatggagtgaaagacgtgttgtcaatacggaagtgatgggtgatgtgtcaaggagcaaaactgagcacagcttcaagtcatggcattggcggccagcggccggggagttgcagtcaatttctcctgaccaatggcggcgtcctggatatcatcgctaggctgaatctgtaccacaggcttgttcatcaatgaaatctatgctcgcctgatgccccctcg

SEQ ID NO: 74606 - DNA, 484 bp, Arabidopsis thaliana landsberg
cgggccgggcaccgcgcggtagccgaactcggccagcacaatcttcagctccaggatgccgaaaccctgcccggggacctgctcggccaggtgcaccccggccaggccctgctcggcggcggcccgccaatacggcggcggattctcgatcggggagtccatcgcggcgtgcagcaactcggagggcaccgcgcgcgccagcagggaccgcaccgaatcggcgaggtcctgatgctcggaggtgatcgctatcggcatgggtacggcctttcggtgagtacgtctagtgaatctaacaaccagccggttggttgactacgttggtcgggggccgaccgtctcgcagccggcggcagatgtcgacggccgcggtcaggtagcgccgcatggagtcggcggtgtaccagctgacgtggggggtcagcaccacgttgtccagccctagcagggggttgtccgcgcggaccggctcgacggcgaacac

SEQ ID NO: 74607 - DNA, 449 bp, Arabidopsis thaliana landsberg
gacaatgagattgaagcagaccaagataacctcatcatctatgtggcatctagtggcaatgatatggactgggggctggatatgttgtctagaaaacgggtacgtagtgctacttatattttttctattatacttaacccaataatgagtcatctacctcatccctgatctggctctttctttgattgtaactcagaaatcaattctcaacaaaaaaacaccaagtgaagaaggatatagtgaaggacgaaaagggaaccttactcatccaagcaagaataggcaaacaatcagcctagaggaaactggaagacaggaatcttcacaggccatacgtggaaagaagaagccttctgaagtggtaccagataaatcatcggatgaaccgagcagaacaaaagatcttgagcagtcaatcgacaatatttcctggtcccaaaagtcttcct

SEQ ID NO: 74608 - DNA, 431 bp, Arabidopsis thaliana landsberg
gcactctgacataggtatgaacatacaggcctagagcatggaaccctatagagaggttcgcctttctaacttgggatatgatagctcttttatggcctaacattcttgctaatacgatacactcagtctggtctgaattgtaacctctaataaacaacattgtttcctgagcaagcgctactgtcatgataaatactgcaatattttggagatgggtatataacgcgacttgagtcgagaattcttgtgctacaatcgcgtaagcaccttaagagctcatgtgctgagctaccactgacggaataacctcataagaggctcgagcagagcgctaattgaaaatgaataccattattgagcgcgagataaagacacttatgcccacgccccaatcgggctcacggaggaaagtgtgcttctaaaagatcttt

SEQ ID NO: 74609 - DNA, 583 bp, Arabidopsis thaliana landsberg
  unsure (1)..(583): unsure at all n locations
tnnnnnnnnnnnnnnnnnnnnnnnnnnnnnnnnnnnnnnnnnnnnnnnnnnnnnnnnnnnnnnnnnnnnnnnnnnnnnnnnnnnnnnnnnnnnnnnnnnnnnnnnnnnnnnnnnnnnnnnnnnnnnnnnnnnnnnnnnnnnnnnnnnnnnnnnnnnnnnnnnnnnnnnnnnnnnnnnnnnnnnnnnnnnnnnnnnnnnnnnnnnnnnnnnnnnnnnnnnnnnnnnnntgcacgataagtgtgaccaagatgtaattgccaataatacagcgacgatcgtgtagtgtgatatcatgtcatcggataatacacgaaaacgcttaaagcagcatnnnnnnnnnnnnnnnnnnnnnnnnnnnnnnnnnnnnnnnnnnnnnnnnnnnnnnnnnnnnnnnnnnnnnnnnnnnnnnnnnnnnnnnnnnnnnnnnnnnnnnnnnnnnnnnnnnnnnnnnnnnnnnnnnnnnnnnnnnnnnnnnnnnnnnnnnnnnnnnnnnnnnnnnnnnnnnnnnnnnnnnnnnnnnnnnnnnnnnnnnnnnnnnnnnnnnnnnnnnnnnnnnnnnnnnnnnnnnnnnnnnnnnnnnngt

SEQ ID NO: 74610 - DNA, 183 bp, Arabidopsis thaliana landsberg
acacaaaactgaaggtcgagagaagactgcgccctgaagggggaggagaaattgcactttacatagatagccgcacctatgtgtcacaaagaaaagacctaccgaaatctgttgattgattccgcgaaaagagcgacagtggcgcccatcaaagagataaaagaagcgcttcatcaaaacagt

SEQ ID NO: 74611 - DNA, 547 bp, Arabidopsis thaliana landsberg
  unsure (1)..(547): unsure at all n locations
gacaccgatccgttatctgatatacgaagatgtaagcttatgaaaaacacccgcaataccctacaggcattggctgttctctttgctatgacccttgcctttgttgcatgccagaaagagaccagcgtggaaaaaggcggtttcaacagcccggcagacggggaactgatcgattccctcggtttttgcaagaacattgccgtatccggcacttaccaggtagatacgcccctgaacagcagtaactatgttaccgtaaacgtaaactttaccactgccggcaaatacaagatatactcnnnnnnnnnnnnnnnnnnntggttcctcgactccggcttcgtggtgagcgccggccagaacgccatcaagctgaaaggcaaaggcactcccatcctgaacaaacagtctgatttttccgtgttcttcggcaataatatgtgcactttctccattaattaaaatggcagcgtgaacggtggcaatacaggcggttccggcgggtttaccaatccggattttttcctcttcacacaggctcgagctggtg

SEQ ID NO: 74612 - DNA, 541 bp, Arabidopsis thaliana landsberg
gggtgggacgcctttccggcggaaaaaatcgctgtcgttttttatatccatacgcaggaattcgaggctgggcgggtgatcgtgctccacactttgactgacatcgataacgtataatttatcgttatggtagagagtattgtactcgctaaggtcagcatggaccaagtgacaagtctggtacatcacacgcatataccctagcatgtcgatatagagctcacgccatttgctttccgggtcggaaatattgaagtcaacatctttcaagcgtggggcagcaatgcccttagagtttccgacgaagcccataactagaacatggagtcgcacgttgatgggctcagggcaaggaatgccagcggcgtatatcctccgcaggttgcgcatttccttctcggcccacagcttgaccatcgctcggttgttgctcttgttgtaccctgaacggaatctgaactctacagtaacgtacttgtctctgtccttgaaaaccagaatgctcgtcttgtagactttgatagcacggtggattggcgct

SEQ ID NO: 74613 - DNA, 491 bp, Arabidopsis thaliana landsberg
accctccgaaaatcctcttagatgttttgctcataatcatctctcatattgggtgctcttttgacttgggctgaatacgagttaatgtcttattttcaagcattttacatatgcttgccatcactaccacttcgatcttatgagattagggtagccattgtaatgagctggataacaaaatgcatgcgttctatatgaggttttaaagatattaaatcaaatttgaagcgcataaacaacagaatgaggaagactttgagttgtcaactttgttgcatgatgatgagatttcaaaaaaatatttttttttgaaagaggttatactaaatactctaattcttatcatgttcaacaacaattttgttatctaggattggtataacttccatgcctgtattttacccctggaaattacacagcttatagtagacacttgataattgattgatttgttaatctagctaagctgggaactaaaaagggcagataat

SEQ ID NO: 74614 - DNA, 346 bp, Arabidopsis thaliana landsberg
aggtagactggcagagacaacggcaagaaggtgaaaatagcaacttttacgttaggaagatgagtaagatagggagggaaaaagaggaaagaacgcgaaaggagggagtagagggggaacaagagtaaagggcgaaagactagaggagaaatggcgagtggaggaaaaaggccaacagacaccagacaagcatagctaaaggagaaacaaagagggaagggaaggaaggaggaaaagatactaaggtgacaaaagctcacggacatgcagagggggcaggcggaagagaggaaagaaggagagcaaagcggaagggggtggagatgaaagaacagtgggaaagcca

SEQ ID NO: 74615 - DNA, 555 bp, Arabidopsis thaliana landsberg
gataaccgacaaacttaaatttcaatttggttttgatttggtgataggtcgagaaagcttctcttaagaactgggctgtgttttcttttgaatggtttgattttcttaggaaggtaaaaatctcatctttatggtctctttactttgactttgctttgtttgaagaaaacgaatactttatgattgtttatgattcagaattaggttaatttgcaattttgtcaaattttctaaagaaagtttgagacttgattaaagcagagagcttgttatgagtagaattcgcccaattcagtacttttaggtcgagatagcttctattacgaacaaactagtgttttctttcgaatgggttgattttacttaggagggaaaagtctcatttttatggtctattttgcatttgttttgattgcttgagtgcatacaagtgacccgaagactctctgatgactgatgatccatacaataagtattgactttgggatgagtcttataattaaagaagagagatttgtgtgaattgattctctcaactcaagacttccagcttac

SEQ ID NO: 74616 - DNA, 401 bp, Arabidopsis thaliana landsberg
gttggcgccaataataacgaataccactaactcttaaaagccagcaaccttatttagagtcagtgatctcttgtatatacgctggaccccccatacaacttgcaagattcgtgcagactcatgcaaccagcagctagcatcgtctcaaataaatcgagacgatccattagaatgtcgacggcccaatgctaaaagacaagatttgacagcctcagccgtattaaaaggtacaagccgcctccaccgctccacgtaagggactgatctaatggactagagggcctataataccatcgtcgagtgacaggggcaaccttcaaccagcgtagctacgtgtgcctataatcgttgcacacggcatgaacaaaaaccacgacaattatatacatttagagttcctt

SEQ ID NO: 74617 - DNA, 542 bp, Arabidopsis thaliana landsberg
caaaaaagaaagaaaaaaagaaaagaaaaaaattaactcatcaatttactacaaatttatttaaatgttttgctcatcaaatatcaattatcttctacaaaggaaaataaaatcaaatcaaaattaaagtattttacttaaaattttgttactttatatgaaaaaatcatataaacacaaaattttgaatctgaatttgattatagagtatagactatggtggataaatggatacaataaccctaaatcatcactcttctaactagtttcctagttaactaatgttaaactgaaaatattttgatatatggtagcaattaaatatttgaattttcccaataatgtctttggttttgtacattcttttaatttttgtagatcaaggatttacttggatgaattgctataaaataaaagcaattaaatagtgaaaaactcatcagttggtttgtaattacattatttgcaagccttttagtctgtagaatagagcatctaaagagaatatgtgaagcttatgcaaatggatgtagtcaagaaaa

SEQ ID NO: 74618 - DNA, 357 bp, Arabidopsis thaliana landsberg
cacgcacctgcgccgcaggtacagactgcgccttttggcgcggtttttctcccggagcctgtagggccggtctagagacactcactgctgcagccgctcctcccctgtgaccgccgggcggcgaccgttcatgctggggcggagggcatcaaaccacagccgctcccgctggcgcttctccaggttcgaggaacaggtgccgaagtgctccagtatggcgactctgacctcatgccacccgcccaggcgctcgatgcacttgtacagggggatctgcgggaactcgatcgcgtctccggtggagctgccccatgctgtacttgaacactatcactgtggagcccacgtataagatct

SEQ ID NO: 74619 - DNA, 711 bp, Arabidopsis thaliana landsberg
cgcgccacatcgcatcgcctatgcggccagttcgttcgagcacgcgccggaggtgtactcgggcgcgctgggtgatcagccaccgcctgcggtgactgccgtcaacgcagcgctgaaaccgagctggggcaaggcccggtcggtgacatggcatagcggcaagctggtgatccagggctggctgctgtatccggcgaacttcgacccgcacaagacctatcccttgatcgtgtcggtgcacggtggtccgacgttcgcgaacctgccttactggggcaccagcgccacggcttattcgtctatcggctatttcgtgctgctgcccaatccgcgtggcagcacgggtgagggcgaagccttcgtgcgagagaacatcggcacgggcaagatgggttacggcgatctcgacgacatcctcgccgggatcgacgccgtcgagaagatcgcgccggtcgacaacaatcgcctcggcatgaccggctggagctatggcggcttcatgagcatgtttgcgccgacccagaccaaccgctacaaaggccgtggtcgccggcgccggcatctacgactggaagagctattacggcgagaaccagatcgacggctggatgatcccgttcttcggcgcatccgtgtaccagtaccccggcggcgtacgagaagagcttcgcgatcaacttcatcacccgtgatcacaccccggcactgatc

SEQ ID NO: 74620 - DNA, 568 bp, Arabidopsis thaliana landsberg
  unsure (1)..(568): unsure at all n locations
ccggccttgccaggtcttccgcatctccagctcccccatgattgttcagcgccgctacactggtgttgacctggtcgctcgcgagctccacgaggagtctaccttcgtctccaaccctaagccctcggtggtggtccagaccatgctcggcccggtctacaagacataccgcatccttgacattcaggagggtaccattgtcgctctcactgagtctggcgacgtcaagagcggtatccccgtgattcctcagggcaacctttaccagcgcatcaaggacgccttcctcgagggccgtggctccgtccgcgctctggttattaacgacggtggccgtgagctcgttgttgactacaagatcatccactcttcccgtctataagctgtctacaggggttctctaaaacgacctagtctgcttgaatgatgggnnnnnnnnnnnnnnnnnnncacccgcatttgtttgtttgggtgattttcttttgttctcacgagtacgatcattgatgacttgaaggacctaaagcaagctgtgtatctgttggaaacttatactatgcatgatgga

SEQ ID NO: 74621 - DNA, 1687 bp, Arabidopsis thaliana landsberg
gaggatagaaagagaggagtttgaaaaacggctacgggaaggttggattgtagtgcattcgagtgtgcttatgtacccataattcctaactaaatacttttatttttaattcttgcgatttccgtttgattagaaagagaacggttacaagccgaggccaaagcagctgaggaggctcggagaaaagccaaagcagaagccgcagaaaaagcgaggagggaaagagagcaagagagagaagctgcacgtcaagctttacaaaaggtataaaagacttttcgagtttctcttctattattcagagccctaccatggtgtacaatcatgataaatgactttctggtctgttgcagatggaaaagacagtggagataaacgagggcataaggtttatggaagacctccagatgcttagagctacaggtacagaaggtgatcaattaccgacttccatggaagtgatgagtcccaagtttagtgaggatatgttgggtttgggtagtttcaagatggaaagcaacagtaatccattagaacatctaggtctgtatatgaaaatggatgaggatgaggatgaagaagaagacccgccacactttagccagagaaaagtagaagacaatccctttgacagaagtgaaaaacaggaacatagtcctcacagagtagaaggagaggatcaactcgttagcggaaatgaagagccggtgagccaagaggcacatgataatggggaccaagaagatggaaaacccataaacccaaatgaaatagaacgacaactggagaatatgccagagcaagaaagtggagttggtgacaaggaagagcaagaaactgaagttgtcgatatgagaaagcaagaaaatgaagttgttgatatgggagtggaagaagtacatccccttgaccgaagtgaaggacgtacactcagtcctcacagaaaagagagagaggacccacgtgctagcggtaatgaagaatcgggaagcgaaaaggcacaagattatgagaaccaaagagatgaaaaaatcaatcaaagcgagagagaagaacaattggagaatgtgctagagcaagaaagtagtagagatgatgatacaggagagcaagaaactgaagttgtcggagtaggaaaagaactttcccttgacaaaagtgaaggacaaacacttagtcctcacagagaagagggagagaaccaactcgattgtggaaacgaagaactggtaagccaaaagacacaagataatgggaaccaagaagatgaaaaatccatcaataaaattgaaggagaagaacaattggcgaatgtgccagagcaagaaagtagagttactgaaaaagaagagcaagaaactggagttgtcgacttgggagagcaaaaaagcgaagttgtcgaaaagggggtagaagaaaatgaagctgttgacaatggtgagggagtgcaaggaactgaagtttcggacaagggaggaaacgaaactgtagttgatggcaatggaaaggtagaaaccgaagttgtggacaaggcagggcaaaaaactgaccttgttgaccagggagaggaagatatagatgtagaaattgattgatgaagtcttttttccgggtcttgctaaaagcaacaagatgaaaagaaaaagttggggatgtttacgcattgattcttctatgcacaaaatgt

SEQ ID NO: 74622 - DNA, 593 bp, Arabidopsis thaliana landsberg
  unsure (1)..(593): unsure at all n locations
tgtcttccctgctacaggccatagtgtacaagcatcttgttgaagctctagcctgcagtgcctttaggtggagtattaaacaggtaatcccatacgatggctggctattactagcaatcaggctggcacagcaggcctgccatcagctcttgcgcagccacaaccatgccatgcacaaaaccgcgaaactggcccatagtaaagtccatctgcttgtacagcagctgctcctggcccatccatatcacatatcctggtgctatggtgttgtagtgtaccttcagcctatatatatgccagttgagcagtactttgacagggctgtactggccatagaccataaatcactgtaccatccagtcaacaccggcctgaaacaaccacgatcgaatacagccaatcatgcggccttgggatgcagatatggtctctaggcttgacagacttgacagggacaaggcctcggcataccctttgtcattgaacagccatgccagctcctggtctgctgccttgcccacccacaagccctgcttagcagctgctgcctatatctggataatatnccagtactaggggtcaagccacaatgc

SEQ ID NO: 74623 - DNA, 279 bp, Arabidopsis thaliana landsberg
  unsure (1)..(279): unsure at all n locations
aaaagagntctccttaagancccnccccgaanccaangacaacaccaagaaaggggacnncacaaagaacccgccaaacacannnnnngnnaanggaaaagaccggnncnagaangcngaaccccnacccnccnanacgaagcnaaagnngncaagggcncannggacnnccncacnagnccagccccannacnnangnnnancancnggcaccggnnacaaccgcccaangacngcanngaaaggaaccaacnncnnaagaaaacagagaaccangaa

SEQ ID NO: 74624 - DNA, 478 bp, Arabidopsis thaliana landsberg
ttgccgtgtgcgccggcgtgctggtattgcgctacattcaaccttacctgccgcgcacgttccgcgtgccgtggatctggatcatcagcccgctgggcgtcatcagctgcgtgtttctgctggcccaggaaagcggttacaactggatgctgatgggtttgtggacgctgctggggttgtcgatctacctcctgtacgggcatcgtcacagccagttgcatcgggcctccaaagccctgccgatggaagcggaagatcgcgtttgagcctgttttatcgtatatttaacatcgtgtttattatgcaatttattgttttataagcatttaactaattcaaacaagacttccctgtccgtccttgccggtcgggagtatcatttttggcccgcgggtattcacttggcagtgggccccggtaccgccgtccggactccgcatgggtcagctcctcagtccggagattccggacggcaact

SEQ ID NO: 74625 - DNA, 504 bp, Arabidopsis thaliana landsberg
agatagcacgcacactattattgaaggactaattccgtttattcaaagcacgcctgcattgcggagtatgtataataaatccattggtatttctaacatgaaaatgggatgaaagcccagggactctacttagatttgtcccataaatatccaagacacttgcttcttcatctattcacctacccctacatcacagtcccaacgactctttaacgcacccttatacacgctcgccacagagtcttttcacttttagattaggactagataaagtcggcggtaaggctccttatactcatctatatccttgaatgccggctcctcaactgaagcttttgttcttcttttgttaattagatatggaattatagacagttagactcaggtgctctgaaacatgatctagatgcctaccagattcgttcattctcaactggccgagtaatcagcccaacttttgctgttcgtactggtcctgctcgtatggttcgggagaatctgggt

SEQ ID NO: 74626 - DNA, 744 bp, Arabidopsis thaliana landsberg
tttgtatggggactggttgatgtaaattgccggggggttaatgtttgggcttttccaacctaccttattccagttattgaaattcagggagatgcttctgtttcgaaggtggccatctagtctttgaagtgacttgcaatttacagctgttaaggcggatactgagcctggaagattcggtagcgatataatattgatgcaataggagatgtcaatcatctgcagcagagggagaaggttgaggtgtcgcggaatagactccaattctatattacccctcaaacatagtatttctaaatcataaggaacatgatccaatctcttgaccttagtcctctccatgcaaatttcaaaaatgttactccaataacttactgatggaggtacctcagtgatcgcggtgccttttattttgagaagacgaagattagttgaaatctctggaaaggtttgcaatcgtgtgcaatccctaaagtggaggacctctagagatggtaagttgatgttagttgggatgatctctaattttttgcaacaagacatctctaaccaagacagatgctgaaggttctttatagatgaaggaagctccaccaaagactcacaccaacccaaatccaatgttttaagctttgttgcttccataagatttggaaggatttccagattccgagagctattcagattcattctcgtgagatttctaagtggctgcacataaacacaagcagataggacatttca

SEQ ID NO: 74627 - DNA, 805 bp, Arabidopsis thaliana landsberg
taatactgactgactaaatccttattattattaatggtatgaatattagacatatcaaatcagcctaatttatataagattatataaaacaaaaattatcatatgatataccattacttaataaaagttatataaaatatttatgtcttataaaatggtgcacttaacaaacttttgtatacaatacataattttattaaattttaaaatcattacttttagtaaataaatagtcacgctgtaccggtggttaaaatttagtactatttatgattagtaacaagtggtggagtaaaatcattattataattgtaatactaaatacattaaatttaaatataaacttttaaatctattttcattttttaacttttcccaacagtgataatatataaaattattgttatgaaaattaaaatattaaataattacacagatttcaactgcccgtttttataaacaagatggttctaagctcacttatcttttggtagttcataaccttacttttgatcacctatttcaacaacatcgatctattcctacatttcaacggcttatctgattggtaatcaaacgagcggttaaatttccgaccgatcttaaacatgccaccaaataaaattactgtgacagatagcaaaatataatagtgaattactgtcaagatagcacataaaaatattatagcattattaatctcttgattatctcgagaactattgatatctagatttctgaataactaaaatattctagaactaaaactcgtacatttcttttatcaagaaacaaaacattttat

SEQ ID NO: 74628 - DNA, 271 bp, Arabidopsis thaliana landsberg
tattctcagacaatatttagaataaactctaactttccttccacaataatggacggctctcttggctctgtccgttctttatccatgtgtgagcgaccagatgggcgtatctggactatgtacggatgaagaaaaatacaggatcttatttgcatccagagtttcatcatctattaattacaaatcattagactaacagtggattgattacatcgatgtcatgtttactactccgaagtccgacaacatacgattaagcaaagtcataaat

SEQ ID NO: 74629 - DNA, 456 bp, Arabidopsis thaliana landsberg
  unsure (1)..(456): unsure at all n locations
agaatagtggaagcagcaagcgaagaagaagaagaagagataggaagagagaatcacctcgtagatttgatcgaaactggagagaagcaaattcatctgctcgtcgcttgttgccgccatgattttgagtttttgagtttggaattcgtaaaggcgagggagattgaagaaaaaaggaaaaaaagctaggggtttaaaattcgaagggtgttttggtaaatatgccgagcattctgggccgtcgatgtcacctacacgctaatcgctaatccaatggtcatgttatctaattaaaaagatatgtaaaaaaataaaatcttattaaaaagggataacatgaaaattgttatacaatttattattttgttttgagaaatattaatatttgtttttttattataaaaatattactttacttaaaaaaaaatatatctntcttgtttttttacatatttt

SEQ ID NO: 74630 - DNA, 290 bp, Arabidopsis thaliana landsberg
aaaaccccgagaaacacccatgaaacgcctatccagagtcagggagaaagctacgacacgtaacaacgaagggagataagaggagccagacaaagtcgaagcaaagagtatcgaaccaacaagaaccggcaatgagaccgccaaacaacaggagcgctgcggcaatcggtagacacacaaagcctcaatcaatgaaagcaacctgaaaaagacaccacaacaagcaatatatctgaacgaggcacacgaaagccaaaagaacaaaaaagcctgcaacgcgcagcgagcct

SEQ ID NO: 74631 - DNA, 141 bp, Arabidopsis thaliana landsberg
ttttatccgcaaaacccacaatgacacactctaaaactataagccactgggcgacataaaactggaggtccaaccatttccccatgctatgtaccatgaactataaggcgcaggctccacgacagaagacacgtgagtgaa

SEQ ID NO: 74632 - DNA, 346 bp, Arabidopsis thaliana landsberg
gagtcagggtttagcgttagggtttatgggtttaaggtttagggtttagggattagattttagggtttgggatttacgtgatgtgggaatcagtctcgagcatacgagcactaatattcatacttggggaggcaaaaggaatgtactgcagtattgtcgacaacgcactgcctaaatggctagtgtatgtttgaggtgagtactggaagagaaaccatggcctggatagtaagggtttacgttctagcatagctgtttgaatccaaccacctacccttttatagatacactctgtcttttagggctgttgagaagggctctgatcgcgaatttgcatggataaatg

SEQ ID NO: 74633 - DNA, 351 bp, Arabidopsis thaliana landsberg
aaagcaccaatctcattgatgattactggctaagagaagtaacttttataaaaataacttatagagttgtgagagatgatatttgaagtttgataacttaagcttgtctttattaattaattattatagagttgagattttattttattttgacatcgagtttggactttgtataggtgataaaacaatttatgaattattggggtcaataagtaaaaatgtatcatttcgaaaaatagtttcaaatttatggatttttgaacagctaatgccaatctatgtacttttcaacgaataaaactgatttaaaataagtgaacgaaccaatcacactaaaccagtgcctaatct

SEQ ID NO: 74634 - DNA, 395 bp, Arabidopsis thaliana landsberg
  unsure (1)..(395): unsure at all n locations
agaccgcggcganccagcacaacccannnangnncnngcnncancnnacaatcctttaaagcaaaaaacacaaanncncncggaaanaaaccaaaaggaggcagaccaaaccccgcgccngncgaagccncaccgaaaccaancaaagncgcaaaccccnccnnnccccaanagaaagcaaagagaaaannnncnaccaancnncagacaaacaaannagangncggcagaaagacgaagaacaagaccgagcngaagaagacgacgaaacgcgggcgaggaacgcgacaccacngcganccccggcacacaaagaagcaaagaccccccccccccccccncccgggcacaacgaaaaggaaaaaaagggaacangggccccgccgcccccccaa

SEQ ID NO: 74635 - DNA, 515 bp, Arabidopsis thaliana landsberg
ggaagtaagggcactaataatttggagtttttttttggaattttatacactaatccgcatgaggaaaatctaggcttcaaacctgagcgtgatgcacttcattttataaatttcaagtcggcggccctcatagttgctacaaacaatttgtcacaatttagtttgccggaactccccaatttcacaacagaaggacttcagatagataaaggcatgtacctcctgttggacgttgcttttaaagaaaatcaggcaccgcacattgaagcacttaagaaatcactgaaatcacctgaattaatccttcgaatcgggtacgatgccgatttgaaaagcgggatcattgaagcagacttaacggatgttcgtattggaaatgagaatggtggcttgctgttggagcgcgtttcgctgctcattacggctcctgtgatttcgtttatactgaaagcaaaagctaccgtgacgtttaacagtcatgtgatttcaagggctgccagcattaatatttcacc

SEQ ID NO: 74636 - DNA, 260 bp, Arabidopsis thaliana landsberg
cccaaaagcgaaaaggaacacgcagcccaacgggaggaagaacggggaaacgaacacgagcggggccggaaattaaaaaggacaacggaagaagaagaaaaaggggacccagagaaatcccatggagggggtcgtgcggcaaacgaccagaagagagaaagagggaggcgactggcaaaaaagaacgtagacaccagagaagggaaaaagcaagatgcgcagaaacgagagaaaaggaaccgggaagacggaaggacagc

SEQ ID NO: 74637 - DNA, 487 bp, Arabidopsis thaliana landsberg
ggtttgtaatgaacagatagtgcaccaaaccctcacctatgcatagagctagaacttggaaacaaattttatgatcgaaaatcagataaatgaagtttctgctccctcttcataattaaagttgctatttaggtattatagtttcaaatatttttgcatatataaaatacgtccattcaaagacatgcaccataacatgcaaaagtaacataatggagaaaatagtaacatatgttgttattataccatttttgaaattgttaataagcttttcatattttctactattttttaaataacgaatcttggcaaaataaatgagagattatttttaaatgactacataagaataccagatttgctattcctttttggtaattgtgtgggaatgaaagtaatgaagtttaaattagacaaaacacgtcaaattaatcaacaatttttggttgtatttgctcataacatgaagaccacgtttaatagagtt

SEQ ID NO: 74638 - DNA, 390 bp, Arabidopsis thaliana landsberg
  unsure (1)..(390): unsure at all n locations
agattaaacccgggcaacaagacagggggcgcaggcccagcnaaaaaaccccaacccgcgagcacaannagagggggccgcaagcagcacancgcaagaccagaacaggggaaaaccacagcaaacgcaaagcaccagaaacaagcaacacaagaagggcccggcgcccggaccgccacaaacaaccacaagcggagaccaaaacagcaacccggcggcggggcaccaggcagaacgcaaccaccaagaagacagggcaaacccccgggagagaggaccagaagacnaccncccagaggaagagacccgacncagaagccaggaaaggccagaaagggaagacaagcaacagnnccgccgcccacacagcaagggaggaggaggcaaagg

SEQ ID NO: 74639 - DNA, 529 bp, Arabidopsis thaliana landsberg
  unsure (1)..(529): unsure at all n locations
cgatagcaaatatacattaatagatgtgagcattataaaacatcatgataaagtgggtgaattctgcggcttgttttgcaggggaaccatactcgtgtnnnnnnnnnnnnnnnnnnnnnnnncaaagaaagcctatcggggagaaagaaaccccaatggcatggaaagcaccaccatttgtccgatagaaaccgacgataggattaccttggctctccagcacaaatgtggtaccagacacaacgccatatgggggagatactctacctttcgatgtggtgaaactcaaggacgcaatgaccaaaacgtaatgagcggggaataggatggagtcgtccctaccctgcactggtatcaagaatacatttggatagaacatcgcaaactgcaacgacgaaacaggatgctagtaaacctacctcgctcttttttatttttcacacactcacacatgaattttcacgacacatcagagcctaataagtctacgtggttgtgacatataaacgtatgttttggcttatcaatt

SEQ ID NO: 74640 - DNA, 234 bp, Arabidopsis thaliana landsberg
  unsure (1)..(234): unsure at all n locations
acaaacgggaacggacaaacgcgagacgcggaaccgagcacgaacgcaagcaccgcgaacgcaccgccggcagaaacgcaaagagccacgcggaccgagaccggacaaaaaggcccaanccagngacacaaagaagcccacgggaaagagaaacnggggcaacgnccaccaacacnagaaaccccgaccggaacaggggccngggggnnccnccagaagacgaaaggaaccaag

SEQ ID NO: 74641 - DNA, 573 bp, Arabidopsis thaliana landsberg
tcgtctttaaattaccttggttagttaagaaattagcaagcaaaacctgatcaatatgtcgattttaaaactatcaccgattcacagcactttatttgtaagataaagttttaaattttaacttgtagcttttctattactataattttaattttaagtttgtaattcattcatgaaaaatatatagagacattatgtatcagaactaaacataaaaaaatgaaaatgaaaatattggagaattgcagtatgctaacgtataactggattttcttataagaccatgaatatttcactctaacgtatggtccatttctaaatattggggatggagcataatctcattaggacataactcattctacactaaagctaaacaaatatctttctttctttttctgattaaaatactatgaacgtattgtagttgcattttccattaacaagacacatcacccatgcattgatgtgtgtgtgataacagaatatcactttcataattatctatttgaataattatattgagacaagtttagtgaccgaagaaacgaattagttgaaacttacatatta

SEQ ID NO: 74642 - DNA, 440 bp, Arabidopsis thaliana landsberg
ttcagtcgccgaagcagagaacgcattatcccagttgcctcacctaattataagggtgtattgaaaacacgaaaaaccccatcgtaatagggcaaatcaacccacaaatgagttcataggaaaactaaaacacccggaaactaagaaaacatgaccaaaacgcaaaaataatatagaaaaaacacaccaaattagagcttgattggtctggtcgtgatttgagagaaagattcactctctgtgaatatgctcctgcttagcttatacagattcttcaacctaagatactagatttatacaaccaaatgtaccatctacccagggagaatatttagcgaacatcacacaaatcaatacagtcattaataagcgcggtccaactcggatttgagatgatcgttcagccgaactgtgaccaaggacatgtaactaacctccat

SEQ ID NO: 74643 - DNA, 376 bp, Arabidopsis thaliana landsberg
tctgacatttggtaaggattggaccccacgttccatcaaatcgatagggaaatgactgtttcattccggttctctaaaccataagactataatgtccggttaaggaaaaaccaaacagatagtagattccttgcggtatggacgtcttcatggacccccaaccgcagtagctttggaagctgaatgcaataaccttatctctctctctctctctcgatgaatctaacacattatttggtcttgatacagtgtttcttgaaactagcttagcttagcttacgtgtcggacagatgaaagtagaatctatatatctctgtcacccggcctcatatctacaacttttattaatcaacgcacctaacactaaatcttcgc

SEQ ID NO: 74644 - DNA, 371 bp, Arabidopsis thaliana landsberg
gccttaccaacgagccatacacaattcagacagacaagaacgacgccagcagaacttacttttggcgcagggacctagaagactgagcggggggctgacatatacagaagacatgggaacccacctcgagcaaaggaagaaaggcatggatggagtgaacaagcagcaaaaagatgccaatgacaagaaaagaggtgagggcaacagtgagatatgttatgaggggcatcttgacgatggaaaaggtgtggcttgagatccagcacaaagaaaggcagtggtgaaaagaaaagcagtccaaaaaagaggcacaaataatagggtggagaggggcaaaacaaggcacggaaagagggccccagaggaaatta

SEQ ID NO: 74645 - DNA, 582 bp, Arabidopsis thaliana landsberg
aaaaacctatgctttgaacatttagtttatttcctagtaattaattaaacgattattttatcccattaagaggactttcacgctttgaataacctatagacgaccctacaataagatgaacacgtaaagagacaagaaagcttaggatacttttgtctggatccgagggttcgaggtaatgcgataagtttaatggcattgtctcctatttatcatatcactggggtttttttatgtccccacataacatggttacaaccaaatttatttattttaaaataaatcttacatatctaatcattttttcatatatttttctatatacttatcaatggtatgtatacaaaatttaattatgcgggaaaggaagaattttcaagaaactttcttaaaattcttttgatctaagacgccatttctgttgtaaatttgagataagttatttaccagttaattaaatttgaattatatggatagacatagtaactcatatataaaacatgacattgatccactaacaaaatgttctactcttcgtagttttctcattattcagagagtatcacatctcttgtatttgac

SEQ ID NO: 74646 - DNA, 511 bp, Arabidopsis thaliana landsberg
  unsure (1)..(511): unsure at all n locations
cctgcggcgcatccaccgcgcgctggtaagcctcgggcgattcgtccttgaacagcttgcccagcgagccctggagcgggtagccctcccagctgcgcagcgcgtggtgatagtgattggtcgaggtgatgcccgccggcaggcccgggctgccgtagggctgggacggcacgcgcacggactcgaactcgccgaacacgtagaactgcaggacgatctcctcgtcgttcggctgccagtacgggcgctcccaggcggtcaggggnnnnnnnnnnnnnnnnnnnnnnccttggcggaaaatgcgcgagtttgaaaggaaggatgtggctgctgcgcgaacggctattcgcccagcggcagcacgctctgctgcagttcgatgctgccgcgcccctcggtgatgtgcttgaactcggcacggctgaccgagacatagcggtcgttgccgccgatctccacctgcggcccttacgtcaccgcgcgcccgctttcgtacacgcgcaccaccatg

SEQ ID NO: 74647 - DNA, 621 bp, Arabidopsis thaliana landsberg
  unsure (1)..(621): unsure at all n locations
gtaatctaactaattataacgtaaccttttctgctccgaagaaaaatttatacccaaatccaagaataattaccaaaatnnnnnnnnnnnnnnnnnnnnnnnctcctcttcggataagaccccttccgatacggcaaaggctaagatatccttcaacagcagatcttcagaagctttcttaagatccagaatcggctgatagtagtcagagtgagcatgcatacacttgatcagcctaggccagagtttatgacactcatcagtttatttttgagcttcatcaacgcaatttttcaaagctgtaaatgattctttgcaagcaccctcattcataaactcgcaaaaccgcaattctgtttcctcatccctctttgttgggtcaatttcatttggtggatcagctgacgacgtatctccgagtttcggagggaataaggcgtcgagctccctggctatcagatctatagtagcattcactatcgcttcttcatgagctctccgtctctccgccgggagttggtagtatgaagaactggacttcgaatcccccgatttaaaaatcgtggatgacgcgatgatccccatagccgtgaaaccggatcttatagaaatcggcgattc

SEQ ID NO: 74648 - DNA, 2251 bp, Arabidopsis thaliana landsberg
cagggaaggcaggtttccttttgtgggaaaacagacaagttatttgtggtttttataatctcaaggccgaaagctgtacttttgatttaaatatgtgatccatcaatgaagaacaaatactctctcattccttttttttaatttaaaggaagaaagagaaaaattaaagaagcaaatctttgtctctgggtctgagcacgggacttgaagacagatgtagggttgagatgacatgtaagggtgggtgcgtctccccacactgaaccacatatctttttgccggcttcttcaacggctttttctcttcccccttcccttcccttcccttccttcgacgtcgttttgtctccttccacacactctttcctctctctttcttctctctttcttttctctctctctcctctgctcctccgtctctcgtctacagtgccctccgcatcacctttttccttgtcctatgaatttggtcgaaatgcccttctcctcctcctccttccactaatctcaagtaagtctctttcttctctcactgttttcaatttcagtccttttttctttctttcttcttgatttggtttgcggtgcagaagatatatccttcgagactctcccttgccgtctccaattgccactcaccgctccaactctcttcgaatgtatgtatgcctctccttccctgcgctttcaattctttgtatgcttagtctgtctctttgttcattcacatctgaccctaatccactttcttgcatatatacctactactgctttcgggacttgtcttgtttatgcaaatctagaaatagttttgttcctttcttttcccctggataaattttctagttgctaggttcattcgtattttggaaggtatttcatctctccgacattgctctcaacactgtcccctccaatgcctagtccttttatttttttcttagttccaattcccttaaatacatctcacagtcttcttcttcttctcgattgcagtagctgaaatgaatggagataatagaccagtggaagatgctcattacacggagacaggtttcccttatgctgctactggaagttacatggacttttatggtggtgcggctcaggggcctcttaactacgatcatgccgcaactatgcatcctcaggtaccttatgtacttaagtaaatttaaggtcccatccgttgtcaaatgagcttatcattgtgtatgctcatatatctcagagagacacaccaaatgcattgtggcgaacacataacgtttcttgtttgcctttttctcaggacaatctgtactggaccatgaataccaatgcatacaagtttgggttttcaggatcagataatgcttctttctatggttcatatgacatgaacgatcatttatcgaggatgtccatagggagaacaaattgggactatcatcccatggtgaacgttgctgatgatcctgaaaacacagttgcacgttccgtccaaatcggagacacagatgagcactctgaagctgaagaatgttagttctttttactctctctacttcgatcatattcttttctaagctaataatttgtctgtgctttcaggcattgcaaatgagcatgatcccgacagtcctcaggtatgtgcacaagatctaaacggtttttgaacctgtgtcaactagttaactcttgcccatctttgtgaagctagtggatgtatccgtgcaggatgtgatctaaacactgatatgaattctatatgctcgttaatgccatgttgccacaggtatcctggcaagatgacattgatcctgatacaatgacctatgaggttcgtttcagtttccttgttggttctttttagttttattgattgacgaagatggtcaagagagggagtggattcacatctagatgcgggacaacaaataagttgtttggtttgtggatcaggaattagtagagctgggggaagcagtaggaacagaaagccgggggttgtctcaggaactcatagaaacgcttcccactaaaaagtataagtttgggagcatcttctccaggaaaagagctggggagaggtaaatagcaagcttgtaataatgttggtcacaggattatgctgataaagtgataagtgtgcttgtgatgagcaggtgtgtgatatgccagctcaagtacaagataggggagaggcaaatgaatctgccgtgcaagcatgtgtatcattctgaatgcatttccaaatggctaagcatca

SEQ ID NO: 74649 - DNA, 574 bp, Arabidopsis thaliana landsberg
gaacctgcccgccggcagcagcacctgggccaagcccggtgtttacgccacggagccaagcccgcagaactgcggcaacagcacgcaaacgtctacacgctttctgaaagacggcagcttcctggcgttgcggaatatcagcctgagctacgaactgccgcagccgttcgttagccgcctcaacatgaacggcattactgttggcttcacggcagacaatgtgcataccttcaccaatttcctgggacaggacccgcagacaaccatcacgcccggctcccaggtgatgccgggggtatcggatttcaagtacccgaacaaccgccagtacctgttcaacattaatttcagattttaaaccgcctgtcatgagatcagctattatattaatgatattcctgccattgctgttatggcaaaccggttgtatgaaagacgtaaatcccagcgatgcgctcaccacggaaaccattaccggatcgccggatggcctgaagaacgcggtgaacggtgcttattccctgttgaaggaccacgttcccttttacggcaccaccgatgataacaatatgta

SEQ ID NO: 74650 - DNA, 614 bp, Arabidopsis thaliana landsberg
taagccaattcaaatcatttttcatcaaagaacccctctaaaatataaacatcttaacaaaatcacctgccaaaggatgacagagttggaagtcctgccagagctgggctcagcctcaaacttgattggctctgcgcttttgggtggattgtaagggaaagtgacagtctcgtaggtcgatttcagaggttccttctcgccggtaggtttaggagcattggcatcaatagtagcaggaggaggcttaggttgaagaaaggcgaataggttggtgatgaaaggaggtaactttatgggaggagatgatgaatcagagccattagaacgatctacttgagcttcttcagccatttttcctccaccgagacggattttgagtttagggttttgaattgaatcggcgtggattaggtaggctttacaattgtctggcggacacttctctccacttctctccttctttgcttacgacacgtgtcacacgtgtcttttcaagtttttggttctattaacctctaatgggcctaaagccttatttggcccataataataatcaccgtcttcagtttggtttttgcttgttggttttatctaaactccattggaaccaaaaa

SEQ ID NO: 74651 - DNA, 180 bp, Arabidopsis thaliana landsberg
agttaggagtagataaaattagaatcttaaagtaccaaaaagttttggtctaactactatccgaatcactttttaaaaccaacaataaatcttactaagtctagccaatgattaggtaaagaaagcttgtgaaaattttagataaagcaaatgtggaatccttaggattcccctttcata

SEQ ID NO: 74652 - DNA, 484 bp, Arabidopsis thaliana landsberg
ctcctaaatccttccttgagctattgcaagaggtattttacttactaactattttgcggctaggctagggctgggaagtttggttctaagaatcgcttgttttaggcaaatttggagtctttaccgtcgcatgtaccgacttacttgaaagcagcagttggacctccgagttcgtcttctcgtcgctatttttgctcggtttgtggttacattgcaggatacaattggtgcttatgtgggatgaggttttgttctattcgttgtcaaaatattcacaaggatactcgttgtcagaaatttgttgcataggaaaggagtgcgaaaacagatgttacatatttttcaaaatgtattggaaacatcatcaatcaatcaatctccatgttcctggcctgaatatgagcgtaaaatgaagatagctaagaaatgcagctatcttgctctgaaatgttattatggttaaagatcaaacattggacatttg

SEQ ID NO: 74653 - DNA, 336 bp, Arabidopsis thaliana landsberg
aaccggtgtcggttttaaagggagcatttaaaaattcttcgattcggtgtacgtcttagaaaaacgcttgtcgtgctgcagttcaccatctccattgccctgatggttggaaccggtattgtatatcagcagatgaattacattttcacaaaagatcttggatacaatcgtgaccaggttgttaccatactgcaaaatggcgcggctgtacaaaaaggaacgactttcaggaacgagttattgaaaaatcctggaatcatttcagcgggtacatcttcgaacaccatgggccaacaacttggcagaaccaatattattccggaaggttcaacgagt

SEQ ID NO: 74654 - DNA, 290 bp, Arabidopsis thaliana landsberg
aaaacaacaagggtgaaccaagaaaggcgatcaagcatgcatatgagctaggaattaacgaacttttaaccactaacaacactgacacagaacgccggacagcatcaaaagcacaagaggggaaaggatccaaagctcaacaaccaaacagggcaaccacagagaacaccaataccaagacgaaacagatggcaagagcacaccaacaagcgaaaaagaacaacgacacggaaccagagatgcaaaactcgctgagaagctaaccaccaaagacggaataatgtccggac

SEQ ID NO: 74655 - DNA, 537 bp, Arabidopsis thaliana landsberg
  unsure (1)..(537): unsure at all n locations
aaggccttttagttactcgatcgaaggagtttaccttttaatcttcaccgactggctatttttnntaataacagcccgactactncgggcaggaggtggggtattgttatgccactgggtctgaaacctgatctgcggaacgctttacttttttaatcaacttaagcacgcgctcacgtacatcatcgctaacaccggccacttctgatttaaagacttcctgcagggcgtcaagttcctctaaggatttctccgtccatttggtgaatttattctttaaatctctggtggaatcggctaactgcttgcgggtttcttcgcctgactgcggtgccagcatcaggcctacaacagctcctgcgacaataccggaaatcgttcccaccaaaatatgttttgcactcataatgaatagttttaaatgtgataaataaggattaatcaataagattcaacaaccttgccaagatcatcaaactcaatgtaagataagacaatcaagcgactataccaattaattcttcttttatcctgaaa

SEQ ID NO: 74656 - DNA, 591 bp, Arabidopsis thaliana landsberg
caaactatctatcgttaagaattttccgaaataattattcacattttagaagatttttttgttttgtttcgagtcggttttggttattttcttacataaaatacacagaataattcgaaccataatattgaattgttattttggttcacgtacgtttaccgttggagactttatagctcttcgtttatgcttgtacggatcaataatcatgcatacttaagtatttggaaagaagaagaaaaataaaagattttatcgcaacataaatagtaacgtgaattggcataaatgaatcgcaacaaacaggtcgcaatcacaatgataaaaatatctactggcactacttcataaggaaggatcttgtaagaatattactttcgttttattcggataagcagaagatattcgttttttttctggctcgttttttcacctattcaagttttatgtcaatttggttacgtactccaaattgtggcacttgtaatttgacactctttatcaaagttatcacttatcttacttgccaacgaaactagtatcagtattcagagccattaatacaaatcaatcaaattttagaggaagact

SEQ ID NO: 74657 - DNA, 327 bp, Arabidopsis thaliana landsberg
tcaggcgagctaaggaagccagggtagagagggtctgttctattttttctgaggtttcaagcgaatggcacagacatggtctctcaggaattttgtgctcacagacactgggaaactaaagcatggacaagagggtgtggacactagaaggaacaatgtttatcactagtgccaccactaccactaccacaattacaggtcccaaggagatcaccacatgccacacaaacacatgcagtagacagttatgtgtgattggacagttagggaacagagagaagacaatggggtatggaccaaatcatacggttctgggtagagtaaagg

SEQ ID NO: 74658 - DNA, 499 bp, Arabidopsis thaliana landsberg
  unsure (1)..(499): unsure at all n locations
ctcctttcggcttgggcttggcagccagctcggctgcgttgaaagaagtatagaccattgttttccatagaacaanactctatttttgaaacatataagtgtaaaatatacatctatgagactaccactcgtcatgctggaaatattcgacgccatcgtgcaggcgggcagcctgcgcggcgcggccaacaccctgcagctcaaggcctctacggtcagtcaccagctcaagtcgctggaagcccgcgtgggcgcgccgctgttcctgcgcaccacccggtcgctcaccctgaccgacgcggggcgcgcactcagccagggtaccgcgcccgcgttcgaacaactggtccaggccatgcagaacgcccgcgacacgggcggcagcacgcgcgggcaactgcgcatcaccatgcccgaatacgcctaccacacggtgctcgccccatacgtcgcatcgttccgcgcggcctggccggacatcgagctcgagctcatcatt

SEQ ID NO: 74659 - DNA, 214 bp, Arabidopsis thaliana landsberg
aaacccacatatctagggttttgttggtcttcgaactatctgatgcttatgggcgaacctgtgcgggctggtctgcaccctgatcaccgtttcctctgtcctaaggcttcagtttgtctcaggaacgacgaccatgacccccatcgtgttctccacatatcgatagatttcggagcgcgaacctcgcttgcctgtattcaggtgcatatatggt

SEQ ID NO: 74660 - DNA, 442 bp, Arabidopsis thaliana landsberg
tgatgcgcgcgggctggcgttcgggaatcggcttcgggcaggcggtctggagcatcggcaacctcgcggttcggttcgaaggagtcgcgatgcgcggcgcgccgcagacggtggtgcaccgggcgcgctttacataaggtacgtcgacttgagctggtaatagccttgcagcgcttcggtgcccagctcgcggccgatgccgctggccttgaagccgtcggacggtgagcccactgtaggggcgtagccgttgatgccgatcgtgccggtggggatctagtaagcaaccgccatcgtgcgtgcttaatccttgctccagaccgtgccgacgagaccaaacgcgctgtcgttggcgagccgcacggggaccgcctgattgtcgtactggatgatcgcaagtaccggtccggacaccttttgctgtgcgagctgcgatgcgttg

SEQ ID NO: 74661 - DNA, 551 bp, Arabidopsis thaliana landsberg
ccttatgattgacaccaatctattgaactcttttgcaggcgtgaaagtgtacgagctgctcttgttatttttctttttacttggagtcctctccgatgaattgtacttagagactcttggtttagtactactctttggttgtgaatctttggatttcttcttcacagactgttacagatcaagaacaatagaaaaaaaagtcagagagaaagaaaactcttaatcaccatctcttaataatacacatgtataaatatatacctttagtataggcttctcctcatccacttgttcttcagctgtgcggccattgatctctgactcagccatgccacagttctctttctcatcagattgtctattactaaatcggccttctttctctgcaagtaatttcaattgagcagaaacatctaaagatcctcttggaatctcaagatccggttttgagaccatccaatctttcttttctccttcattgatatcttcttcttgaactggagacttctctggttggggtttagggatttgctgctgaagcaagagtgcct

SEQ ID NO: 74662 - DNA, 572 bp, Arabidopsis thaliana landsberg
  unsure (1)..(572): unsure at all n locations
accagccggaaacggcgctaaaggaaagtcagcgtcgagccgccttatttaccagttggtgcaagcgcgacacctggttgagttgagaccgaagctctccaccttctcatgtgcaaagatccacgcgaggtcaatttcgtggagggcccgaccaaggagatcgcaagccttgttgatagttgcgccgggcattcccttccggtgatcaatctgcaagacaacaaaagtaaatggcgtattaaacctcgggattgggttaactgggccaagtctaaaggtcacccaataccaacagcgttagatgatgtgttattcccgaagccggtattcaccgccagtattaccaaagctaccgaaaaacgagagcagaaaaagcgggatcgccagcggttcctcaagaccttcgccttccaaattgctgaacgcgcaagggagaaaggctttgcttgggacgcgaactccattcccgtgaccaagtccgaattcctggacgcgttctatctgcaatatccacaagtcgcggaannnnnnnnnnnnnnnnncgaccatgacattgccgagataagcttaaa

SEQ ID NO: 74663 - DNA, 457 bp, Arabidopsis thaliana landsberg
aacccacacagtagaagaaaagaatggactcttactggttatgctgtgtactccacattacttttatatcacacacacaacctttttagtgtgcagaataaaagaatgttataagcaggtcaagttattgaagggactaagttaaacttccttatgcttttctcccaactcttttaagctcctgcagtgtgacagtccacggacagaatcacaaagcctccttcagcagagttcgtccccctttagaggacatcccacccaatctccaggatacagttatcgaactactgcactgagacctggaaaccctccctctaacggtttttaaaaatcctccctctcttccacgtcctaccccagccctgcccaccctgtgtctacagactcgtgggccccatttacggggactccagggtattacagcagccagccgcattctggaaacagcactggcagc

SEQ ID NO: 74664 - DNA, 531 bp, Arabidopsis thaliana landsberg
gaagcaccaccgaacaaaaccggtagtgagatatcttgatttgtacttttattctttaccttttgattcagacggatcaggaagcatctgcaaaacgtttagatgatgagacagatgtcaggattacgaaccttaaggaatctagttcaaaggtctccaaggatattgtcaagatgctcatcacgtatgtcaccactactgcagcatgattctcactacaccgccctcatcgtatcttattctcctgataataaaactgttatgattcttcagctctagttttttggtccgctatttctaatacaggcaaatacatagtccattgggagagaaactcataaatatatggaaactaaaacaaacattagatgaaagtatcattgtaaaaaaaaaaggaggggatcgaaaacgaaactaagtacacaagtgatgaattgtaaacataagtacaaaagagaacatgcatgcatgataaatgcaatgtttggtaaatttgtatcatattcgtactctagagcattatgtggacat

SEQ ID NO: 74665 - DNA, 547 bp, Arabidopsis thaliana landsberg
ttcaatgatattggtactcccacgactgagagccggcattttatcgttctaccttcttcatgcgtgatcatgggaatggggttgttttccaagactagctcaccaatatagtctgtcgtttttgctcctgtgccaaagacctgttgcgaaagttttctgcctgttgcatcgtaggtgtacacaatatagtcagtagcgcctttcgaaacctgtgagggcaaattcaggtgattgtattgaatggctgtgatggctttgttttgatcggtcagcatactgccattacgatcgtaggtatactcgttcgtagtttcaattacttctttaaatccctgttcatcggtgttgttcggcacggcatcattcaccgccgtaagtctgttgccggcgagcgtataggtgaggtcgtccatcaacccaaaagttcctgtcttgtcctttctaccgtatcgccaaagatttagaatatttccgttcatatcgtaaccgggtctcgatccaccatcaccgatcttctcattgtatctgccattctgcgtagcgttta

SEQ ID NO: 74666 - DNA, 525 bp, Arabidopsis thaliana landsberg
  unsure (1)..(525): unsure at all n locations
gggtagaggnccaaccgcaacggaagctctttccgccgtttcataccaaattccataaagattccttttttcaatcttttgatatcgggaaaataccctccactgatgattgacgtcatcacttcagaccttttttatttaagagaatgatcgcagcaggtgcgcaggttagcagacctaatatttttctacgtcgcgataaaattctaagtgaataaatggtatagcttttcatatgtgatttaaaaaataaagtatcttttgcgttatcagatttatattaacaccgtatgataaatgtatatatatatatccgtatgatatttgttaaataagaaagataaaacattttatctttgagataaatatataaactgttatccctagattttgcaaaataagtgaacttaatgttattgctactcttagagttattgatgatgaaattgtatcacataaatcacttaagcggaaaagtgaaaagaaaatgtcttagtatttgttaatctacgatatacactttag

SEQ ID NO: 74667 - DNA, 557 bp, Arabidopsis thaliana landsberg
aacgaagggcgttggtgtcgaccgtcccgatgggctgggagaggggttgcggtttcagggcgaaggcacccatgcgagggttgaggggatcagagaggcgttgcccgacttggtgatcgaactcgtttcggctggcggacaccgtatggaggcgtcgtttctccagcgagtcgcaatgagcagctactcggatgcgcacgagacagtcgagatacccatcatcgccgcggcagttcaccggctgatgctgccccggcagtctcaaatctgggctgtcctgcggcaagacgattccatccaaagaatgaactacagtctggcggcgacattcctcggccggatgtgtctgtctggcgatgtcctgggcctcgacgaaaaccaactctccgtcgtgaaggatgcaatcaagctttaccagatagccgttccagctatcaagagcggcaagagtcgaatcaaaggggatatcggggccagctggcgccacccaagaggctggcaaggcgtggtttggaccacggaagacgagggacttgtcgtcatacacactttcgagc

SEQ ID NO: 74668 - DNA, 475 bp, Arabidopsis thaliana landsberg
taaagaacatatctacctctaacactggaatccaattttctttatacggtttatatcaagtattgattgtttttgtccaaaacaaaaaccaagtattaattgatatagctatagtacactcaaattttaatttgctcactataattctgatattactttgaatagaaattcaaaattatctaatcacaaagttcagtttatttataatatggaagctttgagcaaaataatgtaaatataattataaaaaataattagaaataatttaggacaactgaaaaaaaaatggatttcggtctataagtttctattatatatcaaaggaagtactttttttttttgataaaccctaaatatcaaaagtacttttcgttattgtcaatatatgtttaattacttattttcgagatgttatcatacattttctctcagtaatctttgttatcaattgataattatatctaaatctctattt

SEQ ID NO: 74669 - DNA, 403 bp, Arabidopsis thaliana landsberg
  unsure (1)..(403): unsure at all n locations
ccggtcgaagctcccatcttggccaggttctcggtgatctgcagctcgctgcgctccagttcgcaacgagtcctcgatgccggcaggggtctgttccaagccgcgacgacgagtctggtacagggcggtttcggtctcgatcagctcgggtgaatcgcgcaggctgtcgggaaagctcagcggcttgccggtaacttcggcgcgcaggcgcgccacactggccgtggcagcgcgatactttgcctcgctttcgcccacgctggaggcggtcttggtcggatcgagctgggcgaggacctggccgcgctcgaccaggtcgacctcggccacgttcnnnnnnnnnnnnnnnnnnnnnnnnnnnnnnnnnnnnnnnnnnnnnnnnnnnnnnnnnnncaccttgccg

SEQ ID NO: 74670 - DNA, 442 bp, Arabidopsis thaliana landsberg
caggtgatgctcgatctggtgattgaggccgccggtgtaccagttcagcaatccgctggcggtgttaagttcgccgtggtgcgcatctgatgcgcggtccaggctttgtgaatggtcggcggcgagccttgcggtgcgggaaaggccacggattccacctgatgcgccatgccgaacaccagcgccagcgccagacccaacgtcacttcataaaccaagaagccgaccagcacctgccaagccggaaacagcgccagcggcaggcccacaaaaaccgcgaaatagaatgccttggtgagccagaactcgatcttctcatccgccgacattgcggggatgcgctgatgctcgatgatgcgcagggtgaaatactgaacgaagtccttcacgaacaccatctcgatggcgttgatggcgtatagcacgaacactaacagatgct

SEQ ID NO: 74671 - DNA, 360 bp, Arabidopsis thaliana landsberg
  unsure (1)..(360): unsure at all n locations
agaggatcatgtggatgctgacactttatgatcaattttaccacatgctacattggacgggactaagaaccaatgtgagtccctgtattttttagttgcacatagcgaatgtaaaacttgtgaaaccannnnnnnnnnnnnnnnntggtataagtaaatggctttattgatactgaaatactaggactatatgaaatatatgcaattgagtcggaaaatttcgtgtttctttttttgctggcggcgcgagggacggatcaataaccaattgttcgggaatctatttactccgggaataccgatcaaaacctactctgaaaaactgctggctagctcttcaaggcgatgatggtcgcttaa

SEQ ID NO: 74672 - DNA, 511 bp, Arabidopsis thaliana landsberg
gcctcgccttgagcaatcagtccgaccgctgccggttttgagatcccagatcttgactcggcatacggccgggctcacgactcgagtatcgtcaaactgcaaactagtaacactgttgtcatgggccgcaagacgatgaatgggacacatattttccagcgaccaaactctgacagatccatcagatccgccagtgactagagtgtctccgcgcatctggagctggccaacaagtgaggtatgcccttgaagaatggcaaggcactcgctgcaacaacatgtcagtttgccaccatacatcctaggagctatacaaacttacccagaggtcgggtcccaaatcctgacgttggtgtcgagactacctgtgacgactctcttgccatcaaaggcgatagcatagatctggctgaaatgaccctgcaaagtttgaagacagcggccttcagagatgctccatacccgagcaaaggtatcgtagctaccggatacgacaatgtcacccttgatc

SEQ ID NO: 74673 - DNA, 567 bp, Arabidopsis thaliana landsberg
gcccccgatctcttagtcctcgccttcttccatcgcctttgcctttttctagtcgttcgtcgtcttcagccgcaagtcccttggcaccgtccgatttcccacgtgtgccgtgcatggcgcgaacctcttctgtcctcgttggaccccgtatttgcaacgacgcgacttgactaaataattgtgcaacaaatgccttgggaattatactaacagtattgcttatagtgaacctcaatcacttccgtctgttgcgagtcgtcggccgaggtgcctttggaaaggttcgaatcgtcgaacgcaaggacaccaatctgtcctttgccctcaaatacatccgtaaagatgaaggtaggtctctgctcctacgtgttgcgtcctactgctggccttggacgacgcccctgggccgtactactcgtatctgcgccggcaactgtctgcgtggcctttctgtgtggtgcaatgtctatagtcttcaagctgagctaatcgcgatgctatttacacagtcgtacgatccgagagcgtccgtaacatcatccgtgagcgccgaatgctcgaatacgt

SEQ ID NO: 74674 - DNA, 445 bp, Arabidopsis thaliana landsberg
ccgacccagcgcggaacgcaaattcacgacgaactttgcgttaagtcgtaaaaaatgtcgcgaactcgtccgggggcaggtgcgattctggccgggcatcaattctttttggcagcagctttcgcgctctgtttcgcaggcgcttgcgcgctgactttcttcgtttgtggagcagctgcagcgttcgatgattgcgactgcttggcagcttctgctttcggcttgctgccagacgacgaactggaatcagcagccttggaattcttagaagaagttgctgtttgcgacgccggctttgcgccagatttgtttgtcgattctgaagaagggcttgcgctgggattcccaacgccagatccagatgcaggcttagcattcgactctgtcttacaatacgaggttgatgtaactgtttgagcattgacggctttcttttccacagcgc

SEQ ID NO: 74675 - DNA, 377 bp, Arabidopsis thaliana landsberg
  unsure (1)..(377): unsure at all n locations
aaaagatcatatagggtctagggacaggccccactttttttttaacgcccttgtttttcttctcagtggggggattttacaaagacttgctaacgaaaagaaaccatggggtactctcacacttaaagatctctctttatctgacagctgtgtgcacatgaacgtaatgaccgatttcttctcgttatggaacaaaaagaaaagctcctaactggtttggtccttttgagggaaaatttaccaaacgcgctaannnnnnnnnnnnnnnnnnnnnnnnatcatcttcaccacggtagacaccctgattaaggtctgactcgatgatgcttgcattagaannnnnnnnnnnnnnnnnnnnnnnnccagaaacaccctct

SEQ ID NO: 74676 - DNA, 578 bp, Arabidopsis thaliana landsberg
  unsure (1)..(578): unsure at all n locations
ggaggaatgtccttgatcttttgttcatgctttcttgcttcgcagttatgatctttgttagaagaacatctatagtaactcctgttaccatcatcatacaccaattagtatgagtgatcgggatagaaataattatgatgaaatatgattagctatactatttcttacctttggtgattagatttttttatactcttttgaccatatttcctccaaagatacccgtcgtagtaaatcggatccggtgaatcgtccctccaattctcacttgaatttgtactatcaatctttctgcaaacatgagtattatcaaaatattagcattaaaatcaacatatactcctaagaaaaaaaatacttatattaagaattgtggtttcatttggaaaaacaaaaacaaactcaaaaaagaaaacaaactcataagtgtataccttttcttggaggggctcccctgtggaggaggagaagaatccctagtagattaatcaganaactgatcatctttcggttctggttagcagataagattgaatggcattggataactttcacgatcgattagcagatcataactg

SEQ ID NO: 74677 - DNA, 585 bp, Arabidopsis thaliana landsberg
  unsure (1)..(585): unsure at all n locations
gaccgaactttgtttttttctgcttaggtcatttatgattgtataaattttagacccgtgatatataaaatgtacttaacgaagctcatctacgtaaaacaaaacctaaagttttttcattcgttgcgctacacgatacgtacactataaaataatctatgctcacagcctcacatgataaagacatgaaaccaaccgtcagagtcggcggctatgacaaaaacaaagctaaactatgcaagtagagttccgatccattatttgtacaatgtgtagctttaaaaattgactgttggatttttcaggaaagtctagtcctttaaaataataatttgttaacatactttaaaaaaaaagttttgatatggctatatatagtatatcaacnnnnnnnnnnnnnnnnnnnnnnnnnnnnnnnnnnnnnnnnnnnnnnnnnnnnnnnnnnnnnnnnnnnnnnnnnnnnnnnnnnnnnnnnnnnnnnnnnnnnnnnnnnnnnnnngttccactttattgacaaaaacttgttccatantttattttatttttgggaaaatatcttgatgtcaccttttggagttcttaata

SEQ ID NO: 74678 - DNA, 114 bp, Arabidopsis thaliana landsberg
  unsure (1)..(114): unsure at all n locations
acggcaaagacnnnangganncaggcacagaagaggaaggaccaagacacnccctccggccaaggcaagcnnccggaccagaagcaacacncccggaagcagaacgggcccgag

SEQ ID NO: 74679 - DNA, 539 bp, Arabidopsis thaliana landsberg
aggaagggctcgaccaggcggtccgaagcgatcatgttccccttgggcgcgtagcccgacgtcaagcgcgttgggcgccgtgatgatgtcgggttgatagccgtaacgctgcgaaccgaaccagtgtccgagacgaccgaaggcgcacatcacttcgtcggagaccagtaggactccgtagcggtcgcagatctcacgcacccgttcgaagtagccgggtggcggggggaagcacccgccggcgttctgcaccggctcgaggaataccgccgccaccgtgttcggtccctcgcgcaggatggcccgctcgatctcgtcggcggcccaacggccgaaggccacctcatcatcggcgaagaggggtgcccggtagaagttggtgttggtcaccttgaccgcgccgggtaccaggggctcgaagggcgtcttgaggtcgggaataccggtgatggagagggcgcccatggtcgtgccgtgatacgcgatgtagcggctgatgaccttgatccgttgggctcaccgaccagccggagtactgg

SEQ ID NO: 74680 - DNA, 593 bp, Arabidopsis thaliana landsberg
gatcctatagatacctaagattcagaatagatcgattaacgattttactctggagaatcatcataaaacactagagcatgccactcaagaggtgactgcattgcatgtggcaaataggaaagatgacgccctttacgtaaacctggagccaccccatcacactacaaactgtgaactacccaaccggaatgccaaattgatggctcatggcgtctaaccgacccctttagtgaacatgggtagattgtcatggatggagagacacctctctttataggattaagaagctcccgtccggggttatcccctcttcaagccgaattggttaccttgctttggaccatggagtgtctcatcacgtcttcgaagataaattttagctttgtcttagattgtttgagttaatatccattctacataatctaccagagtggcttacatttgtagtagaagtttaacactaaaaaacttttgaaacttcaggccgataacttaataaaaaggtgactttgaccggaaaaaaagaggtaagatctaagtggcacagaaaactccatctcttatgaaaattcttcctaatttatataatcaga

SEQ ID NO: 74681 - DNA, 537 bp, Arabidopsis thaliana landsberg
ttgcctgcgccagcgccaatctcgagcaggacggtgggaccggcggtcgcccgcgtgacatcgcggagcattgggaatttctggaacaaccatttccggttcttgaagaagttcgccgtgttggccgcgtagaagcggtcccaccacttctcgggagcagcgttgtacttgcgtcggtcttcttcggagacgggcgattcccgctgcttctcgaactgcgactgcatgaactccttgtaggcatcgtcggtctcgacgtggtcccaagcattgaactcgaagatgtcgtccccctcagcgaggtagcgggagccaaactggaacgggtcgctgcgcttaaggttgttttcggggtcgtgtgggcggttctgcgacacccgaacgggatcgaaggcgcgtgacgctcgttcggtctcctggatcgtgttgggcgcaacgggatcgtcgacggtcaccaccccgcgcaagtgttccatgcctttggacagctgctgccgctttgggccggcaggcttgctttcggaatcaggcgtgctt

SEQ ID NO: 74682 - DNA, 593 bp, Arabidopsis thaliana landsberg
ctgatactgatccttcttaagcagagtatttgtgacaagatatataacttatatgactttaaaaagatttgttgaaatgaacccaggtgcaaatagagcaaggcagagaggtcgatgatctgacaactatttggccactaccgatgcttcaaaggtatcatatgcgtacagagatcatgagatccataatccaggagagttacaattattccttgcacataaatccgagatgacaaatgtgcttgatcttagctgataatacattcatggttgctactaacttcttacatcctgacctttgcagatacattcagtttgtgaaaaaaaacttcagacctgtcctatcaaaggaagcagaagaaattatttcaagttattatcgactacaaagaagatcttcaactcataatgcaggtatctcctaagaaatacttcgttgatctgcagatgctagtttggtattaacatggggtgagggagctgactatagtggaccagtgtccagatttgaatcttattatttcatggctgagacttcttattccttacttatatagaaaattgctctgaaaccccttcatattggaggaact

SEQ ID NO: 74683 - DNA, 128 bp, Arabidopsis thaliana landsberg
cattgttatcagatagaagatgcattgaaattgactagtgtggtcaacttataaacgatcagttgtaacatttgcgagtacagtcaagtttcgggaatgggggtgacacatgctcacataataggtgg

SEQ ID NO: 74684 - DNA, 584 bp, Arabidopsis thaliana landsberg
aggccccgggcgaatgattatccattacgccaatctggaccaattcgatgaattggtgaagcggatggacctcacctttgactaaagcaaatcctgattatttagcccacttgtcaatgttccacgtggaacattgacattttttttggctagcctgactttccaagcggacacaagagccgcgcacgaagtaagcggtccaagtggacataagccgcgtacgcaataagcggtccggtctcaactgcttactgcgtgcgcggctccttatgtgcggtttctttatgccagacggcccagttcgctgaaataaaagagcaggcgaataatcattatgggatgaaataatatgttttataaataccaatataaagagaggatcacagcaggccttcgattccctatgataatcaggtgaaatcgcccattcccggccgatatgggaatgccgggcgacgtggcagaataaagagcaacccatcgcctcaggctaaaagatgagaagtcgtcaaattcagtttcggatgatggcatgtcaggccatgttggcggcacgcatatttgttgggtatgggctgacctat

SEQ ID NO: 74685 - DNA, 489 bp, Arabidopsis thaliana landsberg
ggattgtaggttaagctttccattttagagcttctttgacattctatcaaagagtatagttactggcaatgggtgatacatggcatttgagatccctacgaatatattatattatcttattaacgaatccagtgtgcgacaaaaaaaagaaggatatagatgaaattctattataatatagttatttaatttatataataattttcgttttggtccccaacgaaaactcacaatagtattttctagagtcaaactattcctttggaatacagacaaaagtgttacaacttctcaaattgtctttttaaagtttcaagaatataacctttccatctttaacaaacaatattatatttgaaataaaccaagaaaaaacaaaattctatatatatatatatacagaaattttttttttgctatagaaacacttgaacaaagcaaaaaaaaaacccaacattttaatattatataaaaaaaatagatttgaaa

SEQ ID NO: 74686 - DNA, 393 bp, Arabidopsis thaliana landsberg
cgggagagtaaccagcaccttactcattttaaatgagagagctggacatgaagatactagataatggacaagagccagctagagaatgcttcagctcttgtgtacagcatgcatagggggagagggaatcaataacctagcctgagctgcgatcgcaagacgatgagctagactgacgcaaaagtatggagactgagcatcggatgcagaacaggacgtaatggctaatttaggatagagacaagaaaggggacaatgcaaggagaactccccgacagcgagcacagaaacctacaaccgagggctgtggaagagaccaaagaccaatcacatgaggtcacatgaccaccacacgcagctgaagcccatgagggagcttatgaccataatgcg

SEQ ID NO: 74687 - DNA, 463 bp, Arabidopsis thaliana landsberg
agcgtgcgctcctgcgcctgggcgatgccgcgcgagcgcaggtagaacagcgcgcgctcgtcgagctggtccacggtggcaccgtgcgccgccttcaccgcgtcggtgtagatctccagctccggcttggtatcgatctcggcctgcgtcgagagcagcaggttcttgttgctgagcgaggcattggtgccgtcggcgccggtgttcaccacgatcgcgccgcggaacacgccacggccgcggtcactggcgacaccgcgccaggtcgacgcggacacggtgttgcgcgcctggtgacggatcgccagttgggtgtcgaggtgctggcggccgtccggcaggaatgcaccgtgggtgtggaaaccggccgcgtcgccgacaagcttcgcacgcacgtggtggcgggccagtgtggcgcccagctacagcacgtgcaggtgcgcctgcgcgccggcgtacaggc

SEQ ID NO: 74688 - DNA, 609 bp, Arabidopsis thaliana landsberg
gacggcgggagatttacaaacctcgccgcgagcgttgagttgcacgggaatcaagggagttcacgatgaagatcaatcagtggttgtttgcctcgatgttgctggccatgccggtgtttgccgccgaagctgtgccggatgcagccatcagcaatgacggcaccaagccgccgtatggcgccgcgcagcatgaggtctgcaaggcggatcccgggaagtgcagggctgcgatgcaggcgcgccgtgaagcgtgcaaggcggatccggaaaaatgccgccaggaacgcatcgcgcagcacgaaaaaatgtgcgcgcagaatccggaaaagtgccgggagatgaaggcccgcatggaacaacgtcgggccgaatgcaaggccgatccggagaaatgccggcagcagcatcagacgcgcgccgacgggtatttcaggaaaaccgatgccgacggcaatggcaccttgtcacgcgccgaggccgaaaagggcatgccgcgactggtccgtcatttcgatgcaattgacaccaacaaggacggtcagttgtcgcgcgacgaactgagcgcggcgcgcaaggcgcactggagtgtgcaccggaatgaatcggcca

SEQ ID NO: 74689 - DNA, 609 bp, Arabidopsis thaliana landsberg
cggatgaacctccgacaccgccttgatctccaggcgtttttgggtgtgcgtccaggtcgccgtcaggttgcgcgccgccacggggcgcggctcggcctcgtaggacgagagcagggccgggccgccgaaaccctggagggtcgcggcgagcttccaggccaggtcggtcgcgtcgccgacgccggtgttcatgccgtaaccgccggtggccacgttctggtgcacggcgtcgccggccagcagcacccgcccctggccgtaccgctcggccagcagctggtgcggggtccaggggttggcgagcaggacctcgaacgcgaacgggcgcccggcgaagcgctcgacttgggcgcgggggtccatcccctcctgggcgaaggcgaagggcgagtgcagggtccagatgtcctcgtcgttctgggccaccagcccgccgtagaggccgctgcggtagtgccaggcgatcccccagcgctgcagcagctcgcgcgcgtcggagcggaagtgcaccaggtagcgctgcaacaccttggcctggccttcgaggccgatgtcgaggccggcgcgcacgcggttgcgccccccgtcgcagaccaccaggtagtcgca

SEQ ID NO: 74690 - DNA, 235 bp, Arabidopsis thaliana landsberg
aaagcgttacgttcctatattatggaatttaagatttatttggaatcatcccctcaaaccggagagtggctatatgcagtttttaacattttcaaatcatcaaagatatcagcttctgatagtggttttcatttacccttgttttgcatataacagatttatatattacctaggactgtgcttctatttgtcgtgtggaactgtcctatccctgtaacctctacagtctgttgag

SEQ ID NO: 74691 - DNA, 513 bp, Arabidopsis thaliana landsberg
gagtgattattggattttctcttcaaattgggttataaaattttgagaatctgagtcttgtgatgggctttagagacaatgtagaacaaagcagttacataaatggcccacatttttgtcagtaaatttatgaatggggttttaaatgtttctacataataacatctatcagagttttgtttgtctaaattagaggaggataggtccatcttcttcttttctctttcagaataacatttcaatcttataggtttctcttcttttgttttgttgcccaggtaaatttatcgaaagtaagtagattcctaatggcagctaccaatcattcatctggtaaacctggaggttcgttgaatatttcttgtttttataccattctttgctattttgtactgggaatccactttctaagcttgtttggggattctgcataacttgaaatggatgattaagaactggataagggttataaagccttggagatcgcaaccattgctttgtttttgagatata

SEQ ID NO: 74692 - DNA, 510 bp, Arabidopsis thaliana landsberg
acctcatcaatgtggtgcaatttaataagaacttaacattttgtttttaagtagctcaacagaaaaacaacaagggtgtgggtagggttaaaaagagcttttgtggaatcctctactaggaagacctcacttgacagaatccagacaaggattgactatctccttgcttgtctgcatgcattataacaataaggagaaaacaaactcatgtgaaacctaactctgttcgtgtatgtttcatgggggatagaaattcataaatctctttatacatataaaaatagaactaactatacaatccgaagccaggataatgagcaactaagtttttctctaacgcttcaaatgtaaattttccaaaaacaacagatgtttttgttcaaaagtcaattgggtgccaagaaaattctcagaatgactatagaggctacaatcaacaagccaggatcagcatcaatggggtttcttgcggcgtacgttggccaacaccacctgtaaaataagaaatat

SEQ ID NO: 74693 - DNA, 576 bp, Arabidopsis thaliana landsberg
  unsure (1)..(576): unsure at all n locations
tgcagccgatggccgggttcaacgagatcagcggcggcgtctacgccggcgccccacccggcagccttggcattatcctctacgagctgacgatcttcgcgtgggcgctggggttgcgcgacgttccgatgaccggctccaacgactacaacggaaacttcttcgaagacaacgtcaccggcgcgatcaacacgatctatagcgacgcgatagccaacgggaccgtcagcgccaacggcgagatcaccgacgtcgtctactccggtggcggactgatcagcgcatggccgctgatgaacgtcaccaatcccgatgtggccgtgttcatcccgctgctcatatcgactctgaccgccggcaacgccaacggcttcctgtccaacgccggcgtcaccgagatcgaaggcaaccccgacgacggctggacgttggtcaccttcgacggccaccccatgccggaatatccgggactgctctccgaatggatcgtggacgtgcgcaacctggtcaccgcaccgcagaccgncgagtacgacctgacgcaggccgtcatcaacggcgatcccgacgggatcg

SEQ ID NO: 74694 - DNA, 566 bp, Arabidopsis thaliana landsberg
cactagtacaaaatatacaattttgagtataaagttttaaccaaaatgtggttggcaggtacaagagtgcgtggcacagggtgttggcgagggaggaaggaaacagaaggtctatagcttccttctacaatccgtcgtacaaggcggcgatagggccagccgcggtggcggaagaggaaggaagtgagaagaagtatccaaagtttgtgtttggagattacatggatgtttatgcaaaccagaagttcatgcctaaagagcctcgttttctagctgtaaagtctctctaaatgtactattttatttatttttacagtactatcactgttttatctacacccattatgtattttctcttaagctataaatgccaaattatatagttaaaaatttggcatctgctctccaggctttatatttttttgtttttttttgttttgccatgtgatgtatgaatctttcttgtgtgacctatgttcttagtttttgaatataaatgtgtgtgcctttatcttttgtctcttggggatgactaaaattagagggaaaaaacatcatataaatct

SEQ ID NO: 74695 - DNA, 508 bp, Arabidopsis thaliana landsberg
gccacgcgggcgcgctaggcgcgcatcacgcgctcaagcagcccgtcagggcggtagcaacgcttcgctcatgcagtccgctagggcggtagcgcaacgcttaatgaaagtagtggccccggaggatgcggcgggttgggggacttgccgcgatcgactccgaggcggggctgcgtcggggggactacgcagccggtttgagaacgtcgccgaccgccggacggttgcatgcgcacagctcgtcggtctgcagggcgtcgaccacacgcagggtgtcggccggggcgcggcccacattgaggttggtgacgtatacgtgctggacgacgttgtgcgggtcgacgactaaagtggcgcgcagggcgacgccctcgttctcgttcagcacgccgagcgcgcgggcgaacttgccgtaagttgtcggcgaactgccagatcggcaggctgctcacgtccggttgctcacggcgccagccgagcttggaatgctcggtgtcggacgagccgt

SEQ ID NO: 74696 - DNA, 577 bp, Arabidopsis thaliana landsberg
  unsure (1)..(577): unsure at all n locations
agttaaatcttgaagttgcatctgccaatagattatattaagcttcttctatctttttcatttgttcaggttgattaaaagatatcagaaggacaagtagttccaagtgattcattggaggtactgtgtttaaaggcttttggtgttcatcttctttgacattatctgttgcttaacaaatatcttcaaaatctgttgaattaggacaaattgaatttagggctttctcgcaaaggaactagatccaagagaagtgctagaggtggaactcgtcgagcgaatggagatgaaaaagtaataactgcaaatgaagggctgtctgaaagtacagatgcagagactgcatcagggtctacaaggaagagagggtggaaaccaaaatctctgatgaatcctgaggaaggctattcatttaagacgtcttcaagcaagaaggtgcaggaaaaagaacttggggattcatcacttggaaaggtggctgccaagaaagtgcctttgccttctaaagttggtcaaacgaaatcagtctgttgtatttctctctcatcctctngtagggctaggacagggtcacgta

SEQ ID NO: 74697 - DNA, 569 bp, Arabidopsis thaliana landsberg
tgttttgaaaccacggtaatccccccatttttgaagcggcctgagagtagaggctatgcggccagggcctgtttctgttttggcgtgatgccgccgatggccatgttggggcgctcgtgattataggtccatagccaacgggttgcgtagtcctgcacttcttcgatgctgtcgaacaggtagtgtgccagccagtcgtaacgcaccgtccggttgtagcgctcgatgtaggcattctgctgcggcttgccaggttgaatgaactcgacgtgaatgccacgccgatttgcccacgccattagagctgcactgacgtattccgggccattgtcacaacgtatccgatccggcctgccgcgccattcgatgatgcgttcgagcgaacggatcacgcgctcggacggaagggagaaatccacttcaatgtccaagccttcccggttgaagtcgtcgatcacgttgaacagccggatgctgcgaccatcggataactggtcgtgcatgaaatccattgaccatacctggttgagtgtcgttggcttcgacagcggctctggcttctcgcgtac

SEQ ID NO: 74698 - DNA, 587 bp, Arabidopsis thaliana landsberg
atggattaagatgaagagacttcacgataaattattttttcatttatagaatcaatgggtaaatcatttagatacggtataccgtgtatacgatggaaaatatggtaacctattaactattttccttaataatatttacacaaaagacaatcttatacgtataagctgatgtattatgaataataaaaatttatttgaataataaaattttttaatctattctcttggggaaaaacaagaaaaattcaatttaatgggtttgcatttatgaaattcgagacgagtttgtaagaataaatttggtacgttgaaccttatacaaaactgcataggtttctacgtaagacaatgcatgacagcacgagacattcagtcgaggaattatttaaacattacaatatggtatttttttatttggcgtcaacgttactaatagaaacaaattaatatattcaatatacttcaaagctaactttctacgagtagacttgaagagaagatgaaactattaggtaaaatattaagtgagtgtggtggtcacatgacaatttggtgtataatgaaacaagattccccattaattaaca

SEQ ID NO: 74699 - DNA, 181 bp, Arabidopsis thaliana landsberg
ggatccatggccggcctggatatcccaggggctgtcttcttctgcatcactttctctatcgctatcgtaaccctcatctacaccctgaataagagatgcatgagcggttgatccgctgcggaaatagcggcgcgtcatggcgatcgagaggtgcctccagctgctgatggtgaaccttttt

SEQ ID NO: 74700 - DNA, 2588 bp, Arabidopsis thaliana landsberg
aagactctgtttccaatacattaataatcactgacaaatctcagaatgtaagtttttacactctcgaatccatatatatatatatatatatatatatgtagagaagaaccgaaaccacgcgcgaagacactcactcattagaacaaactctttgaacagagagtgatatctacgaccagccaaaccagtaatcaagaatatagaccagacccaaggagaatgggtaaagcaagtaagctatgaaacatgtccaaagaggataagttgtgcggaaactcgcgaaaccgcccatcaccagacaagcgatgagaatcaccaacacttctgatgagaagttccatgtcagtcctcgaacgtagacgattgctaagaacaccgagagacacagaatgttgttcattgtcactccaccacatagctgaaaacaaacaaacaccaagaaacgggttttagtataggaaatataatgggacagaaagatataagacttgtgaatatggatggacctcggagaaagttaaagaggcggttctgatctttttgcgggatgcgaagatgatggcagacacggcttcacttgaattggtggccaaaggcaaagcgatgaaggaaatgaagaaagacggaatccctgtggctgcggagaagttgttaacagtgtcgactaaaggatcagcaaatgcagctgcaatggcagctcctaacagtagcagcagagctgctttaatggtgatccattttgggtctgcaacctcaccgccttcctcatcgttctcaccattctcgttatctcccaacaaagcatgctctctctttgtttgctgcaaaacaagaaaaaggataaaactaattgcgttagattccagataagttttgtgacccaagtctgttcaaataaggtttcaacagtctttctaaccacatggaaattgtcaaggaatttcattgttcgagggccagcttcaggaccagatggagcacctcccattgcctggataagccattgcttaattccacggacaaactcttcttgatcaacttgctcatcaagagtcttatcaaaatcttggagaacttttcccacagcatcatccttgtcaaaatctatatcctcaaagctgatcccaatgataagcgcctttagttcagccgctgacaagtgtccgtcattgtttgcatcaattgtcaaaaacaacctaataaacagataaacttgagcacaaggtgaaaccgagtaaaatgcattctccatgtaaagaatatatgacttactttcgaatgacatgttcatcaggctgaccttcatcatcaagaagccttcccagagcatgttgtttcaagtgccttagtattcctgatataacatgcttgtgttttgcaaaagcaagccgtctcctttggatccatggttggaatacctagatatcatcatacaaggaaggataatctcacaaaacaagatggagaaagcaaaaaaaaaggaaacaagtctagtaaatatttttcagaaacttctgtcctgaagattttatgttacctgatatacacagtaagagatcaacataagaactgaaaggattagagcaatcaacacggacaattgtcttccagaggttgagcccaacatctgcggaagctggacaatgacgaacggaataactgatatagccattattcttgcagcatagctggtccaaatatcaacagttacaccagaatctacaaaaacagagtaaacaacaataaggaacccgcatatagtaaagcacaaatactaaattctactgtattcatcagtcccttataaaaacccatacaaacgaagaatcctgaaggtgtaaccgtataagacacttccttgttaccttttaggtgaaagcctttggtgtcttggttgtttacagcaattgaatcacgaagatcacacttgccaaccacagtacaagttccccagataacagtgagaagcataacagtggaaccagcaagcaaacccattcccacagagacttggctttgagcagttgctgcatctccagatagtccagacactgaaagccaaaagacattgtttataaccaaagaaacaccaaacacataataaataacccatcaagataacaactccacagaaaaaaaagataagattttgactaaaaagcacaaagtgacaagttatgagttcatcggttaacatcagtgtatcatcatcatcttttcacaatttggtatcacaaaacccaacaaaaattcactttttgttaatccctgtatcatcatttgattcacagaaccaatcaaatattcactttttttgctctctcaaaattcaaagaatcttcatcaaagcaaaacaaaattcgtctatttcactcaaaatgaatttcaatttcgcatttgctacataactcgcacacaagcatgacactttatagatcgaatcgaatcatacgaaacctcagcatctaaatttcgaaactttgaaaaaagaaaaaaaaaacattttgacatacccatgataagcaaagcgtcaggaagagcaccaagcatcggaagaaacaaaccaccgacaattccaggtccaagga

SEQ ID NO: 74701 - DNA, 197 bp, Arabidopsis thaliana landsberg
ctcgcggttcttaaagtctacggtgtaccgtacattgtaagtcatacgaaaattcatatcttataatgatcacttttagatatttatacgttttgacataagtttggattttctttttaatcagatctttgcgatgtgggtggatgcctgcacaggagactaccgggatgcatacgatgcgggcgagagtcgaaatg

SEQ ID NO: 74702 - DNA, 474 bp, Arabidopsis thaliana landsberg
caaagatgcatcctcagccaagagctgcaacaaagacaaccattgaaaaacatgaatctcagagaaactatcaaaaaatcaaatcttctaggagccatatccctctttgcctcagctaatttcgattcggtattgctctttcagaacaattacactacctacaattactatttgacatacaaagatccttccaaaacaaattttctccttttctaaacaatctaatctgaccgaatcgatccctgatccctaccctataacagatataaatgtaagagatacttacagctttctcacgagcacctagctccacatggaacccgcgacgggattgagcttaagcaccatccgtcttctgcataaagatcaaacgattttgtcataaatataagaatcgaactatatccgttaaaagaggatccgattcgaaccaagaacaaaaacctgggaaggaagatcggaggggagatgaaa

SEQ ID NO: 74703 - DNA, 413 bp, Arabidopsis thaliana landsberg
gaaatacaatccgtagcctggaaactcgattgcggtttcgggtatgaacatgtgtcttccatgctgatagaaagaaaaggtgttgtatattttggtaccaagaacggcagggtatacgccattgatccggaagaaaaaaagaagctgtgggtgcacaaaaccgataactccatggtgaataccgtaaatgtatttgatgaccggcagatgataacagccaccatggatggtaaattaactctgctatccttctgataatccattgatgataccgatactgctaaaacccacctgtaaccatgcgtaaactcctctgtatcctgttccttatgtcacaattacccagcggcgcgcagcagcgtattttcctgtaccccactcctgaaacggttatgaacaaaggctttgacacg

SEQ ID NO: 74704 - DNA, 381 bp, Arabidopsis thaliana landsberg
cggaaattgccgatagatgcaatgaaatgacaagccatatgaaaataatatggattctaccactatcgataaccgctttcttgggggtgatatatggaccttaagaggtaaaaacatgctgcacaactagctcaacataatggcgttcgctcaatggcttaagcgtgactctttaccattgaaaattcggtcagcaaactcggaaacactacagcgaaattactacagatggcgaaacattcttgataagatactcagataactttatgtagtgagctaccaaacaaactatctgaacacatgtagtatcataacatgttacctgaataaattgacgacctaagtggtaataagactttgatttctttctgggtgaaaaaa

SEQ ID NO: 74705 - DNA, 526 bp, Arabidopsis thaliana landsberg
aaaccttctgtgacaatggtgcctccaaacccagcgcaccaaccggctcggcgaacgcaaccgcaactgcaaccccaatcgcaacctcgagcacaacccctgccgggcaggcgtatgaaccccgtcctatgcatcatcgtcgccctcgtcctcttgggactcctcgtgggtctcgccatattgatcacatacctgacactcaggccaaagcgactcatctacacggtagaagccgcgtcggtccaagagtttgctataggcaacaatgacgatcacatcaacgcaaaattcagctacgtgatcaaatcatacaacccggagaaacatgtctccgtaagataccactccatgcgtatctgcacggctcatcataaccagtccgtggctcacaaaaatatctctcctttcaagcaacgtcctaagaacgagactaggattgagacgcagcttgtgtcccacaatgtggcactgtctaagttcaatgcccgggacttaagggctgaaaaatcaaaaaggaccatccaaa

SEQ ID NO: 74706 - DNA, 588 bp, Arabidopsis thaliana landsberg
  unsure (1)..(588): unsure at all n locations
aacaactctttaccacacagtctctctacaaaaatttttactattaaacttctcaaagatcttccaagtgtgaaatgaacaagttcttctatacaaaaaccaccgtgaatggggaaccattactgtttcattgacaagtcaaaattcccaaaccaacgagtttcccaccaattattattcaactcccatctcaaagattgaagctttcatctcaaacgcattttcaggcaatgaatttcaaaatcgacacataaaaagaaacgcagacaaaacccaaaaatcctttagatagagtttcaacaaaccattgtggctgtaataacccaaagatcatgagaaaaaccacaaatttcactaaaaaacagaaaccctaaaaagtgctgaagaagaaaccttgattcgagtagcttcagcgacgaaggcagtaacagctgataataaaccaagaagaaataaaacaccacacatcacaatctttctcctctccatctctgtctctctcccaccaactccgaagatgctgactnttttttttaggctttggttactttttttctgcttctttcttcgtggtaagaaaatggaaag

SEQ ID NO: 74707 - DNA, 518 bp, Arabidopsis thaliana landsberg
  unsure (1)..(518): unsure at all n locations
caacgagcntaatacaacaggatcgggtgtagtatgtgtagcttccgttactttaccattgatctgattttcgagagttgataacagcccgcatttatagcccatatcgcgaaacagtttatataacatggttgcgatggtggttttgccattggttccggttacgccaaccagctttaatttagccgacgggttgccatagaaattagcggcaacaatacccagggctacggcggagtcggctaccattaaaaaatcaacctcgccggtaacgcgcgatggcagttcctcgcaaaccacggctatggcgccctgttcaattgcctgcaggatatagtcatgaccatcaaccagcgtgcctttaaccgctacaaacatgcagcccggtattaccttgcgcgaatcaaaaactacggcagtaatttctacgtcggcgctgccctgcagttcagtcaacgcaagcccttctattatgtcgctcaaatatctcattgcaggtcaatctgtatttttgatcc

SEQ ID NO: 74708 - DNA, 594 bp, Arabidopsis thaliana landsberg
gagttaagacatcatgagttaactatatatagtttactttatataaacaagttttagatcaatatggggatgagatttcagatttgtaaatttttgtttccgtatgaatatactcattcacatggatctagacaatcataaaacatacgttcacacatatattgcttaaagtggtaaacaaatcaatgtgaatgaattattatgttgcaacattgtttagaattcttagtgttaaccagttgacttgctaagtaacatgattaaccagatggatagcaatcatatacattatacaatgccgtcgacttaaaatattttgaggctctctcgctcgttaaaaaagacagagagaaagagaattgttgctgtccttttagtttctcactaaaaaaaaagtatggccgaatcatggctacatgatttgaaactgaccgagaaaaatgagtgctattgtgccaaatataattattttggcaaatcttgcgtttattttcattcaaatttggaaactctttaaatttcgtgttaattgaatatcgaggggaatcgtatatcaaattcacatgtctaagactattcacacttaaatgcact

SEQ ID NO: 74709 - DNA, 485 bp, Arabidopsis thaliana landsberg
caactcatcctaatcgttaaaaagtaagaactataacaaaatattcaactatgtttaaaattcgtattgaaaaactcaaatcctgatgtgccaacctgaaagtgaataaatcaacaatgaaaccacgataattaaagttatatctttttggttgacgtaactattgagttaaaatatatacatgtgatcggctattgtatttaattttttttttaaaaaagatatagaaaactaatatcagtattttgttccttaattgtttgttcatatctgaaatattccaaatcgaaactcatactaatcagttaaaaagtataagaaaatatatatttttgatatgacatttgacaactataattaaaatcatgattgaaagattcaaatctctgatctcccaacatgaaagtgaataattcaacgatgaaaccacgataaagtaatatgtttttgggcgacgtacgtaactagttaacagatataaccta

SEQ ID NO: 74710 - DNA, 377 bp, Arabidopsis thaliana landsberg
tactgccataaggccccctaagaaggacggtcgaggaggggaggcgtgcacgtagaatagcttgttttaacagaaatcatccgcgacaggaaccgccagacaaaggtagccaaaaacaaaacagggcacgcaacaccaccaaccgaaagaagaacgcgctctaagtccgcgaatgcagactaagaatggaccagaccagcaaacgcatgctgcgtcaaatcaagccgcaggaaacaatccagggggagcccagacgcaaacgcgtaaggggaaaaaccgtgcaaacatactccgcgcggaacaaaaaaacttggaacactcatagggaggcacagaacagcaagcagggacaccccatgagaacggggaccaacggc

SEQ ID NO: 74711 - DNA, 404 bp, Arabidopsis thaliana landsberg
attcttctagaaatggcaaataatatggttctcttttgttttatctcttttttgccggtcacattcgtttatactttctctctctctcgacatttgctgggattttctgtgtcacacaaatggcaccaatctttttgtacgttttttaagtatttatatgtcatataaatgtactttatttagctactaatcatattttttggttagtgactaaaactgtatcattccaaactattcataataattacgtttaaaacttaaaaaaaacatatgaaaaagtttgtagattgtctgtttatttatctttccttggatgcttcctttgaagaaaaagaaatttagtgtatatataaaagagataaagaatttatcacatccacatatttggtaattgatatataact

SEQ ID NO: 74712 - DNA, 524 bp, Arabidopsis thaliana landsberg
  unsure (1)..(524): unsure at all n locations
gtagccgacacctacacgcaggcgcaggtggatgcgatgcacgattggcagttcgtgtccactacagccatcagagcaggaaccaatatcgacgtgacggggctggaggcggggtatgattatctgatctcgctacgaagcgcattcccgcaaactgacggatcaaacatagagtcacagttctcccaagacggcggagcaacgtatttggccgggtcgtcgtacgcagattccacagcatcggttgcttccataactatgggcgctgcagtggggaacgataccaacgagggcatttccgcagactttacgctgtgggcacctaactcatctggctctgtaaagcgcatcatgccgctaaacagaaattcctctacatcgggcgttgagggcaannnnnnnnnnnnnnnnnnnnnnnnnnnnnnnnnnnnnnnnnnnnnnnnnnnnnnnnnnnnnnnnnnnnnnnnnnnnnnnnnnnnnnnnnnnnnnnnnnnnnnnntcttccgcaggaaactctcatgaac

SEQ ID NO: 74713 - DNA, 584 bp, Arabidopsis thaliana landsberg
  unsure (1)..(584): unsure at all n locations
tcttcttgtctttttccttctccatctatcttcatgtgatcttctttcggtattcaaaatcggatctatttaattaaaatatatataatatacatatattatagttttggccacatttttcccacaacttatggaacaaggtaaatatgtgtttgtcgaaataaagaaccgtgtaatgtgaacgctttgtcgagcgtgttttgaaaagccaatttcacaccactctttcttagtaaatcattacaatttgatttctatgttaacgtggtcacatcttatgtacgttttccgacaaaaccacgtataggataacagtatccaatatgtatgcatgaactaacttatttacgcacatttttaatagtgttgaactgttttatgcgttgctacactacacgtccttggaaccattcaataatcattcctgtctaaattcattgtttattcgtctccgcggttctaaaaggtaatcgacatcgtctagaccattttttactacgtactacatttcaactctatcttattacataccttctactctattttccatagctctttgntntctattttaaatttaaataaaa

SEQ ID NO: 74714 - DNA, 505 bp, Arabidopsis thaliana landsberg
  unsure (1)..(505): unsure at all n locations
agctcgcataaagcgtcttttcgtcttcgctgaggatcacgccttccggctcggcgccggtcgggatctcgttgtcgatgatcttgtccttgatgctgatgatctggaccgtcgagttctcttcgttggagacgtagagctcggtctcgtccttgttgaagacgaacatttcggggctgcgggccgtcgggatgtggtcggtgacttcgagcgttgcgacgtcgatgatgtcgatgacgtcgtcctcgccgcaggcgacgtagagcagcgtgtggtcgtggttgaagtgcatgtcgcgcggacggcgcgaggtcttgatgtccttgacgacggcgtagtccttggcgggatcgaagaccaggatgttgttggagcgctnnnnnnnnnnnnnnnnnnnnnnnnnnnnnnnnncttccgcagggtggagcatcatgagggtggcggcgagggtcgcgagactgacgataaagcgtctcagagcgtggctgttcatcatcgtataccg

SEQ ID NO: 74715 - DNA, 554 bp, Arabidopsis thaliana landsberg
  unsure (1)..(554): unsure at all n locations
tagttaacagattctgtccgctagtgccgggatatatgagtttcaatgacctagttnnnnnnnnnnnnnnnnnnnnnnnnnnnnnnttgcttgccatttgatttaaaaactatttcatctttatcattttgcaatgcttgcaagccttcctctacaattgttcaaacaataagaaacactaactttgggtttcttaagctatagtaattagttcttttcacggccttgtttatctctcatgtatggagtgtacctcgcccattaattcgtttcaatggttttcaatattatatacattttagggtatcgatcattttactagctatgtttggttactctattataaagaaatcacaagtttctaaaatttactttactttcatgtcgaaaacaagtttaacaacacttgtcacgtttaatactcacctgttatatagacatatagttacgatattgctatctaatctgctgtatatttatatacaagtaaatattattgatactataattgactacgttattgtaagcagcctacaatattacatttgcatgcc

SEQ ID NO: 74716 - DNA, 570 bp, Arabidopsis thaliana landsberg
  unsure (1)..(570): unsure at all n locations
tctacataccgcaaatatccaaactggatcaaactaatcctctttcgcattgtaaccgacattgcgtccatcgggagtgcagagaagaatgaaccggaacggttcgagaaggcttttgtggatgttccgaaggggatttggcatattttcgaggacnnnnnnnnnnnnnnnnnnnnnnnnnnagaggtggtgggagagaagagctgatgtggcaggccgggggttagcagcaggtggacgaggatggggaaatgggatgagacgggcactctcgagccctgtaaatatgtagttagatgatgccgtttgaaactttgcaggcattgtggaccgggggacgaaacatgggatggggtggggaaaactagctacggaccgtgccgtaaggtacttagcgaagacaggctttccggatcgagcattttagttttggtagatactgtggaagaggggagaaattacgcagcgatggcttttggtgtccctgcttatgctaataaacatttggacgtcctttgcatgtttgttagtgtaagtcacaatgctttagacaacatcatacacttacct

SEQ ID NO: 74717 - DNA, 517 bp, Arabidopsis thaliana landsberg
aagccgtacccaatactttgatgctttgcttttccgtatgtacaatgaacggatgttccgcatctttttctatttcaaaataagcctctcccaccaggctgatctcgcgggtatcaccgtcaaaacgggaaggatagatcaacctggaatctgcattgagccatactttagtaccgtctgccaataccaggctgtaggctcctccccgcgggaccgtaaggatatattgcaccggtttttcatcagctacttttaaatttccactgttgacatgcaccatgtttcccgccagtgtaaagctggtatcttttttatttaacataacctgcatgccgcctgcctgcagtatggccttaacgctgcccggcctgatttcagttttatccggtgacgtattgccggctaatgttgcagcccgttcttttttatggaaaagcaaaaaaatacagccggtagctatcaccaacgccagcactgccgcagcaggacgctgccatataatttttctgtgtataac

SEQ ID NO: 74718 - DNA, 627 bp, Arabidopsis thaliana landsberg
  unsure (1)..(627): unsure at all n locations
tttctctctccttaaagtaaatagaaatccatcatattgtataacagtttggacacactttaatacccacaaatactatactatgtattcaacactaaatgaataacattaaagatcattcaagagattgttacgtcagaaaaatacgacatacttaatatcaaactaagagataataagtgaattcagatcgagaaccatggccttgatcaacggcgtcgtttagggatagcaaaactttgtttaacattacataagctgaatttgaggtaccaaaaatgtgaggattttgatttcttatatgttgctttgttgtcattagtcgtatatgtacaactaactctcagagattaggagaagttaatgataataagcccaatttgtcaatttaaatactacataaatgaaaagcactagtgtcttagtaagatttaagaaaacattaaatttgatgatttgtcatttgtcagacatgtctacatatgagaaaatagatttgtagggtttggtgaaagtttggtagctaatcactttctcatgagacanagttgacattacgaaaattaatatattacagagtgatnttatcaaaatctttttaatatatttagggtcgaaacacgaagt

SEQ ID NO: 74719 - DNA, 477 bp, Arabidopsis thaliana landsberg
ccgtttagaataaaataactacaaaacaaaactcaatatattatattgcatctaaacttttctcattttatgtatactaatattactcaattgctataatgatttgtaatcatatttgagcgttaaggtaaactgaaccataatttagactatactgtggattcaattcatagcactaccggattaccatgcatgcacgctaatccatatatgctcaatagccgtcagaactatataactattggttatattattatacacctaaatcgttagtccatgatgacgaaaaaaacatagatatacattgagggccatctttgtatatgagtcagaaatattactaatagaccgaggaccagccaaaacattcttcaatataaacaactctttataaacatgattgatatttaaatgcagcttacctgtatccaataggtttgaaaagatatgctcgcctttttacacactaaactattg

SEQ ID NO: 74720 - DNA, 571 bp, Arabidopsis thaliana landsberg
acacatccagaaccttgactggatgagcccggaaaccaagaagaaggcgctcgagaagtggtccctgttcctgcccaagatcggctatccggacaagggcgagtggcgcgactggtcgggtctttcgatccagccgggcaactggtacgccaatctcgaggccgccagcaagtacaactaccactacgacatcgacaagatcggcaaggcgacggaccgcaaggaatggttcatgacgccgcagacgatcaacgcgtactacgacccatccaccaacaccatcaacttcccggccgccatcctgcagccgccgttcttctacgccaagggcgacgacgcggtgaactacggcggcatcggtttcgtgatcggccacgaatccagccacggtttcgacgaccagggcagccagttcgacggccacggcaaccgcgtgaactggtggacgccacaggacaagaaggcgttcgacgcgcgcgccgacgcgctggtcaagcagtacgacagctacgcgccgatcgcgggcaagcctgacctgcacgtcaatggccgcctgacgctgggcgaggac

SEQ ID NO: 74721 - DNA, 352 bp, Arabidopsis thaliana landsberg
  unsure (1)..(352): unsure at all n locations
tcctccgacggaacttacgaaatgggtttctttaattcatgttcttcttcaaacttctacataggtgtgtggtgtaagcaactctctcaaaccatactatgggtagccaatcgagacaaagcagtttccgacaaaaactcatcagttttcaaaatctccaacggaaacttaatcctactcgacggtaataaccagactccggtttggtccaccggtctcaactccacttcctctgtttctgctcttgaagcggttttgcaagacgacnnnnnnnnnnnnnnnnnnnncggcggctctagcttatcagctaacgtattgtggcaaagctntgatcacccgggagacacgtggc

SEQ ID NO: 74722 - DNA, 579 bp, Arabidopsis thaliana landsberg
  unsure (1)..(579): unsure at all n locations
gcggttgctgccgcatgcgcaactgggtcgcgacagttccggtttgacgccggccaatccccgggcgagcaccatggagccgtgcctcacgcacgccgcgttgccgtttgccgtagggccaccgccagtccgcgtggccaccggagtgcctgccgcgctccgccgagaggagacgttgtgaccgccccccgcattaccgagatctgccacttccaccacaagtcggacatgtccagctggacgcgcgcgcacgccgacacggatggcatcaactggtcggtgtttcccggtcccggnnnnnnnnnnnnnnnnnntgagcacgaggaagaccgcgagacgttcctggccggccaggccgcccagcgtgaggccgccgtcctggccgccgacgcggagaccgtcgccgacgccgtcaagggcaccagctttctcgacttcaccgccagcgtctgaccccgtcccctaatcgagaccgtcgccgtctacttcccgcgaatacacacagctcaaggccgccgatatgacgcgtgtcatcgctctatcacgatagggcggtcagtcccaccagaaggtccagcc

SEQ ID NO: 74723 - DNA, 514 bp, Arabidopsis thaliana landsberg
  unsure (1)..(514): unsure at all n locations
cagaagaaatccggcgtgttctccagcggcgccgccattattttgggcaggcagcaaaccgaccaggaccaggccgataccagcatcaccaacgtcggttccagcatcgccagcctgggcggcagtgtcatactggacgccggcaaccggtacgtccaggccggcagtcaggtgctcgcgccgcaaggcgacatcgacgtcgccgccaaatacatcgacatcagcgccgccaccgacagcggcagcagcgcccagcatgcgcacttcgagcaaagcggcctgacgctggccatctccagcccggtcatcaccgccgcgcaggcggtggggcaggtggccgacgccgccggcaagaccagcgacccgcgcatgaaagcgctggccgccaccgcggcggcgctgacggtcaagaacgcggcggacgacttggccaaggccgacccanagaacccggccgcnnnnnnnnnnnnnnnnnnntgggcagcagcaggagcgacagcagccagaccagcag

SEQ ID NO: 74724 - DNA, 574 bp, Arabidopsis thaliana landsberg
  unsure (1)..(574): unsure at all n locations
aactactgacagagaaattattttaggtgtcaaattgattaattttttgcatgaatattacaatagtaatgaatggtttagcagtccattgtaattaggtcttttatgccagctaaaaagaagtcagtacgggtttcatcacttaagggcgtaaggctttataattacattttaaagcgtttaggacaggaaaataaatcccagcaatcaaaacagctacttgggattgaggcgaaaagaaggattgtttctgagcagttataccctgcttttaagggcaaaaaagctacatcggtcgaggtcaacaaatcaatcagggaaacggttcgtaaactggctccaaaagaaatttgtaaccctctttatctatcagaggcatacctgactttcgttgaattttatgagattgataaccatatcaggactgttctgccagactgtttagatgtaagggttaacgcaggatacctgngaaaaaccaaaatatttaataccaggaactattcgtaccatggcgatggggtaaaaaagattattgnnnnnnnnnnnnnnnnnnnnnnnnnaaatgagtccg

SEQ ID NO: 74725 - DNA, 449 bp, Arabidopsis thaliana landsberg
acatgctatcagattggcttcaaggtctaggtgcattcgggtggctgtataaaagcctctgtcatttttgtatgagacgtatatagcataaaagccacctgattttctttcttcataattacagatattcaaagcagaatttacttgccctccctggttctctgcaagtgctaagaagttaatcaaaagaattctggatcccaatccagcaacggtatatttttcttaccctattatataatttatattagaggatctctcctttgaagaggcaaaagcttctataggattgagtagatctgaaggcttacactgattttttatattgggcagaggattacatttgctgaggtcattgaaaatgagtggtttaaaaaagggtataaagcacctaaatttgagaatgctgatgtcagccctgatgatgttgatgcaatctttgatgactc

SEQ ID NO: 74726 - DNA, 597 bp, Arabidopsis thaliana landsberg
  unsure (1)..(597): unsure at all n locations
atccttcgagttttaaaaattataatttgtcatattatctgaatttgttatattaaagtaaacaattataagaaataaaagaaagcatgcgtcgctccaaaacaaaccatgcccataaccctatagctaccaccgtgacaaaactaacacatatgatattatacctacacacgcatatacatttatagattcgtttagcatatcacatgcatgtgtacgcagtatgtatgtgtgctttgcgtgaatcataattagaaaaatatgtcagcaaattgtataaattttctggttattggtcgaattaatatttcatgacacttgtattgtgagaaaaaaaacttaatacgaccggagtaagagaaaaggagaagatgtacaaaagttcacatagattttttaatgttatcagtctatatatgaaggtgatgtgtctactcgaatttgagatcatctagataaggtacaattagataatcgttgttttcttgaaacaaggttagaacagcagccatgttcaacgatttaattgtagcgaacaatgtgcacttttttgtatggtaatcggcanaaaaaaagaaagcatttcaaacaatctca

SEQ ID NO: 74727 - DNA, 482 bp, Arabidopsis thaliana landsberg
  unsure (1)..(482): unsure at all n locations
ttctcgtggtaaaatcagtgggcagtaacgggcttttgcatttgctgccatcgagccatacttctgggcggtgttcattctcagggtttttggcgccttccggtttgggcaatccgttcaggataaagccggtgccttcgaatgtgaatacgatctcgttgttagcatccacagatgcttcctgtttctgtacaggatacagtcccgggaaacttttctcgaaacgtactgcctgcggttgttgtgtgcgtatggtgatattgccgccttctgccttgccgccattgcgtttgatattttcgatggcatgcttgtaaccgatctcatataccttgttgagtgaaatagttgtgtatttgaaatcgatgtcttccgagccggctaatccttttttccagtaatcgggtatcctgtcnnnnnnnnnnnnnnnnnnnnnnntaccgcctgcagatgaagggttgcagtctgcatcctgtcccgcg

SEQ ID NO: 74728 - DNA, 497 bp, Arabidopsis thaliana landsberg
ggaggggtgcgggacgaaacaaacccgacacggacaaagactaccataagacagacgaagccacagacgcccgcacccgggcgggcgaaaacgccaccacacacacccggacacaaacagccttaaacccccggcaccgggcgggcccaacacccaatacaaggtctgacgacacaccggagaccaaagaaaatggaaaacaaggacccgggccaggaaaccgcgaccccggtcgagaagaggcacccccccgccgaaaaaaactgggccatggtgaacaaatcctcagacagagacgactagcgcccctacggatccactacccacccacccgtgtagattatgggtgccgaaacccactactggaaggccaatccagcgaccccggggaggaaaacatggaccacgtcaacgaccgaaaccccggtacaacaaaaccggggacgccgcacgacgaacacaccccccactggacccccgaaaaaaacaggggcccc

SEQ ID NO: 74729 - DNA, 611 bp, Arabidopsis thaliana landsberg
aagaaagtggtgatagcagactgtggtcaacttccaatgtctgattcttaaaagtaagatcatttaaccaaaatcttggagacatgagatggagcttgtttttgcattttacaaccctttcttttgtgtaatggatttgtatccccttcttccaaaaatttaagaaagaaatagtattccgctgccgggtgttgaactcatatttcatttcattggtttgtttcgaaattaaccattgtgttatagcggttcagttgcattactaagatacaaaatctgaagattcaagagtagtcgatgcagttgtgaaattggtctgtgtaatacagcggatttgttggtttggtatacgagcaatttgtatttaaagtccgatctcttcataaaaaagtaagaacaacaattgaaacaaaaaatattccgctgcccggatttgatcccggatttcattttgagtagtgaaattggcctgtgtgctacagcgaacttgtttgatttatatacgagggatttgtctttaaagtctgatatcttattgaaaacaatactaattaaaataataagtattccgcttgcggggtttgatccccgatttcatattgagtagtgaa

SEQ ID NO: 74730 - DNA, 619 bp, Arabidopsis thaliana landsberg
  unsure (1)..(619): unsure at all n locations
aaccctgtctccagtctctttagacactggacctgcaaacagtcaaattttctggtcagcggactatctgtaaatgctaaggactgtacttgccgccgccagtaacaactgcttgcaccctttctagcttagcaagggattccggcgactctgaaaattcctcaagcatagaaagtgcaaggaacagaacgtcaatagttgcagaatcaagaatatcatcaatagttgaagcgctgactggtcgatcgactggcggccagaaaatgtggcttacagaggataaaagaggagcaatgaaagcaaccgccacaccaaaagcctgtgtatgtataagcttttccaacattaagtattctagagggggttgcagacgtggaaagggggcaaggcacagaaaattctgttggctgttaaaacctcgtgttccggagcatgtccattaaagggtgtcaaggcgttctgtctatccaaggcggcaatccatgaatgggacagtacaattggcttatgcaaaccagctgagccggaagatgcagtacaattattggatcatctnttgcctcatcaaaattttggttaaatctatacggtcgaacttcaccctcagcgaggagttctt

SEQ ID NO: 74731 - DNA, 441 bp, Arabidopsis thaliana landsberg
  unsure (1)..(441): unsure at all n locations
aaacgaaaaagggacaacgaaggggcaaaaaccgaagcgaagagcgaaagttttagaccccagttagtccaaaagaaangcaggaaagaggaaagacaaaatcagcaccagaccaaaaacgaacacgggccacaagaaaggggacagaaacagcaaaaggacaaccagcagaaaacagcaaccaaacaaagaaagccaccgcaacacagggcccaaaaacagaggcaagcgaaagagacaagccctcaagacaaaacaagaggcagacagaaaaaagaacgcagcgcaagcaacaaccaccggcacaacacccgaacaccgccgngagacgccaccgaagcaggagggagaccacacaacaaaaaagccgggagaccaaaccaacagagccaggaccggagcacgcgcgcaaacagccaggaagacaaactggaaaaaccc

SEQ ID NO: 74732 - DNA, 564 bp, Arabidopsis thaliana landsberg
tggacgatggacggcgcccgccagcaccgggtggccagcgcgttggccgggcaggctccgacaatggctatggcgccggcggcggcatcgagctgcccttcggcggcttcaagaaatccggccacggccgcgagaaaggcttcgaagcgctctacgacatgagcgcgaccaagacggtcgtgttcaaccacggctaagccttgaaattgatgtgggcggcgctgtccgctatctttcccggcatggatagcgacagcatcatcgccacgctgcggcggcacgagctggaattgcaccgccagggcgtcgcccatgcggccctcttcggctcggttgcgaggggcgaggcgcgggccgatagcgatatcgacatcctcatcgacctcgatccctcggcgcgattgagcgtgttcgactatgtcggcgtgaaagactacctcgccggcctcttcgagcggccggtcgatgtggtcaacagggccgggttgaagcctcatctcaagcccgccgttctgacagaagccgtgcatgccttctagcgatccggctcgcgcattgcgcgag

SEQ ID NO: 74733 - DNA, 144 bp, Arabidopsis thaliana landsberg
ttattgtgtataaatgagttaaacatttttaataaaaaataaataatttatataaaaaatgagttaaacatcgttgtaattaaacttaggatttgtttgccagctcaaacttcatcctattatatatatatcctcgccttccta

SEQ ID NO: 74734 - DNA, 571 bp, Arabidopsis thaliana landsberg
aactcggtgtgcatcttcggcacgccctgagcctgacgaatctcttgtcccttccagatcaacaaaagcagcggacaccatgcacaaaagttaatgatggcaaacacaccccatgcaacgtcgaaaccagcgctctggccaaacggcagcgcatagaatccaatagtaaaagcaaacgtttggcgaaacaaattgatgatggttgagacctctgcggcttgcggcttatagcaatcggcaatgtacgaataggtaagagttgtgccagcctgaacgccgatggacgccacagtcatgccgacggccagggcaatccagggggcatgattcgagaccgacacgccgtggataatgagaccggcaggcaagaacaggcagagaggggccaagtgcagacgcgcctcgggcttgcggtaaccatcatgacgacgagcatatcggttaatcagccagtcggagatccagcccgtgcaagactcgccaatcaagcaggcaagagtcaagggaataccaagccagcaggccgttctgcttaagtgtcgaaatggtacagcctctcggtgatgctcga

SEQ ID NO: 74735 - DNA, 371 bp, Arabidopsis thaliana landsberg
  unsure (1)..(371): unsure at all n locations
ataaaagaaaanaacaaanaccnggaacacaaacggaaaaaaaaaacacgaggagggagccttcgcgtggggacggacagaagagagccaaacacgggaaagagtgagccgccggaccaaacaaccacaaanggncnccgcanaacgcggccccgaccgngaccganggcccggcagcaccaccagcacgcgcgaaaagcgaacgcggaccccaatagcacccaccaaaaaaccaaacccncncagcggggacaanaaccacacgcagcngcagagacgacacagagacacacnccccnctcnctnggggcccccggcccaaccccagacccgnnccaaagaanaanaccgannacngccaaaccaaacac

SEQ ID NO: 74736 - DNA, 578 bp, Arabidopsis thaliana landsberg
agacacgtataaagagcctcacaagccagaaagtcacaacactacaagaaaaatcaaaccaaattaaaagtactcattgatatcaaattccaatggattgtgttccttcattgtttatgcctgattcaacctacgaagatggattactattttctgattcttttcttctttctccgtttatatcataccaaaacaatgatgttttccatccgatcacaaacaaaattggtggaagcaataagaaacgaagtttgtgtgatataacatatggtgcgaatgaagccaacaaaaatgatgatgatcgagaaagcaagaagatgaaacatagagacattgaaaggcaaagaagacaagaagtttcatctcttttcaaaagtctaagaactctcttgccatttcaatatatccaggtaagttatctagtgggagatatttcattatgattagcttgagaaatattttatacttttatctctatatatagtccttaattacatactactttacaaaaccatttcatttgttaaagtgcaagcgagcagtttctttccattgaaaaggaaagtatatagagaacc

SEQ ID NO: 74737 - DNA, 444 bp, Arabidopsis thaliana landsberg
cggtataacaatgaattctgatttaacatagatttcatacttgaatgttaacaatttaatactcatttggaaaatgttcacggtcgataaggtagaaagatccagaatctgttagacaacccttacctaaaatagtaagaaccctagattttatgtttatatcgcctgcattatctttagtcttttagtagtaacgaaagcaaaattagatgcttattgttgtttatttggttacagttgttgtaatcgcggcgttatctgttaaaccaaattagagattcttttttaacatatcgtttctacaaaaaaaacgggaataatccaacggtcacaaatttacaaatcaacggatcacgttcatttcgggctcacttctgtcaaaagacttaagacaaaaaaaaaaactcaaaaatgaacaaagaacattgggtaaatattaataaa

SEQ ID NO: 74738 - DNA, 549 bp, Arabidopsis thaliana landsberg
  unsure (1)..(549): unsure at all n locations
ggatcgatgatgaacatccagcgcacctgtaccgtggcgtctttttccgggtggaacatgccgtacaccttggccacggggaggtcggggtcggccaggatcggatagttcagctcggttccgccaacatcggcaatgtcctgcgcccagcgcttgtggctttcaaccggatcgaccgacaggcccagcagcttcacaccgcgctggtcgaattcacccttgcgatgcgcaaacgcccccagctcggtggtgcannnnnnnnnnnnnnnnntgggatgcgaaaagaacaccacccagttgtcgcgcgcgtaggcgccgaagtgcagcgaacccttggtggaatccagcgtgaaatcgggagccgcttggcccaattgcagactcatggcaaatacctcgtgttggaaagcccgtgcgtcgttggcgttgacgcgatggaactacgtgccgccagtgtgcgaccctgcggccaccaggtgaaatacccatcggcaacgcccttatgcattggcgttatgtgcaacaatggacgtctggacgtccatccat

SEQ ID NO: 74739 - DNA, 225 bp, Arabidopsis thaliana landsberg
cgtgtacatcgatctcaaagcgaccactatgacccacttggatttcaactgaatttctttgtcttatgatattccttgcttttcttgcgatattcagcttcacactcaaaataaaacatttccagcctgcatattgaccttaacccatactgctactataccaaatgcaaaatttagactacctattttgtagactaaagccttctcaagctcaaactgtttctt

SEQ ID NO: 74740 - DNA, 504 bp, Arabidopsis thaliana landsberg
agagggcccaattatgtagcccaaaaaaaacctcatcgttagcaatgtgctgctacatgttgttgttttttatttaaatttagagatttctaaaaatttataactttcaaattagctgtaggttttataagtatctatttatccccaaattagattacgactgtgattggattattcaattttggtccttttggataatcaagtcaacggaagatagacttcagacatctttttttgataaaagacatgtctttttttgggattagtcgtgtgtttaacagataaatcaacataattagccgcctaaaaaaaacccctacaaatatctttattaattagattttcgaaaagaaaaaacgaaaaagcaatttctgagcgtggaggacaaggcaaaattcggtgtgcaaggcactggatattgggacccttgtttcctcgtgagagaattttcaatcctatggcttaaagagcacgttccctagtataaagctgatttacagatgc

SEQ ID NO: 74741 - DNA, 372 bp, Arabidopsis thaliana landsberg
gctgtgtgaatgtataagtgacttgccctcctttatgttcgcagtgcgccagtgcctgatgcgcggccttggcgccggccgcatcaccggcgagccggcacatgtgggccacggtctgccagttgcgcgcgcacaggccgccggtcttcggacccagcgcgtacgaacgccgcgccagttgttctgtctgcgcgtactggccaagacggatcgccagctcagcgcggtcctgcaacagtgccggcgagtccggcgtcactttcaacgcgtcgtcgaccgtcgccgcggcccgggcgaatgtgcccagcgattcctgataatgcgcacgcttgcacaaccgggtgacggtccgatcgcgcaacagcgccacgt

SEQ ID NO: 74742 - DNA, 365 bp, Arabidopsis thaliana landsberg
aataatgcgatgttaattatatatgttaataataatgaaaaacaataaggcacatattatttataaataaaattattaaaacataccatatattcttttcgtaaatttggtcataaaagaatttgatgttgattgactaatttgtgctagaaaaagaaaaaatatagttgtgaatttcacaaatttataaaataaaataaaaaataaaataaatatgggaaaactgtgaatttcacaaatttattatatgagacaaataaaaataaaataatgaaaatacctaaaaatggccacatgacaaagaaaagagcacttacaattcattaattaaaaataatcagtgtttaaaaacaaaagatatgtat

SEQ ID NO: 74743 - DNA, 574 bp, Arabidopsis thaliana landsberg
  unsure (1)..(574): unsure at all n locations
gaacctttctttacaccttatagttagctggcatatttatgatgtctgattttatttttgttatatatataatgtacggatttaaatcaagaaaataaaaataatctcgttatgaaacatttaattaacgaaaaacattctcagtgtttcttttttcagattttattcagtttctatgattttttttttttgttcaaccatactttaaattaaaccttacgaagaggttgatactaggactcagcctctgaattagatcccctagggatgaaaacacaaggaaaaaaaacccaagtttttcaatgcacaaaaaaatatctgacaaaacacgatgcagtttcgataaaaaggtcttcgacttgacttgctgatcgggacacaatctgacaatgtttgccacaaagaaaatactataactttaataataccgaatttttaagatcaaatagttaaagaaaacanaaatcagaaagacatgatttgccgttttgcgttgtcagcacggatcaaaccttgtagaaaattagaggatactggtcttacttattttactaaaattagaattattggagga

SEQ ID NO: 74744 - DNA, 572 bp, Arabidopsis thaliana landsberg
gtttcatagaaattttttgagttgtttaagtagagttggagtttcgctttgatttttcgagtttgattttgtgggctaactatgtttatgcgtttttggtttcagtgagagtttcacaatgaaagatagagaaaacgatggaaatcttgagagcagaatcttcgtgggagggttatcgtgggatgtcacagagagacagcttgagagtacctttgaccgctacgggaaaatcactgagtgtcaggtcttgtatcgattctcgtactttatgatcagaagtctcagagactcgttttgaaacctgtgtttagtgaatgatacctctgagattgtaggatagttttgtttgatgaacctaagactcatctattctgtagaagagcacacacagatattgaggtttattgacttgctgaaggatgcagtcgaggaattagtagagcttttttaggaagtaaacatgcatctcaacctccttttgatctgaaaatctgtttgagagcccgatgtttagaaatgcaagagttttgagatagatcatggctcttgtctcagcatcagagcagtacttt

SEQ ID NO: 74745 - DNA, 501 bp, Arabidopsis thaliana landsberg
cacattacaatccactgtgaactgaaacccttccgggcataaatcttgggtagttgggttaaatctttgcttctccgggaaagtatcttagaaattatatctctggatgatgaagacgagatttctggattggtatttgaagatcgcgattggatcggctattatcggcggaggcatggaattcttcatgatcaagactggtttctgtaaattcccatcttttctattcttttctcgctttcaattttatgtgtgtttttctccataactcgtcaatcaatcaactagatcgaaaattgcttgacatggtttctgtgagcagtttaatttcactggattttggatagaaatgttatgcatttttggtttatggggacttttatgcttaatatcaaatctgatcttgtaagaatgcttattgatattgaagattcttactttccatcttttgatgaaattgtcttgcagacgacaaggttactgtaatagaagcagagagac

SEQ ID NO: 74746 - DNA, 566 bp, Arabidopsis thaliana landsberg
accgcgatgtgatgggtgcgaagaaaatccttctctccattatctcgggtgttgaagctgaattgcagatggacgaacttaccgagattacggaatatattcagatgcaggccggtgatgaagctgagatgatcttcggtcacggtgttgatccggatctcggagacagaatccgtgtaacagtaatcgctaccggatttcaggcagatgcaaagcttccgattacgcgggcgaaagctgaagaaaagaaggttcacgaactggagaagtcacagggatggctattctcagccgacaactctgtaaatgaaaagaaagaactacaaatgcgtcagcgcgaagaggctaaacctcagcagaagcctgaaccgaaaagagatttatttgatgataagtcaaccggaagcaaacctaatgagcgtgaactcatttttaccgggccgttcaataatatatccaataataatgcttccgacgatgacggtgaagagagcttgttgcgagacgacgactttgataccacgcaacagtacggcgatcagcacattaacgaggatggaatgatg

SEQ ID NO: 74747 - DNA, 497 bp, Arabidopsis thaliana landsberg
  unsure (1)..(497): unsure at all n locations
gagcagggagcaacgcaaatctccgatcgcgggccgattgaggttgcggcgcggggtgttttaaccgataattcggatgttgtggccaaatacaaggccggaaccacgaacgtaaaggggttcctggtcggtcaggtgatgaaaaggactggcggaagggcgaacccgaagctcgttcaggacatccttcaagaagagttagaccgcctatgaaaccctttattctcgtcatcgccgctacgctcgcggccttcggcttcgccggcacgccgggcacccgtgcggccaagaaggctcaaggtacggcggctcagagccgtgtggacacgatcatgggcttcgccaacgatcgaatgtcgacgcacatcgacgcgatgttcgacgacggggatttcccggcggtgatctcgctgcttcgcgttcaggcggaggcgtacccgagcaactacgacgtttggactaatctgngctggatgcaggagaaacgtcaagcgtac

SEQ ID NO: 74748 - DNA, 551 bp, Arabidopsis thaliana landsberg
  unsure (1)..(551): unsure at all n locations
caatcagcactttaggtagggatagcgttcaattggggagaagtnntggttgtcggtaattatactggttctcacgactttgagagtgtatattttcaaatgagtttttgagggattttggtgctcaacgaagactacaacatggtggtgttaacagaaatgttgagggtaattataataatcgccatcttgtttacgaggatttcaacagaattcttggccttcaaagagttgattccaacatgtcagaaggtattaattcctcgaatggttactttgctgagtcaaatgttgcagactcacctcggaagatgtttcaaactgcaatatcagatgtttatttgcctgaagtattgaagcttctttgtagcttcgggggaaggatcttacagcggcctggtgatggcaagcttagatacattggaggggagactcggattatctcaatacgcaaacatgttggattaaacgaattgatgcacaagacttatgctttgtgcaaccatccgcatacaatcaagtatcaattaccaggagaagatcttgatgcc

SEQ ID NO: 74749 - DNA, 252 bp, Arabidopsis thaliana landsberg
  unsure (1)..(252): unsure at all n locations
aaaaaaaaaaaaacaacgaacacaacaagaggaaacaagaccaaaaaaaggaaaggcaccaaaaaacacaaaaaccaaaagggcagaaaaaaaaaaccccaaagggaacaccaccaaaacgcaaaagggagaccaagaacaaaccaccccgnggccaacaggggaccaaaagagaaagcaacggccctgcaaagagcaaaggcacaggacaagggcaaggacgaaacaggaagagcacaagaacggggagcg

SEQ ID NO: 74750 - DNA, 424 bp, Arabidopsis thaliana landsberg
aaaacatttgacttcacttgttacgaggaaaaaggaatcttttattctcaaacatatttttttaattgctttttagaaattacgacttgtgtttgttaaatcgaagttatatacgataggatcaagtcgtaattgctatcaaaatattacctcattgactgctatttgttcttggttgatgcgtgtgaccaatgactatgggtctcaattccactagctatgtcaacttacaacaaaaaccattttattaacttatttaaccaaaaagctgacggcaacaactgacaaattcacgaagaagataatttcaaaggtttagttcacaaaaatcatcaacttttttgttgggccttttcgaatttcctgattgcattgctaagtcccttctggaccttgggtcttgataggaactaatcacaacatc

SEQ ID NO: 74751 - DNA, 356 bp, Arabidopsis thaliana landsberg
taagtccgcatgccgccagaagactccctgatgcgatgctgaggtactagacttttcgctcctatgctccacattcacacaaacccaactgtgcttgtgatatacaaatatgatatggactgggcagatatacatagatacagtgccaaccctgtgaaggcgttcatgaaccacggagggctacctccaatcaacgaaggggccggtaagacctgctagttctgaatcatggtgggcaccgatgccactcgctatgactgcattatgcaacacatctttactatcaggctatagtctactgcggggcagaggcagaaacatggcacaactggatccgaagagcaatgagccacttg

SEQ ID NO: 74752 - DNA, 277 bp, Arabidopsis thaliana landsberg
aggctaggggggtggtgcttggttgaagagacggaaattcagcctcttatggacgagggttcagccaacaaacctgcgctaagcgagacgaagctcgattggggtctgggcgataatgaagaccagatggcgtggggaggatcagacacactgacttcagccacaacggtatcctaagcggcctgggagtgtgtcctcgtttgtcaattcttccacataggactccttttgagcttgcgattaaccaacttcgctttgagaagcaagaaggcgcttg

SEQ ID NO: 74753 - DNA, 520 bp, Arabidopsis thaliana landsberg
  unsure (1)..(520): unsure at all n locations
gaaaaccccagcataagtaccaaagcaacatacccaagtgacttactgacctggaaccatgagttccgatcatgccccatatggccacagtacgtacgcaccggggaacctgggaccaacttannnnatataccatatcccatatatagggataattatacgatccacgcatccccaagccgtatatatgtcccttttcaagtaaagcaacccctattggacagcaataagtaaaattcacacaagttccaagtcattactatggtatatattaggagatcatccatagagaacccataagacttgtaaattttttttgagttggacttctttgagttgtccactcggggttgtttggggtgttgagcttttgctcgggggttttgggggggcatactaaatccggcttcgccgaatcagcacgcgcgaattgcgttattacaaatcgccagaacacnnnnnnnnnnnnnnnnnnnnnnnnnnnnnnnnnnnnnnnnnnnnnnnnnnnnnnnnnnnnnnn

SEQ ID NO: 74754 - DNA, 568 bp, Arabidopsis thaliana landsberg
acttctattatgttgcatcatgtgacatctaaacgaacttttccatgatattgacaccgctgaaaataatggtatattcaattacattatgataccaaaaagtaagctgatagaccacactttcctttgaaaatggataacgtaaatggtttgtttttatttttgttaaaaggacgtaaatggcatgtttataaaaaaaaaaaatgattttgtttaatcggtgaatataataaggatatgttaaaccttcagtacgtatgttatttgcttcttaatagacgatttacataagtaaatacgcaaagagatgtctctttttaagttttgatgtccttatttcaaatcttgttttatcaaccttttaaatataacaaagttgaagctatctgaaggaaagaaaagaaaagaaaaatggctaggcccaatgacaatgctataaatatttctgtaacaaaaagaaattaagttaatatagaagtagtatattaaaagtttgtgtcgtcacgatgtgacatgaccgataaagaaggagaagaggcagaagaaggaaatcatggcagtgagtgaa

SEQ ID NO: 74755 - DNA, 592 bp, Arabidopsis thaliana landsberg
gaaaatcgggcgaacgatcccgctgaagaaatgtacgacacgatatcctccagatttgccctttccttgtcgcgcaaaacaggaattggtcggcagccaccagtaccagcgatggcgtcgccgatcatcggatcggtcgcaacgaaatcgatgatcttcatgacttcaccggcggagagcccgcaaacctttgagcgtgctataaacgtcggctctcgataacggtttgcatgaagataagatgcggaaattccgcagttttgtcaatgcgcctacccaagggcagtacggcgccatccacattcacgttgtgagtctagttgccgatcggccgagtcatctgccttcgcctgtttctcgccggcgagtcaaaatctactgcctctgaatccaaattctgcgctctccaagctgatttgattaatctcaaatacatttcgcctcgctcatcttcgcataatactaatatgtaccatttcatcacgaagcgtatccgttcgttcaccattgatgctggtttcctgcccctcccgcaggcgaatcgtcgaatttagcatttacgcaagattttcccctctagggatcgcccgtc

SEQ ID NO: 74756 - DNA, 101 bp, Arabidopsis thaliana landsberg
tggggaaagtaccccctttagggggggataggggtatattttctttagggggtgtggtgggtattatttcaacccaacatgttacataggtcactgtgact

SEQ ID NO: 74757 - DNA, 600 bp, Arabidopsis thaliana landsberg
tgattcaggatccgtatagatattggctttgggcacccagataaacaggttacgaccttgcaggctgatggtaacacccttcagcacctttgtcttcttcagcaaagactgaggcaggtcataagcaatgctcagctgacgcaatttccagaatgctcctgaagtgatatagttggaagttatacccctgttgtaggtattgtctgtccagaatccggcattaccgttgggatagcgaaccaccacatctgtattgctaacatacttgccggttccatcatcatatgcagaattggggaacacgaaaggcagacggttgtaagccactgttctgatgcttccgccaccccagtcttcgttggggcccatgctgttatagatagaataaccaccgcggtattcaaacagggtatacaggtgaatgcctttgtagcttacgttcagatccacgctaagtacatctttgggctgtgtgttgccaagataaacctgtgtggtattgggctgaggcataccatttaccttatcaacgatcacacggcctgaaggatcacgtttgtaatccgttccgagcaatacagggaaaggcattccccggac

SEQ ID NO: 74758 - DNA, 353 bp, Arabidopsis thaliana landsberg
atcgaaacttgcggaaattaatacattaaacgccaacctgaatggtgaatttgattatcttcttaccacatgtataccatgattcaaccttgtcagagagaccttaaaatgtcatatgatatcaacaaaattatacgtatataagagcgcagttacatgctgcaacaggacaatcgtactttgacataatacactaagcatgtcaagattccaatgctcgaactactatgggaattatgattaaatagacatcacatggtcgattgaataaacattacgcttggtgaacacctatgacttaatcacgaaatgcacacacatttggtcatggattgctttagacaagggatgcc

SEQ ID NO: 74759 - DNA, 299 bp, Arabidopsis thaliana landsberg
  unsure (1)..(299): unsure at all n locations
tgaacagagagaaaaaggcaagtcgggaacgaagcaaggacaagactcaaaatccgggaaagagncgacaagaaaggaaaagaggntagaggatgaagaagcagagcaaacactaaacagaagccacaagtgaacagacgaaagcacacaatatcataacccactccgacacgctggataacacaatgctcctcagtttagtaccgacaaaataagcattaacaactggctgaatctgattggcagtgatccacatagatcataaatctgcagaggaaatgctcgtataaatcgagcat

SEQ ID NO: 74760 - DNA, 276 bp, Arabidopsis thaliana landsberg
ctaacactgtctttcggtaaaccaccttttctttggaacgcttgacccatgtgggagagcggtttacatggaaccttgacccgatgccgcctgcacaattgtgaattagatcttagatccgaccaccatgatctgagccgacggacggtccgcccgggctaagaccctaagacttggagtgacctagactccgtcctacccatcgaggcctggataaggaccaaacagccgggtttgggtcgcgcgctcaaacgccaccccttgtcaggggtagga

SEQ ID NO: 74761 - DNA, 552 bp, Arabidopsis thaliana landsberg
  unsure (1)..(552): unsure at all n locations
aactgattgcaacgtttgttcttttttctacaacaaaagttattaaactttaatactaaatagaggatgtatgtgtgtggggtgacagtatgtatgtacaatataatgtatttgtttggtgaaacaccaaagttttttactaatagaaagatgtttttattaatagatttgattatgcatttgattggtgactggtgtgatactaatggtcatactcatacgtcggtagcagttgagcaagatcttgtttgccaaacaaattaattaggattatatgtatatttcttggcaaaaacaaaagagatttatattttctttgccttatgtgcaatgaaattcagaaatgcatccctactgcaattcgatttggtcaaaatcattcaacgtcaagatcatattcactgactttttgtttataacaatggtctaatagaacaagttatgtatatataatagtgtgttcacatcataaaccaactataaactatttgaattagaaattataatatatgtctatttattgatgtntgtgaataatagttcccccttttt

SEQ ID NO: 74762 - DNA, 384 bp, Arabidopsis thaliana landsberg
aataatctctatgctgattatctgtcactcacaacgttggtaacaaactttgagattttctataaatatatcacctatgtgattttgtctccaacacatattaattatcattacaaaagatctctggtagttagctttaacctgaggtctgaagcgtttagtgtcattgaattacctgaggatgttaacgttgaccaatattgggatttgaggaattatgacgatgaggatcgtggtttggaattggtgaactattaggtgctattgccttaggggatgactctgacttttgccatagagttatgaatccatggagtggcaagaaagtgttccatatatggggtaaaaatgaaatggccggacatcggttgagaacacccattg

SEQ ID NO: 74763 - DNA, 389 bp, Arabidopsis thaliana landsberg
gtgccccggcttcttgtagtcgtggtcgagcgctgtggcgaagccctaggcgatgttttccagcgggatgcggccttccgggcgcttcgggccggccatggcgggctcgacgtcgccgaggtcgagttccagcgtgtcggtgaagacgaggtcggaaccgtcgccgtcacgccacatgccctgggccttcgaataggcttcgacgagggcgatgcgctgctcttcgcggccggacatggtgaggtagttgacagtttctgcatctaccgggaagaagccggaggtcgggccgtattccgggcccatgttgccgatcgtctcgcggtcggcgagcgtcatgttgtccaggccggagccgaagaattcgactaactgggagaccacgccct

SEQ ID NO: 74764 - DNA, 373 bp, Arabidopsis thaliana landsberg
  unsure (1)..(373): unsure at all n locations
aaaaataaggggangggcaaggaccagancacccccgngcgcggcagacggaacatcggaaaattcaaattgncctcccgacgccgacaacaccaaagaggggcgagatcaagaaggcaacagccaaaccacgannncgnnccaacgangnaagaggaacacgaaacggagaacaagcaaancaaagcagccccgagacacaaaancncaaaaaaaaaagaacnaccagcagacacaccaccagggagcagggggaacaaaagacaagcgccaagcgcaggcgggcaaaagaagaaagaaaccacncgacnnngnngggaggagaaggagaaacccanagcncaaaccacaaaggaaggaaacgacggacccg

SEQ ID NO: 74765 - DNA, 300 bp, Arabidopsis thaliana landsberg
taaggctttttgctgggctcgatgaagggccatggctcttgcctatggaggagaggcaacatttttttctctctgggcttcctagcctatttatgaaagagccgctgacacttcatgagtctaattaattgaaacgaccgacttgccagtttgtcatccccacataagtttactctctaactgagccttctatggcaaagcactaatattgactggctgcccctgggggccgatcctcggccttggttgttcgaccatatttggtccccgatgtacccaccgatgatgatgtgccaaccg

SEQ ID NO: 74766 - DNA, 527 bp, Arabidopsis thaliana landsberg
  unsure (1)..(527): unsure at all n locations
catcgcagtactgcgggtggactctggcgcatcggcttacatccttagatcgcttacaagccttgtcagtccggccgtcagagacaaggacggctgccagcccgaggcagttctcagcttctgacaattaagcacattataatcgagatcgaacggacgtcccggcaggtacctaacgcttgccctcaannnnnnnnnnnnnnnnnaaaattcgatcaattgattgagcgaagttccaaccgatgttccgacattgaaactctgattttcatcggccacttggctggaatcaagttgcattaccgcgacaaggcccgaagctgcgtcttccacatggatgtaatcnnnnnnnnnnnnnnnnnnnnnnnnnnnnnnnnnngcctccccccgcaagatttgacgagcgaaacgtggtgctgcaccttgtagtttgctgagcgattgttcgctgccataaggattgctgatacgagcgatccngatttttgaatttcgatagcgggcaaaatatctacaataattctcga

SEQ ID NO: 74767 - DNA, 399 bp, Arabidopsis thaliana landsberg
  unsure (1)..(399): unsure at all n locations
gggggaaaaccgaaacgacaacaacagcccgaggcccccgccgacgacaccggacnccttaactccgccgccaaccgccacgacccggggccggaaaaaaaccggacccccacccgcagnccgcgcgaaagcgcgaacagacgggcgccccccgacacacaggaacgacnaacccacgagcaagggccgnncacaaggaaccncaccccncggcggccgncaaagaccncaggggaaaaanggccacaaccaccaagaacagcaccgacggccgcaccgcccgggcacgcgccccaggaaacgcagcgaccggcgcgcccnccaacacagagaggcccggcacccgccccgacggccgggaacaggacgcgcgcgnaagcgccaaccacnggcggggca

SEQ ID NO: 74768 - DNA, 465 bp, Arabidopsis thaliana landsberg
  unsure (1)..(465): unsure at all n locations
aaagccagcccgcgaccacangccgnaccaccagccggaaaaccaccgaagttgcggtggcaaagcaggccaaaacccaggccggaacgtggagggacaaccacccccgcccgaccgcaggcaancagaacgacgacaacgacaacacgccggccaaaggagcaagcggcccggaggacaaccgggccacgagcnggcgcaacaacacgacaggccacgccgaccccacgggacggccgaacacgacgcngacgcaaaagccagacgcgcgcacccggccggccagcccggaacccaaccagcacaccagcaccgaggagcaacnggccaacggggcgcagcagcaagacccgcagcggcaacagggacaggcgcacgcgcgcccacgagacaccgacccggcggaccgcgacgcgcgacacgaaacccgccgacgaaaagaaccggcggcacagcagggcaccg

SEQ ID NO: 74769 - DNA, 154 bp, Arabidopsis thaliana landsberg
gggtgggacccacggaagaacggatcatgacgacttaaaaagagatttgacatcttttgaacttgcatatactaagcgggggcgatcataccatttctaaggcactgtatacaatcggaactcccgagtaacaggtgttatgggcgagagtatg

SEQ ID NO: 74770 - DNA, 422 bp, Arabidopsis thaliana landsberg
tccagtggcagaacaattagagatatgtggcgaggtgaactatcacattgcgcgaggctgagagaattgtctctagggggccaccatcacccaatataaccctccgagatctatggcatagcggccgctgatgcacagacagaataccacagatatctgcttgagcatataactgtgtaccgaatgagccttgcatatgaaatacaccatgatcagtaacatgaagtcgctctacaggtgatatccaacgtagcttgatgaacgtgtgcatagcaccattgcatgcatggaacaagcgtacgcatggaacacatgcacgctgcttggcgcatatagacacatgcaattgtgctcataaccctgagaattggtggtcagctagctgccggatgggaggactggatcacttcaggttagccggc

SEQ ID NO: 74771 - DNA, 538 bp, Arabidopsis thaliana landsberg
cggaacacggcccgccaggccccttgatgaaggcgggaggcgcgctctgccgcgccatggcccttgcaaatgtctgcaagaaccctgaattgggtctcggtatgcccgaaggcgccaccgaccgtctgctcagcacggctcgacgtcgcgtccgcggacagtgttgaatcggagcggcggttgcgctgcaatgggcgccttgggcgctatcgacagcagcacatcgcatttccgatgccagacaagactttgtagtgtaaaccattgtggccgccgatggcgaagccggcccttttcgacaagacaaacggagattcccgtgagcgaacacatcacccatgccaccgatggtgacttccagacccaggtccttgaatcggacacccccgtgctggtggacttttgggccacctggtgcggtccatgcaaggccatgtctcccgtgctggacgaagtggccgccgattacgccggccgtctgaaaatcgtcaaggtcgacgtcgaccagtgccagaacggtcatgaactattccatccg

SEQ ID NO: 74772 - DNA, 302 bp, Arabidopsis thaliana landsberg
gagcagacagggtagaatggatacagggcgatatactcgatatcgtatccctcgaaaccgccatgcaggatgttgaccaggtataccattgcgccgccatggtatcattcaacccgcgcaaaagaaaggccatgcacaagatcaatgtggaaggcacggccaacgtagtgaatgcctgtttttctgcgggcatacaaaagctgctccatgtaagctctattgccgcaatgggtttgcatacgtgatatcaaagccatcgattaattcattatatgtttttgtttgtaatttgtccttttagt

SEQ ID NO: 74773 - DNA, 375 bp, Arabidopsis thaliana landsberg
cattgcgcataaggcacttcattgatccctgtttgcttgctcaggggatacacatcgtaaacatgctgtgtataacgcggctgttccggtgggctatcataactgcgcatgccccaacctgcatgctgattcaacccgctattcacctgcatactcaacattggatcctgcgggattcggcgtaaaaaacgcaatctggcatgctttgcatgcttggcatcttgcacgccattcaccaacacttgcaaattcagggggtagccactggcatcagtacttttcttgatgcgcccatcatccgatgcttttttataagcatctatcgcgcgccgcattttccgtaaatgctcgcgtaactgctgttgtttttgtcgt

SEQ ID NO: 74774 - DNA, 480 bp, Arabidopsis thaliana landsberg
gggaaggctgctggtgtgcgattatacgaaaccatttgctttcagcaccgtaaaggaccacatgcggtactgggtacagtgaaacgctcatcgagaaaaaacacacttatagctagacacgaaccacaggaaccagaatctaatctgaacacaaaaaagagaatggagctatgagaaagaccgcttgacgaaagaaacccggctaaatcgttaagatagattgcgacttagcactagaaacagaggggcttgggccgggagttagccatgagggactaataaagaaaggtgtgagggacatagggtaagtatataagaaatgggaatgcgagactataggaatatgattggtggggaggataaaggagtgatcatgcagatggagagagagaaatcgggcataaacattgatattatggccatttatgcccttctacacataactaattcgcggaattgccacagacctgcacaggatat

SEQ ID NO: 74775 - DNA, 151 bp, Arabidopsis thaliana landsberg
  unsure (1)..(151): unsure at all n locations
aaagcgagagccaccggacaggcaagcacgangacgacagcagcaaaacaacaggagaannacgacncagaaagagagaaaaacaccaaaaananaaagaccgaaccgcaaccaggcaacngaaaacacaccnataaacggcncggacaaa

SEQ ID NO: 74776 - DNA, 501 bp, Arabidopsis thaliana landsberg
  unsure (1)..(501): unsure at all n locations
aaaggaagagaagggaaaggaccagagcggcgaagagagccaaacggcgaaggaaaaaaacattgagattagggccccgcgacgccgcggccggggcgggagcgagcacaaaccaggcccccccaacanacagananccgacacggcgcaaaacccacgcaaaaanagccaggaccgggcaaggaaccaccaacacaaccaanaaaaacgaggcaagcaccgcaagggaaaagcgaggcccccaagnaaancccacgcaaagacaaaggaggggggcaaaaaacaaaagacacgcccaaanaccacnaagcangncccacccaccanccganncacgagcccccggggccagcaagaaccccagcaaaaaacaaacaaaanangnnaaanaaganaggggccaagggaaacaacccgcgagggaagcgcnacgagcggcnagcaaaaaccncgcaaagcccncgcaagggagaancaannngaaaaaaaacaacaaaacac

SEQ ID NO: 74777 - DNA, 579 bp, Arabidopsis thaliana landsberg
ggccggatagtcgcaataggccaccatgtaggctttcgacctgctttcctcgtgcatgaacatgttcatttttacgttcccaacagctgttggaacgtcctgttcctgttcggcaggggtttctttgaagttgatggtgaatttaccggcctcagatttgaattctttcatggccggggcttcttcttcagtggcaacggcactttcggaagtttgtgcttctttgttctcagcgcctttgtcgtcttttttagatccacaggacgcaaataccgctacgctggcagcaaaagcggtcagtaataaagtggtttttttcatgtgtttgtgtttgtttatgtaaattaaattgattgctctgtattctttttgagaaaagctgcaaaagcattccagtattcctcgctgcccctggtaccgggccacaataccttgctgccatgatcgccttctgccgcaggtacaaaaatgtctttgacggctacacccgacagcaacccggccacttctttggcttctttttttgatgaggtggcaaacacccgcacattcaggcccgtaatctcttttttaaggtcg

SEQ ID NO: 74778 - DNA, 416 bp, Arabidopsis thaliana landsberg
  unsure (1)..(416): unsure at all n locations
gcgggggtgcgaataaaatggcctagataggtccggaaggtcacagacttgtcagcgcttatgtttgcatgctctaaagccgcatggccttcacgcttcgtcagcttcaatatttcgtcgcagatcgccgagcagggttcggtgacgcctgcggtgcagaacctgtccatgttccaatcctcgggcacagaggcgctgaaagagctggaaaccgatcttggcgtctcgctcttcgatcggcatccgcgcggtctgaccatcacccatcacggccaccagattctgcgccacgccacgaagatcctggcgaccgtgtgggacgcgcgcnnnnnnnnnnnnnnnnnnnnnnnnnnnctatcgggaacgctgaacatcggcggtacctcgctcagggtcggctatgtgctctccgatct

SEQ ID NO: 74779 - DNA, 483 bp, Arabidopsis thaliana landsberg
  unsure (1)..(483): unsure at all n locations
tcttactattttataattataaacttcatgcatttatggaaaagtgtttacaacaatgtaagaatgactacttcaaatataagtttacgtaattagttgagagtcgttttcaatatggttgacttattctaaaatgatcgttagtatttgtccgagtgagagaaagcatcgaaacaaaaagttttttttttttttttttattagtaaatcagctgcgagaagagtgtagagtttattaagattataattgatggaaagatggattccacatataaattggtaagagttcttaataatgtatcaaagtcgacgagagtttggagcaatgtgtgctctttaaaatattttggtctgtgacaaggatatctctttgctaatgatgatgtgcatgtgntttttttctctcttaattatatatgncaccaagtgaacctgacgtacatttntactacactgtttgaagctattgggatgtgtgattta

SEQ ID NO: 74780 - DNA, 417 bp, Arabidopsis thaliana landsberg
  unsure (1)..(417): unsure at all n locations
ccaggcggaaaccagcaagacaacctttgacttaaggacaaccaaaccgcccaccagacacagggcagccaagggagcgaaccgccccccgccaaaaaaaccacaaaacgcaacgagggcgaccaggccaaacaaccaagcaaagagcaaaccaaccccacaaaggaaccaaccgcagaaccaaaggagaaccaaccaaacaaagaggaaggaggacccgccgaccacccccggggaaagcaccaagaccaacaacgaaagcccgaaagaagaggccagaagcagcccagacgcaacgagcagaagcaaaaaccagaaccccaaaaccggcaccacaccagcaaaaacaaaaacacaaacaaacggacaagaagngcacagacacggcngccacccaagaaggaagaagacccacag

SEQ ID NO: 74781 - DNA, 165 bp, Arabidopsis thaliana landsberg
  unsure (1)..(165): unsure at all n locations
gaggaagnagcacccgccgaccaacacnagggaaaacaccccgaccaacaangaaaacccgacagaagaggccagaaacagcccngangnaacaancagaagccaagaccgnaaccccaaaaccngcaccanagcagcaaaaacanaaacacaaacaaaaggaca

SEQ ID NO: 74782 - DNA, 397 bp, Arabidopsis thaliana landsberg
cactcatcgccgtctccgtccgtggcttcgtccgcggcctcgagcgcctgttcgtcgagctcgcgcgcggtggcgtgctcggtgtcgatcaggtgcagctcgggttgcttgtcgagctcgccctcggcctgctcctccgaggtgccgaggtaggcggcgatcaccgcggggtcacgctggatctcggccggcgtcccctcggcgatcttgcggccgaagttcagcaccacgatccggtcggcgatggacatcaccagcttcatgtcgtgctcgatcagcagcacgctgatgccctgttcggaccggatgcgctggatcagctcggcgaggtcgcgcttctcggacgggttcgtccccgccgcgggctcgtccagcagcagcacgccggggtcggtgc

SEQ ID NO: 74783 - DNA, 251 bp, Arabidopsis thaliana landsberg
  unsure (1)..(251): unsure at all n locations
ttgttgaattctggctactgggtttggattacactaagttctaaattccaacagtttgatgagctaaagcctctaactaaaagtttcnnnnnnnnnnnnnnnnnnnnnnnnnnnnnnnnnnnnnnnnnnnnnnnnnnnnnnnnnnnnnnnnnnnnnnnnnnnnnnnnnngcttgacacaaagatttctgattttccagcttgaacacctgccaacagattataatggatcagctgttactcttgttgatca

SEQ ID NO: 74784 - DNA, 589 bp, Arabidopsis thaliana landsberg
tctctcgatcgaagtcttccgtttattatgaaccacacatttgtttttaagcaagaaaaatatctacgagtaagagcagttttgttatgtgtagagattatcatttgtaactttatgtattaatacaattgcacgtaaagcttgaccttctaatagaaataaatttgataggaaaaaatctctaataccaattgcaatttttttgttgttgtaatattgcagtaagctctctcatttaagcctttgaacaaaaaataaaataaatatcagatttattgttgagtttcgcgttggtatttcaagaaaagaatatggtctttggcttttgaccaaaaaaaaaaaaagaatatggtctttggctctttgcgacgcctatatgcatatatgatatttgtatgactatagactcatagttaatttattttctattccattttaacttatcagtgtcactaatcaaagctattattaaacggtctattttaaaacaaaccattttgtctatatgctatttcatatacgacgattataatcgcttctttagaactaatagccaaatataatgtatatttcgactgttcaccataca

SEQ ID NO: 74785 - DNA, 400 bp, Arabidopsis thaliana landsberg
attggttaattcatgaattgggaaaaaaaggattattggtttttattgaccgttagtagaaatcttgggcacagctgatttttctgtctcattcccacgacctccacaacggcactttctgtacttctgacactgccaaaatctctatgaatgtaaaatctcaagaatcgttgacttatcctcaagcatcagattattccgagcaagcggctgcattttctcatgttgaaggcttcgatataccatcgagagctgtcgttgaaatacttcatagatctgcagatcatatgatatcttcggattctgttgaaaaaccccatggaataggcaggaacatacatatctgatagtactcattcgattgctgaccctcgtagctacttatatctttgacggtgat

SEQ ID NO: 74786 - DNA, 418 bp, Arabidopsis thaliana landsberg
gaaattgaattacgattagtatctcaaaagataactaaaagtatatacattttagatttatttgtttttttataactagaaggagtttgggtttaagcgttaatcttctccatggcccaggatcagtctttgctaaaatcttataaagacgtaaaacatccgctccaccaggaattgaactagggagaactttatagaaagacaatatatataaacaaaacatgcatgatattttatgtcgtaaattcaataatattgatgtggctgaggaaaagctcaattattttgatgtcattgatcagtgatcacaaacggagtcgtttggtcaataacgagtttcaataaccatcaccactttttacgtgggattactttatattttaaaactgactacactatactggatttttttcctttc

SEQ ID NO: 74787 - DNA, 513 bp, Arabidopsis thaliana landsberg
tgatatggaggtgttctggcgatcggacttgttatgtcggacttctaagaagctaaagaaggagaagggtctgatggggttctttctagaagaattttgaaggatggctttcgggatggtttggtaggaagaaggaggacatggagggcgtaatctctgtagagaagccacgaccaaaagcctctcgttaagacagagaggacacacaccttcaataacatctactggatggatgttacaagaagatgttgagctttcgttctgtcctttcatggcttgtctaagagagagagagaggtgaacaaatcgaagactgtttttgtttagagacttgatgcggcacatctacttaagatggtgagaagcacaatctgagcgtgtgtgggtggatattggtttatgagctgccactatttagacgatgttaaataatgaatggtatctgactttgaaatataacaatgattcgaaatacgatcatgattggtaatgaaacatattatagttagggaa

SEQ ID NO: 74788 - DNA, 433 bp, Arabidopsis thaliana landsberg
ctaagcaatataagcagtttttgcgctgaggtcatatcccacgttgtatccttgcatggctataaccccaatgatgacatgtgaaaaggactccttgttattctggatcgccaaacatcgaatttcagggggaccttgctgtatgaatatgttatgaatatttacgctcaactcagctcctccatcaaatttaaaaccgacatccatcttctctagcctttctatggtatccgctttgtagcacagcgttggttcatacgaaagaggtctgctgcctataagatcgtcaaacgcatccacaaatttgtagtacaaatttgtggacaaatgagacagcgtcgagcccgtgtcaacaaatacttggactgggtcgtccaaggttattttctcgccaacaataatggatttccaattgaaagattgtgtgaccttt

SEQ ID NO: 74789 - DNA, 452 bp, Arabidopsis thaliana landsberg
  unsure (1)..(452): unsure at all n locations
agagggtttattctctgttagctaccttttttatattctctatttcttctgccttcaaaagaaagtgatatcatgagtgcttcctattcaattcccctactaacgattctctctcataaaatcatagtgaacacccactaaaacatttgtaccataatccacatgctttcttatcataagtcactacacctacttgcaaatgaacactggattgcttgaaacacatgcatatttcgcaggttgagctagaaagtgatgtaagatacttatgcaaagacttaagcagaccgtttgctaatcatccaaaagaccatgagaaaataacatttttatgtnnnnnnnnnnnnnnnnnnnnnnnnnnccctctgccaatgaagaggcagaaccaagatcgctagaaacctagcaatgttcttaagaacgaaatatatagcacagtcattggctccaat

SEQ ID NO: 74790 - DNA, 424 bp, Arabidopsis thaliana landsberg
  unsure (1)..(424): unsure at all n locations
tttgtctcctttttttttcactccagctctttttactctcacactgtttttttttaannanncganncacataaataaaanaacccnacccccagccccccgccccgcgcccgcgctnnaaccnnnaaaacacaaaaaaacaaaatccataaattaaacctacaacacacaaaagnncttnnnatacttcttcaaccaaatcatacaaactttttacctcaganactcttctttcaatacctncttttaaacattttatcactctctttctttcttcctcggatttgacaccacatccatccctatttcttatctagtattcctacaaaaaccccataattcaaattatttttcaatatacaatatttttatcaacatcaataacttctatataacctaattatttatatttaccttataaact

SEQ ID NO: 74791 - DNA, 511 bp, Arabidopsis thaliana landsberg
  unsure (1)..(511): unsure at all n locations
aaacgacgaccgcctgctgcggggtcgacttgttgtcttcggtgacgaggcgcagcttctttcctagcacgccgccctggccgttgacgcgctcgatcgcggccgcgaggccgtcgcgccagtgcgcgtcggtcagcgaaccgtatccggtcaggccgagcgacgagccgatgacgatgtcttcagccgannnnntcgcggccatgccgacgctgagcgccgccgccaggataatggactttccaaatttcatcttgttactcctcccgagttaagtcgtaccaatagtgccggtggcccggcgtgttacggtttatttcgacgcggcgtcgcgaacttcgccgagacccttgatcgccgcctgacgcaggaagccctggtccgacgacaggatgaatacgctggcgccatgcgacttcagccacgcggcttcctgcgcattaccgacatagacgctgatgttctttttggccttgcgcgcggcttcggagatacgctcgacggcgcgaac

SEQ ID NO: 74792 - DNA, 543 bp, Arabidopsis thaliana landsberg
  unsure (1)..(543): unsure at all n locations
gatgtaagaagtttatcgtcaggcttgttttcttagcatgtgtactgcgtactgttgacaaatgacaatgcattcgatgtcaaaaaaaaggctacatattgtagtaaaatagtaatattgtcttccttttttaattaccgaatgttctaggaattataatttaaaaataaaccaaaatgatggtcattggtttaattttgaaatgttggtaaaaggaattagttaaatatgaataaatcgactctgatttgtagtcattttatattattttgaattgaactttaaatctatagtactgaaacactaatgtttgaatttgtgtagagggagagttgaaagagatttgccgacttcgacggccgacacgcgccgacaatacatgcatatgtcggctatttagatctctacattgaatatcctaaattacaataataccttctcccttactaatattctnttgatcaacctttattatcttttggtttttatggtttttcagaaattatttgttggcaccatgttcgcttttttttgaattatata

SEQ ID NO: 74793 - DNA, 234 bp, Arabidopsis thaliana landsberg
aagcaccgacgagaaaggataagcaacgcctcaggtattgcaagaacttttacctaatggtaccaaggtatgataaatgtataggaaatgttaattttatcgtaaccttttttttcaaacctagagcgtaataaatatttttctgtactaatttttttttttaaaatctttatggtggcttttatgtaggtggattaggatactatgcttgagaaagcactcggatatgtaaag

SEQ ID NO: 74794 - DNA, 472 bp, Arabidopsis thaliana landsberg
gaaaacacctcgcaggagataataaattgaagtcatgttgagctaaggcggcctaaattttaggatggagaagcttgggaagaggacgggggagtagtggggtcactgatggcttctccggcgattaaatcggcggttgtttcagctactccgaccttatccttcaagtccttaagcaatgatccccatttcattgttccacagtttcgattccagattcattcatccgataaccactcctgaatcggtcggacacgacccggatccgaatcggggctcacaaatcaacccgtttcttttgattaaggaaacggaatcatgaaagacgaacaacaacccagacatcaaaactatgtatgctggtgcaacgtgtgagattaggctttggcagttagaacaaaacctaagatccaaattcgcgattactgagattcacaccatcgacaacactttaattttttccttcctcctc

SEQ ID NO: 74795 - DNA, 578 bp, Arabidopsis thaliana landsberg
cgctaactaagctgtggccttcttgatctatggtagatcattttttaacatgttcatagcttactgacaggtgcgaggtgttttcgtaagtggctctgaaaatcaacatctttcccctggagtgagctgaagtagacagattgacatattcatgactgttactgtaagtccttaaccctgtctctcctaaaatcgagatctttttattggggtcttagataaatttgaccgagtaattacaattttcttaaaaaaacttttgaatgagaaaaagatacagagaatgtttgtatactttatcatgagattagaaactgattttaattttagtgcaaggaatctacaacaaagattacttgcttcgagctatcactttccttctttattttgttgtctacaacaaagaatacttacttgaacttgtcaccaagttattctctccctctctctatctcatttagaaacttaaaacagttcaaaatctctctgttctcattctttcatgtgaagacttacttaacttagtttcctttgatgcttttagcttctttatctaaatggtcatcatcatcaccatg

SEQ ID NO: 74796 - DNA, 604 bp, Arabidopsis thaliana landsberg
  unsure (1)..(604): unsure at all n locations
atgatatactttgattaatatatattaaatcattctcaaatctacagatttatcataatataaaatatcacaaaatatatagaaatgttcaagttatcaaaatgtagttaatatttgttgtcaacaagatcagatatacttattataaattgtcttttaaaaaatattttttctataaaaatcttcaaagttttcttacaatcaacattttttttaccaaaatcattaatttgattattgactattgccaaatttcagtttacctttaaaaatcattgaataacttatgattcaactaaaattttgagtattgattgaaacataagaatatatgattacatatcataaccaacctagagattcaatcctataactcccttagacgatgaatcttgttgttctgctaatcctaacattactccttttcattgtttcttatgtagtagacgcaggccaagtcattttggttgattccaacataactcgctcttttgtcgacatggaagctgatttctgtgagtttctctgtcgattntgcttgcagttacgttttcataactttgtcaccacttcttttggtcatttttccattgattatatatat

SEQ ID NO: 74797 - DNA, 254 bp, Arabidopsis thaliana landsberg
gtgggataactgacaatcgctaccaaacaaggaatttcttctgacttgcccatctctattgcttacggtaccgggttatgcattgagcctgatctgacgatctctgatgtttatgcacatcatttacctacttctcgggcacattgcaccacgctatactgaagccaagacacctatccaatacaactatacaaccactgtcatacaccgaacgccttacgatttcatgcatactcacgccatctctagggcat

SEQ ID NO: 74798 - DNA, 2271 bp, Arabidopsis thaliana landsberg
gtcaaaaatttgaggggatgggagcaaaatatcaattcgctcactccttgcactagcaaattgcataaatgctttgggaaagcaacacaaaaagggtcttgcttatgtaccataccgaaacaggtacgtgtcgatatgtgatctttcttatcttaagatggtcattatttttggcttacacacatgtataatttcagcaaacttacgcggattctcaaagatggtctgagtgggaactcccagacagtgatggttgcaactatatcacctgctgatagtcagtatcatcatactgtaaacacattgaaatatgctgaccgagcaaaagagattaagacacacatccaggtgacaataattttcgttgaataattctatttcatgagacttttaattggtccagaagtacttactattcacttttcatgcaatttagaaaaatattggtaccatcgatactcatatgtcagactaccaacgaatgatcgacaatcttcaagtaagttaattacttttatctacttctgttacaaaatgaatatagtaacagtatataactcagagctttgctttcatagagtgaggtttctcagctgaagacacaactagctgaaaaagagtcgcagctaagcatcaaaccttttgaaagaggtgttgaacgtgaactttcttggttggatggtttaagccaccagatcagtgaaaatgttcaagaccgtataaacttacagaaggcgttatttgagcttgaggaaactaacctcagaaatcgcactgaacttcagcatcttgatgatgcaattgcgaaacaggttagctgctaaagcttctcctaattcagaggtcaatatgttgcattactgtaacctcttctttgttttataggcgacagagaaagatgttgtcgaagctctaagtagcagacgacaagtaatacttgataatatccgcgacaatgatgaagccggtgttaactaccagagggtaaacctttttctttatcatatatttcaactttgcacttcatcatggtcattgcttattatccttattatttttgttttacaggatattgaagaaaatgaaaaacatcgttgcgaactacaggatatgctcaatgaagcaataaataacaatggaaacaaaacgtatctgcatattcttaatcagtataagctcctggtaagtagaataaacagaacagtgccttattttcttgaccatgaagttcttacattacgattcacatttattgttgttttcaacaaatctaggggatgggtaatacggaactacagtttgaaatggcaatgagggaccaaattatttacaaccaaagggaagcccagagaaacctatggaatttgctcatgggtttaggagttgaagagaaacaagtgttcgatctcgctgcaaaacaaggaatcacaatcgaagactggagtagtatagcgtcgtttccaggacttccttaccggaaacagacaccgagtttcataccagcaaacatccctttcgtgggccactcatattctaaatcctcctgcactttccagagctatcaagacccttcttcgaaaggacaacaatgggctccaactcctactttatgcagagaagaacaccacagctcttactacttcatgagacaggagccaccagcatttgtcaatcttaggaaaagccacgatggttgggttggtggcagcagaccagcttcacggattgacacaggaggcaatcatcgccgagtctcatatccacaaactgtgaacaattcttctcctcggatggcctcaggtcctactttttaccagactcctcaaagggtacgtatcaaaacagctccattgcttctttcaagttaaacgtacctaagatgttgtttcagttactctcaacctcacttgtttggctagtaaaacaacatttttttgttctgattgcaaaatctgattaaccaggaaatgttgctcaacacaacgagtccttatagtagtccgcgagtgggactcatcaacggggccaccaccccgtccgtgcaacctttctatggaagtcctcgtgccgtgactgtgagaaacggttcatacaacactccactcgcccccgctgcagtttcaactaaaggtgcgagaaaccaacaacgagtgtttggaacgagcccactctcaggaaccaaaggcgtcaagaactcttcatatggacagaacagtcacaaaaagttgtacagaggaggaggcactaaaggtcacagtaagaggaagcaat

SEQ ID NO: 74799 - DNA, 154 bp, Arabidopsis thaliana landsberg
tgcagcaggatgtcgagataagccgacggcgccacgaagtaatactggggtggcgtcgttggtggtgaaggcgcttaccccttttacttttatgctccgaggccctgctgaaacgctaggggatttattacaccctcgaggcttaccgctacac

SEQ ID NO: 74800 - DNA, 345 bp, Arabidopsis thaliana landsberg
tgcagacacacggattgcttttatcgtattatacccaactcttagacagggcacggggtcgctcactccttagcccctgcccaaatactaagcaggaataccgggttgccacatacgactgcaggtttggactcagatactatctgacccactgttgctgcaagaagcttcgacgaaccgccacaatagagagcatacgtagctcctggcgggcggtttccgaacttggattacgtcattggaagaggctggaggagactaacgtagatcgcatcttcatctctcccgaagagtttcataaccttggacagtgggtggaacaacctgcgtgaacgactccatgct

SEQ ID NO: 74801 - DNA, 644 bp, Arabidopsis thaliana landsberg
taaccttcgaggttaattaaatttgtataggtaaagggcaactttaatccgaatcatatgacaatgacatgacaaatgatgatcgcaatatacataccaacaaatgataaataatttgatatatatattcgaagatagaaagacgacaaatatctactacatattacaccaatgaactagctctgatggctccttaaagtgatagcctgattcatgtggtttcgtggacccaatggtcctgttaatatactacatgatttattttgtgtgtccaagcattgtgtatatcgtatttgacagaattaatagctttcgctgatgacatgtataattttttctaatcatcggaaaattttggattgaaatgtagacatatactgatcagtgcatgttaaaaatcatatattttgaatatgtaaagtgttcaccataatcaggcatatatagttgcaatcgtaaagaagtacttgaacccatcccaacaattcatgatatgtatctttcatttatttcacgaattcccaaggaaactaaaatagtatacgatacacttggcttcagattgtttccctatataatggcactaactctccatgttgaaaccacattaatttcttataaccaacaacaataatgacaaacca

SEQ ID NO: 74802 - DNA, 417 bp, Arabidopsis thaliana landsberg
aggccgctggaccacctgaccgagccggtcaccgtcgaagactgctctttttcgtgcgcacctgactccccgctgggtggggggtcattttcgccagcggatcgctaccaacccgctcagctggctgcacgagcagaggctgcgccgcgcgcaggaactgctggaacgcaccgaccacggcattaacctcatcgcgcaggaatgctgattcgccaccggcgaaacactgcggaggcatatccgccaggccctgggaaccaccctggattcctaccggcgcaccttaaccgggcagatctcggaaacggaagccgctgggggatgaattacttggcggagcccgggtggccgcaagctatccctataacggcccggggagggcggctagggctgccagccgctcgagagatgcctgca

SEQ ID NO: 74803 - DNA, 546 bp, Arabidopsis thaliana landsberg
  unsure (1)..(546): unsure at all n locations
gatgaggacatggaacactttccgggaaatgccatcgcttgtgtcgattgagggccgcttgtttgagcggcagccctcatacgtgcattggcagagttcgccgctagaccgggaagttcgggcgggccccagccttcgtgtcaagcggggcgtcgcccagcttcttgcgcagcttgatgagcgtgctgacnnccgctgcgctcagcttattgatgatggcctgatcatgatcggcgacgttttcctgggggatgactccagcggcggtgaggcgctcgatattcgagaccttcggggcggatttcttcttgacggccttcttcgccggggacttcgcgacggcctatttcacggctgccttctttgccggagcctttttggcggacttcttattagctttcctggttgccacggtctttcttcttataggcctgagttcttctcaggacaaacgaacgctgaaacgggcccgaaacaaacacaaatgcaattgagtcttcggcaaaagatacgtgatgcgccgtagaacaaacgaggcttttgaga

SEQ ID NO: 74804 - DNA, 573 bp, Arabidopsis thaliana landsberg
tagttggtttgctataaattgatatttcttcattttttgtttttaggtttctgctgatcacagaggggtttggtatgaatcggatgctaaggagcggcgaaagatgcagactgagacactttctgctgatttttgagacctatttccgtattctgagaaacacactgtattcaattggcgaaaggtgttttcatatattctaaaagctaattttaattgtgttttcagctgtcgtgagtaggaattaaataatgcttatgttcttatcaaaatctcaaaagaatatttctccgtatgcaaaatcagttccagtaaaattcttggtgtgaattctcgttggctttacagtcacagataactatttaactggtcatatgtctgtgtcagttatttcaattctattttacaacgtcactttcactaaatttcagaacagaagaaattccaacttcaaatccgggtgcctgtggatcgcaccctttgctagctccatgcttggatgggttggcaaaatcacccaacaactggacttggactacatgggagatcttatgaactatctcaagaagcttg

SEQ ID NO: 74805 - DNA, 548 bp, Arabidopsis thaliana landsberg
caagacgtattcacaaatgtgttacacttccccattcgttcatctgtagtcaatctattgcaaaccatgttatgatttcttagttaggtgtaaaagatactaaaaacaaaaaaacttcacattttagtatatatatagattcaatttatataaagtggtttatgttttctaaatttgagaaaatccaaaactcaaaattgttaaaacaaaaaaaaaaatccaaaattaatagttaatacaatttatgcaaatatggaaaaagtatttgtataactgtaaaattggtcattactgaagaataatcatttaacattttattctaaaaagatatttgatatagcgttcattctaccgacaaaattactgtctaattgtacccgacataaagaaaaacaattatagaaattattattactcttagaatataggaatatagaatatttcttattcacgatgatgtcaaaatatgtacatacataatttggatgctactcctcctatacctatataaatattaagattttgtgcaaaaaaaactttcaaagtcg

SEQ ID NO: 74806 - DNA, 381 bp, Arabidopsis thaliana landsberg
agcactgtacaagcacttggattattccatgctatcacacaccctatgatcagggttcttcatccacagttacacatatgacgcttaatgacagctacggccgaggatacaaatgcgccacacagacaaagcgtgatggatatggaatccatgtaatcaatactcgatgttatgctcatactgagcgcttgcgtagagctaggggacaccacatctgagggcaaagagtatagtgtaatcccctacgatatcgggagtggagctcagggcggtagataatctagtctctatcagaatggcgacaatctcactttcctaggtggaaccgaccaatgatgatgctgtacatacacaatgctcgttcggagcgtagacagatgc

SEQ ID NO: 74807 - DNA, 391 bp, Arabidopsis thaliana landsberg
  unsure (1)..(391): unsure at all n locations
ttataaantaggataagagatgaatgacaatattatatgtgacgcattttacttgaatatgctaccaactaaatgaaagaaattttatataaggctcgaatttgaaattagtggaattgataaattttgaatgaatgaaaataattttgccccccaaaaaaaaaggaatgaaaaagaaataagatgaatatatatatatatatatataaaagcttggttgttggttcattgattgatcgatttattaaaattaaaagcttctatgttctttgaatttggagaatgcaaattatgatcaacgaactattcgaaataggttggttttgtattctagaccaaaccggtttgttcattggtttatggaaatttctgaatatctgaattgggagct

SEQ ID NO: 74808 - DNA, 374 bp, Arabidopsis thaliana landsberg
gacacacctcgccgcgcccggtggaggaatgcccagctcgactagcttcttgagaagatattcgcgcacgcaagaccgcaggaccgccctgccgacgcctatgcgcgaataaggcgtgcggcccgagcctctgagctgcaattcctgcggtcccatgggcgttatcaatacgccaggaggacgagcccggtcatcgccgagctgacccgtccacacaccgaactggagcccgatatacaccgcggaaagcgttatgcccccggccaacggcttcttgcccgaacagacgtcgagaaaatcggcggaatgtgcacattcatgagacaagccatgatcgcgggccaggctttcattgacatgaaaaagccggggat

SEQ ID NO: 74809 - DNA, 436 bp, Arabidopsis thaliana landsberg
  unsure (1)..(436): unsure at all n locations
cggccatgagnnnnnnnnnnnnnnnnncggacatggcccttttcatgttagttggaggctatctgcnnnnnnnnnnnnnnnnnnnnnnnnnnnnnnnnnnnnnnnnnnnnnnnnnnnnnnnnnnnnnnnnnnnnnnnaggcattctggcacggcttgagagaaatgctatgcatggggttagagcggataacctatcatcaacagacaaggctgaccagtgctgctaaccagtggtacttgcggacggatgaacattcgcggtgcctggcccgcctgaccactgttgactcaatcggccatgtagaggattctgtacaaaatgtgtacgccaagagcacacagtccgctgacgctgggatgctattaaggagacaaccacctcataccgcctgatgctgaagcggctcgatgtcaggatgctctcccatgggcttc

SEQ ID NO: 74810 - DNA, 108 bp, Arabidopsis thaliana landsberg
aaacaaacaaaaaacacaaacacccatttattttcaaccaccccaccaacaacccaaagagagaattccttaaacattctaaccataccccccccttaaaataaacac

SEQ ID NO: 74811 - DNA, 469 bp, Arabidopsis thaliana landsberg
cgcctcaccacgcgcttgttccggagtcatgccagagatattttctccaccatcaccagccgaatcctcataaggtatttggcttttattcctcttaatgtggatgccataatcatcaatgaattgttatccagcttttcaaggtggctcttaaattctgctggcgtaaattgagcaagtaaagctttagagtcagcaataacttgatcttttttatccccaaacgttttaacagccaattcttcaaaggctttatcatcagcggctttgcgctcagactctttaccctgcatccccttaagagattctattacagagctctcataaaattgcatgacagatttggcttgtttagtgctgagccccgccttgagaaaggtttctctaatttttgacttcatatcatctggtatacccataccttcggggctttccgctttatcgaactcatacgcgttagcatctttag

SEQ ID NO: 74812 - DNA, 546 bp, Arabidopsis thaliana landsberg
  unsure (1)..(546): unsure at all n locations
ccggtgttagctatggaagcttctccatctcctatttactccttctacagcacctgctattcttggaggcatagggtttggctatgtgatgtatgatattactcattactatctacaccatggtcaacctaaagaaccaacctttaaacatcttaaggtaagaaaacccatctctagacatctcctcttttttcgcattcaagcttattcctctgcatttctgatgaggtttttggtatacgttttacagaaataccacctgaatcatcactttaggattcaggacaaaggatatggaatcacttcctctctatnnnnnnnnnnnnnnnnnnnnnnnnnnnnnnntaaagccgccgcgaagaagagctaaatcggatttctgtttgccatttttcagagtgtcgaaaaactcactggtattgcgtattctggattcatcaggtgattcaatgactgtttaactacttctgtatacgatctattcaccatatttgaacatatgtttagtgggttaacattattcagaaattgggctttgaattgact

SEQ ID NO: 74813 - DNA, 439 bp, Arabidopsis thaliana landsberg
cccgcccgccgcggtgaagaacaggacggcgccgatgacgacgaggacggcgccgcccatggtccttcgccgggatagtctcagttccgcggggaccttccatatgtgtgccatcgcgaccagccaccgcacgtacggttcggcgcgggccgcgtcggcttggactcgccgcagctggggctcgatctgcgtccgccgtgccggatcggtctcggccgcgtactgccgggcgaggttcacggcgatcacgcggtacttcagcagttcgtcgacagtcgtcgccacatagccgaagaaccaggccgggctcttttccacctacgaccgcagccccgtgagggcaggcgacgccagatcctcgggcgtggtcagtcgcggctcgagcaccttgctggtcgaccagatcgccaggcccactccggtcagcgcgatcaccaga

SEQ ID NO: 74814 - DNA, 560 bp, Arabidopsis thaliana landsberg
ctttattgttaacattaattagcagtttggaagtaatatagaaagacgaaattgtgaacttcacatttttgtaacggtaccaaagtagataagacttcttttacacatctacttaagttccatatatctcttcttctaattactacactaaaatataaaaagaaaaacttaactatcaagcaactaaaagaatgaaaagtatttgtacattgtacatgaggctagatggattagagatccatgttgcaattcaataatcgcattcctcaaattagctttccaaactttcatttatgttatttggaaagaacataatcgcaggttttattctcgaataactagatttctatcggcttgattatctatatcaaaaacaccattcgttactggctaaagccttaatagttacctattagatcaattgacttagaaaatcttagaatatgttataaatttggtttatttttatgtttaatgggcgaattttttttgtttttataattgcttgatttttaaaaatggtgtatttttttaatgaaaaaaacaattactaaccgatt

SEQ ID NO: 74815 - DNA, 413 bp, Arabidopsis thaliana landsberg
tattataattactatttaattaaaaacatttcaaaatttatgaacatttggtgcaattgtgtataactccacgagaggtttttaacccaagcaggggcactatagaatacaagtttcgtagtttatagtatatttttgagaaactaaaaactccaattaaacagattttaggtgttcaaataagatagaaaacgtaaactaaaaactagtttgaaaatactaaaattttcatattcttgattgggaatttaaataagtttcttaaagacaaaatccaaaaactgactcagaaaccactaccgtatcagcttcaggttataaatttgataatcaattttttttttctataactttattaggtatctcgaaagaacagtaatcgaggttttactgttttaatcaactgataatag

SEQ ID NO: 74816 - DNA, 493 bp, Arabidopsis thaliana landsberg
gccgctgtgtctgattcttgacccgcagctccccatggattggatcccggtttatcaaacggttgtgaactaggagccacttccaaaaaacatgaaaaggagtggatttcgctaacaaaaaaagggccaaaccgatctgcttatcctgaatgaaaacagtacaagcctcgtgggacccggggttattgtttctctggaccggatgtcctgttcaacggtttcacatccttgacggtatcacttgggagacgaacggctgcatgctcaaggtgtacccactctgatcttaggaacgagagtatccaaggttcacgtgctccgctaggaggcctgatgcgttacaactttcccgagaggatcgattctagacactaaatgctatgtgggctgaatcagattgcataacgcgagacttgtgagcccatgtaagagcgataaaagatcatactgattcttgtctacttgataaggaggggtgttgcgcagactgttc

SEQ ID NO: 74817 - DNA, 320 bp, Arabidopsis thaliana landsberg
ccaaactgttcttttaattcaggtttctcatatatcattacgcagaataccgcaggttctactcaatgcaacctctttgaaacagcctactctaacttgatcagacgtataaggaaaaacagcgtctatcacacgctctacaagaaggcttcgctatacacgcattaggcacaaatctaccttgaacagtgcattagcggggaatatctttcgaataacgactgaaaccgcagttctcaatgccctcagcacgaaagaaatatgctgtaaacaaccatccaccaatgccaatccactcgaccccaataggacttctttct

SEQ ID NO: 74818 - DNA, 558 bp, Arabidopsis thaliana landsberg
  unsure (1)..(558): unsure at all n locations
tatcgaaaacaaagaatttgaatagtcagaactaaattgaaccgaataactgaatatccacttctatccaaaacaataaaaactattatcaagtattatgatgattttttattgagaaaatgttatttaatatctcaattttcaaattatgatctttataaatcagcttcatatgtgaatattttatatatgtagccataatttaaaagttaggattgacatttttctttttttttttaattagtcagtttatttaaaataaattttattaaaccaaaggtaattttcaagggaccaaataaactgaataaaataaagcgaaaacgaagacaagagttacaacaaaatatttttttattaatctgcaaaaatgaataatttaatttagtgactttcatcaacagctactaatctatttgcaaggtacagttgtctcgagaaaaagacggcaacgtttgtctatttgctgggtccatccgaatctagaaccttaagttttgtaagttttcatttgtttgtcacgganaaagggtcaccgcataccacaataaaattacc

SEQ ID NO: 74819 - DNA, 338 bp, Arabidopsis thaliana landsberg
gccggggttatgggcagagactatgcaccgacccatcgaaatttcgctttatcctagcgggtgctgaggcatggggatgggatcatatcacatctcatctggccctgtgtatgcctgggcttccacagggactgattgaccagtcacagcgataccactaacgctttatggcgctcacaaaagatgattccagctactgttatactattacaaccacgattcgctcagtggacacaaaggacgcatgctttaccacccggcgatacaggctctggcgaaacgacatgctccagaatgacctgcgggggcggggagttaattagcacgggtggcgaatg

SEQ ID NO: 74820 - DNA, 609 bp, Arabidopsis thaliana landsberg
  unsure (1)..(609): unsure at all n locations
aaaaagtttccngagatgccgtaatcagtccgtctctctgtgtgactactttgatcacttttctgtctttgatataaatgatcgcataaccatgtgtagcgagcactagggtcccgtcacttaattcctggatgtcatttattctccgggtcagcagcggacttctatcaaaatacttatacagtttccccccgaagaactctgacaggccgttgatgttggaaaaccagagactttcttccctgtcgtaaaaaacgctgtacgatctgttnnnnnnnnnnnnnnnnnnntgtttgtaaaataatgaactgaattcaaatttttgaagcctgtcctgcaaaaccaccacgccggatgaaagggccatggccagttttttgtttttaccaaggctgaagttcttgatgacaaacatgaggtcatttgcctcatgaaggtagtcaacagtactctctttaggtgtattggtgattttgtctatatttctgattctgcccaggccataatctggagcaaaatagatcgctttttctgttgtgtcaaaactaagctgcttgatgatgttgaatttgcttttgtccggatcaggaattcatcgacatcaaaact

SEQ ID NO: 74821 - DNA, 511 bp, Arabidopsis thaliana landsberg
tactttggtcctttctatcttctaatattaaaccatatttttacatttatttagggtttgatcattgagaggagtcaacaatctttagctaaagaagggaagaagaaaatgatctatctaggagatggagctggcgattactgtccaagtttgaaactaaacactgaagattacgtgatgccacgtaagaatttccctgtatgggatctaattagtcaaaatccaatgctgattaaagcagcgattagagaatggaccgatggccaaagcatggagatgatattgataggaacgatcgaggagattagattggaggaagagaaggagaagatgttgactagtgcggagaataattgcaagatgcagaccatctctatcgggattaataatgttcatcatgaaccaatattgcctcgtgctcttcgtgtgtctcagtctagttagacggttttgaaatagtggaggaagaagatttacaactgtggtggttcttcttcctcatatatgcata

SEQ ID NO: 74822 - DNA, 534 bp, Arabidopsis thaliana landsberg
cctgtggaagtggttcagcgggtggaagatcttcgtcttcatcccgcgcgagaccggcttgcgcctgcccgtgctatcgatcgcgctgccgatcacgctgctgttcgcacgcgcgcgttacttccgctggctgtgggcgcctgcgttcgtcttcgccgttctcctcggtcttggcccgcacatgggcaagatcggtgacgacatcttcccgcccgtgcgcgcgctcggcacgctacaaaccgtcgcggcgatgggcatcggtgccggcgccgtcattctcggcacggtgctgtggaacttcgtcggcaagtactcgctcgcgtactggatgcgcacgtgcatctccgcgattgcggcggcgctcgtcgtcctcctcgtcgtgcccggcagtcgcgcactcggcgctcgcattcgcgtcttcgcagacaccaacgctccgcgtcgcctcgagctcctcgacatcagccacgagctcggcacgcttgccgcaggtcgcaagcagcccggtcccggtgcggagaaccactggtggaa

SEQ ID NO: 74823 - DNA, 584 bp, Arabidopsis thaliana landsberg
  unsure (1)..(584): unsure at all n locations
gaccctgaggcggatgcgggccagagcccaggcgagcctgaactcgtttccagtcttctccagtcgttcattaccagtagccttggagcgtatgtcaactcgaacagcatggaatgggcgtcgagactgttggagtactgcaccccggagaagatcgtgccaggacgaccgactatgctgcaagcgttcaagcaggtggaagagcttcaggccagggacgccttggtcgggcagctggtggtgagttaactttttcatagtattggttcgtatgtcgctaacacgctcgccccaggctgttgcccgtgacttgggtctttcaaagatgccctcagcagaggtgaagaaggctttggaggctccaatctccaaaaatcccctgtcggttgagcctgaccccaagaaccccgatgccatcaagctatcgacaggtggtttcctctgtctgacagcctaccgtatgtttgcatccgacattttcgatgccgattacgaccagcccgacgtcaacatcttccctgagcatcatacactggtgaagcgattccttggagacgaacctcangcgcagatcgtgggcaatc

SEQ ID NO: 74824 - DNA, 390 bp, Arabidopsis thaliana landsberg
cctaataactgggggcgatgcaacatattttaagtgagccgggaggatccggtgactagggtgataagacgacgacaggccatggtacaacggatcaacaccgaacgaggcactatgcaagttgctcacggccttgaggccagaaatataaaagaccctatctggacgccataaatgaaaaatcacttgtgcgatccgctcggaaggtacctcaatggagtgacaaaaaaaactttttattcaaccaatatattggctggattaaggtagaaagcgaggatccataataagactaatatccaatcctcaggtagagggactcatcaaattttacatggattgtaatagttggaaacaaatagctaaacccaaaaatctggatcaaaggca

SEQ ID NO: 74825 - DNA, 321 bp, Arabidopsis thaliana landsberg
  unsure (1)..(321): unsure at all n locations
accatggaacgcatcaacccactaaaaatttgtggtttataaagggcctgaatcgcccatgggtggagtgggatagacttaacttccccacctatccactcaatgaaggggggtcggacctgagggagaaggtatttacacccttcccaaccgggtatacggagtccgcgacttaatttattcagctagccagagctatggacctattaaagaaggacacacgctacctgttactctagataaagatcgtacctactcagggggttatgggctagatggcgaaaaaaagaccaccannnnnnnnnnnnnnnnnnnnnnnnc

SEQ ID NO: 74826 - DNA, 515 bp, Arabidopsis thaliana landsberg
  unsure (1)..(515): unsure at all n locations
aaagaacttattccaacatcaactgccggtggcaccgccacgcagaggtggagcttatttcgcttttctgaggcagcgggactcagttcgttggggacgacatcaggcgttttacagcgggcgatgtggtacttgtcggctccaatctgccgcactactggcactacgacagcgaatatcaggcggaaggaaatgaccagaccgctccatttgcaacggtcgttcactttatagagaatttttggggagagcggtttctgatgctcactgagaacgcgatgctcaggaatgtgctggacagggccagacgcggcttgtcggtcagaggcgaaccgagagagctcattgnnnnnnnnnnnnnnnnnnnncacgctgccgaaggcccctaccgagtaatgcttttgatggagtgcctgatnnnnnnnnnnnnnnnnnnnnnaaacgacgcgctggcttcactgggatgtagaggcgataacgccgtacaggaaagtgaacggatcaatgccatttac

SEQ ID NO: 74827 - DNA, 575 bp, Arabidopsis thaliana landsberg
gtcggaaataggaatctgtgacaagataaattaaaataagggctaataaaaaataaatttacttaatatttctgttattttttggattatttaatagtgaggtacatgttcagtggagaccatgaattttatatgttttcaaatcttttgtgtgagagattttaggtgaattatagagcccaaagccctcttgaccagcttttgctgttatttctttgcttgttcaaaacgtgctaaacacttatacgtgaatcaaataaataataaatcaataaaagataggatgtgtattcaactaatgtattcaaaacgaatgacaaatagtaaacaatcataataaacccgatcagttaacccaaacaagcattatacattgagatacaaagttaggatttttagcttgcaaaacaagtaatataaatttttataaaatattctattggacttataataggaatccatataacaaacataatatgcataacaaggtataaacttctaaattaaaatttatatggctccgacaattgccattcacacaagaaaataaactgtatagagtgaaaggatagaga

SEQ ID NO: 74828 - DNA, 267 bp, Arabidopsis thaliana landsberg
  unsure (1)..(267): unsure at all n locations
nnnnnnnnnnnnnnnnnnnnnnnnnnnnnnnnnnnnnnnnnnnnnnnnnnnnnnnnngcaaagggacgacttacgccatggacccttcccatggggggacagccgcagttgacaacggctggtaacaccttgaccgccgaatggctgaccgaggaatactaccgaggacgggctcatgcatgctaagctcagtctggaagccatactgaagacaggcgattggcgttagctgaccctagaggaatcgcaaccctactggcactgcat

SEQ ID NO: 74829 - DNA, 338 bp, Arabidopsis thaliana landsberg
aatttattcggttcaacgtcgaagagatgtttgtaagaggtgttgaagtagtagtagtagatgtcaatctcagtagctggttcaatccagagaagtgtagttgggaggtgaaactcacgcgctaccgtagacacccacgggacgagaacagagtagattaccccggtgataggctctgtttcggtggtggcgtccagattggctttgatgatgtctctcagggcgttagaaccacatcgcttgagttctgacatgtagattttgtggtcttctaatgacttgagaccgccttggaatccattcgtggaccaagcgaaggatataccttttgtggaatg

SEQ ID NO: 74830 - DNA, 592 bp, Arabidopsis thaliana landsberg
  unsure (1)..(592): unsure at all n locations
cttttcttttgttacagtaacatttaggttcatttttagttcgcttgttatagtttttctcttcagctgcatgttgatcatcgatgtcgttgttgttagctgtgaatcttgtcggaatcttcacaaattttcaattctcatagccaattttttttggcgaaaaaattggtcaccggagagactctcttttctttctaacttcattatgatgcattttcattgaatgtttgctcttgattcccttattattttaatctcccgtaactaatgtaatttnnnnnnnnnnnnnnnnnnnnnnnnnnnnnnnnnnnnnnnnnnnnnnnnnnnnnnnnnnnnnnnnnnnnnnnnnnnnnnnnnnnnnnnnnnnnnnnnncaatttcttttccatgcagaaaaaaattgattatgtagttcacttaggttttgatgattttcttgttttgattttgatgatgttcttggttttgtttggcagattatcgatggatgataataagcttgagccaagaaagaagtagttaataaattcggcatacgtcaacttagttttaaacaaaaaagatttgcatattttaatttcacgctcaaaaca

SEQ ID NO: 74831 - DNA, 393 bp, Arabidopsis thaliana landsberg
ttttttctcctggagttgagattatacgctttctgctgtattgaagaagaagaagttgtgtcctatatcttactatttagatttggggggaaattgataagggctctatcctcgcgcagcactaaattagggttacgtacggcttaaaaagggcaaaattcgatagagtgtgtgtgttgtgattttgacgaggttcttctagccaaaattactgtgtaactactgtcgacaccaatttgggattgtattcaattttttgtgatcagcaatgtttgggaataactagttgaacgcactaaaagggcctcaaagctctctgccttggtcaataggaatggcctttgcatcgattgcttcctcccacatggcccctcctaactttcaacctcagtt

SEQ ID NO: 74832 - DNA, 419 bp, Arabidopsis thaliana landsberg
actcacttgcattaaccaagtactgcaactaaagactcaccaggaattttgctgataaggttcctagctttttctgcccgttttagatttttgtgtgctcctctcacagcactgaagcgattttcatcctgataagaaacataattgaagagacaattaagaatacatacaaaaaagctagtctgtaggaagttcacaaaaaaaatgatactctctaacattaaagccataagaaagtagacacgcttaaaagaaaaagtgttctctaatagttatagactgtggttaaccttagacttagacaactctatatttttatcagatcaattggtcacaagtagtcttctcttgacctatcttcagaaaagacaactctatattttatcaggtaaactggtattcaccttttcataatcatc

SEQ ID NO: 74833 - DNA, 313 bp, Arabidopsis thaliana landsberg
tagtggagagtggcctatgtgatcttatttttgattaccacttcttatagaatatctccacgggtgtgaacagcggggcttaacacatcaaccactataggacttcgaggtttataagaaagtgctgagtgaaacgccaagattgctatcctgataaataatatgtaataccataagacaacaagaaaaaaatgttcaactcataagatgagatatgaatttagatgacgatctatcttaccataaattgttgagacaaggcctatcaggtgctaacaatttatcccaattaggcaaaaaagactgcatgata

SEQ ID NO: 74834 - DNA, 567 bp, Arabidopsis thaliana landsberg
actattcattctacatttactacaacattagatcttatcaagctcagaaacctaaattgcaaaagtaaatacaccaacaaacacctcggctcaagaactagcaacaagttataaatctgaaaatcaacaaaaggtatttaatctttatccaaatacttagaacttactaaaatcaagcagctgcgttaaaattcaacaaactaaaacattcacagaacaaaaatcgaaagctgatacttacaaatcctcagcatctatatctgaccatagatctttcgtcacggattccagaaaaccatcacctgaaagccaaaatcgaaactaacaattatgaggaactatccttctatgtatcggcacaccaaaaaatagaaacaaaaacggtaaataccttgagatttcaacgaatagcaagaaccgaagctcaaaatcaccagaagaaacacgagagtacgattttgaagccttaatcgaacgggatatcagttgttactcatcgtcagactaaaaaaacataaccgagcagaagctaaaggagcacggagaagctgataaatacaagtctcg

SEQ ID NO: 74835 - DNA, 479 bp, Arabidopsis thaliana landsberg
caaaataaataattttttttatcaaaatatatatcccttaagtttgaagtacagtttctatgacgtttcagttttgtcctaattatttttttatgtatagtaaaaatttatatagtatattaattagaagtaaaaacggaaattttaattagttttaatgtaataaaaaagcgacacgtataatatgtgattcatatgtataagaaaaatcaattaatttttaaaaatattttttaaaagttaagtttttgttggcacacaaaatttaaattaacaatctcaattaaaatttccgatgcaaaattgtagaaagcaaattattattagtagtgaactaggtacctgaagcttccaaacttcatgtatgattccaaactggtatagagtactcatattataatctcacgcagctacctaaatttttcgtaattcctgaatatgcctataatagttttacattacgcgttaaagtttactat

SEQ ID NO: 74836 - DNA, 492 bp, Arabidopsis thaliana landsberg
  unsure (1)..(492): unsure at all n locations
acacgatggttgcgccgtcgcgggcaaaccacgtgtttcagttcgcgggccggcgtgcgcgcaggcacgcggcgggcggtgccagccacgccatggtcgttcgcacgttcgatgggctcgatcaacacttccagctcaccaccgcagcccatctccatcagcacgtccaggcctgattcggcagttgtaggccacgcgcatgggtttgccatcattgatgaccgcgcgggcgcgcgtgacgatgtcgcgctgggggcaaccgccggaaagctcgcacacggcgcgcccgtcggcgtggaccagcatgcgcgtgccggcgtggcgaaacgccgaaccatgcgtgcgggtcagtgtagtcagcgccgtcacggccccttcgggcagcgcgtccgtggcttcactcagcgccagccattcggtcgcgttgctcatgcgtccattccgccgcgtgtcatcacgcctagtccatcgccgncttcacgcgctcgggcc

SEQ ID NO: 74837 - DNA, 556 bp, Arabidopsis thaliana landsberg
gagcgcctatgccctcacgcgatttcaaacgtaccgaccgctttggcttcgagctgcgccgcgaggtcggatggctggtgcacgccgcggtgcgcgatcacgcgctgccgtcggtgagcgtgtccgatgtggaaatcacccgcgacatggactgggcgacggtgtggatcaccgcgctgcaggccgagcaggcgcccgaggcactgaaggcgctgaaggatctcaccggcgaattccgccgttcgctcgcccgcggcatgcggctgcgccgggtgcccgagctgcgtttcaagtacgacgattcggtggacaagggcgagcgcatcgaaaccctgctgcgccaggatccaccgcccgcagccgtcgtcgacccgaccgaccaagacgagcccgctgaggactgatggggcgtatcgttttccgggacctgcacgggctggtcctgctcgacaagccgctgggcctgagctccaaccaggccctgcaggcggtgcgccggctgttccgggccgccaagggtgggcacaccggtgcgcttgatccgttggccacgggc

SEQ ID NO: 74838 - DNA, 536 bp, Arabidopsis thaliana landsberg
  unsure (1)..(536): unsure at all n locations
ggaacaacaattanacttgacgacacaagcagtactagtagtactgttacttgatggagatgattatgaatgattctggttttttgcagcttgtggagagagcacgtcaagccaacgcttcagttaactagagcaataattctgtctcttttatttttatgtcacctactactactaaagaaaacattttctaataaatattataaaacaaaaaatactcgcatgaaagttgaaggtgattggttgatgaagctattgttgtttccattacacttgttcactcatctctttctctctccttctctctgcggatctttgtttctaatttggaaccgacatagctcccaactaataggaatcttaagcttctcactctctcttgtgtaagtttcttctacttatgttttctatactccattttggattcttcttctctttattgagtcctcgagtatctattgtggatcttgtctagcatttttcacattaatgtttcgcttgacgatttgatttttgggtctaactttatagttttt

SEQ ID NO: 74839 - DNA, 452 bp, Arabidopsis thaliana landsberg
tgttttctggaaaattaaactaataatttattatatacaaattgcccttttataatgtacgtcttacgtcttacacatatgtaataatcttcataagatgactgatcaaattgaccggtgtggcggtgtttcaaaagaaatgaaccaccacatattttcctggtcggcaattatatttatattgaaatcctagtatttattgtctggttgataaaatatattttacgtgaattcttttaaaagagagttttcacgggtcttttatcaatccttgtttgttacaggggaatctctattacttaaccacaaaattatagtaatagtttttggagtcttatcaatccttgtttgttcaaagaatggttggatagaatttctttacgattaggttactttggaataaagcataatatatttgttcactcaaacgaattataatgccattttttcaa

SEQ ID NO: 74840 - DNA, 626 bp, Arabidopsis thaliana landsberg
  unsure (1)..(626): unsure at all n locations
tttttggcactacttgtatgatcaattatttactatctttaagaaaaatcgtcaaaaacaataagaagcaaagctgcaaaagcagagttttcaacatgcgcaagcggagcccaactgaaatcaaatttcaagtctgtcttcttaaccactccgacatctttagttatttaccatgccttcgttggtgaagttgaggtagaagtagttacgtatatataaaaagctaaacattacatggatacgtataagcaaagacttgaggaatgatatagtaaccaattaaccatcaacaaaagaataaccaataaatcaatgagtagatcgatctttatcatcgtgatataaaatatatcataatcattaacttcgaaataattaatatatatgattgccattttaaccatacatatattaccaccacctagaagactctttagaagagcataccgacgaaaacaaactctatatacatacatatttaattagaacttcaaaaagatggaggaacaattattttagttttagagatgcagnnnnnnnnnnnnnnnnnnnnnnnnntcaatcccacccatctttttgtcatctttatttggccactgatgacaaaagcttggcttttcaatgga

SEQ ID NO: 74841 - DNA, 519 bp, Arabidopsis thaliana landsberg
ccttggaaccccccttattttaacaaaatataatttgttgcctacgcggatctttcttgcgggattctcgatcacattctaaggcgggtgggtttgttcagttcgcgcagcaggaatactttgatcttggcgccggtcttttccttgcggacgtacatgcgggcaggaaataccttggtattgttcaccacaaatacatccttgtcatcaaaatattcgaggatatcgcggaaatgcttgttctccatatgaccgctcttacggtcaaccaccatcatgcggctgtcttcgcgcttcttggtagggttctgggcaatgaggttaaggggaaggtcaaatttaaactgggataatttcatgtgtctgatcctgttttacggtgatagccacagaaagtctgtcgtacccggctggcggagattggatcgaccggcttcatgttacggcattgaattggaaagtcggcaaaggtacctgaattgcgggaattaaaaaaaagtcattaccactatacaactg

SEQ ID NO: 74842 - DNA, 595 bp, Arabidopsis thaliana landsberg
cttttgcatttttctcatataagtataactgcaagtttcatacgagtcagagaataaactatttgaaacgttatttcaggatggattctgcaatcttgagagaaggcgctcagcacgggatgctgatgaatgaagtttctgggactcggtgtaccgtaggaaacttggaaggggtcatatatgaaatcacacttcaatagaagaagagaggaattgtgttcgagtaacttagttcctttgatacctcagaattttgtaacattatttttatgttatttagatgcatacatttttggtgaaacgtttactaaagttacagttcaaaaagtatacaatgacatttgtggatgctttgaagtgaatccacattgttagctgaaaaactgttgcaactatcatatctcctttatgatagttgtcatgtgcaatttcttgacttcacctacttatcagctttcatgtatatcattctcttttgttttgcacatgaatgggatcatcttatcctgcgtgactttaaaagaaaatatttttaagccttattttatcttctatattattattcagcttttttttttttatctttacattattt

SEQ ID NO: 74843 - DNA, 526 bp, Arabidopsis thaliana landsberg
  unsure (1)..(526): unsure at all n locations
gatctgggttccattttttcttatgaatctatcatcttttaggattcagaagtcaccatactttccagatggatgggagaagagagaagaaaagggtggccttcctgtgtgcttagggactaggcctctaaatggaaacgacttctggtcacattccaatggctagacctttatcatattgcatacccaactgcaacggaatctgaaaaagactgaccaactgtgagtccaggcagcagaggagttaggtttatataaaactagcagtctccatcattctgtcctcccttacgctcatcatgaaacagaagtgagtattgaaaatcagagtcatcaatatcaattaatattctccttttcctgaaagccattttataatcaccacaaattagagtgagaattcctttctccacaatcgcaatatatatcttctttttataattcgctttatatctatcacctgccatactgcaaatgaaaatgctctntctgctctgctcctgcttttgtatttgttttttttttt

SEQ ID NO: 74844 - DNA, 561 bp, Arabidopsis thaliana landsberg
  unsure (1)..(561): unsure at all n locations
ggcgctcgccctgcctgcggcctggaatgttctcgttctactcgccacgaagagcaccgatgtcngaggtgccctaacctggctggaggccgcctttcaaagcaccgccaatacggattgggacgccgtcgccggatggctgattgcccgaccggatttcgaaaaaatcgatcccgcggctccacaactcgctctctcgccgggaagatggcggtccgcgcgggtcgccgtcgcgcgccgccttctcgatacccaccgaccggcgctcgcgattcgctggttgccggcagagtcgctcgtcgagcccgaggcggctcgccttctcacccagttggagaaatatccgcaaacccggtcggaggcgaaaaagcgctgggcgcaggccgccgatcaatttcccgattctccaatcgtccgcaacggacgagctcaatccgccttgatccgcgcgcaaacggcctctctcgacgaggccatctcggtgcttgatcaggcgccccgcactctgaaaannnnnnnnnnnnnnnnnnnnnnnnnnnnnnnnncggtgcggctggagga

SEQ ID NO: 74845 - DNA, 335 bp, Arabidopsis thaliana landsberg
aagtctaacttgtttttttccggaagaagatttatagttcattagtcgactagttgatcaaaggacccgggcaataaatgttttggttcgccagaagacatatcgatcggtccactatttatttgcaacgctgtctcgtgagtatcgatcttgggtcaagacattatagatatctatattttttgttggtacagttcaagtttcgagtcgaggaatccatgttggtcgggggctatcaaatcttttgctacaagttagaacatttgatgataaattattggatcttttcttggggatgctggtatgcttgtgtatcatatctagtataggagaat

SEQ ID NO: 74846 - DNA, 200 bp, Arabidopsis thaliana landsberg
accaacactactctccaccccacaatccaaaacaaaaacactcaacaacaaacccatacactccacctcattattacctacacccacatcatcaaaaacaacacaactcctaaattaaccaccgcatcaaacctaaaaccccctaacaagactatcgaccaacaacaaataatcctcaatcacaaaaatatcaaaatcaa

SEQ ID NO: 74847 - DNA, 216 bp, Arabidopsis thaliana landsberg
ttcgttttaagtattctaattatagtaggaaattagagaaatacaagcaagatttttcaactcagctatcaaataccaaccattgcttatgcatatatgtgtatatagtcaattcacattcagcactcaaagtcttagctgtgttatttgaacccactggtttacaagcagcgactttgaatgttagctaacttgcactctggctaaagctataat

SEQ ID NO: 74848 - DNA, 427 bp, Arabidopsis thaliana landsberg
atctggttttctgattttaagagatctcattgttttgattttattgaaagcttgagtttgctgggggtcttgggcctttttacttcgcattcattcgagatcacctatcctatattgtccctttgtctcgctcgaggaagttatctgatccatcgtttccgatgagtgttttgatggatatggaatgagagaagtatgtggttttgttagttgtaggagaatggtttgctacatgttcccaagggcgaagctcaaaaaccacaagctgctacgttttcggatcctaacatggccatggctctgcagaaaaaaaatcttcctatgatgattcctcatgagagctgtatttgatatgtatcatctatgttttagcgttactggatatttatgaaactgaattcacttaccattttgcaaacactcactt

SEQ ID NO: 74849 - DNA, 695 bp, Arabidopsis thaliana landsberg
  unsure (1)..(695): unsure at all n locations
cagcgcgattctcgctcttactccgaatggactcggccaaaaatccaaaagtatcacttcatccgccattattgttttanagaactcttctttgatggattttgcttaaaccttttctatactccaatcgctgattctttatagagtaaactagtcgagttatataagaaatttgtatgcgatgctgatgtcttattactattgactgtgaacataaaaaatgaaaaattaattgaatcttggaagctaagataccgtagcaagcaaggtgtgaatgttaaacaagtcaactcaatgttattcaattcgatatgtttttttaaatggagttttaagagatgcttaggccactgcttacgtcattatgcttatctgttcttgtttttatgttaaaaaaaatacatgaaacccaaaacataaaattttctatatattattttgtttccacatcacacacacacatactatggtactattttactagtacactacaaacttgatcaccaaaaaaacttttttttgtttctcttcacatgaaaaagtaaaagcaaagtaaatggattacttttaaatctatgaatcgtattctttactgacaagaaacaacattcgttactgagcccagtctaacatttgtcattaaaaccgcccgttggcgtagttaaacagttcttccttttccaagtttgcgtttt

SEQ ID NO: 74850 - DNA, 562 bp, Arabidopsis thaliana landsberg
acgaattcttcactgatataattcggcaatgcctccatccatgatggagaagtcgcgcgctgcggcttccgaacgatgcaaatgtccagaggaagagctggcctatttgcgcgaacgtgtcgctcagaaagagcgtgaactagaggtaccccacaattccttcgagagcgatcgcatcggcaagcgcgaaatcgcgcactatgcggaccagcccgcggcgaccatactccacgagaccgtcgtcatgccggagcacgagaccgtacgccatctcctcaagctcgagccggaggagcacgaccgccagctcgacggcctcttgcagatcgtgagccagcgcggcatcaggaacgcactctccgtcgccgcgcgcatgaagaatccgcacctggaagatgactttcatcgcgcgctcgtgcgctatgtcgctgagggtttgcccgagaagggtatacccgttcccgagaagatccgccactcgctcgaactcgtgctcttcgaggtgcagccgcaggcgtttggggacggcacgagggaggagatgcgtcaggcgaagctcgag

SEQ ID NO: 74851 - DNA, 713 bp, Arabidopsis thaliana landsberg
acttgaattccaaaaatacaaagagaaatgctcctagatttttatcgttttaagtgattgaacatttaaatcgctaacaacagaatacatacctaattttacctttgagtcaatatatttattcacaaaaattagtcttgactcttgtataatagtattagacaaggttttataaaaaagtctacaaaaaatgggctgcgtaatgagtcacaaattgttagcttccaactttgagaaagagaagcgaatagtggaaatatgaggaaaaaagtaactgttaaaataaaattaaaaaagtaaagtcactgcatgcaaccacagcccataggtcagaccttaaattggaccattccttttttaagaaaattaatttaaaattggtaaaaatgagatgtcaaatagaatttaatctcactttaatttgaggtattaatataaatatctcaatgatgtaattgatgaggaatattcccaaacaacgatttgttttatattcattgaacctctttataaaagtttaaacatgtaatgggcatatcaatgaggtcacttgtctatgattattgagttgattaatttataaatgacttataagtcagcattttcggcacattaataattacttcgaaagattttttatttattttgtttgtctccaaccaaaatgaaaacttacattcttacaagtgaaattattaagcttagcataaata

SEQ ID NO: 74852 - DNA, 559 bp, Arabidopsis thaliana landsberg
  unsure (1)..(559): unsure at all n locations
ctttattaccttttttttttttttttgagaatgctttatttcttttcattgttatgtataaacattgaaatggttgggatttgtgaatgaacaaaatccaatattttcatggcgaaaaaaatcctttaattatttatccagtaaacctgtaaaaacgtatttgtggaattttctttaatttgattaaattaaaaatagacaaaaaagaaaaagacacgagcgaataaaatcacagtgattttcagtgtttttttccctcgttacaaaacaaaatagctctgtctgaaaaataaagctttaactctctctctcttaacactgttactgtcgtctctctgtctctccattaatctccactgctctaaaaaaattcattaattgctgaaactctctctctctctagnctctatctctcttcttcatccttgagctctgttagattctctctaactctaccatcgnttcatttcttaattctctgttttcttgttcctccagagtgatagatctggcagagaacaatgtctgaattagccaattaggtcgccgagataaaaca

SEQ ID NO: 74853 - DNA, 499 bp, Arabidopsis thaliana landsberg
gcgcaagatactaagaaattcgacaaaaggtttggatatagattcgctgattattacgtgaagacccgcgctaatcacccttactctcagcttcaacaagtttttaagcatgtggtaaatgaatttttcttaccaccctttcactggtttcatctgtaggctcttcttgttaggaatcttaaatgttctgtgtatggaatttgtagggtgttggagctgttgttggagcaatttcccgcaatcttcatgagcttcaagaaaatgaaggaagcttttattcaatttatgaccaacccgttcttccggctcaggtactacatttcaaatatatcaaatcagaatcctcttatacaggcttttgtaaatcctaatcttttcctcaaaactccacaggatccagtggttgaggcaataaataacgcggtggacaagttaccttctcgacaattttctaacttctggcacaacatgctctatcatgcagatgattggtgactcc

SEQ ID NO: 74854 - DNA, 357 bp, Arabidopsis thaliana landsberg
aaaacgctaaccaacagacctcttgctaccaaatttattttattatatatgcacctaaactctacacctggacgcgacaccataaatcacaaaacctaaaaaacaaccccaaaaccaacaaccctacatcctaaacactcaatacaaaatcataaaccctactccatctaccctaaaccatacaccctcaaccctaaactcttatccctaaaccatcaaacctcaccacttaaggtcaaacctctacactccgaaacgctaacctaaatactcattgcatctataagcaacagagatgatcggatcctctaccctcgaccctacaccatagagacaaaactgaacaacctctcttat

SEQ ID NO: 74855 - DNA, 605 bp, Arabidopsis thaliana landsberg
cgacaattgagaccaacttcaaatgaatttgatattaatttacgtattaatgattaatgaccattatcatgagtctcatcgcgcaaaattgagatcaaactcaatgtcactcgaacagactcatacacagagaatcaaacatggagtagataagatcatagacgtggaaatagcgttttgtctcaccttaacaccaatctgcaactctgtcacatcacctaacttcttcgcataagctgaagatcatcatcatcatcatcacaaatcaacggagatcagatctatgagattgaatcaaatcgaaatcgataaggatgtaaaagacgcaaaaagagaagagatgtatttacctaatgttagaatggtaagcagaagcaaaaatccaacagctttcatggcggatgcagagctcatcatcgtcttcgatctctaagtcactgattatacgaaagatctgtttcagggtactcttttgttgtggaagacaactaaatgtaatgggcctatcatcgtattatatataggggccattaagcccatatgtgtatccacagattcacctaattaacgtgttttcaagcggtgtcccaagaagaaaaaactac

SEQ ID NO: 74856 - DNA, 532 bp, Arabidopsis thaliana landsberg
aaattctggtgattgactgggggataggacacttactatcaattgcacgtccccactgatcacagtcactttctacagcccatgcgagggtcccaccagtagtaggtcttgtggtcaccaatagaactaaatcagtatcagcaataccctctgtttgatttgaaagaaactgaattagaccaaattagcaaaacaagtttaacggcacgaaactgccaatcagagagtaaaacagtaatggcattaccctctacatattcacgaggaagctgcacaccaccatcttgcccacaagcagagtatccacttaaccgtaaattccctttcacaggttcaacagccaacgctcttctgaaccaatctgcagtctgctctaaagccttcatttggaagatttaaaaatcagaacatctgcaggatcagtaaccaacacagatcttagacaccaataatcaagtaagtgaaccttgcgtaggcgatgctttttgtccttgccagatatgtcatctaaagtgcagttataccaacaatc

SEQ ID NO: 74857 - DNA, 334 bp, Arabidopsis thaliana landsberg
gaagatatttacaaataatcaggatccctaaaacacgaatataacataagaacttaagtttataactttatataaaaactataaaaatgatgcataatggcaactgactcttaaaaaacgttaaggtagatattatagcaaaataaaactaatacaggacacatgattatcaatcataattataatatacattggagatttataacaaaacttaactagttgttattattggacgacccaaaacgcatactaatctaacaaattgtgaaaaacaagattaacaatacacaagaacacataatctatttaagacataacaaaaagaacattattg

SEQ ID NO: 74858 - DNA, 335 bp, Arabidopsis thaliana landsberg
agctggagaattgctttgcaaagctggcagctctactataggcggtttggaaagagtagaaaagatactcaaaaaagagggcctagggcaggaaaaactctgtattcttgaaaaacaagctgtatctgttagtctaagttgttgggtctgtacacaaaatcttgttagaatgacaacattttgttatctatattttatttattttgtcaactgctctgttattaaatgtaaaactaggcgaatacaatttacatgatttattaagagtacaaaaaatataattataatagggacatatttaataaattttttaatatactatattatcattagta

SEQ ID NO: 74859 - DNA, 629 bp, Arabidopsis thaliana landsberg
atttaattatgtgcatggcctggaaaatcacctaattaatcgtatttattaatttagttcaatctgtagttttttttttaatatcactctaggctattcaagacatcaaaaaggaagcatgaaaagtaatatttaattagaactatatataaattgttgaacatatgcatcgcatggtatcaaacattatcaaatctgtcatattcagaaaacgtttatagttaatttttttcagaaaacgttcattgttgaggtaactatgatgaaagatttccaactagatggtgatatgatcatatcgaaaacgctatcacgtactgatgttgaccaccatggacgtgtgtttttacccaaaaaccaagtgctctcggtcttgaaaaagatgagaaatgttacaaaagaaagcttgccaaagggtattgaactcaaagatgtatacatcattgaaaacgattcatactctgttatgctaaagtccaggaacaccaccaacgattttgttctggcatccggttggagcattatgaagcattcattttacctccaagaaggtgctgatatcaaactattttgggattacctgaaatacagattcattatcctcaatttcccaatacaaccttaaattc

SEQ ID NO: 74860 - DNA, 567 bp, Arabidopsis thaliana landsberg
tgttatgcctctggaaccgatctacctctttggtcgagagtcacaatttcggctcttcattaggctcaaactcccatctaagaaaaaaatcgtttctttcccaagggacaaaatactgttttttctattgttttatttatttcaatcttatcaggcctatgtctaccctttcggcccactatgatgtagatgtaccattatttcattttgtagatataaatgggcttcgtaacagaaacctactataggcctattaagatatgaaaatgtatataatcatattatatgatgctcactatagtatgtttgtatctaagtgacaagaatcaaggagcaaaagtaaaagtgatccgttaatttgatattacatctgcttaatttgtttcgcacttatggataatcaatttcatcatataggacttgattttgccttgtaattttgtatatatatatataattttagattttgaatatacatatgtaacatttttacaaatctgagaaagttgtgggatatatatatatataccttagagaagacgtagaagataaaatggggcgataagt

SEQ ID NO: 74861 - DNA, 582 bp, Arabidopsis thaliana landsberg
  unsure (1)..(582): unsure at all n locations
caacaaatgagcatccattatagcttagactaagaatatttgtcactatttgtaatgagtctcatatttaagtacatggcaattctaaaaaaaatcactagctagataaaaacacatcaatacttttcattgatctaccattggtggtcagatgataattcgattcaatgtttagcctaaacacattttttctggccgattaaaaaccaagtgaacgatttgttttggtcgatctatcccaagattagttggactttgtttcaaatttcttgatgagcaaacacaaaagtgtaaattgtttcttattattgttgtcatgtaccatatatatatttgacaaaataacctagtatagtagtagtagtatatatatatatatatatattaatattagtttcagtttgtttatttaacaattatatacttctcactctaattgggtatcanagattcanaggaaaaaatctgcaacatgcaaaattcatggtttcttcacttgggttgcttcttttacctgtgtggataatattgatgactacatatatatccgggtggaagtcaaatgtngaaagaatcgaatta

SEQ ID NO: 74862 - DNA, 238 bp, Arabidopsis thaliana landsberg
ggcccaccggggaaaagaggacgcaagggaccaaaaaccaccccaaccagaacggaaaacccgggaggaacacaccggcaaaaagcaaacccgaaaccgaagggcagcacgaaaacgaaccgagaaagcgaggccaaacgagccggaagaccaacggaaaaagaagccagaggcgacagaaaagaaaccacagggacaaccggccagcggcaaccaagcgcgcagagcgacggagacc

SEQ ID NO: 74863 - DNA, 534 bp, Arabidopsis thaliana landsberg
  unsure (1)..(534): unsure at all n locations
tttccgccatctgcgcagcggcttctttgaagcgtttgttttcaattatcttatctaccagttcctgcctcggggctatggcattaccctgtgcatccagttctttcctgggcagcaggannnnnnnnnnnnnnnnnnngagcgtggatacaaaaaggatgaactcactgctcagctctatattcagcttctctccctggtggataaaatccaggaagtcattgatgatcctggtaatgnnnnnnnnnnnnnnnnnnnnnnnnnnncgttcaatgaaaaacagcagcaggtcaaagggaccttcaaactgctccagtttgatctggtaactcacattattcacaggcctatgctttgctgcaaagaaagccgaatcaggggaaaacggtgggatttagttatccacgggaaagccggccggaaccggggaaataagcccggagatatgggtgtttcagaaccctgtcagacccctatctccggactttgaagttattntttcagtgcatccctgatctccgtcagcagtttttc

SEQ ID NO: 74864 - DNA, 142 bp, Arabidopsis thaliana landsberg
catggttcatattttgggatattctgccaaaagaatcggtattggcggggtcttccatataccaggggagcgccctatgagtattaatctcactatcactgctacttcttactgtgcatatgttatgatgtgactataccac

SEQ ID NO: 74865 - DNA, 265 bp, Arabidopsis thaliana landsberg
gcttatgagacagttaaattagtgatgatccaaaaacatgtgtgtgggtcagtttcattaatactaatgagtacgcaaaccctatgatgtttcttgttttggtacaaaagaaagtgttcaaatcaattaaaagaactatttggaacacatttctatcacataaaagatcaaatctgacgtaacttaaatttagatttaccttctatacgatatatataattcagtataccatatacaactatttcggtaacatattaatgaacaa

SEQ ID NO: 74866 - DNA, 329 bp, Arabidopsis thaliana landsberg
  unsure (1)..(329): unsure at all n locations
aaggccgagacccccaggcgcagacccacgcgggaatagaaattgaaaacccgcccgggaaaaacgggaccgggggaggggcaaggccccacccaccccacaaaaaccgaaaagagggcacggaaaaccacaacaagacacgaaaaacccaaaaacagaccaaaacaacacgagcaacgcgccggcacgaaaagcacgaacccaaccagcacagaagacacgagaaaacaacaccccgcaagaaaagcccgagcgagacccaaaaaaagcgcggacgacaaaaaaaaaaaaaaaaacagccaaaaaacgcnaaaaacaacgagaggcaa

SEQ ID NO: 74867 - DNA, 432 bp, Arabidopsis thaliana landsberg
gcttttgatagttttatttggagttgtatcggattgacttacaggctttggcttaagccttttcaattttatataaacccacaattataattttatctgaattaatgagaatgagagtattttactactatttattttgtattattctcagtctctcacattaaattccttttttaatgtggtcatctttcattttcatgtatattatctactgagattccagaaatcgagtagaccttaccattgcactctaattttgattttaaatattttttccaatgtagtcaatattatttattttgaaaatattcaatggattaacacatacctttaaatgttgtgtctagaaatatattagcatttggtgttgtgaatacaaatataccactgattagctcaaatattttaaaggttgaatatttataacatatc

SEQ ID NO: 74868 - DNA, 546 bp, Arabidopsis thaliana landsberg
tattttatggataatattttgttcagagcctgttaaagaacatcaccttcttgttcgacgaatttccaaaaggagctgagtgtaagttttcaatattaatttatttttacatatcacatttcattcaaaattcttaagcgcaatgttttttaaaatattaatttgttctctcaaatatttcagtgtttttggaaaaaccttatgctataatccaagcagcaattcgaatttatggacaatttttggcgccactcataaaccatgtaatggcaagctacctgaagcttctaagcaatatggccgaattcttcttattggtcgtcaaaattatcatcaaaattcgaaacctcttcttcaaatagaagaaacaaggactgcatacttttattctaaatcatctttttcctatatttgatgatattattttactaaccgtatatgattatttgtactttcaaaaaaaaaaaacattaacaatcttgaggggtttggtaattagagatattaaataaagtttttttccgtgatcccgctcacaaacctaag

SEQ ID NO: 74869 - DNA, 504 bp, Arabidopsis thaliana landsberg
ggtgctaaactttgtttgaaagagaagaggattcactttcgatttgctcaatataataggaattgtcggcttctgttacattaaactgcgagttttttctttttctttttgtgtcttactaaattatttttttattaactactttttaagcgatgaattgaatttattgacactatttttctttcttcttaattatacagctgattttgtgtgaaagtagaaaagaacaaatgattgaagctatgcggtatggagattttactacgcacaatacaatgcatgttcttatttatctttgactgctccttttaatcttaacttatttgtatcaatctaactcatgtattatcctacgtctatctagactgatcggacggacatcacgtgtatccatatttcttggctacgcgtgaccacctctcagagactatgccttcaggtagtagatgttttactacaaaatacacatattcagtcaaatcaaatacaccttgagagaatctt

SEQ ID NO: 74870 - DNA, 606 bp, Arabidopsis thaliana landsberg
taaatgacattgctaagaataattaggtaattatgtggaaatcatgcatgttccactttttctcgtttcgttaggtaaaaaaaggttcttcattatgtctttgatttgaagattcataagccttagcctcattaagtggcctgtggacacatttatgataacagtaaagccgacatgttataattgtatacaataaatagtttttcttaatgaataaaacccaaatattctgctacccattgatgaggtctaagaaaaatacatttacgattcattatggacgacgaattgcaatagatttgtgacctcttagcggtccatcttctttttatgacaattctatcatcaccattctttgtatagaggcgaatgttaatgcacatttcgaaaaaaacatgaatcatgcaaattgatatttgtattttgcaactaatctatataactacatgatcataatatgttcatcccataagaacttttacaattaacgaaaaacttataatttaccatgaaatgtgaatatattttgggttcttccgcatttccaaataactttaacacctttattagagttttcatatatatttattgtccttttttttgggg

SEQ ID NO: 74871 - DNA, 267 bp, Arabidopsis thaliana landsberg
gccgttgccgccgaggctgttgacgttcagaaccacgacctggttggcgttgtccgtgccggccttgatctggtacgtgttagtcgactggtcgggacgcacctcaaaaccgttggcgccgccgttggtcgggttgccgaagttggtccaggtgtcggcaccggtcacgacgttgatcgccgtgttgggaatgctcgcggtgacatcgcccgacacattgaggctctgtgagccctttacgccgacaatgtctccgttggtgccggt

SEQ ID NO: 74872 - DNA, 419 bp, Arabidopsis thaliana landsberg
  unsure (1)..(419): unsure at all n locations
aaacacccaaaggaagggccaccgcaagacacaaaatgggagttcaaacccggcaagcaagaacagaacgaagggaaaaggaaagagccctgcccacccagcacagagaccaaaacaaggaggagaaacaggaacgaaagcccaacacaacangacaaaacgggagggccaacgaagaaagacaagaagccagcagagcgccaacaagggagcaggacaaacngcaacacaagaacgaaaccccgacagaacacngacagagagacagacaaaaagacangaagaaaaagcgagaagagcaagacgacagaaccacaaccacagagagaaaacggaagacagacagacggaaacaccgacaaacaagcagagaggccaaggagcaaccacacaacccgaggcaggaacccaagaacaac

SEQ ID NO: 74873 - DNA, 586 bp, Arabidopsis thaliana landsberg
  unsure (1)..(586): unsure at all n locations
gttgaaaattacttccttccatgccggtaacctgattgactattcttaatccaccactnatagccatttcaatacctattctttcaatattgggctttcaggaagtattacaaattctacggatgttgaaatattgggtgcaggcgtcgaatttacatttaatgaatcactcggcacacaacaaggcggcacatttacaaacggcggcgataccaccaccaccatgggttttgaattagctgccgacggcacggatgaatatgagagtgtggatgtggataaggtactgaaacaagtaccggtacccggtttgtcgggaatcacagaaaccgtttttgatggtttcgtatttaatacaaagggaggggcaaccggatgcccgtatgaagggcctaccgttaccaaatattatcaaccgggtactgccattgatcagcccaccgtgcaaatagaagttcccaaaataaaagtggataatccggtagtcaataatgtacctgctactcagaaagccttttatacgttgcttttagttatgaatcacaggcacacctgccggcaacttctcgtttgactatgctataca

SEQ ID NO: 74874 - DNA, 397 bp, Arabidopsis thaliana landsberg
aaagcccacagcaacgtcaggatccccaattaagagtgagaaccacgaacgccgcgaaacggcaagggagaggtcaaagacgaggacccacaccgcccccaccccgggcagacaaagaacaaccacaacgaccaggacacagaagaacacacagaccagaccaaagaacaaggcaagagggcagaaaagaaagacgacagacggacgaagcacagaacaaaacaaaagagaacacaccgggaagaccagcaaccagaagggagaagagaaccggcaccgaaaaacgggagcacccaaaccggacaccgagaagcagaagaaacacagccagaagccacagccaaggaaggaagggacaacaaagggagcgcagaaagaagcgaaggaacagaaaaca

SEQ ID NO: 74875 - DNA, 544 bp, Arabidopsis thaliana landsberg
ttgtgggctgggttaatacccatgatacaggttctgcgctgtctatttttgtatcgcgcagcgggagggggtccatttgctgatccagttttttgttaacactgtctgttttgaatttatgaaggctgcggaaaccaagtgcctgctctgttaaaccttttgagtcgaaccatgcatattcaaagttgcgcatattgtagaagtcgcgcatgttctccgaaatgctgtccaccatggcattgtctgcaatgaacttttcaaaccctgcactgtcgaggaaaatatcgttgtatgcattttccttggtaatggaataatcccttgcatacacatcttcttctactttttccgaattaacgattctttgccagatcctgcgcgacctggttttgcagctggtaaaaacgataagggccagtaaagcggcgtacagtatttttttcgtcatgcactaaaaatacaaaaggcatgccttccaacggaacaggcggaatggtatctttattgggtgcggcatatagagtttatccataccgatcatttt

SEQ ID NO: 74876 - DNA, 195 bp, Arabidopsis thaliana landsberg
  unsure (1)..(195): unsure at all n locations
agaaggaaagcccacacacgccaagncagggacgccaagcaaagcacgcgcgccgcgagcaatcgagctatcaacgcgaagccagggaagacaagcaaagcacgagccgagagccggcgagccggcaaagcgaagccagggaaggcaagcaaagcacgcgcgcagcgagcaggcgagcaggcaatgcaaacggac

SEQ ID NO: 74877 - DNA, 101 bp, Arabidopsis thaliana landsberg
  unsure (1)..(101): unsure at all n locations
cacagagacaaaacgagagggagagacacagagagagagggnccgaacaaaaaaaaaaggcacacggcacgcaaagcgaacaagccaacgaaacgaaacaa

SEQ ID NO: 74878 - DNA, 367 bp, Arabidopsis thaliana landsberg
cgttccggtattggattcttatatttcctgttgttctcgatcggattcgaggtttcattttggatttttgactgagaattgagttgttttgctactgggatttgatgtgttatcgcttgatgagttcaggatgattcagcaaacagccgtcaaaagaaagacgctgaagctacttggaaacttcaggcatacactcatgtcaaatctgaaagtcgtatcttactctatgtagatcttaaaagccattgacttccatgtattgcattgtcacagagcttacgttagactgtttttcgctgtccaaatctgattgggttttgaagtgaggatgaagactataaaacctgttatcgtggtttctggggaa

SEQ ID NO: 74879 - DNA, 526 bp, Arabidopsis thaliana landsberg
attcatttcaggaagattgatatcaaggatgacagcttctttttcatgatcgagcgccatattgcggccggggatcgggttaaaagcgatatcggcctcgaaggcattttcctcaagaccttttttgatggattcggctactttggcctcgtcttctacaatcaggattttcatggatgacatggaccgttaatcttaacaaaagtaaatatagcagaaaaaccgggaacattcatcgtaacaggaccaactaaaccaaaatatacctgttacgatgcagttccggtcttttttgccgctgagaatatattcttgcgctccaacagcaaattgaacatgttctcggtgatcgttctgatagatgaattggcaaacgaaactgaggtgcaccaattggtactcccaacgttgatgatccggcccgaacgcctggtccgctgaaatacaaaaaatgtgtgcagcgctgctttatcgccctgctgccccagtcaaatccaataatctctgcttttctggccttcatggc

SEQ ID NO: 74880 - DNA, 690 bp, Arabidopsis thaliana landsberg
ccttaatgttatgttataagcaactcggtgagtatgtactgtgtgcttttctacaagcagaattccaccgccacacttgtcaccatttgtggacaatgaagcagaaggatacgttcctgattatgccgaaaccatcaaaagactacaggcagcagcaagaaacgaagtgcttccattgccaggtgttgggaaagaggatcttgaagatcctcaaaatttattgtacgctggtgttatgagtcgtgcggaggaagccgaagctgcaaagaacaagaagaaggtttgactttgctgatatataagcaattcaagcctgtcaaacttttgtatgcgttgattaagttgttaactttgtgggttattttatgtagatggcggcgcaggagaagcaataccatgaggaactgaagatggaaataaatggaagtaaggatgttgtagcgcctgtggtggctgaaggtgagggtgaagaatcagttccggatgctatgcaaatagctcaagaggacgctgatatgcccaaagtgttgatgtcccgtaagaagaggaagctctacgatgccatgaaggtatgtacccatttacatttaccattcttttttttttttttttataggtcctataggtctgtaagggcatagcaatgaaagggtctcttaatgtttgtaagttgatgttaatttggtgtat

SEQ ID NO: 74881 - DNA, 453 bp, Arabidopsis thaliana landsberg
agcctctatgcatatcagactataaaatatttgttcgtgaaattactttttatgttctataatagttattgagtgtttaataaccaagaacatcataaaaaaaaactctatagataatcataataattgcattaacatatttggctatttgccaaaacaatttaactcaatactggttgatttgcaatgctagaggatcttaaagaaccatcttagattctaagtagtaaacaaatatataaatcaagtggtagtggcttagcgattcccattcgaggaagcgttgccttgtcggtctagaacaagaaaagattcattacaaaacattgaattatctacatcaattgttatttacctagtcgaaatagtgttatattttgtttctttattattagaaaatttggtgaatacactagtacttgacgactataatcactctaaaaattagttggg

SEQ ID NO: 74882 - DNA, 433 bp, Arabidopsis thaliana landsberg
  unsure (1)..(433): unsure at all n locations
gtcgaagtcccgcgcaaaagctgccgcgacatgatcgcgttcgtgaaggcgtatgtctaccatccttcgaagccatacactcatttcggaattcaggggcgcccggagaagttcgaaggcggcggctgcggcagctacgcttcggctcttctgacgaaggcgaacgttcttcccgatctcgtgaataaattctggcgcgagcttctcggcagccaatacctgatgggctggaaacagaagctcccggaagacacgtacttcaagctntccgacgatttcctgccgcaccgctgggtgtggaagggaaaaatgcatatgcttccgtggatctcggacgatgccccggccgtgaacctctacgatcccgagctggcgctgctcgcgttccgtcggatcgcgcttgaatacacgaaagcgagccatcgctcgtcgg

SEQ ID NO: 74883 - DNA, 501 bp, Arabidopsis thaliana landsberg
accgtatccttgcttgaccctgatgggaagaggtaggccacatcaatgcgtttggactgtatgcatctttcttgctatcaaaagcatcgtcataaaaagtcggtgaaggctctttgctagacttgttagacttcttgctcgtcgatctctttttgctttcggctaaccttcgagcccgctctgctttacgtgccgcttcttcctttgcaatgagattcgcgatcatcgcttcaagcttccgtgcactctccaaccgcttttgcagttccttccgaagtttttctttatctacctgaagctgagcaagctcccttgcttccttttccttctgctggcggattgtgtattcttcccgttcccgggcactcatcaggctctgctgctcggtaagtgcttccgtcagctctgctttatctgctgtaaggttttgtcgggttaactccaacttaccgtgattcctagcatgagcttcttctagtatcttaccataatgagcaaaac

SEQ ID NO: 74884 - DNA, 398 bp, Arabidopsis thaliana landsberg
  unsure (1)..(398): unsure at all n locations
aatgattcctatgcgcgcgtttggttgaagggttaagttctgnnnnnnnnnnnnnnnnnnnnnnattggaagggacagtttgccaggttcaaagcggattctatgaagagctggagcatcaacgcctgggtaaagctgaggaacaacggctccaagcgcaccatggtattccagctggcgaggcccggcatgtttaacggtcatatcaactttggcctgaacacagatggtttcccggccaccaacgacagtctgctcaccatacagcccaccttgctgaccatcggcggcggcacacaggataatcagaacaatgtgctgaacagagccaaccttaacaactgggtgcatactgcgcttacgtatgattatgccacaggtgtgttcaacaactggat

SEQ ID NO: 74885 - DNA, 415 bp, Arabidopsis thaliana landsberg
agcttttcgttgtggcttttcatgctgcccctgagtacgtgccaggaggatacgtcggtgttgacatatttttcgtcatatccggattcctcattactaggataatccaggatgcgctaagcacgggaattttttcgattggttggttctatagtcgtcgcgtgcggaggattttcccagcgctgtttgttgtattggcattcgttctctgtatcggttggttcctgcttcttcctgatcaatattcagagcttgggcgccatgtggccggcggcgctgcttttatatccaatttgcttctgtggcgtgaatctggctacttcgatgtcgctgcgacgagtaagccactccttcacctctggtcacttggcattgaggagcagttctatttagtctggcctttgcttctcatgct

SEQ ID NO: 74886 - DNA, 610 bp, Arabidopsis thaliana landsberg
  unsure (1)..(610): unsure at all n locations
acctctcattctgcttcgtagattagctcagatcggaactacgtttggttattggtttgggcttcgctctgctgatgtttctttggaacgctctgatcaaatgttcaaggtcttttttccaatttcgtgatttgctcttcaatgataatgatgattttgtgttctcatgcttcgttttcgatttcacgaattggtatcattaggtacgagcagcggagcttaggaaattgcttgtggagctaggtccggtatggttatctctcnnnnnnnnnnnnnnnnnnnnnnnnnnnnnnnnnnnnnnnctcaatgctagtgttcttatcatgtcttgaccttgtttttaggcgtacgtcaaaatcgctcaagctgtttcatctcgtcctgtaagcgtctttcttaacatgtttgattcttattttttggagctttgtgattgttattgctatgaagattatggtttctgaactagctttattcacgaaactaggatttgatacctcctatatacttggatgaactctccctgctacaagatcaaataactccgttttcaaccgaagttgctttcaatatgatngaggatgaacttggtcttnctatagatgagctt

SEQ ID NO: 74887 - DNA, 336 bp, Arabidopsis thaliana landsberg
gtaagtcatttgtcaagcatggggttaagaacacattatgttacagaaactttatttttcttatctctaacacgcgtaacaaaagataactgttgtcaatatatttactctactacttgtaacaaatacttgattatctaccaaataaaatgacagcacaataaaaatctacatctaaatacagccaaccaaataaaaccaaagcaaaattgatgagaaaaaatgctctttttcacaaaactaggggggtttgagattataaaataaataaagagtctatatgtcaagttattataacaatatggaagaaaatatagataaaaatatgtaacagaa

SEQ ID NO: 74888 - DNA, 574 bp, Arabidopsis thaliana landsberg
  unsure (1)..(574): unsure at all n locations
gccttcaacaccacaaacgaaacttcaagattatatccatagatcacatacactgtgtatgatacacattaaagagtttagtgatttgggaatatcattttttttcctttttgggtttcgatgaagtttacagaaaattataatccaacaaaattagttcacaatgatgaaagatttaaggcttctacttatgagttctacaaatgtcttacacttaatcacatcactcaataacatagtttggagcaacagctaagatcctctcgtctctttgtgaagattttttcttcgtttcttctgcttctgcggcttcttcttgctcattagctaacactataagatgaccttctttacataccaaactctgtgcaatgcatagcttgtgttagatagaaacatcatttgaaataattttattcttaacttctatgattgttttggatttttacctcaatgatggctctgagtttcttgatatcgagttttacttgctcttgcgaactatattntcttttctcattctggtgatcgatgaaccatcgaatcagttccttttgtctaatccaggcaattc

SEQ ID NO: 74889 - DNA, 513 bp, Arabidopsis thaliana landsberg
taggttaaatgggacggattaacccgctctgacatctcctacctaaatctttaattttaaaattcaaaaaaattacactagtaggtcaatattacattttatcccaaaagaaaaagaattaaagaaaaaaagaacactctgcaaagtaaataataaaattaaggggttacacaaaaatgacacataaccagaggaccacacggctacaagtcgtgacatatcatcattgtgtgggaaaacacataaatatttacaaaaattctagagatggcctatccaatatggcattgtatgtgtacgtacaaattaccaaatttaccaataacgaatgcagaacttcataaattaaagagttgtgtagagaaatcaataattgaagaaggatgcaaccgaatgattgatgaatttactataaaaattagggaccatttttgaatggatagttggtgtatatctatctactcaatcaattgcattaattgatatgaagcttgttgtataattcagtgtgaa

SEQ ID NO: 74890 - DNA, 621 bp, Arabidopsis thaliana landsberg
gtcttcttctcgccggaagcagagagtacaacggcggaatcattcttctcgccgccgctttcaaccacagttccttcgtgctccttctctcccaccgccatttctgattcctttacactactactttgaaaatcaaactacagaatctatcgttgatgatgaagttagaattcttcgtaaggattcgcctacttgccgcctgatctgggattcgttggagaaggaggaggagacttcttcgaatatcgtgaaggagaggccaaaatatgtgtgatgcttcgctctctgccaaagttttcttcctcttcgagaagccaaagaggaaacgcagaatttactcaaaactttttgggattatttgattaggggtttattggagactgatatatgtttgattttttagaataatttgaaggcttagtgaataaattatgtaatattaattttaaattgagtgtgaaaattgaaaaatatagaaagaatattaacttaaaatttagtgttatttaattaacgatttaagatatacaagtttgaaatttgaatgaattttcaaaataattttagtaaaaattatacttaggaacaaatcttgagagtgttatactttagacataattt

SEQ ID NO: 74891 - DNA, 585 bp, Arabidopsis thaliana landsberg
  unsure (1)..(585): unsure at all n locations
gaataaacatgacacctcgacatcatctccagttactttcagtatttcttcaactagaggtacgacagtctgatcgccacataaatgtagctcatcagccgcgattccaagtaaagcacgagtaaatgcaaatcccctttgtttacatcccaccatctgaaattagggaaagaaaggatgagaataacaaacaaaaagttcttgtcgatttcttaagccaaagtcgagcaagactagcctgaatttcgtcaatgatggcacaatcgtagacagatgtaacatcagccatttcaactgtcacagctttgtgtgttgccccttccactaagtctttctcttgtcccgtgatcaaatcacatggaacatttgctttgtttaaccgtttagctacctcccatgccaacaatcttaacggaccacaatatacaccttcaagtgaaagaagcaaattttaaacagttcaagaactggcttccaaaaggtttattagtcaccttcaaggcatacctgaagaactctgttcaaggtgcttaagggcactatatgtcttcccgctgntttgtcggccaacatgtagaatgacct

SEQ ID NO: 74892 - DNA, 141 bp, Arabidopsis thaliana landsberg
agcgggagccacacagggacgaagaaggggcggccgcgcacgagcaacacggagacaagcaggggcacgagcgagacaaaagagacaaaggcgcagcaagaaagcaccacaaaaaacgagaagagaggggaaaaacaaacg

SEQ ID NO: 74893 - DNA, 529 bp, Arabidopsis thaliana landsberg
tcctttggatcctctcctctatttttatgcccttcacttggtgcttttttggataactcattaaatgacactatcggagatagccacatgtgtatctgcgtatgtatatgcatgtgtatttatatttagaagcttcctagttttgtctaagaaaatatcttcttgttttgttcctttcagcgctataactcataattctcttccaaagttcttggatttgatccccaaatcaactggacatctaagaagaagaagaagaagagcgaacatcaaaggataaggaagaagagaggaaaatgtgtactcatgctgatgaatcacaacacaacaatctcccttgtctccattgccaaccacattcttacattcgcatggtacataactacatatatacacatactgtatatagtttatacgctttgtatttgatgtaacaatcctcacaactagtggttgattttggtcggttcaacatatgatagagagatgcattctactccgtatgacgcgggacgaatgcgtcaggcgt

SEQ ID NO: 74894 - DNA, 533 bp, Arabidopsis thaliana landsberg
  unsure (1)..(533): unsure at all n locations
ctactcactcgtctaccgaagcccccaagcatggaaagatatctacggtcatcgcaaatcaggagacgggtccttcctcaaggatcccaaattctacgtccgaggaccgaacggacctaatctcctcaacgccgacgaggccgaccacgcaagggggcgacgactcctctcccacgccttttccgaaagagccctgcgagaccaggagggtcttatccagtcttatgtggatttactagttgagcgattgaacggggaaatcaccgcttcgagggaaacggtcgatatgacccagtggtataacttcaccacattcgatatcatcggcgatctagcctttnnnnnnnnnnnnnnnnnnnnnnnncaaagccagtatcatccgtgggtgaagatggtctttgtaagtaccaaggtagcagctttgatgcgaccgttggtggtataccccttcctggctccgatcgtgaggagaatactaccgaagagactggctaaaatgcgcgaggcacattttgcattaagtgcggagaaag

SEQ ID NO: 74895 - DNA, 189 bp, Arabidopsis thaliana landsberg
gaagaagcacataaacaaaaatctataaaggacctatcactaactttatacgcatatgtaccttcagagaccatataaggatagttctatcatatgaagagctgtagagaaacccacctatacagagaaaaggaatattgagtaccttattgatcatctattcaacatacattgttattagatttgtac

SEQ ID NO: 74896 - DNA, 119 bp, Arabidopsis thaliana landsberg
  unsure (1)..(119): unsure at all n locations
aatataacactccaaaaccaaaaacccaganncaatagttatactgtacacacaacactacaataacaaagggtacttttaaaaaaaatacactcacataaccaagactttattttcta

SEQ ID NO: 74897 - DNA, 372 bp, Arabidopsis thaliana landsberg
  unsure (1)..(372): unsure at all n locations
ttttcatttcctttaccattatgtctatacgcngctctaacgattgggggcataatgactacattgcaggtaagttagtctgatctcaactctttgattcataagcacaatataatcaaatctaattccttcttcgttgtctgaaaaataaaaagcttgccagcatcatgctctcctgcatttggttctcacacccgcttagctgggagcagtgtattggatccgtaagctcttccaatcctctctttacttcgtcttccctctttttcatctatccttgtacccgaaactaaaaccacttttcactggcgcaggtaattgttttccgatctctatatgctaaaaccttcgtgaagaagaaatcagaaaagc

SEQ ID NO: 74898 - DNA, 564 bp, Arabidopsis thaliana landsberg
gaaagacgccacatcgtatcagttacatcttatattaatttattttgaaactttttgtcttaaatattgttttgggctattggtagttttcgtatggtgacggatttacaaagaaaaaaaaatattggagtgaagggaaaacaaaacagagaaaaagataagagatatatggatacacaaaggttgccgaagaaagaagaagaagaagaagaagatcatctactttcttcaaccttcgagtccatcaatggtcactctcgagaccaacacaatcattctatagatgatttcgagagcattttcgacatcaccattgacaatttaagctgctctaacgaactcacgtgggatttctgggaagaagacgaacatgaagatgtaggggaagaagaaaaaagatcgagtactgatcaagaaggctcaagttttgggttttgggagaataagccgacggattatgaagacaaagacttgggtctgaagctgaatctgaaccatcaagaagttatcgatgcttggtctgatcaccagacacctctgtggacagatacttcaactctggac

SEQ ID NO: 74899 - DNA, 743 bp, Arabidopsis thaliana landsberg
tatattaagattttattcaactttcaatataagataatattcttaataaaatttgtgttaaatttaaaaatgaaataaataataataataagtgaataataatccgtccaaacagctatagatagagagatatgtagagcaaattgggagatggaaatacaaatacaaaggtataaacttttcagttatagaagaaggcaaaaaaactttatagtaaacagtgcaaaggtctaatatgccaaatcgtaatagttattttccatgtattttgggaaccacaaaatgggttttcgggctccactttctcatatatctcagttttcataagccttatagaaatcataactattgcacaaataattagtgttaccatttcgcaattctttttgtttctgtcgacggtcgaccaccgtttagtattttgtcgaccactttctaatattgtaaatgtatgtgtttgttaatgttattgccaaaaatagacacttgtttgtgcacagttcccagatatcttttgggtttactttcttttgttgattacacggtaactttattgtccacacaaaaaatgtaacatttcacatatatagaaggaatgttgatatattgtatttttggtgtctttggtctttttgatgtgtttgtcgtgctaacgtcagtcttttctaattttttttttatttatgtttcgagtcttgaacaaattctaagtaatgttgatttgaaaggtttcatatctgtcc

SEQ ID NO: 74900 - DNA, 623 bp, Arabidopsis thaliana landsberg
caaatacaccaaaatcgatgacaaatttttgttttaatagaattattggctagcatgagcaatacacttaataagtaaatggattaaaaacaatataatatgtgactacattgacaaatttagataggaaaatggtaatatatgattgttaaagtaaaatattctattcatacatctctcttttcaaatttagataacgaatgagccctaatttaaaatggtctagatgtatttaatcactttgacattgagaactacaagaacatgttcatattgtctacagcaaaattcatacattatataacaatctgaatagactttaagggacaatcatgcaatgaagtgtaatactatatatacatcatatgtaacaataatagtttccgatatgggacacacaaggaaatgaaaggagtggcaggattctctaattaattcaattggcgtatagttgtaaatcggtatattatttgtctatactgattaccggataaaacacccacttactaacaaattctactttatttctatatgccatcaaatacaaaataaattatctttataaatttttattaccccatttatataagtttgtcgtgtaaatggttatggtttccgaaatt

SEQ ID NO: 74901 - DNA, 472 bp, Arabidopsis thaliana landsberg
tgtttaaacttatccataatatcaaatgtccgaatagcttggctagtatcattagcagcagcatatctacatcaacaccgtcaccaagacaaccaattcaatacctagctagtaaatctttcaatttagcacaacaaaagagaaacttttatcaagaagacgaaaccgaacctgtccatcatgagaaacatggcctttctagtatcctttgaaacattaaacatatcacggatcaaacaccaagcaatgttgaacttttgatgattacccaacacccagatcatcaaatcacaagctttctgatcatcacagccgcgtttctctccccatttgaatgctagaaaggcaagcctccattcatctcttaattcccagattaaagagtagaaagaatcatgatttagatcaaatgatgagtcctccagagaagccatggcatccgcctctgactccagctcagagacctgtctaa

SEQ ID NO: 74902 - DNA, 575 bp, Arabidopsis thaliana landsberg
  unsure (1)..(575): unsure at all n locations
agagctttcttgtgcctatctggacgggggcctgccggaccttaacgctgggacctatcgagcgatccggagtggccggcctccgcagctcgcccctcaggcttactgcgcgcatgcatgagccacctcaccccaacggcaaccgccgctactcccatgaccagcgccacagcagtcatacctcgataccacgggtcgggcgagcaatggagaacgctcggaccgtggcgcccgcgcatagtgctgatgcatcccgtggccacggctcnnnnnnnnnnnnnnnnnnnnnnnnnnnnnntaagcaagaacagcaacccaccgccgcgtgcggtaaatgggtccacgcgtggtttcgaaacacgtgcgggtcggttcaagcgcgtgggcatctgggctgtgacccctgagtgttggccacgccgcgaagcgacgccggcacggagatggactaaccggcgtctcgcgatcgcatggcgccgcgcaccgcaaggatgaacatggccctcagtatcgccgccccgatcccgaaggcgctacgacacgccacctcggacaccgcaccacgtgcaccaagc

SEQ ID NO: 74903 - DNA, 583 bp, Arabidopsis thaliana landsberg
ggctttttaacgccggagggaccggcaaatccggttatgggcgctttttagggcctcctgcacggcttttggggttgtcgcgggcatcctgggttccatcgggggacgaaaacgcggctcccggcgcccggggataggggtccagggccagggaatattcctccagcgccgggccggccaggtcgtagtgcaggctctcgatcgtttcgggggcattctcctccatcggaggcagggtgggcgctgcgccacgctgacggcccacaaatgtcagttcgcgcgtgaagccgcgggcgatatgggccggcacgggggccagggtcacgacacaggcctgcaccacatccgcagccagttcgaaagcggcacgaaaactggccggaccggtcttggtcagctggacggtgaccacaaagcgctccaccgcctcgacctcggaccagcgggcaatggcggcgcgccgatcggcatcggcttcgaacgagaccgtgtcgccggcctggcccaggcgtcccagattgtagagttcggaaaaaggcagcggcgcatccgtcacggtcacgggccccgcggcacggcaggg

SEQ ID NO: 74904 - DNA, 551 bp, Arabidopsis thaliana landsberg
tcttatgaggtagagatctgttcctttcaataattcaagagttgcttccgtagggataaaaaagatttatgcatacaaacaatcctataaatacacagcccttaaaatcagaactctcaccaccatgcaactatccaaaacacacataaaaagccaggaaaatgagttccttacaaccactttctgtgcacagtaccaactccaaagtcataacagagaagagaaaatcggtgacaacccttacaaatggtagtcgtcatctagagagcaagcctaagattcatgatgtcgacaaatgcgccgaagctttcatgcaaaacttccggcgacaactttctcttgagtgcgataacatcctccctagaggagctctctgatatattccacttacagaaaaatagatgtcacatgtcacgtgtttcagataacatatgttacttatctctctaagcttcttaggcgatttcaattgtattataaggtttcttactatcatataaccacatgttttagaagcataacaaccaaagagagagagagagagtttggta

SEQ ID NO: 74905 - DNA, 553 bp, Arabidopsis thaliana landsberg
tgtcgttgtcctgcacgacccggctgtcggggatgccgtggcactcgacctctttgactctggcgcctagcgaccaggggaagccgcggtagcccagcgtggacgggtaggcgccgtggtcgcagaggaactcgtggccgacccggtccagctcgtcggtggtgacgccggggaccacgtgccgcccgacctcctcgcgcgcctgcgcggccagccggcacgccgcgcgcatccgctcgatggtctcggcgtccttcacctccgagccggtgaaccgctcgggagcgggctggtcgacgtactccggccgcgcgatgtgcgcgggcaccggacggcgcggcgagaccctgccgggcagcacggtcgggacgggggtggtcacgtcccacgatcctaggcgggtcggcggtacggtcgggacatggccgacggaggcaagcccgaccagttctggttcaacgtgaagctccatcgcgtcgagaccgaggaggacctctcgccgtccaaggaccggcttcgtccctacgcgacgcgcgaggaggccgagcgcgcc

SEQ ID NO: 74906 - DNA, 544 bp, Arabidopsis thaliana landsberg
atacataaaaaagtatagtaacaaattatactgaagtttgtactcatgtactcttataagcaggaaaaaatatttcagcttagttttgctgaacgaaattaaaagcaaaaaaaaaagatttcaaattaaaattctactatatctagctcaatacaattaaggcataataaactcgaatgctcatgtctataaaaatgaagtctcttacataattacatgcttaatgtgcaatcataacgtcccttattacattagaatttgtatgaattatacatgaaatgatgaaggtccccatcgcagacgtggtttgtcccaaagtattataatgagttttgacccaaaggcttctttaccttcgctcacatgatagcttcttcttttctttttatgcatctccaattttacaaatcaattttcctaattaaataccagtagtttgattttattgtttaaagacccatgaacaagtccttgctttttccattgttaggtaatatatcatgaaagagttcatgtcgtaattgttatgttgtacagtaacgtg

SEQ ID NO: 74907 - DNA, 354 bp, Arabidopsis thaliana landsberg
ctctcactggctctctcttttctcttttcgcccagctcgagcttcgaactaatcacacgttgcacattattgtaccatcgcagaccagtgcgctacaagagccgggcgccaaggttacaactttttactaacttaaaaacctttggtcacctatataataacttcaataattcttttctatttttgagtcacaaacataattcactccaacagtggtagtaattactagagtccactttgagtttcttttaataatacaacaactaactttaccattttatctttttgaaaaaaggtttaccattctttactttttggcaagttgtagtaatatcatcatagtatggtgcatgt

SEQ ID NO: 74908 - DNA, 604 bp, Arabidopsis thaliana landsberg
acttttttgctaaaataagataatgacctcatagttgactaaagtaaaaaatcatgatattcgcataattaaattgttactaatactactcaagtaagaaaataatgaaaataggcaaataccgtgccatcacgttgaagtctataatttttttttgtttttttttaataatcatattcgtcagtataaatcacctttttgtctattttattcccaatacgaattacttttcttacgtccaaatcaatgtaaataatctagctacatttttcttcattttctttttttaataaccacctttcatcagtgtcacagaaatttatctaaggacgtgcgttaagactatctgggattacatcaaaactgcaattgttttttaatactctcattatattagtccttgtagacgtgtagtactagtaccatgtcgaaaaagtaaacatttgtatcaattgctatatacatatattaaaatggttgtaaatacaattttaaattcttaacttaattatcttgaaaaagtaagttaataagtgtctgcatgtgctatatttcctttaacaaaaaaaaaggcctgacaaaagaaattaataagttctctaac

SEQ ID NO: 74909 - DNA, 419 bp, Arabidopsis thaliana landsberg
aaatgtaactaaatactatcatttttacaataaatatattctaaaaagcaataataacgtgggttagaatttaattaccaattataatcgtctcttttttctttaaccgttctcttttaacagccaaaaaactctcataatcaccttgacaaaaactgtgattacctaccaatcaaaccataactattttattggtattgcaagcacttattattttattaaccgaaaaaatacttttttgatttcacaaaaatatttttaaaccaaatctcaattttaattttattattttagtttactaattagaaaaacaaatcttattagtctattgataaaggacataatcaatttcctatactttcaatatatgcgacaatggtcaaaatatcgtatttttgtggacagaacctgaatttgat

SEQ ID NO: 74910 - DNA, 568 bp, Arabidopsis thaliana landsberg
gagtgtccaagtcttgattttacctttctcggtttctctctataagttttgcaaatcaggactacctttttaccgttttgaatttgtttgtgtaagataattttcttaatacttgaaatctctggtttatgagcattatttctgactctttttcctccattttgaaaaggtacgctatcattgaaagatcttgctgacaaaatagcgacagaggtgcaagattgctttttccctggcgcagagttgtatggggaaagggatggggaactgcatccttgcaaaatcttgaggatagcatcagacggggatagtaaacctcagtgtgaggtaggcttccttgacaaaaacacggaagtagatgactacacagtgctctttggggaggatctgtcatggaagaagtttccatttagtagaaattttctgaagtccttcattcgagattccacatgccacagtatacctcgagtagtaaatgattacctggctaaagcacatgaaatcacgagaaagattcccagggacttcaaacaaatatgtctttcagaatggagaactgttcaacaaa

SEQ ID NO: 74911 - DNA, 714 bp, Arabidopsis thaliana landsberg
  unsure (1)..(714): unsure at all n locations
cnnnnnnnnnnnnnnnnnnnnnnnnnnnnnnnnnnnnnnnnnnnnnnnnnnnnnnnnnnnnnnnnnnnnnnnnnnnnnnnnnnnnnnnnnnnnnnnnnnnnnnnnnnnnnnnnnnnnnnnnnnnnnnnnnnnnnnnnnnnnnnnnnnnnnnnnnnnnnnnnnnnnnnnnnnnnnnnnnnnnnnnnnnnnnnnnnnnnnnnnnnnnnnnnnnnnnnnnnnnnnnnnnnnnnnnnnnnnnnnnnnnnnnnnnnnnnnnnnnnnnnnnnnnnnnnnnnnnnnnnnnnnnnnnnnnnnnnnnnnnnnnnnnnnnnnnnnnnnnnnnnnnnnnnnnnnnnnnnnnnnnnnnnnnnnnnnnnnnnnnnnnnnnnnnnnnnnnnnnnnnnnnnnnnnnnnnnnnnnnnnnnnnnnnnnnnnnnnnnnnnnnnnnnnnnnnnnnnnnnnnnnnnnnnnnnnnnnnnnnnnnnnnnnnnnnnnnnnnnnnnnnnnnnnnnnnnnnnnnnnnnnnnnnnnnnnnnnnnnnnnnnnnnnnnnnnnnnnnnnctcatttattgatttaccccttctaatggttctttcattttctttccaatctttatcttatattatctctaatttttttttatctatataattatctatcatatgtatcattcttcctatatctatctcttctttttgtctctttaattcttattctctttttcgtttctatct

SEQ ID NO: 74912 - DNA, 429 bp, Arabidopsis thaliana landsberg
tgaagagatcaactttcacatgcactattataataataaatgatcatatttttgtaaaactatgatcgagatccctcagaacttaaatattataaacccttcttttggaatcaaactagtgtttcttagtttatatgtaaggccacattttttatcgaaaaaaaaagtgaaatatatctgaaatctgatatgtactttagagatttatacattttcacatgtattgatcgtttttatatatttggccaacctatgatcgaaagctcaaaaactgaatacataaaaaaatatatatacatgaatcaagaaacttgatttcttgattctatcattttttaacctaatttttatttcatcgtacttttttttttttgacaattcccttactcttaaatcttaactcatgtatccttagaagttttgcatttt

SEQ ID NO: 74913 - DNA, 581 bp, Arabidopsis thaliana landsberg
atcgatacgaggagaggacaagtgcgccaattcagcgtctcttccgaaggttcggattcgtcagggtttttgggcgttggaccagctcttcccgcgtaccgctgctcgtggccttcaaccgattcgttgcacatgcctaccgtaatcgcctgaaagcagttataggcaaaagtcaattaaagtagaactccgaacttcagttcgtgccaactcactcgaagacttcgaagagaggcatataatttaatttgaaagtatgaaagcacttacttctgaacttgattgacgcttgtaaaagtattccagctcgacgttgattcctttcagagccaaagtgatgaaagttgccactactgtgctgaagcactcaagaatggcagttccgacccaaacccacactactctgacagtttgcactgccgaattaattgcaattagccaccagggaaatgatgtgccagcattcccgccttcatgtttcaggaagtggagatggtacgtcggatacgccggtactcgaagagagtggaggaggcagaaaccaacgctgattagtgacagaattgtgtacacagtatagc

SEQ ID NO: 74914 - DNA, 383 bp, Arabidopsis thaliana landsberg
ccttcgatctgtggggcgtcagctcggcaaggaattggcgaccagcctgctgcctgtcgtggagggcatggaaagtgccgcgggtagggatgcctcgaccgccggcctggtgaatcacatccaccggctgcgcggggagtaattcgtggcgatcaagggcattctcttcgacaaggacggcacgctggtggacttcaacgccacctggttcgccatcgccgacctgatggcgatggaggcggcggaaggcgaccgctggagagccgacaagctgcttgccgtggccggctacgacttcgcgacaaagcgcttcaaggccgattccatcttcgccgccggcaccaaccgcgacgtcttggaacttttggtttccgcgcctctag

SEQ ID NO: 74915 - DNA, 547 bp, Arabidopsis thaliana landsberg
aaattcacattcccaaatacacagtatatatcttaaacaaaagcttgaatctcacttaaacaaaaaaaaattctttaagaacctatatataaaaaaaaagatttaagaagctttaagaatctcactgaatctttcttagcaaaaaaaaaaaacttgaatctcacttaaacatgtgatatgtcaagaacctagataatagtgtattactggaatttaagagagaattactcaccataaaaggatttaagaaatttttaaagcttcgtcaaaaacaaaatctgtagattatcaagacacataagagccagtgtaaaagcggcgattgaagataaataaaattaggtttaggataaacaatcgagtatgtgcttctatgtagcatatatatctttatggataacccaaagcccaaatatataaagcccaaaagtatacgtatattagttcaaaactatctggtcaatgtggatacatcatcattttcaaattctgaaattacatgtttacaataaatataatttaaacaaatatatataaattatgtacc

SEQ ID NO: 74916 - DNA, 371 bp, Arabidopsis thaliana landsberg
tggaccagccttctaatgcttcctgatgcgacaactaaacatttcctatataaccacactaatgaactgatgatgccgactaatacgagaacactcttagcatttgggaacgcatatgcacacatgggctcactaccaatactcttctgaggcctaaaccactgtctctagctgcaagtgcttatctactccactcatgttgatacttatctgaagctcactcaacatcgattacaagccatcaggacctatgacacacaccaactacattgtttacatatgcaccggacaagaccgatgacgctgaccggagagcaatcaaccacatcgggtctcgataccatggttccttgaccactcgacttattatc

SEQ ID NO: 74917 - DNA, 228 bp, Arabidopsis thaliana landsberg
tatatattcggatagtcctctgctagtgagctggactatttcgagtattttttttgatgaattcagcgatctatggacattaatcatatatgccagccatacttgtcctttgagacgttcattaattgagattgtgcaaatactggaggggacgcctttagtagggtccccattgtatgccacatgcgctatatcacgtcccaagagccatctttggtcctgcaggag

SEQ ID NO: 74918 - DNA, 464 bp, Arabidopsis thaliana landsberg
atctaactgcaatagctcctcagagactgtctcatttggtttagactgatcttgtacactttccctcggggtgagggagtgactgaacatccctctctcggataatagccaagaaggcttcatcttcagcagcaatgtagaagagaacctgtgagttcatgttccacaagtatattagcgaacgcttcaatgatatatgacataaatgaaaacttcaccaaatgtggtatattaccaaaagcatcaggcattagacctaataatagaaactctgtaagagtcataggcataacatgctgaataatggtgtgaagcaagacaccaacagtgagagattataccttaacaagagaaattgcttatctacctttgcggtcgaaatgtcactgcctttcgattggatagagatctggagagcaaacattaggatggctgtcttaggcacctggaaatgaagttaatca

SEQ ID NO: 74919 - DNA, 228 bp, Arabidopsis thaliana landsberg
tttgtacactcgttccttcgacagatgatgcattggccatactagaattctcacttttgtcggaagttcacacagaagatctccatatctgaggctcaccacgaacttgctataatccaaaacatatttggttttttaaaaggttataaaaacaaaattttaagtggtaaggaagtgtagcagcaatatctagtgtagcagcagttaagaggaagtatatggatctat

SEQ ID NO: 74920 - DNA, 106 bp, Arabidopsis thaliana landsberg
tgtttcggcttgataaaaaaactaggtcaatcgctagttggcacatgaattatttgatcaaagttttataaactaatataatacacaaaatcaataaaagagtttc

SEQ ID NO: 74921 - DNA, 144 bp, Arabidopsis thaliana landsberg
cctaatcagtactatgtgaaacaataattcttctactttctatttttttattttatataaattttaatctttttattctcaattacattgtattatttttacttaccgactaaaaaatcttttttttaatcttataacttaaaa

SEQ ID NO: 74922 - DNA, 594 bp, Arabidopsis thaliana landsberg
  unsure (1)..(594): unsure at all n locations
catattttgtctcctgatacgcgcatcgaactggaggtttttgggtgtggtcatattcatcaccgttttcgatgcatccagggtaatatctttccggttggtgcttgccgccaattgcgttaccaccgtcctgccggcattgccttcggccctcgcggtaaggtaaagggtatgaatgcctgcgagtgatgaactgtaccgcgacatgatatccggcgccagcaactgcaggtcttttgttgaaatgatattgttatcaaaccgtatcgtattctttaccgcagacctgttgcccggctgcaggctgaagggatataccagcgcattaccgttgagataggaattgggcgttctggccataaaatgatccacggccataacnnnnnnnnnnnnnnnnnnnnnnnnnnnnnnnnnnnnnnnnncaaaaccacttttctccttcccggcaatgaaggaaatgccagcgttcatttttttacctgtataatcaattgtgttggcataagcggtaagatcgcggaaacggatatggtgcggatcgaatccccttctccgggctgttcaaatcatattggtagacatgaccgatgatct

SEQ ID NO: 74923 - DNA, 358 bp, Arabidopsis thaliana landsberg
gaactttgcgatctctatggagctgccttcagtgaatgatgatgaaggacgtcttttggctcccattgatgcatccgcttgtgtcgcctgtatttttatggggcaataagagagattacaaccgaagacttttaacatttgatgtaagaatcggatatgatgcgtgcgtgtgtcaagggagacaagtgaatacctgaagcggcctcccttcacctcatattggcgactgaagccagttgttatcagggagatacgtatctgacagcgaagaaagaaggaactagccttacgggtatatgataggtgttatgttagaagaaaatccgagaccgaacattacttacttgaccactataag

SEQ ID NO: 74924 - DNA, 593 bp, Arabidopsis thaliana landsberg
  unsure (1)..(593): unsure at all n locations
ttaagaaacatcccttcaccatcactctcattcacattgcttgtttgattctgttcttccaagctatcaataccagtggcatttcgagctaaaaccgaaaatggagaccttatctgctgattcacacatgcctcggcccttccatagttactgatctctgtgagatctagaatgtgacttctcctgtataataaccaacaaacccccatcaaatttgtgaaaagtgaaaacactcangaaacttacgtttatttgatcaaaaaagaaacaaaacttacttcaatttcttagcaataggagtttcattctcggattttcgcggtgtactgataccgtctaagaacaacattcttttggtgtttgagttgctgtctttagtcatagcttcatgcttggctctcttcttacaaagtgttgtaaacctgttcttcacagcattatcagttctacaaaacacataacgaacagaacattagtttaaccactctggtcttataatgatgacttcacctacacgcttagagtttgagcttgagctatacctgcctgaaaccacctttgctatctcagtccatctattaccaaatactctt

SEQ ID NO: 74925 - DNA, 516 bp, Arabidopsis thaliana landsberg
ttcccggaagtcgctgcgcctgggatctaggtgagaggtacttccgtttgcactgaactggcgccaggtacaagggtacgtgccgccgccgtgggtggcttccacaggccccgtcgtcgctgtcacggcggaaggtccggtggattctcggacccgcagcgagaatatggcaggagctcttgtgagcgataacgggatttgaacgcgtctgaaaggatggatcttgtgtctttaagcgtctcccattctgccggtcctttgcgtcgacaattctcctcgcgttggtcagcgtagcgcttgaaggcgccgtcctgatacagggacccgtaggctcacgtgcggacccactggcgacgacatccgaccgggcgcaaaaccacattaccgagacagagtacccatcgacgggctctacggtgctcaagatggtcacaaaggggtacggggcctgtctgaagactcatgcaagtaattatctcgaatttgggagcgaccacatcaccaacgcacccgatc

SEQ ID NO: 74926 - DNA, 560 bp, Arabidopsis thaliana landsberg
aaaaacatcccattgaacgctaacaggagctgtggccgaaacggccatgcatagccacgctcctcaacatgctatattattcttgacctaagcatgcctcactacggcggcctatacattcattctaacgccttattattgaaatcatttaggatcatagtatttaacgagcttacgctgctcaagtcattaacaatagaagataaaaaaactctatccatggagaatacacacttcaatatgaaccatatattcataaaaacccacctaagcgagaaggggaccatggccttcagagcctgacaataggaacccacgccattataaggcccaccaccccagatattaacgcaacaataaccacccgccaacatcttgctagtgcgggctaccctgatatctcttgggctcaacgctctcaactgaacacgtggttgacaacgctttacctacagaggaccggcaatataaactccacattagctcatacacaggccaactctttacaattccaaaccaccatgattgaatacactatcctgactggctggcggaacaga

SEQ ID NO: 74927 - DNA, 570 bp, Arabidopsis thaliana landsberg
ggcaattcttcaatgccagcttgacagccgtgtacactgtatttttttgaaaaggcttctgcaggaatgcatggggcgctgcttgcaatgcagcatttaccacggcgatatcctcatgggctgacagaaagagaaaagggattttgaaattctcccgtatataatgcgcgaggtcgattccggtttgatagccgttgaggttgatatccagcacggccaggtgaaaaaccttgctatggagaatttctgtggcagttgtataatcagtcgcgatatcgtttgcgtcgtaaccgaaaccattcagtagaaattggagatgtttcgcaatgataaagtcgtcctcaacgattagaatattcatctttgatataagtagtcagcctttgctcgtcctaaaagagattttaaaatgggttacgtttggaatccgctgcggccaaatgcccggcggtgtacaaataatatgataatatacgaattaattgcaaagtgagatttgtgaagtttatcgaattatctttcaggaggagcgttcgaagcaactttgcgttaaataacggcaaaatgtgc

SEQ ID NO: 74928 - DNA, 248 bp, Arabidopsis thaliana landsberg
aactaggagtgccccaaagggcatgaacgaaactagggttcgggggtccaaactcaagtttaaaggagaagctagctacataggatgtcacagggaaaactacaagagtacggcaatgggaagaagcagagacttatagggaatgcgaccatgagagtacgaaaccagcccgaaggccaacggacggaactgaaaccggaacgggaaaacccaatgcagaagcaacgacgagcacacgaacatatggt

SEQ ID NO: 74929 - DNA, 549 bp, Arabidopsis thaliana landsberg
atgttcagtgtcaaagccaaacacatcaacataaactttgttttcgatctaccccttgttaaagaagcaatcttagcttcatatataatccacctcttgttgtcattttctcgatttaatttgtttttttgttcctcgtcttaaaagacctatactcttgtgaatatacgttctcgatcgtcttgctgaaaaaggattaaaacagttgatattcaaaggaaacccgtcttatcatatgtactgataaaagcttcacaataatgtcgcggataagaatgaaatattcaaatatttcaaagagacagcagaaataaaactaaatccattgtcctaaaaccccaaacttcaaaccctgcaaattttgattgcaccttctagttacacaacaaaccactcatcactgctgtatccagcgtctttggctttagactcatcatcatcgactgcatcttttgagagttccatctgaaaacaaaagagacgtatttgttaggaaaatcaaaacagaagatagtatagagtttcaagacatgccaaaagttatgagaa

SEQ ID NO: 74930 - DNA, 552 bp, Arabidopsis thaliana landsberg
  unsure (1)..(552): unsure at all n locations
ctatttttcctcaagagttatccaaggggactgtggttttgccttaagcaaaacctctttaacatcccagcatctcaaagcaaacaacattattttattaggtaccccagcagatgaaagcaagtgttccatttggactcttctcaggcaattaatgcattagctaaagacaaaccttcctgaaaaatcaaaccactgttctcagcagcctccgatggatttggggaacagagagcaagcttcaaatgtgtagtcactgataagagaaatgattcccaactcacctcaagcctaaagtaacattccacatgaaggagaagattttttttaaaacaacagtttaatttttcacaatgaccagggaatttaaattcatccttgagctcatgtcattcttcgtggctcacagaaacaaattattaataattaaaacctattttacagctatgttgatttaatagaagattgacttgtgatttcttttaaaaaaaagtgtttgatactcgggactgtatcaattgtccctcatntctggttntaatgccagcagca

SEQ ID NO: 74931 - DNA, 165 bp, Arabidopsis thaliana landsberg
ccaaaacatatttggttttttaaaaggctctataaacatagcaccgacccttaaggaagagcaacaacaataaccccttaatcctcaaacataaggaaaactatggccctatgacataagaaaccctccaccctcggacatggccaatacaatcctgaggtaaag

SEQ ID NO: 74932 - DNA, 333 bp, Arabidopsis thaliana landsberg
gggtggctgtagagggtgtctcttccacctttgcttgaccctaccactcgaccaaggccgggccagcattggacagactggctcttagctatttccgaggaaccatcgtccgtacgagcgacggtaaccatgtctgaaatgtgataccaccagatcagccgggaatcttttcagtttcctaaccactactgcgaacaaggctggggcaacaacagctgaaatgaatgccatactagcgaggttaacagctacttgtcaacttaatttattactggcgttagggtgtaaagttactattcagtgttcgagacatataggtatgctcgtgcacat

SEQ ID NO: 74933 - DNA, 304 bp, Arabidopsis thaliana landsberg
  unsure (1)..(304): unsure at all n locations
gctgaggagcacacngaactatgcatgttgttgttagcccccataataaacgcacaacgacgcaannatcaggggggcgctctaccagggagctaacagcccgacccgcgggcacgcngcngggggcccgaaaagccaagccaaaagcgagagaaaccccancncacnncanccccaaaacgccccccngccgccacacgagagggacaagggggcgcaaaaggggaacccancaacgngnaccgacccagganaaaaagcccaagggagnggncaaacancaccgncgagaaacgaaagaagg

SEQ ID NO: 74934 - DNA, 545 bp, Arabidopsis thaliana landsberg
tgctcagcttgtctccctgtacttattgatatttttatagttacaaaaactgactgttctgactgttttgtttaaaaggcagcccctgctggtggtggacgtggaatgcgtcttgctaaggaaccgggagagtttgtaaaactgttgcaggtatgacaatcatgtaaatctgaaccaacaattcctctgatagaatttttaatgagtccagggatcaagttctccataagcataattgcagtattgtcacagattctttatttctttctaactcagacaatgtaaaggtgtaatctcatgatgtttgccgcatttcgaaatttagacaactgtatagttgtgaaagctggaagtgtagtagcttaaatctagtaatactgaccattgatatcaattaaacaaccagattgtatgctttccgcttgcctttatagtctcagatttcttaaatgaaaattccacaaaagattcgacttccctttattgaacttggctaattattgttatcgacaagcagctaagagcgaggctgctgctgcttttgg

SEQ ID NO: 74935 - DNA, 557 bp, Arabidopsis thaliana landsberg
aatatctttataatattgatcttttgctaaatattttattgatttatttatgtattttataaaactgatgacgacatataacccaatggatgcaatggacgtcgctttcacagctggagtctatctctctttctctcacacacatttaatgtgcggtttacagttgaagcaacgatggttacacttcttggtggcttgcttcttcatatactcttttatcttttggtccagtttctattcaatttgtctttttcttctcatctttttgttacggttctatatatctactatcttataagtattttattttgatggtctcatatcacaaattaatccgcattcatttaacattgggtacaactgttggtactgtacaaatgtaaagggctttagggtttaaggctttatgccatgacagagcaagcatatctaaaggctggtcaagacatctactaagaaaaataataaatatatcataatctataatgtcagcctctctctttaatgccacgagagcaaaattaccctatgtagtttttcaattcgttttggtggga

SEQ ID NO: 74936 - DNA, 550 bp, Arabidopsis thaliana landsberg
cacgaaacgagccgtgatctgatgttgtgcgccggaaagctgcgcgatggagaaacatagcgcaggaaacgccggaaaaacaacctcgtcctggtctagcgtgccgtcaacacagggaggggattacgcatgctcgtcggcgttcctagcgaaatcaaaactcatgagtatcgcgttggcctcaccccggcatctgtccgggagtatgtccagcgcggtcacaaggttctggtgcagagcggcgcaggcgaaggcattggcgccgccgatgacgtctaccgccaggccggcgcctcgatcgcgaattccgcggaagaggtgttcaagaatgcggatatgatcgtcaaggtcaaggagccgcagctcgacgagtgcgcgcagctccgcgaaggccagatcctgttcacctatctccatctggcgccggatccggaacagacggcagctctgatcaagtcgggctgcaccgcggtagcctatgagactgtgacggacgagcgcggcggcctgccgctgctagcgccgatgagcgaagtcgctggccgtctgt

SEQ ID NO: 74937 - DNA, 445 bp, Arabidopsis thaliana landsberg
  unsure (1)..(445): unsure at all n locations
nnnnnnnnnnnnnnnnnnnnnnnnnnnnnnnnnnnnnnnnnnnnnnnnnnnnnnnnnnnnnnnnnnnnnnnnnnnnnnnnnnnnnnnnnnnnnnnnnnnnnnnnnnnnnnnnnnnnnnnnnnnnnnnnnnnnnnnnnnnnnnnnnnnnnnnnnnnnnnnnnnnnnnnnnnnnnnnnnnnnnnnnnnnnnnnnnnnnnnnnnnnnnnnnnnnnnnnnnnnnnnnnnnnnnnnnnnnnnnnnnnnnnnnnnntctgcagaactgggtaccggacagaggggaagtccgactggttgtaattaaaacaatagcatgtgtcgatggtgccctggcggatgctatacgcaatggtgatgttctggcccagtgggctctgaatgtgcaaagtggaagaaaatgtcaacccaagcgtcgggtgaaacgggcgggaggtaacnnntatgactc

SEQ ID NO: 74938 - DNA, 593 bp, Arabidopsis thaliana landsberg
attttcttttttctctgcccccttgattatactgttgctgacctgtcatttttattatataattacccgcatagatatccagaggtgatgatttatggttttgaacaaattgtatgtatatcagtatatccaactaattaaccttatacagaacatttctatttattttcatacaaaaactttgacctttattttaggtaaagaatcttatggtttatccagaattttatcttcagatttaataaaaaatttgtgattacttttaaataaataatattatttcgtttaatattactttatttatcaaaacagtacagagccgtacacattttatttacgatacgtatttgctaattcgttcaatgacatgttattttaccaaatatcggtttttttgcataaatagtattttcgtcattccgtacgaaaatactttctcgttatttaccattttataactatagttaactaactactaaatttcttctttaatttatattaacgcaatgtaaataacctaaaatgataggaaatgtacgggaatataccgaaaagtatagaaaaattaatctttaattttaaaataaataaaa

SEQ ID NO: 74939 - DNA, 517 bp, Arabidopsis thaliana landsberg
  unsure (1)..(517): unsure at all n locations
ggtttttgcggtgcttcaacctttgtcccngtggttgacataggcgccgttgtccaacatcaaggggttnaagctggtgttcaatgtgcaagacctgcacccggacgtcatgatcgatttgggcatgatcaaaagcgacaccatgaaaagggcgctgcttggcatcgagcgcttggcttatcgccatgccgatggtttgtcggtcatttgccctggctttgctgaccatgtgaatgcacgcggcgcaagcggtgcggtggcagtcatccccaattggatcaatgtggacgaaattcgccccatgtcacccagtggagaacttcttcaaaaggctggaatttcgcaaggtgccaaggttgtgctttatgcgggtactttggggcatgtttctggtgcgggtgttgctctcaaggcggcgcaacttgcccgtcatcgaaaagacgttttttggctgattgtgggagaggggcccagactacctgagttgctggtgcaggctaccgaaatgaaactgtac

SEQ ID NO: 74940 - DNA, 427 bp, Arabidopsis thaliana landsberg
gccccgcaaggccccggcatggcacagcccgccgtcggcggccaaggtgttgcgcacatgctcgtccacgctgtcttgcggatggggcgcggtggggatgccgccctgcgcccgatggctggcgctatgctcgatgccgcctttggccagcaccgccacgcggcaatgcggcgccagctccagggccgtggccagcccggccaggccgctgcccacgatcagtacgtcgtatgccatgtcgcccgctcctgtcaggccgggccgacccgttcgtacagcgccgtgtgccgcgccaggtcagccgtggcgcgcacgcgctgccggcgctgttcggcgaaggccagcatgcggtcgatgggcgccttggcgcgctggcccagcgcggggtccagcgtgatttcgttgcggcccgtgttccagcacaatc

SEQ ID NO: 74941 - DNA, 473 bp, Arabidopsis thaliana landsberg
taaacttaggttcagatttcaggcagccagtgaatatgcaaagcttgaagtgaatccttcaaccatttggcggcatcggttatccagaggttgagtttatggaacagtaccttcacgcctgtttcctgtgctaatgacaacggcgatggcaatagtgtggccattgagaaatttgacttgaaaatagggcaatactactacgtatcggttcggtcgaaaattaattcaactggttcgttcaccctctgtttggcgaatcagctgcctgagttaaaaggtggtcagtgcgatttcaattatccttacactaatgtgggcgcgcctgcttattaagcaggctcgacgtgcgatactaacgcgaaaaattaagtgtggtataaataccgtccctaccggtagctttttgaaattgaccgttaaaccggaaaccgccagctacatgaatacctcattgtggacaaaagatttgaccc

SEQ ID NO: 74942 - DNA, 502 bp, Arabidopsis thaliana landsberg
atgtcataagcatgacgattactaattatgttagacatcgctattttatgggtttgcgtctatttttctctttttccccttttttttttttttttttttaatccccataatgataaccaatcgctttggttttgctgttacctgttaaattggttagtgggtatttcttttgggagctttatcggtttaaggactattaatttggtcttactatatttggggatttgtttctaatatcttgcatctgtaaaaggatgatagttttgagaatttttgttctgaagggtaatatgcttctatttataggtatgggcatatcttgaattttgttttcaaaaactaggggggtaaaaagttcgtaatagttaatatacatatcaagggcatcaagaatagtaaactttattttttaacgtctaaaagtaaaaacttcttttagttcaattaatacatcgcgattatcaagaatagtaaagctttccactatttatcactggaaaat

SEQ ID NO: 74943 - DNA, 425 bp, Arabidopsis thaliana landsberg
  unsure (1)..(425): unsure at all n locations
acacatatagaatcattaactactgcaaatgagaattacgcctaataattattattnnagtgnttctcttattttttttnnagccaaatgaaatgtctatcaaccaaaccaaagcataaatagtttttatttggtttcaatttactataaaccgataacattgaaaacagcaacactgagccgatatctaaccacaaaaaccatctccatcaatctctgtctatatctatggacacagtttcaatttcaagactacaaaaaacaacagaagaaaacacccaaacaaaagacagagacaacaaaagagctctcttcttcttgtaaagttcatagatagagagagacaacnaaagagctctttttctataaagggatcaaagaagtagtcaaatcctaagtttaagcaaaacaacaccacattcctt

SEQ ID NO: 74944 - DNA, 592 bp, Arabidopsis thaliana landsberg
  unsure (1)..(592): unsure at all n locations
cagccattgttgccgtaaccgatcagaccaacggttttacccatcaactgcactcccctgttaccttcacggtcccatataccgttccgtacctgccggtcggcgcgtagaatgttgttaaaaagcgccagtagcaccccaaagcctgttccgctcggcatcnnnnnnnnnnnnnnnnnnnnnnnnnnnnnnnnnnnnnnnnnnnnnnnnnnnnnnnnnnnnnnnnnnnnnnnnnnnnnnnnnnnnnnnnnnnnnnnnnnnnnnnnnnnnnnnnnnnnnnnnnnnnnnnnnnnnnnnnnnnnnnnnnnnnnnnnnnnnnnggccgtcgtagccgggcaatgcgttctttatgtcttctcttttgtattcaggatggtaatcgtattcccacttttgctcgtgcaacattccgaataatgacggatgcatggagtctgcgatcaggattttcatagtagcacaggattttttgtaacttgccggttgaaccgttcggaaaagtaatacagaattacgcaggagaacacatagaacagcatttacctacatgaagcgacaacacagtgataaaccggtcatcggaatacaatcg

SEQ ID NO: 74945 - DNA, 556 bp, Arabidopsis thaliana landsberg
ttcgttcacttaatttattacatgtatactatttggttgtttgtcatattaaacaacaaaaaaaaagtatactatatgtttattgtcacttgcgcatggtaataaacgttccttttaattaaagatacttatattggagatttgagattggagatttaaaattttaagaacttattttattgccaattcatatgtgagtgaatcatttattcatctgtagatcgtctagattttatgaatttatgaatgttttccttgtatacccctttttgcaactagtttattagatgccttcttgatcattttagcacgacttcttgtcactggcccaacagatactagcaacacatccttaatcatttttaacgtacaatgttcttaccctgatacgaaatcatttttctagaactataattgctgaaaccacatgaccattacaagtatatacaccaacacatttcatgttccttcgatacttcaatgatggcttgatcatcttacaaaatataacatttcaaaacagatataattctcaaaatctgttaaaacatatttg

SEQ ID NO: 74946 - DNA, 250 bp, Arabidopsis thaliana landsberg
ggacgcatctccatcatccgaactctcttcagatgcgtcgtctcaatcattttcatcatcatctaacttctcttgagaggaaatggtcttcacaggttccaatggcacaacaataaaaggtaaaacatctacttcagcgacgatagtgagtctgtcattcaccaaaaatccttcagctatattaacaagtttttcaaggagcaagaaatcttgaaaaccccaaatgttactctttgcatcgaaaaaacat

SEQ ID NO: 74947 - DNA, 557 bp, Arabidopsis thaliana landsberg
atatcgcccaagactagcatttaatcttaatccaagaaaacttttatcaggcacttcatagctcttttgaaatccaacttggaaaatagccggtctttgagtttgggcttataacggatgtgcataacaggaataccatccgcgatcgtcgggatttgattatgggcgaatgcatatagaggatcccatgcttgattgagagtgggcttgttatcttacgtgggataaacataaatgccaatggatgtcagaccgtcaaattcgtcatcaaaagacccaaagaaaccaccaaactcacgacgatcacgtatcttcacatcaatttccttcttataatctgccatataacttgatgaatatccagttccattacaaaacggcccgtgtttcccctgattagtgtgaaatgtcaaagacgtgacctttctctcccataatattccactcaacccagtcacatactcatcgtcattcagtctcacctgtatatttgctttaacatggccatcatgaacatgtataccaaaaactaagtatatataaacatttataacaca

SEQ ID NO: 74948 - DNA, 622 bp, Arabidopsis thaliana landsberg
  unsure (1)..(622): unsure at all n locations
gccccgnttacccaatcaggttctgcccggagcaaatgggaggcccaacaatgggcactcagtcttccatccacccgcaggggagaaatcatcatggtaaaccggacttttcttatcggccgcttcgatgccaaacccagctccgggcgcattatcctgagagggtacaaaaagccgatcgtcctcattccaccgggaggcaagaatttcattgcggcccgtgatgcggccaaggccatcattgctgcgcttttccaggggcaggaccgcgagtgttacttattggcaggggaaaatatgacttaccgcgagttctaccgccaattatgcgagatcacggggcaaaaaagctggctcatcaccttaccccgtccactattgctcttaacagggctcatgggtagcctgctcgcatactgcggtgtatttactgcccttcgatacaataatatgcggatcctgtgcctgcatacctactacgacaataaataagccgtcggacagctcgggttaccccagacaccgctcaaggaagccatgactgaagccatcggctggttcataataacggggtatgctcattaagcgacattaatcttgtgattccctgtaccaaaacata

SEQ ID NO: 74949 - DNA, 483 bp, Arabidopsis thaliana landsberg
gacattgaaacgttaggtcccgatgggcgcgctttccatattctgatcgtcgcttacctgctgttcgtgctcgcgctgatcgcggtaatcctgctccagcgctccgaaggcggcggcctgggcatggggacgagctcgtccaacggcctcatcagcgtgcgcggctcggccaacctgctgacccgcaccacgggcatcctcgcggcgctgttcttcgccaccgcgatcggcctcaccattctttccgagctcgatcgcggcaccgactcgatcctgaacaacgcggtgcagggcggcgagcagccgaccaccgtgctcgacgcgctcaagcagatgcagcagcagaacggcggcgacctgccggtgcctgcggcgaccgacgccactgcgcccgcgaccagcacgacgcccgccgccgactcgagcctgcccgtcccggctgttcccgcggcgaccgatgccgctccggctgcgaccgacgcg

SEQ ID NO: 74950 - DNA, 500 bp, Arabidopsis thaliana landsberg
tgatgtgatatttgaaactcatttttatgtcttaatttacaaaatttgttaaatcaattcatgtctttgtgtaaattaaaagtaaatgtgcttctgattataatggtgtatgttagatcatgaaaacataattaatacatagaacgcgtgtattttgatttcacattggtgtacctatttactagcttgtgtgtccatgtaaagatttgagaaattgaaccatgtgtttcttttaatatgatgtggcaacgtcatcttgctgagagaaggaaatcataataaagtaattatgacataatcatttaattggatctcttcattctctctctacatacatgcatattcacacagatacatatgtacacatatgtcaatatattctaggacttgagatgatagatcatatgttagagataatatgtaaatataatggtgtgtggaactttttataatctatgagaacgtcaatttatcattagttaatgagtactggcgcttat

SEQ ID NO: 74951 - DNA, 495 bp, Arabidopsis thaliana landsberg
gtttccttgcggtgttcgtcgcggtcctgatcggcgttccggtcggcctgctggctggttatctctttggttgggtcgatgaaatcgtcagtcgcatcatcgacagcttcctgtcgttccccgccattgtgctggccattgcggtcaccggcgcgctcggtatcgggctgaccaacggtatgatctcggtcggtattgtgttcgcgccgcagcttgcgcggctggtgcgtgcgcgcacgctggtggtgcgccacgaactgtacgtcgatagtgcgcgctgctttggcgcctcgacgagccgcatcctgtggcgccatgtgttgcccaataccatccagccggtgatcgtgcaggtaacgctgctgcttgccggcgcattgctcgcggaggccagcctcagcttcctcggcctcggtatccagccgcccaatgcaagctggggtgcgatgctggcgcgggcctatcaaaacatggagatcgcgccggagcagatgt

SEQ ID NO: 74952 - DNA, 512 bp, Arabidopsis thaliana landsberg
  unsure (1)..(512): unsure at all n locations
gcaaactgctactacatgcaatcaggactagatgtttgngatgacccctagcaactctaaggcacanggcctccaactggggtgggtagacacttaaatttccttttacaccctttcttcttatcttatggcgtacttcattctccacccatagtgaaacttcctcttcttcttcttggtcttgttcatttgaaaaacgctgtctactttacatatctatgcgggtgctataagctgcatatagccaactctatgcacatgggcgaacgcatagtatattcctctcttggatctttacctcccaattgattttcacttgcatatttacaacaattatgaacaaacaaaaattcaaccgttggatcatactatccatggtcctttctggagctgccacacgcttatgcattacatcttcaagtggcgcatatattacctgcgaaaatgaaggctcaaaaatgagtaacggagcttggtgtgccttctttggcacggtagcattctctttatct

SEQ ID NO: 74953 - DNA, 503 bp, Arabidopsis thaliana landsberg
tgtagagtagaaaaggtcttggcttgaagccgcttttcacaaacatgttgttgttccagagccatttagttgcaaacttttttctcaaagatccgcaaatgaaaacaagctcaatccaacttatcaggaactcagtctctgtataatcaccaacctttgacggaacaaatcctttccacgttacttgatattagctgaatatatgaatgtaaaaggagactaataagtatttttttcacaatctcaaatctgcaaataagaatgcaaaagataaaacctctaaaaccaattcgatgaaaacgattcagttgctagtgaaacacgaagaaaccaagagagagtgagaatcggattcaaaatcaaaggattttagaaaactgatcgcgatataaaaacatatgagagcagaagaaccctagcgaaattagaaacgacggatccaaatcactgaattggaaatcagtaagcagatgaaaaacatggagaaataaagaaggaaatcg

SEQ ID NO: 74954 - DNA, 512 bp, Arabidopsis thaliana landsberg
  unsure (1)..(512): unsure at all n locations
ctcttttgtttgtacagccaatcctgatggctattcttatgctttgacagttagcactctgaaactcgtcgcaagggtttctggtgtggagttaggtgctgcctaaagtcataaaccgggccgagatgtaagacaactcatggaacaggtttgtattctctttctctctctatctctctcaagatttaattttggctattgaaagttaaagagcacaaaggtattcgtatattgatattgcttgatataacaggtatcgaacttgaaggatgtaattgctaagaaagatgaagagctacaaaattttcagaaggtaaaaggtaataatgcaacatccctgaaacgtggattaagcaatttaaggttggtggggcctacatcacctagaagacattctattggagcgtcaccaaacgctcgacgaggaaaggcctctggtttatttggaagaggaacctcagatgttgacaactgctctgaatatagcagcaagcattcngattctggttcac

SEQ ID NO: 74955 - DNA, 570 bp, Arabidopsis thaliana landsberg
ttccaactacattatatatagacgagcaagttattggatatctaacgtctgaacgaatctatacctgggtaggcggtttctaaatctgggaactttttacagcttcttctagtgaaatccgcgaagctctaaaggatgaagctcttcagaaactcatctacagtattgatagttcttccaaccctttacaggtaaagctcatctacatcgtcgtcagtaattcaatatttttgttgttgttatcgatctcctttgacgaaactatttgtggatgtatcaggaactcgatgaagccatgggaatagaagcattccgcgaattcacagacaaggtacagtcttaaaagcttttatttcaagaacttgcaacaatccatgaccagcaaaagggcctccgctaagtttcccactttgtttttttttttccagattttatcaaacatttcgaagagtaatgacgagcagtgagtgtagtcgcttcaaaactccagtagtattcttgcttagtgtattcgttacatagtttgagaaaagtttcagagacatgtctactggctataaaaacgagccg

SEQ ID NO: 74956 - DNA, 193 bp, Arabidopsis thaliana landsberg
tgcatctggtcatttataactattaaaaagtaggtttcatcggactctccctatctaactgccaatatgttgtggcctccctcgtaaatgagtaacatgtgatgaaaaacactattgaatgatggaggaacaaaattagatggaaagatgtcttcagttgcacatgaacaaagaagagggcgtgaagactcta

SEQ ID NO: 74957 - DNA, 362 bp, Arabidopsis thaliana landsberg
attgagctttcgggagaaacctcaactgcagcatgccatacaagaatctggacaacgctgtatactttgtcggacgaagcgatggagatttacagggacactaggattgtataagtgtctcaattcgtgaatgaaagatattaaccttgcagaatgtgaacttacctagttgtatggtgaccactatcctagacatatgcgaatcaattggaattattcttcaagttctaataaatacaaacttggaagcatccaaacgagaacatactttactttctgatagcagctcattaagctaaacctgcaaccggacgcggacggagcatatgtccaaattcactgaaagtaagacaacatggggc

SEQ ID NO: 74958 - DNA, 381 bp, Arabidopsis thaliana landsberg
tcttttggtacatccagttccgaccccagactgaccgacagcgtgcctttggcgctttgcgtttagttttcgccaacctgcgtgtcgccacccttcaccaccacggtgccggaattggtgagtgaaccaagcacgccggggacggaatccaacgtgccctctcttcccacggcgaccttgtcgggcaatgggtacaccgcctgcagggaaccacccagcacctgggtgccgccggtgtagttgtcggtgccggccaacaccagcgtgccggtaccgttcttgatcaatccgccctggcccgtaatatcgttgccccaggtggaagtgatgccatcgaaggaaactgaaaagtcaccccagtcgaatttcgccggtcccttt

SEQ ID NO: 74959 - DNA, 567 bp, Arabidopsis thaliana landsberg
caatggataatattggaatttctcatacatgataaatgtgtgattggtgaaaacagtttttttcaattttttggtttgttcatgttttctcttactattcacaattaagaaatcatgctgagccttttgaaaaaaataaaaaaaaatcatgctgagtttgaacttggcagacgatgttaaagatcgaacataaaaggataaagaaaaagtttgaagcatattataacaaaatgcacactattattagtaattttaataacatcatcatttcaagacgacgacattgggtccatttcgcatgtgaatagacacaaacaaactcttttaaaaggatacatttttatgcatatgaaaactttcagtatcatcatagaaatacactaattcttttacgggatctactacaatcataggaaattttgaaaacaatcatatatatatggaacaacattattcgatattttgatcatcttttatatatatatatactcatatatatatactcatttatttggtatttatcgttataattctagtgagtgtctatatattccttttagacatatg

SEQ ID NO: 74960 - DNA, 379 bp, Arabidopsis thaliana landsberg
cccgacccgagcaaggcgctcagcgatggcccgaacgcgtggccactgggcaagatggaggccttgctggaaaccctgatggaactggatgccgtgaccaagcggcacggattcctcgaacaatcgatttgatcccggcgcgcggctgctccccgcgccgtttttttgcgtatctttaagccatttccccaacccgacctacaggaccgccatgagcacagccatcagccggatccacgcccgtgaaatcctcgactcgcgcggcaaccccacgctggaagccgaagtcaccctggccgacggcagcttcggccgtgcggcggtgcccagtggcgcgtcgaccggttcgcgcgaagcgggggaactgcgcgaaggcgac

SEQ ID NO: 74961 - DNA, 479 bp, Arabidopsis thaliana landsberg
tctactttgatgctgctgctggtgcacttgcctctggttttgggcctgctgtggctgctggggatgaggctggcttacgtgccgccggtcatgccgtaggagcgaggagtgagcgagcgagggggacctcggtttctctcactcctcactcctcttcactgcttctcgctcctacagttcccgcagcgccgtggtcaccggcaggcgcgccgcgcgcaccgcgggaaacaggccgccgataaagccgatcgccatcgcccacttgatgccggtccacagcagctggggcgacaccttgaactcgaataccacctggctgaagttggagccgagggtggatgcggtgtaacccgtgaagatcagccaggtgatgaagccgccgagcagaccgtccagcagcgccagcagcatcgtctccagcaggatcgacaccaccaccggcacgccacgaaaaccgatcgcgcgcagcgtggcgatct

SEQ ID NO: 74962 - DNA, 462 bp, Arabidopsis thaliana landsberg
acggaaccagacccagggggcagacaaattctgcggcattttatattttagggcctgtcccggctccactgagggcgtgtgtgtaagtatacagggcccgttacctacccggtctgatttgagcgttaaagtcacggattccttttcattgtgggaaagttcgaggctcttctggtcataaaaaccaatcaaataagggtctgaatgctctccagcctgtacttcctcgtctctccaggggccgccgcggccggtggatttgccgagtttacacatgtcggacatcgctccggcaccatacggccgcctttttgtcgccccaatcaatgatatgcgcgctgttctgcatcgacttatgatcgactcccgtcatgaccagaataccgtggtaggatgcatattcctgaatgctgagattatgcgaataaacaggttggattttgggataaccatcagcattct

SEQ ID NO: 74963 - DNA, 642 bp, Arabidopsis thaliana landsberg
  unsure (1)..(642): unsure at all n locations
tgtccggcagcggtgagcggcaaaccattcgcgctttacacgatctgtcctttgtatttttggaaacccacgccataaaatgtgccgtaaggctggcctacgcgtgcttccgacgacataccgcgctgtgtggcgagcgtgtaggtggttaaaccttccgcgagttcaaccactttgttgcggttgcgcgcccagttgagcgacacatcccagctgaaaccgcttggcagtttcaccggcgttcccgaaaccgagatttcaataccctggttcgtgatctttccagcattcagaatacgggtgttataaccgcttgctttggagatttccacacccaggatctggtctttggtcgtctgcttgtaataggttacatccaggccgattttacctttcaaaaagcgtaggtcggcgccgagttcgaggccggtcgtgatctcaggtttcaggccgccgttcgcgatttcgatgttttcggaaaatttgggtaccgcgccgtcccaggagccttttgccagataggtttgggctaactgataaggtgttgcatcattacccacttgcgcatagctcgcacgcactttcccgaatgtgaacacatngctttttacatcaaacaactccgtgagcactgcactcaac

SEQ ID NO: 74964 - DNA, 453 bp, Arabidopsis thaliana landsberg
acattttttgggtctctcttttcctcttcctgcaaagacaacagaagaaaactcgattggtaaaatcccatataaaattcaggatgagtggcaggcaataaggaaagaggcagtataaaccttcttatctgtgccatgcagttggtcttcatcttctatttggtcacttacatcttttgcccccacaccatctcccataccagtaccttctgcagcttccgatttgtcaactttagagtcatcatcttcttcatttttggagatgccaaatccttttgtaaatagatcggcaagaacacttgcaaggacatgggttatcagtgaaacctacagaccaaaagcacagatgttgttgtcttattggaataaaatagtagaaagtgtgtaaatgccgagatctcttcacactaactaacatgcttgacattcaagaagttgtttaaagaaaattta

SEQ ID NO: 74965 - DNA, 520 bp, Arabidopsis thaliana landsberg
  unsure (1)..(520): unsure at all n locations
taagtttaaacatataataaataaacattaagtatgaattaaaattaatactaaacttactttatccacattatatatttgttaataaacacatcaacaaattttgcacatttgcacagtaaatccgtagcagctataatggggcagtattatataattgatttcgacagtacatttacacaggttgaggcgttggacgagctcgcccgcatatcattaaaacatcatccggaccgggaaaaaatttatgaaaaaattgaggctttaaccaatgcttccatggaaggacggttatcttttacggatagcctggccgcgcgtgttaaactgctggaagccaaccgcgatcacctgaaacaactgatcagccatttaaaaaagaaggtttccacctcattttcgcgcaacagcattttttttaagaagcatgccaatgaggtacttattgtatcgngcggttttaaagaatttattatcccccgtgttacccgatatcatattaaaaaggaaaatatttatg

SEQ ID NO: 74966 - DNA, 572 bp, Arabidopsis thaliana landsberg
  unsure (1)..(572): unsure at all n locations
tcctactttaacatctancacaattctcgaaactattatttttttacctattagaattctcttaaataagatgataagtatattaaaaaaagaaaatgacaagtatataacccaacatcaatcattatttcaatagttcaactcgtataaaacccataagtagattttttttttcttctaaagtcacaaatttaagtctctcagtggatagaaattagaaaactatcagtggaagaaaaagtatatattttgtgtcaaatcagtggaaggaaaagtattaaatgatattgatcataatttaattttcatgtcttataatcaaataattttgttgactggattcgaagaacttactgaacaatttgttgtgggttatcgtcagattatattataaatacatgatctatgagatgatcaacatttatttaggatgatgactattcaattaaactcttaaaattgccatcataaaggttgtattggttagactaggtttatctcgatgggtctaggactttgaggtaactcactggatctcttttggaaaaaacataaatccttatttcatagga

SEQ ID NO: 74967 - DNA, 564 bp, Arabidopsis thaliana landsberg
  unsure (1)..(564): unsure at all n locations
gcgccatgtccagcgcatggccgacggcatgcagcaggccgcccacctcgaccggcttgttgagcatgctgaaatgcttcaggggtggcagctcgtccagcgacggcggcgcctcgggatcggtcaggaacagcacgctgccagcgtaatcggcggccagcaatgcggccagcgtgcgcacgccggtgacgaggctcatcgccgnnnnnnnnnnnnnnnnnnncggcaaaccgtcgatggccagtgattgcaacgccgccgtaccgctgttgcacgcgcgcacgacgtagccggcactggtcaacgtgccggccagcaacgacagctgggtggcgttttcgtccaccaccagcacgtgttcgccatgcccgcctgcggcctgctcggtcacgtgctgcgtgctgccgacggccaacggcaggtacaggtgaaaacacgtgccctgacccggagcactgcgcacgcgcaacacgccgncatgtccctcgacaatgcgccggcacgacaccagacccaggccagtgcccatgtncttggtggtgaaaaaaggctggaacagatgct

SEQ ID NO: 74968 - DNA, 225 bp, Arabidopsis thaliana landsberg
cgccgatgatttttcggctgataattcagtctcacatagctagagcgagcgaaagccatttaaactttttcttatgcgagcgatccacagggggaaaactgtgaaattccgggagaaaggaccaaaaaggtcaaaaagtctttcaaatcagaagaggcggaggctataggtaatatgcccaacgttgatgatgagccgacacaagttgaaagagaacagcatgag

SEQ ID NO: 74969 - DNA, 723 bp, Arabidopsis thaliana landsberg
catcaccgagggtgaaatgtggcgcgccacgctgccggacggttcgctgaagtacgccttcctcgacagcctgatcgcgatcaagccgatgtacctgatccgttggggcggcggcgcactgatcctcagcggcatgtgggtgatggcgtggaacctgtggcacaccgccgccgacgcccgcgcgcgcttgatccatccgattccggtgccgatccccgagccggtgcccgaccaggtacccgccccgctaccggcgatgggttaaggaggaagccatggcctacaaacatttcgaattcatcgagaagcacgccgcggtgctcggcatcttcaccgcgatcatggtgtccttcggcggcctcgccgaaatcaccccgctgttcatggaagcgcacacggtgaaggcgccggccggcgtgaagccgtacgatccgctgcgcctggccgggcgcgacgtctatgtacgcgaaggttgctatctgtgccactcgcagatgatccgcgcgttgcgcttcgagacccagcgttacggccacttctccaccgccgaggaatcggtctacgaccgcccgttccagtggggcttcaagcgcaccgggccggatctggcccgcgtgggcggcaagtattccgaccagtggcagcgcatgcacctgctgaattccggcagtgtggtgtcgcaatcgaacatgcccggttacccgtggctgggacacaacacca

SEQ ID NO: 74970 - DNA, 366 bp, Arabidopsis thaliana landsberg
aacgaacaccgctgtaactttttctttctgtgttagcctaaacgttgtaagtgattttgaatttttttatttcataaatttccagtgattcatgttgacatgatttgcctacgttatactaaagttgagtgtacacatgtcttatgcatgttaagcgtacacatcattcattatcgagataataaagggggacaacatctgagaagtagaattttttatattagaatacaggcttgatttagaaaagtccctaggaaaaaacttatagtgactctaatttcttaacacagatgagatatgattaggttcttctgatcctactgcataatcggtccatgatgagcttggagctgggagatggacggg

SEQ ID NO: 74971 - DNA, 911 bp, Arabidopsis thaliana landsberg
tgatggacattcttgatccaaataagagtttaaaagcagaaaaagattttgatttattaaagtttacaacatcagcagtcttgaaaagtattctgataggaaattacatgatttttgcaggaatgaacactggaattcaggatgctcataatcttgcatggaaaatagcagctcttgttcagggttctgcaaactctttaattcttaaaacttatgaaacagaacgtaggccggtatggtattcatcttttctaactttttcttgccatctctttcctcctaacttgattcattaacacatatcttattgtgactgctagattgccctttccaatacttcactcagtgttcaaaacttcagagcagctatgtcagttccttcagcgctaggccttgacccaacagttgcaaactcaggtaaactaaaactagcttgtcttttgctcatttcatagttccatgatcaggtttaaagcaattatatctctatggtgttgtagtgcataggtttataaacaaaacagttggttcaatccttccaactgggctgcaaaaggcaatcttggataatgtctttgcactaggtcgtgcacagctttcagaatctctgttgaatgagagtaatccgctgggaaatcagagacttagcagactaaagagtatcttcgaaggaggaaaaagccttcaactacagtttcctgcagaagatcttggtttcaggtatagtcaccacctttggaactgtagaattctaatacttgtctgagtagtactaagaatagaatagagaagaaactagggttggctgcttttgtaaactgatatcagcggtttcatgacacggacagtgtagtctttaatgtttgaaccagtgtatttcttgcattatatttcattgaaagatatgtaat

SEQ ID NO: 74972 - DNA, 511 bp, Arabidopsis thaliana landsberg
aattactcattatattattgaatcctcgcaatctaagtgtgcaattcaataaggctctctctaatttcatttcttcttgattatcattctttcactaatgaggaaacaatcatccaatgcctttgtttcttgatgacattttgaatttcgttgccaccattgatttctcctttgtatactttcacaaatctctcaagcagagatcggggtgaggagcctgaagtggccttatggctagggatagggcttggaccgttcctaaaccagatagaaccttaacattagcatgacttgatgctaaaatatagaccaaaagtaaaacatacatttgccatcgttaagttagtcttcttgttatagttagttttttattattctgtaattagtctgagtggatgctaaaatattacaaataattcttcttcaaaacaaaaccgcgagtgagtgtatcgatcctcacatctaaagagagctttctgcaatggataagctgccaagaagaaatgatatt

SEQ ID NO: 74973 - DNA, 705 bp, Arabidopsis thaliana landsberg
gtcattccgatggtgcgcgagatgctggcggagaagaaggcggcttaggcacgcctcatgcaatcgcgggcggttccaccgtcagggatttcattgtccagtggacaaagagcggatggcgagccgcttcgcctacaaacgtcggtacggactccgtcatcgagatccacagcagcccgacgctggcgtcggtgtcgtcaccacgggcgaccgatccgaaaacgcggggattcgagacagggtaacgcgcgatgatctcgcgagcctgcagccgatttttctccaacgcttccgagggccgcatcgtcaggccgcctcttccgcctgcctggcctcgatctggccgatgcagtcgaccaccgcgtcgaaggtcagcatggtcgaggcatggcgcgccttgtagtcgcgcaccggctccaggtatttcaggtcctcgaaacgcccttccggcggcgggccgttttccttcagcatcttcagcatcgtctcgcgcacggcgcgcagctccgcggccgtcgcgccgaccacatgccgggccatgatcgaagacgaggcctggccgagcgcgcatgccttcacctcatgggcgaaatcggtgacgacgccatcctgcatcttgagatcgacggtgacggtcgaaccgcacaactttggaatgcgcctttgcggtgggcgtcggggggcatcgagggtgcccgatgcgga

SEQ ID NO: 74974 - DNA, 612 bp, Arabidopsis thaliana landsberg
ctccttccttcctcatcctcttgccatacagactcgtctctctcttcttttctctcacaaacaaatacgctcgcagttttagggatttttattctctttttatattatttcttttgcatttaaatttgtattgttgctttcttcttgtctaactcgctcgcttattattttcgtgctctttttcttatttaaatactgtgttttttcattacggtacaatcttaataatctaaataaattcaaatcaatctatcgagttcctataagtcatgagatctaatagtaatactagcatacgactacaccaattcaaggggaaataaataagtaattaaaaccgaaaagtggattaagtaaccctagttttaaccgctgctttttatcctttgacctattccctttttccttttcgttagttaaattgtacatttaaaacccataacgatgccttattatatccagcccggttaggcttagttcaacatctttcggaaataaggtattacaagaatgtgccctctttggtttattctactttctagaaacagaatgccttatatcccgcgtgttgttggtgaaagtaggtcagactacgtttacgaaatcatgcta

SEQ ID NO: 74975 - DNA, 453 bp, Arabidopsis thaliana landsberg
gtgcacctgcatctgatcatatgaaactttttatctgaagtttgtccgccatgtacagtgaccagttttatttgtttatgtatgtagacgaaacgcatcatgtccctggatataggattgctaatggccggtgcaaaagaaaggggagagctggaggctcgagtcactgctttgataagcgaggttaaaaaatcaggttagtgatctgaaatcttaatacgtcaaagacttctaaaattagtatggcacattcctaacagtgttttttctttttgttctctcataggtaaggtcattctcttcatagatgaagtgcatacacttattgggtctggcccagttggaagagggaacaaagggtctgggcctgacattgctaacctcttgaaaccatcactttgaaggggtgaaacttaagtatgaatgctgaatgaatcgatgttttgctgtttt

SEQ ID NO: 74976 - DNA, 294 bp, Arabidopsis thaliana landsberg
  unsure (1)..(294): unsure at all n locations
ccgggggtcttactggagccctcgctgcccagttgttccttattaatttcatgctacgtacacaagtagtcaagggggaaggaatgacgggatatacactggactctgcaatattcattttctcgatgcttgatgactgctaatcaagggtcgggnnnnnnnnnnnnnnnnnnnnnnnnnnnnngaaatattgactttatcctaagcgagtacagggtagaagaacgtcggttctctcagagcggacttcttgagggcagcaatcgatcgtgcctcattccctagcatgcctga

SEQ ID NO: 74977 - DNA, 469 bp, Arabidopsis thaliana landsberg
ttatatacgtgggggtacttgtttttcagatcaactcttattgtgaaacaggattattgggggtataccgggagatttaacttggatggtgacaagacaaccctcgtggatatgctagaacagtattacaaagacatcgatacatatactaatatggcaatatatttatttatcatataaaatgtgaatcgttttttatagagaggtatcacacagaacaaagacaaacactcgtgacatagccagctagcgtccgtcaatttgacaaatgaaaataaattcagcgagtaaggaaaaaggtaaataaataaaaatctaaaacacacgcacacactaaaaagtgctgcattactctgtcaaactaattcactgccctaggaggcaatgatatggctataaatgagatttgcaaaaaagttttcagctttctaaagaaaataggttgataatccaaatagatcaatgacat

SEQ ID NO: 74978 - DNA, 572 bp, Arabidopsis thaliana landsberg
  unsure (1)..(572): unsure at all n locations
ggaggaaagtttcgcggcttgcactttgtcggattcangtgatctacgataacttggttttttttttttgtggtttttttaaaaaaacttggccatttgccaacaaaacattcaagtagaagtaggtacactctagcttatagactcatcgtagtaatatcgtctgcccatttattttatttttgacatatatgcattaggtttatggccaatgggttggatatttattcgcattcaatgataatgaaagtaaaaactgatatagcggatttgtcggattgtgaagatgtcagtgctatgattgaaccatttaataaaagtctcaaatttctgctttccagagcattacaggctattggattcaacttctgtattggaaggtttagttttatattcaaaaaacaaaactaacaaatgtgaaaatgcgttctttgaattataacaccgttctctatctatcagctctattatatacgggttacatacaaaagagttaggatcagtcaaatacaaacggatacatgaaacttcataagcaatgttaaattatgatgtactataaaatattgtac

SEQ ID NO: 74979 - DNA, 585 bp, Arabidopsis thaliana landsberg
  unsure (1)..(585): unsure at all n locations
ccttaactttgctcttgcgagtctgtactagtttattagctgtttccttaataactttgttgaacaacaacactgttgattctctcttcttctctgtgtcttggtgtttcagaacaactctgggtttgcgttgttgttccttgtcgttgcttaagttggttcctttgttctttaagcgtctcctaccaccagatttcgaggttgtgtcagctccggaaatgatttttcctctcttgaacttgagnnnnnnnnnnnnnnnnnnnnnnnnnnnnnnnnctataatctttcctcttctgattctcagtttcatcgcattgccagttatagcggattctgctgagaaggctttgctttttccttcccttgntgngttcttatcttcagagacagacacattctcatcttcttcttcttcgncttcctcttcttgagaagactcattntcatgttcagtctcaatacactcacctttgtcttggctcttttcgctctttggatcatcaataggtgaatccatgacacacctctggttcagttcagattcaacaatctcatccactgttccatctaataacatagagagtt

SEQ ID NO: 74980 - DNA, 608 bp, Arabidopsis thaliana landsberg
  unsure (1)..(608): unsure at all n locations
taaaaccacaagtgtttgtctctatttaataagtgatttttaacttaatttcaataaaaatagttgaggtagaggtaaactagaaaattagttttaatttaaaaaatagcattgaaaatgtaaaacaacactatttgcgagaaaacaatttgtggaacgatactatttgtgaaaaaaagaagtactattaagtttaaacactattctttatttttagtttctgtgtttcgttattaatgtaagacaatcccaacatgaagacaatctcaacgcgatgaaaaaaaaaataaacaaaaaaatatttagccttaacatctaagtaccacatggattttttttcaggttttttggtatgcaagatcagttcaatacccgcctataagactccacactctaccctagttttgagaacacatgacatgcaagcgacctaatagttttgacttaaccttgtatcttctataatttgtaaaatggatcagtacataacatccttgcctacatacatctaaccaaaagtttatcctcttattccacaatttcttgctaaccttagatatgtgactgctactctttagtcatcggatntaatatatatggggtatgac

SEQ ID NO: 74981 - DNA, 1682 bp, Arabidopsis thaliana landsberg
ttgaaccattgattttagattctagtgtcttattgtgagagttgctttgttagtggactcttcactgttggctcactttttttttttgcatatgatcttgcagagaaaatcacttccagagttttggcgagatcgtcctgtagtaagttgcttttctctggtcacatatttaactaccgcaccgtattaagttattaacagttcctccttgcccgttagctcatgcccattcgattcctacatgttttactctgtagaatctggcaggcatttacagtttgatgaccaggacacgatgtgttgtactaatgtaatcttattgtgtagccagctgaaggttggaaggaacacaactgtatacctgatgagcactatgttcagacattgctatctgtaagatcaatgtttgatccaaccatgtgaattgttgtttagaaataaatagtattactaatcaaatctggtaatgcttcttcaaatttcagcaaaagggtgtagatagcgaactcacacgaagatcactgacacactcagcttgggacctttcatcctcgaaaagtaatgaacgtcgtggatggcatcctatgacttacaagttttctgatgctactcctgatcttatacagtccattaaggtaagcatccgtaagaccaacattttatttggtagaaatgaaactatccattacaatgtatgtatctcttgttctttttttcatgccatggctttagccctcttacaaacttaaaacataaatagaatctctaactaaacacattgattctcagggaatcgacaatatcaactacgagactgaataccggcgagaatggtgtagcagtaaagggaaaccatcaccgtgcttcctcttcgccaggaagttcactcgtcccgccgctctccgcatactccgtgaagtaaacttttctttgactatcatagcttaaactaagaaactaacatcacaaacattttgatgaactcattgtgggtttctttacttcctctatttctttggcagactatcttgttagagggcaaagagcatgacaataagtagatccttcaccatttaaagcatatattacacataggtacgtaagataaccaagagttactatgtttgtacaattgtactactgtgatttcatttcatctgtaatacttacgatgacgaatttacatagaaacttacaccatttggtaaatgagtaaaagccagccttgataaaagatggacggtagagaaagagctcagcaggggtgacctgagaacacatgaaaacgagagctgtaacaatgacgtagcgtcattacagccgttgattgctcgtgtgttctcatatcaaccctgtcgagatccactaccttaacaatatttatctatcttctaaaccagtaataaaaggactgttacagtttgagtttcgatatccttcaaatctgctgagagctactatatatacacaacacaacaaatgatgaaaggattgtgtagtacacaatattaccacacaaattgtagtacacaacacaacacaacaaacgggccaacgatttgttgcattcatatacgttttctttagtacaataaaaaaaacctacagaattgtgtactgcgaaaaaaatttacaaaaaaatcaacattgtacttctccgacaggaggaccaaggggagttt

SEQ ID NO: 74982 - DNA, 454 bp, Arabidopsis thaliana landsberg
gcgctcgcagccagacctattacggacgagatgacagcttaatctctttgatgcccgagaacaaggaacggtacggcgaacgcaacgatggcggccaagatgccatacacagcccaagatgtttggcggtcgaacatcgtgcgacaggtaaagtaacagatcgccaagacgatgacccggatagggtctataatttgagcggcaaaaatcgcgataactgccaacagcctctcccaagcccgcgcgactgatctgaacaccgaaacccactgacattcaagccccgccatgtcggcggggttttctctcatggagaacagccgatgacagtcccttgtcccggatcgctcgtctatacctatttagcagacgacagcaccacgttattcttttacccggtttcggtcctcgacaagcggggatccgttgtattcctgcgcgtgggattgacgga

SEQ ID NO: 74983 - DNA, 584 bp, Arabidopsis thaliana landsberg
gaattcaattgtaggattaaatttaaatccggttttaaaaatgatcaaagcaagcagtaataatgatcatatatcacatgatttatagtgatgattttatcttgaatataaaagttacaactattttctcttgttgcggatttcactatcatcgaaaaagaagtttgcaaaaatattcacatataacaatttttgttgttaggtacctaattttcatgtatttaccactagaggtgtgctgagaaggaaaaagtggaaaagtaaaaaagcagatgagagggcttcagccttcaacttcacatatattcgtcaaagcagaaaataaaggggacaacttcagagaatataatttgcagattttgaagccttattatgtttgttataagaattatatgtcttaaaaagtgattggaacttggttccgtatcatgtctttcatctccactctctctatgttttcatgcatcaataataataatccctataatgaataattggattctttaatatgtagacagcattctttagctccttacctatcattgcaagaattgtgtacacttatcatgtttctattgtttgta

SEQ ID NO: 74984 - DNA, 750 bp, Arabidopsis thaliana landsberg
ggcccagtcttcagacttggcccttcattcatatcagttcactatgagttgtacttacgcaaatatgttgcagataatgagaaatgctgccgagacgttgacacctgtcactctcgagcttggtggaaaagatgcatttatcatatgtgaagacgcagatgtctcacatgtaagtgttctttctgtgtcgtggtgctctcttctgtgtttttatgatctattatttgaaaaagaggcgttcctttcataaacctaaatacttctattgtacaattaggttgctcaagtggctgtaaggggcactcttcagtccagtgggcaaaactgtgcaggtgctgaaagattttatgttcacaaagacatttatactgcattcattagccaagtaacgaagattgtgaagtcagtttctgctgtaagtgctctgtaactcacaaaaaacaaagggataacaattcgcatgccatttagtttgatccctaatacacatgaaattcaggcagtccctaattcatatctgtcttctgatttgtttgtcatcatcactccagcgtcttcattagtataaagggcgtagtagccattctcttgttttcaccacccttcaatcctattcctatacatcctagtatatgtaagccataaaggaggttaactggttttttatatgtgatgcttgggaagtttgaagaaaacaaaaatctcttggttccagcaacattaggccttctctttctcaaaatttctctt

SEQ ID NO: 74985 - DNA, 112 bp, Arabidopsis thaliana landsberg
atgataacagaagcaagactaaacaaactgatataatctgaacaactcaagtcgagaacactgggttaagtgcaaagtaaagcaaaaacgatatgcgagctgcggagcctag

SEQ ID NO: 74986 - DNA, 580 bp, Arabidopsis thaliana landsberg
  unsure (1)..(580): unsure at all n locations
gaacattcgacgataggactatgaactttacacgtttctgtcaaagtagaattaattgaagatatactctcgtgttattaggttacatcaccgaaacacatatatacacggttcaagagaagtagaatatagataatcataaacttaatcacaaatctattcctaatccttatctcaataggtatcctagcactttctttaagaagaaattacctccggcgagacaagcttatttccgggtttcaataacatcgccggctgagtaaagcttgatcaagagtggcctgttttccacgtagaggatatgaaaacaaatatcttgtcttaaagcaacaattttgagttgactatctttaatcatttaaattccgacatacttgttatcacgaacataacaaaatcttcattgtctaccaagataggtgtgcacgtcgtacattgtttttttgggaacaaaagagaaatcttggaataagaattaaggtgaaaaataaggtaacaatgactggagacaagtatttttttatgaaatccaagaaagtgnggatggtggagggagtaaaggntttggataaaagta

SEQ ID NO: 74987 - DNA, 452 bp, Arabidopsis thaliana landsberg
ctcagtattaacaaggagaatactcacaattttcaaaagcgatttagttgtgatagcagcagttgttgaactaattaaaattctgttattcacagaacttaaatcccccgcatcggaagaactataaatttctgcttgacgtttaagaacagtcaaatctgaattgtagacatatgcgtatgtaggccctatgacttgaccgcacacaataaagacttcatcagtatctttaagataagaacatgactttatattattcggagatagacccgtcggggtaacaagactttctgcaaaagaaccatcagaccatttaacaagaccgacagttgtggtgccagcgagataggcataatcagcaccaagggaaattgtatcctggaaaccgctgatagtagtatcatcggtgccaccagcagaggaaacagaccaagtcgtatcgccagaccctt

SEQ ID NO: 74988 - DNA, 648 bp, Arabidopsis thaliana landsberg
gtgtagcttatgagcatttgatactgagcttcttcgatctctctgatctcttcttttctcagtttctctccgaaacacatcagagccaataaataaaacatagcgtgacggagatgatctaaagcgtcggagatatgtcctttctctctctgctctgtctcgaacagatccacgagaatctcgagagaccatttcctcgacggcgcgtgtgctttcacgcgcgagggttggaggatttcggaggtgaggttgcggcggagggttctccagagagatccgtagacggaggagtggatgtcgtgttggttgctggtgatgactttggtggtagggagagcgagagaacggtcggagaaaatggcaccgttttggacaagggcttggtgagcgagtgatctgtctgtgacccagatggaaggtttggagcctacgtggagtgttatgattggtccgtgacgggaggctaagtcacggagaacgccttggaaatcggagaagttgtttttcttaagccagatgatgtttccgatgaccggaaaacgaggtggtcccggtgggagtttgtgagttgagaagaagaagatgagtttaaggaagatggagaaggtgagagaggatatgatgaggaatatgatagtggtgatccca

SEQ ID NO: 74989 - DNA, 562 bp, Arabidopsis thaliana landsberg
atctatgatttttgttactatttgaacctcaccgcaaatttaaaaatacatttgaactagggtatttatggggaatgatcttaaggatacaaccaaagatatactttcctcctatcaaaaaagtatgtagttccataacgacatggctcatcgtaatgtgaaactatataggtcttactcttttactattactattttgactatagattataaccgaaaacataatatccgtgatttcacacatatcagacaaaatgattagtggcaatctagcaaatccaaataataaggatgggtaaaaatgtaacatgagaacgacccatccctataaggcctacataaaccgccaatcactcctctaaaaatcttacgaaagaagagaacaaagaagaaattttgaaaatagtgaaaatggtaaccgtaagccaaagtcacacgacgacgtttctcttcttcaccacatttctcttgatattcggatcaatctcagccgtccgtttgctttcacgaccaaacactacaacaaccaacgatctaaatttcatccgacaagctgaacgct

SEQ ID NO: 74990 - DNA, 378 bp, Arabidopsis thaliana landsberg
cgacgcttgatcggggtcaaaaaggggcttggaaacacaaaattcctcgtgttttgaaaaggaaaagagacgtgactaccattcccacgttgattggccgatcccaggcgcatgaataaaggatccaaaacaaacacgttgactggggactcatccctctactaacgtaaagatctgaaaggaatagccacatttctacccgaacacaatagaacatgccaagtgacctcttgttcatggagaaccgactggatacataccggaagacatgtgcgggaatatgagacccagctccatggttcgagctgcgacccaacacctaatttcggtaggagtcactgacagcagacatcaacttacaacatcagtctcatacta

SEQ ID NO: 74991 - DNA, 550 bp, Arabidopsis thaliana landsberg
ggtgtactatactactactacctgtaatctttttccctatctttttttggtcgtatttacttcacttcacttagatcattgaatatggtgtcatctaggagcaattggatcatttaattattgtcatgtgttgggccttgggagtcgttaactctcgttcatggtgttaatttggtttcacggggtgagtttattgggttatatacggtgaagtccttctaagaaaattctgactcaagtctgttgggaaattacatgcattggctcaatctgaaaatttagtgggacctgcaagcaataaaattgcacaaaacaatttgaagcatatcagcaattctttttcataaatagcaatttagaacccaaataagcctagaatcttcctagtcccatattctgatggagacttgtcccaagtccaaaccacatattactctcaccaacgaaagagggcacaatgtaaaacaaagacatagagacaatcaccaagaagataacacaagagcccacacatcgtacgccacgtggcagattcacctctttataatcc

SEQ ID NO: 74992 - DNA, 584 bp, Arabidopsis thaliana landsberg
aacaggttgcaaatgaacaaaatgataaaagacagtggctgtcttataattttctatcatacaacatgagaatgtcacagggctaaaatagttaagctgctacataataacactgggagtataaagatccagaataaacgctgtattttcgtagcactccaattatttgacactccttgaacatccatgttccatgaagtgcagcggaggaacttttctttcttctcagctttttaaaacaataactgattctcgaaatatgcaaagagactctgtcagaaagatcaaacacaatacacaacccatcaccatgtcaaatcctaaaccattcaacaaaaaatttcctcgttatctgaaacgacacattccacagtttcagatattaataactaattctccttcttggtctgaatgtttccacatatcacagataaaccaatgaatctatcttcaatatcatcgtttagtagttaatttaatgtgattacttgcagcctactcatcctaaagcattttgcaatgaaatgttcttacccctctttgagaccttccatataaagaacaacaacggttaattagaacac

SEQ ID NO: 74993 - DNA, 755 bp, Arabidopsis thaliana landsberg
tactcaatatatcttttcgcatgaatggtacttataaacacgcataatacaatcaaaatcgtcacaaacgtaacttcttttgtttttatcataatttagattttggattagttatatttggtggaaagattggaaaatctgtttttttatatatagtgcaaaaggataagttatagtttcactatctttaaaacatatctttgtttggttccagtttagatatttttattaaatatatttaaaaaaaaactgaattggtgttacagttttagtttcagttttttttcttcaatatatacattaattaattttgaaacatttgaaaatattgagattttaacatatcattttttgttggtttaatttcaatcagtttttgttttgtcaaaaaacaatatcggtctcctaatgctagtattacatctcaaaattttgatatgtttaaaaattgcaaaattatttttaatattataaagtgctattttataattatttctaaactttaacatataaaaattgatagatcggatttgaatatctccgatatcatgatattttgacggaaatccatgtttggatatagaaaatttacaaatttaggtacacttatcgtaatatttaatgatagtgatttaatttgtgtgtattttcacctcaaaattttatcttagagactacgcgagaaaaaatgcaaatccacaattaatcttatgtagtattttaggatcgatcctaataagttatatatactaata

SEQ ID NO: 74994 - DNA, 547 bp, Arabidopsis thaliana landsberg
gcgctcggggtcgaccccgacacggtcaacttttacggcggttcgctggcgctcggccatccggatggcgcgtggggcgcgatcctcgtcacgcggcttttcgcgcagatgcgggaggctccggcgggcacggaagggcttgcgctgatgggcatcggcggcggcatggggatcgccgcgctcttccggcgcgtgtgaggcgtcaagaaaggaaggccctcagccagtcgcgcacctgctgcggcacgttgacgggctggcgcgttgcgggatcgacggcgacccatacgatcttcaggtccgcgaccggcgcaccttccgaggtgatcgcgacggcgaaggtgagcgaggtcgcaccgatgcacgtgacggtgaccttgaagcgggcgatatcgtccagccgcaggccgcggtggaaggtgcagccggattttcggacgaaatagacggtgtcgttttccccttgcgggcggtgccgccagaggcccgccaccgcagtctcgcatgggcgtaatatgcggattgtgcatatggtctgcatgttata

SEQ ID NO: 74995 - DNA, 242 bp, Arabidopsis thaliana landsberg
  unsure (1)..(242): unsure at all n locations
aaacgccacaaacgggcacacaggagcgcgcagcacaaccaacgacacagccagaaaaaagaccgaacaaagaaagacacacccnaaagccgccagaacagagggaacggaggaacccacagggcaacgcacaagacggcgaaaaaaaaacaaaacacaaaacaaccgacggagagaaggccgagaggaagagggcaccgggccngaaaaccgcgaaagagcagaaaacaaacgagcgaggg

SEQ ID NO: 74996 - DNA, 127 bp, Arabidopsis thaliana landsberg
tttcaaaattccgctttagggttttagaaccgataggggaatgggggggacggggcgacaatgggactgctatccataccttgggccccgaacaaaactgggggcctgcacaacaccgtttcgctga

SEQ ID NO: 74997 - DNA, 532 bp, Arabidopsis thaliana landsberg
  unsure (1)..(532): unsure at all n locations
acatcccaacgagcagcggttcgccgagcagtggcagccggctccgctcgacggggaccccggcaacgcgttccggctgcagtgggagctgttcgtccggcacgtcatggaagacgcccccttcccccacgacctgtactcgggggcgcgcggcgtccgcgtggccgagctgggcctgcggtcctccgccgaggggcgacgaatggagatcccgtccttatgcagatcaccctgcccgtcgccgacggcgccatccagccctacacgctcagcgcgccgaccccgtgggtcccgcccgagacgggcncgaagtcgcgtatcgcctacgcggccgcccacgtggtcgccgacccgatggccgacccggccgcgcccaccgcgtgcctggactgggacgcgacgctgcggctgcgcaggcacctgtggacctacgggctgcgagtcgccgaggcgatggacacggcgcacgcaacgtgggcctggactggcccgccgcccggagctgaccggcgcacggtcgacgccgcgcacg

SEQ ID NO: 74998 - DNA, 471 bp, Arabidopsis thaliana landsberg
gggggagggtttgagctggttgtatattaattagctttttcttcttcatatacgctcctttataggtatagggaaggaattgttttatgtatacttgaaaaaacccccctattacagggacccgattttccagcgacatggaaatcccattcctttgaggagacccgcgatgacagccgaaccctccattatagtaaggaagcttaagccacaggacttgtttctgatatttgcatcatatggtctctgggaacatcttagtgatgaaacatccgtagaaatcgtcctcaaacacccaagaactgtaagttctccctaaactcaactttgctctgtatcttgacatttatgttatcttactaacctctttcatttattaactctctgtgttctacagggtattgcacgaagacttgtaagaactgctctggaagataccggcaagaatagaaaaatgatatatggagattt

SEQ ID NO: 74999 - DNA, 609 bp, Arabidopsis thaliana landsberg
tgatttaatttattgaataacacgaatgcaagattcacaaaaacacaaattcgaataggaatcaaacggttcttggttttttattctgtttctatagttgatgcacttagaagttcataaaaactgaaaattttgaactgaaaacggagtacccttattgcaatgttaattcaaatgcagaacaatctcatcaagtccaggtgattgagaatttgacaaaaacaaaaggaccatttcccaagtatttttgtacttagtgccattagaatttgtttactctccctcaaaagctataagaaaacagaaccatcaccaaaaacattatcaaagatactcctaaccacactttattagcatcaaaccaaagtaataagaagagacttaaagaagtttaatccgtaacataaccaggcagaggcacccaaatctacaagaagatcttgagattcgtattttctaataattccaacacataaacttcacttataataatttatgaaaaaatagtggtgcatattgagaaaccgatatgctagactagaactaacctactgtatttatgtagccatgataaaaagttattctaataatcattattcgcttttagtg

SEQ ID NO: 75000 - DNA, 534 bp, Arabidopsis thaliana landsberg
gaaaactctctctatccaccaactcagttttgattatataattattgtgaaacatactcccgtcatagtagactaatagtaacatgagtacggactcttgagttgtttgtgtatttaaaatcctttggttgttggaaaagaatagcatatgttcatctcttaattaatcgtaagtacgaataacgaaatattaaaaaaaaaaaatggatacgattataaaaactcaactagggtgaaaacaaatcataaagtttatatagttcatgtcagtacattttcttaaataaactctcaatatatgatttaggaaaaagaaaattgatgatattgaactcctagatggagaatattgttaaagactttcgattccagatacgctttaaaatcttatactagtaaatattggtaacaaaacaattataatcattaggaacatagattacattgcataacttggtcattgcatgataaaaacaattgctggtaaatcaaagggtaaaactttcgacaggtacacattaaaaaataagctaa

SEQ ID NO: 75001 - DNA, 659 bp, Arabidopsis thaliana landsberg
tgctagctacttattaaatgtgtgcatgcatgtatatgtgtatttgatgtaatttaagtcgtactactatatattctacttagaactaactacatcatttatcacgtggaatctatatataacatgacacattttactaatagtataattatgaatattttgatatagaggaagttagggagttggtaaaagatattttcttcttttcttattttctaaataaagagaagagaaatagaaaaacaagtcacgccatccaaggctctcttttgcctccgtatcatcacctaaacctatctaaagacttgttcagactactctcagctttttattttgttttttccagtttcagttttttgctcagaattttaaaaactttattggagtttgttaaggaaagctcacgtcatgaagatttgagagagagaggggggcttacgtggcttggcttcctcgttcctatacttgacaccttgcagaacaattgcttcttttagctctccaaaatcgaaactggacgatccatcttggttactgtttcattctattaatagtattgtttaattaagtcaaagagaatatttatcatgtgttactacaactatacaatcagaaaccaagaaaaaatgggagacccaaaggaacaacaattaaattta

SEQ ID NO: 75002 - DNA, 474 bp, Arabidopsis thaliana landsberg
ggctgaatagaataacatggcccggacaaaattctcaccgtgttagttactgtggcccgcagattggttccaagttgctcggccgcgatggtgataaagatagcccagtagcctacagtaacccccaaagcaaagcatatccagtaaaaggctgtaggcgtcgcgttgtacaaattgaaatatcctataatgacagctgcggtgaggaataaaaagagtacaactgtcttcttccggctttttcaaagctgactgatcacttcgctaagcaagtctccaaccaccagcccaccgtaacttaccatcacagaaattgctggatttaccttcccatgtacacccatctgctgtgcaaaatcattggagaaaaacaccatgatgcctctcacataccaggtcggaagcccaattaaaatgcattttaggtattttaccaacctttgcttactgggtaacatggataagaaatttcct

SEQ ID NO: 75003 - DNA, 154 bp, Arabidopsis thaliana landsberg
aaggcgggaggaacagacaagagggaccagaaaacaaaccaggacaaaaggaagggcagaagaacacaacacaggggacggcaggaaaaagaaaagaagggaagtagggacagaaaaaaaaaaggaccctaagacaaaaaaaaaaactaaaaca

SEQ ID NO: 75004 - DNA, 299 bp, Arabidopsis thaliana landsberg
tccttaaaacaaagcaaaaaaaacatgacagtgactttctgttcataccagaaaaaacacacaaactaatgacaagtggttggtattgtctcaaccattattcaagaggccatatttttgacactttttcttggtacaagagttgtgaatcagtagaaagggaacatcctcagcttagtcttcaaatcagcttttggagttgctgccttctggaacttaactaggagagccttatcgctggtcaaggctaagcgtcgtgcaccagagatatcggtgaatatgccaacgttcatgcacgt

SEQ ID NO: 75005 - DNA, 464 bp, Arabidopsis thaliana landsberg
  unsure (1)..(464): unsure at all n locations
cctgtttcaaaataatagacaattagaatatgttatagcatanattagagttatggaaaaaaatttatgagtgaaatttatggataaatgaacaaaacaaacatttaaaacaaaccccccccccccaggcccngggaaaaagaggatacatttaaagccaccattatttatgtaacttatgttttttagattggtgcatggaccgaaataataatccgacaacgccgtacgtaatttaacatttggcgaccatgcatgatgatggggctggtcaactagtcaccgtaattggggcttcagaacgaaccagacatagtcggaagttgagaaaatactattccaataaatccggcataaaacccggggtgacccatttagtttccgggcggaacacactggcttttgatgacttggcattatcaagctctctgattcgttgattgcttagttgagtttcggtaacc

SEQ ID NO: 75006 - DNA, 1169 bp, Arabidopsis thaliana landsberg
caccatcttcaaaaccgccatattcatcacaaagctccttaaaacatgaactgatcactgaatggaacttactggttttagccaaggctgaaacaagggtcttatgaagaggcaaagaattctccatgaagagaatctccaagtaaaacctaatagcttcccttatctcgcctcctgcattctcattggtcttggcgacaaactctccgaacgaagcaacaactttcttggcgtgattaacttgcgcgtagattgaattcaacgaaaccaattcttcaatgttggagtaaaacttgggacaagactgagacaaactagattggctcaaagaagcagtgaacgagctggggaacagaacagcactgtaagtataacgatggcgatgctgcagagctcgccacttcgcagacatgtttcagtgagctgaggaaaaacagagaaacaataaaaatttgaacttttatttttttcacttgaataaaaaatagaaaatatggtaaaacagagtaaagatcataccgggaaaagcggctaagtgtacgagagagcttattaggaggccggaccaataccagtgagtaacctaagaggcgacgcggcggaggcggaagaaagcacccgccttcaaatctttcaactggagaagatatgggcctcacttgtgtttttaatgggcctgacttttagacaaatgagaaaacattttggttgtctaggacgactgcttagttgtggacctgtggtaataatgaggccaatatttcagttgattgagtgtaaatttcagttgcaactggttgcatagctcatcaacacattacactttccattagtcaaatatctccaagacagttcgaagatggtaatgttctgtctcagattgcttataaaacaattagctagcttcttagattgtcccaaagagaataataaacaggtgctgatgttaagtggctattgttcgcagaatcttacgttttttgcagattttattgccaagagaccaaatagatagttctcgaaagtcaaatagggttaatctcaaatttgtaacaaagaacgtgcgtgggtagatcatacaatgatgtttgaagaatcaaatctctaattgaaagaaaattcagatatattagaaaagacggtagaaagataattaaactttgatggca

SEQ ID NO: 75007 - DNA, 549 bp, Arabidopsis thaliana landsberg
  unsure (1)..(549): unsure at all n locations
attggaacgcagctaatgtaaacagacccataactacgagattaccgattcatttaccctacggannnnnnnnnnnnnnnnnnnnnnnnntttgcaacgcctttcagatcgacaaaatggcccaatgacaaaggggaccgccaatttctttcctggtcttcaatttaaaattcgagttttgccgtcggaagatcgactgggcatagatgttgaaaacgtgtactaaggagttgatttatggagtctgtggcaagggcagtaagggatgaaacacttgtaatatgtcaatggaattgctttttagcaaaagaccacctcgttgattatatggatggtcatacgctaagccttacatatccatgagaggctattcgttcaggggccttgagctaacgcaattgactctgtccgaggcacttgagagctgttctttcgacgtatttcgtcgaaaactaaacatttactcgcacatgggcgtctgatgttgcagcgcgctgntgccttggtggaggccagatgaaagttcacgtagttaccgactgtaaatgg

SEQ ID NO: 75008 - DNA, 465 bp, Arabidopsis thaliana landsberg
gtccacatcaatcggatataatggatctccctcacccatccttttacagtttcacgctactgacctcacctgcttggagcattgggcaaaaccaaaacaggcacctacctaaaacatgggccgatcgtcatctattatatatgctcatgcattcccaaagaattctactccctcttcatctgaaaaattctcaacataagtatcatctcctcactttactgattctcacatgatacacaagatcactcttctaaataacatgaatcaatatattcacacacccatggaggaaacatggaagataatgcatcaatgcatgcatagattacatacactggctattgtgctcgaaaaggggtatcactcctgaaacaaacatctatctacacttgacatacatcaaaaactgagatctcgcatcgtgtgtcctacatagacagcaacgatggaggtgatcctagacaa

SEQ ID NO: 75009 - DNA, 589 bp, Arabidopsis thaliana landsberg
cggctgaaatcattttcaaaagacatttttttttttgtcgaataattttaaaataccaattactgtaatttagtctcaagagtgatagattatccaaggaaactagttttttttttaagtagtaaagggttatttaaaaaaggttatagatcattctcgcttttttagcaaatatatatgtatatttttttgcgctataactttcttataaaagaaaacatactagtcttttctctaagagagctaaaataattgtaatagccattgttgttagggtttttggcaaggaaaaaactatccaaattataaaaatatcattgtctgcatgtttataaaggatggtagtcttttctcttagagagataaaatataactgtaattaccttcaagttgcaaataataaaaatcaactccacgaaatctaatttaacctgcaatataatcatcggtcaccactttcaattttccaaaattgtaataaatattatatcaaatcaaaacttttacaataaaaagcctatttttcgaatttaagaatactaatatatgtgactgtactaaactcatttaagatgcacgttatggtatg

SEQ ID NO: 75010 - DNA, 498 bp, Arabidopsis thaliana landsberg
  unsure (1)..(498): unsure at all n locations
acctgtgggtcggcgcttggctgccgtcatgtctcatcgccttcccgatcgtcctcgtcgtcgcgccggtcgcgcggcgggtcgtcggcagcatggtgcgagcctgatgccatgacgaccccgcacacccagccggtagacggcgcaagagcgaaccacagggcggcgggcctcgcgctcgccgccctgtcgctctccatgttgctgtcctcgctcggcaccagcatcgccaacgtcgccttgccgaccttggccgaggccttcgccgcttcgttccaggcgatccaatgggtcgttctcgcctatttgctcgccatcaccacgctgatcgtcagcgtcgggcggctcggcgacatgatcggccgccgccgccttctgctcggcgggctcctcctgttcaccgcggcgtcgctcgcctgcggactggcgccgaatttgccgctcatgatcgtcgcgcgcgccgcgcanggtctcggcgcagccgtcatgctggcgctg

SEQ ID NO: 75011 - DNA, 562 bp, Arabidopsis thaliana landsberg
ggcaaaatcctcgttcaggcgctgtgaaaaattactgcggatttcgcgtgtagtcatcttccggagcggcacatgatcgggtgtgatgttcgggcacaggtccgtccgggcctagatacgggtatgcggcacttgggtgccactcaaggacgcctatagtcgtgagcaagatgtgggaagtcaatcatcctgttaccgcgttgttacggtaaagatgttactggcgttaccgaggctgtgtctggtcggctgcgccttttacaggcgctccaggccgacgaatgggcaggcttgcagcagttgggcgagggtgcggccgtcggccagcacgaagtcgctggctaccagctcggccaaggggtagagcacgaacgggcgagcgtgcatatggtaatgcgggaccttcagacgcggcaggtcgagcacctgctcgccgaacagcaggatgtccaggtcgagcgtgcgcgggccccagcgctcggcgcgcacgcggccctggtcgttttcgatggcctgcagcgcatcgagcagggccaagggctcgagcgaggtgtccagcgcg

SEQ ID NO: 75012 - DNA, 548 bp, Arabidopsis thaliana landsberg
  unsure (1)..(548): unsure at all n locations
cgttgagtgtgtatgtgtcataacataagtggatttgttgtccataagcaataagctatgatgactaagtttttcacgatagttttgctatagaactcgtgacttttaattcttaaatatatatttattaatagtatgacatttttcggttggtgcgttttttttttttaaatgccataaactgataaaagtgccacaaaggacataattatgttgatcggatggaccatatatgtacccaattacaagtgtaatcaagcacctttttgtgatgaagattcaattattatgctgaagaatttgttgtatagtttatacactcttcttcgaacaaccaaactctccgctttcaagtttctgccgacgtaaaataaattgtttagcgtgttatgccaaaactcaggccacttttatgaaatatatgacagaaaacatatataataattaagtcaggtgtgcgtatccactagaaacaatttcacacctnccgacttcgatatgacgaaaccactagactatattcactactttttgcacctctgttaatc

SEQ ID NO: 75013 - DNA, 575 bp, Arabidopsis thaliana landsberg
gcaactacgtgccgcatggcatagtttttttttttttatatagtaaaaagttaatggttccattaatccattaagatttaaattgcaacttgtgaagataaaatcataaaatataaaatatatattaaaataatctttgcatataatattagtcatggatcatgttatgtcaaagacagagctggaatcccactcgaagtcacatgcatatgaatctttctcacttttatatccttactttcttaataaatttgtaccaacccatcacatatatataaaattggacatataagttgacaaaaatcatgatttttaatctcactcaattggttagaggagagttttgttcgggaagtaaaagagagtggttatgcttttttgaaccatttacatatattgtaaactgtgatcaatccacatacatctaacaatgttacggccgaatgcaaagaactttatgatttttattaaattaaagcaacaacaaattttcgcactatacaccaatgctctacaaacccaaagaaaacaaaatgctccattaatttaaattgaaatgagtagcaataacataa

SEQ ID NO: 75014 - DNA, 545 bp, Arabidopsis thaliana landsberg
  unsure (1)..(545): unsure at all n locations
ggaaagtgaanaangcgagacagcctaattctatcaaatctatagttggtaagaagaaggccatgaaagctgggcgctgcttgatcactgaggaggaggagaagaagatggaactgtgtgtgaatatgaagaataaggttttttgttgtctctgtaaatggatgatgactttgttttggtttggtgtggtctcttttgggtgtaagagtaaagagtcttcggatgtataaccagtactaccatgtaatatactctaaatagatagatttttacttgggttgatatctaatatatgttcaaagaatcgaagaaacgaaggctaaacaaattcgagttattatttctagttgggggttgcttaactaaatgctaattatgtattttatctaaggccgtgaattgaaaagaaaaaacgcctcatacttatgtatgactaagatggggcctaaagacttttgaaacgcccaagtttgtgattcacggagcccatcagatgtttaacaaacatattggtcatatgtatcgttagacaaacattcaactct

SEQ ID NO: 75015 - DNA, 564 bp, Arabidopsis thaliana landsberg
ccccacatccggcacaaggtccccagctctcgacctttgcgcctctttgttttgtctgcgccgtgccttgctgcataccggggtacactgcgctactcccgccctgagcttcgctgagctttcgcgaaacagaaaaagaaaaaaaaaaagtctccaccacggtcgagtcgagtcgcgctgcttccaaccatcgccgattgcctctctgcatccagactcgcagaaacgcgcacgtcgccagacaaaagtcggtcgccgctcgtgtttcctgactgccgccgtgtgccatcatcgccattgcagtcgcacacgcgtcgcgcccctcgcccatctgctttactgcatccaaggtgcaaagaataaggtaacaatagcccaaaagaagaaatctttgtcccatttcctttctctgtctcccgttcagtcctgtggccctctcaagatcaagaatcgcaacccaagatgcgtcgtgcgcggttcctcgctgcgcagccatggccagctactcatccatggccacgtcgccctgcctcgagatgttgatctgcgctctggcgtggcagc

SEQ ID NO: 75016 - DNA, 567 bp, Arabidopsis thaliana landsberg
aactcaagcattttggtttcttcatcatcacactttaaactttgatttcggttatgattactttgtgtttccatgattgatacgtgtagttactatttttacaaggtctacctcaaattagctagcattgcatcccatgttcttttgtacgtccaatatgtggctagtataatatactaatatggtcatcaggtcatgtataagtataactatgatatatactatacattgattaatttgaggctaaggagaaattaaggtatgtgttttagaatccattctattaattttagaatcttaaatacatagatgggattcacgaacataccaacacacttcgtcagctcaaaaacaaaacaaccacatgccgcatcgcacaaaccaacaacgaggctttttttttttattggcgtctacttctcatatgttttttttcgtctttttacaatgaagtaaacaccaaatccctgaatgcatgtgatcttcaagttttgatcaattgggtttctaatttatgcaaattttcctttttgaattagacttctctcttctttttttttttttttt

SEQ ID NO: 75017 - DNA, 430 bp, Arabidopsis thaliana landsberg
atttttattctttattcactttccatacttgttgtctttcggagatgttggtgattgacattcattttgactttaccgcgattactaaaaagcatatttgcattcacagaagatattttaattggtgcctaaaagagctcgcctaatgggctttcacataccatacatcgtcaggcggtggggtcccctagttgaatgaattattatacttggaatgtgcattgaactaaaagagtcatatggggtcctatacataagctatattgttcgggtgggctcggtgtgaacatgaggatagggctctccacatttacgtatgtaaggttttgaattcctacatataggttgatttgtctttttatgagagaaggggagctcattttatgtttgatatgaagcatacctattttttttgaagtggtttcttacc

SEQ ID NO: 75018 - DNA, 337 bp, Arabidopsis thaliana landsberg
tgctcatctgctataagattcaatctttccttgttgggtttgtttttcagcgttcatttctatgttattatgtagataagatgggacactcttgattgtgatttgtagcatgttccatattctgtagagattaagatcattaatcgactagatatagactcacttacctctgctatgctttcacagagtgctgtgttgaatacacacgtgtctattctacagcggccactaacactcgcgagggtgattctcatacgttggagtttcaaagcacctgtccaggggagcttagtcggatccataactgaggcacatcccagatgagggagcttcctta

SEQ ID NO: 75019 - DNA, 560 bp, Arabidopsis thaliana landsberg
ggtgagtttatatggatcctcaaataaaattcatcaagcatgagcatcttaaattagtactcaatacaaatcccaattaagagagagaagcaatcgctagggtttgggaattagggcaaattacaaaagattgaaaattcagaacataccacgagacgcatgttacgaaatctctcttgggcggtgctaatagagaaagctcgatctttacgagaagagatttctcttcgttgaagctttttaacactgttgacgaatccatcgggtcgagaccttttcttagccacaattcttcttccactacaaggtctagggcttgccgtaatccttcttccttccatctaattcttccttcttcaagcccaaatatttccaagtaggttttgaatttttgtggaaaccctaaaggatgaagaaaccctaagaggaaaaagatgaagcgagagagttgggtaatctctaggaggaagacgagaagtgacggctactacatgggagtgtgacgtaagacttttttgcagattcagattggaattaagctgatttcaatgattcagagc

SEQ ID NO: 75020 - DNA, 568 bp, Arabidopsis thaliana landsberg
  unsure (1)..(568): unsure at all n locations
agaaagaaacgtcaaaaacaatttatgtggttgtcaattatttataattaagagtcgaaaatgacacgaaaaagaacaacaagaataaggtgttgagatgaaaaaactggagacatttcgacgtgagaaatctataaagcgaaagggaacagagaaatgacaatttttttgtttcaaggacaaagaagcagaaattgactaattagcttttaaagaaaaaaatacattttgggggaaaatatggaaaaaagtatttctaaattttactttggttacgcagttttccctacctatgcgggtggtaatttaatgcacatccgtgacctcaccggcaaatattaaagaccaaaaaattgtgaaggtcttctaattgtagtagattcatacatttttatatcgttttgatggtgatgttaatcaaacttagtgctcagataaaatgtttaaattaatatcatgccgtaatcttagttcttttttgtttttgtatgaattttaatatccgagtcataaaaaagccaagaattaacgnctggttggtatgatatatnngtaatattctaacttg

SEQ ID NO: 75021 - DNA, 373 bp, Arabidopsis thaliana landsberg
acccagagtggatgcatacaacttttcatttgtatctctggtaaagtttctcctctctttctttacaaagtctcctacaaaacaggatttggaacatagtgtagtattagtagtcataggcatttattccatctcaagaactgattgttatactctgttggatttgtctttcctaagctctatctaacacaattttttgggcagttcttcttaatactctcgtgcagtatcgcggttgggaccaatctcagccaattcatctgtattggaagattcacggcggtgtctttccaagtacttggtcacatgaagacaattctgggttttgggttttgggattcactttctttcgggaaggaaaggattaaaccta

SEQ ID NO: 75022 - DNA, 579 bp, Arabidopsis thaliana landsberg
aaaactaatcatcttacagggatgactgttaccgctcaacatttactttgtctatggctgcaaattttatgaaaagcttttgccacacaggctaaaaagcgcagccgtagcggatttgcatatttcgcactttacatttcaggcaattattttaaatttgtatcaccttattattcaacaaaacccatcagcttggacacggtaactactgctaagaatgacccatatgcctctctacgcatccgggaatttaacttttacctcattatccgttttgccgttgtattcgcccttaccatgcagttcacgatcattgaatggaaggtgtatgccctttcccatgatccgtttacgctggggctcataggcctggcagaagtgatacctgccctggtgctggcgccctttgccgggcacctggtagataagcgggaaaaaagaggcatgctgctggcctgcatggctgcctacattgttattggcacagcgctgttcctgcttacgtgggaccgcgcggtacagggccttaaaacccagtgggtgctgaacctcatatacctgatggtgttttttggcgga

SEQ ID NO: 75023 - DNA, 606 bp, Arabidopsis thaliana landsberg
actccgaaaccgttatcgaaattccgatcatgctgctatcccttctcttttttctcttttgtataataaggccagttggggttggggggcatgtgcagcgatatacaccaataacaacgacgctacaagacctgtgattaccggatattttttaagactcattaatgttccaataggattcgcgcgcttccactcgaattttcttctgtggtccggtgataaagattccggaagaataaataatgcatagagccagttcagcaatgttaacgcggcagctaccataaaaggtacgctacttcccatgtgaccaacaagtccgccaatgagcggaccaataatgaatcccaatgcaaatgctgcgcccatgatcccgaagttttgtgcgcgcttctccggtgtgctgatattagcaatatatgcacctgccgttgtaaagcttgcgcccatcataccggctatcactcgtccgaggaaaagccatccgagtgttggtgagaatgccatcaaaatataattctaattcgaaaccaaaaagggacgcgagcagtacgggtccttttccataacggtcgctcaatccttccactacaggagcacagagaa

SEQ ID NO: 75024 - DNA, 289 bp, Arabidopsis thaliana landsberg
ttgaaatacaacagattttaaatgtttggaaacgactataactaaatatcatgtcgaggcacataggcttgagaaagatatcaaatcagaaaatattagcggcctcacaggatacctcctaaaaaacaaggaaagggtgagatggacagcgctccatacaacccgttcttacaaaaggggttaaaaaaaacaaaagtcactccacaccccaaacgatgtcgtgctctagacagctttacaaacgcttcaccctcaatataccaaaattccacgaccaatatcacgaacc

SEQ ID NO: 75025 - DNA, 478 bp, Arabidopsis thaliana landsberg
ataaactccagatattctcttccactcatccgacgactcttttgctatgtctgagagatatcaataggtttcgcttattaatacacaaacataccacatttgtttttcttcggattttgttttttttttcttgtcattttatgttcttcaatgaatttggataataagtacactttatggctctaaatggtaatcatacgaccaaagaaaaaaaagaactctaatagatcaatagaaccattgatgcatcatttgacatcaatttagaaattcatgtgtgtttattctttttgatttttttttttcatgtcagctggttgttattttagataatcttaggaagcattaataatttaagttgtaggaaatattacttcgaattacaaagttttttttttgtgctttagtgaggtgacaaatatgaaagcttacaaaaatgcggtcgggtcgccaacttaacggccaaattaataaagtc

SEQ ID NO: 75026 - DNA, 474 bp, Arabidopsis thaliana landsberg
cggccccatgtcgccgaatgttttttatccaaggtctaatgtaatttataatttctttggccttcgccgctgactttaaggggcttcggccccaggtaaacttggtaagtgcggtcggtcgccgtgagttcgacgacacccaacgcgccgacggaatgataggcgtaactgcggttcatcgcgaaggcgacgagaatattggcgagcgccaaagactcaggaacaatatcattcaacgtcgttttaatttttagttcgctcgccaaacgcgagagcatggggccgtgcatgccattttcatttccacggcccatctcgtcccaatagttgcgggccatctctaattttggccgcgtcggcatttttacttgagtcaacgctgtaagatcttcaaagccggcttcaccagcgacttcctgtttgagaaaccaaatcatctcgggaagcgtggcgtgttgggccagccagggaaag

SEQ ID NO: 75027 - DNA, 399 bp, Arabidopsis thaliana landsberg
  unsure (1)..(399): unsure at all n locations
taccgcctggncgcgcctcggntgttgggcctcgccagtgtcggaaactctatcctttgtatactggccatactgtcacgatcgaagacagggagcctggcggcactttctcagaaggtagctttttcagtcgcgtcancgggtcaagcatggttgcggccccttcggctttcctttttccttgttgcgttcttcgcgcatcttatccgaaatcgagcgacagggccaatgcgcggacgggcccatcccggcaacccgcggaaaccgagacaccccacttggcggcggacgtttgccgagtctatgctttcagtaacgatgcgccacacaaaagggcccggtgaaaatgcagggagcgacgatggttcaagccggaaactattcgaccgatttcaagtc

SEQ ID NO: 75028 - DNA, 308 bp, Arabidopsis thaliana landsberg
gctccgtcaaagaatcgtctttttgggttctcaggtttcttctcaaaaatttcccctttctcttcaaatcctgtgttatgttagaattggttcttcatagataatcaaactggtgatatcacaatgaaattaaatttgctttagtcttgtgtaatcaaagcatctatagagattgatcttgtaaaaccatgaacttgtttcattgaagttcttgattctgaaagaactgttttttggttgattagaatgatttatgcatggaggatttgatgtagtttaagctgttttattgtttgatgagagtcaga

SEQ ID NO: 75029 - DNA, 562 bp, Arabidopsis thaliana landsberg
  unsure (1)..(562): unsure at all n locations
accagccgctgcttgtgatcgacggcgtgccagtggccaacaagctggacaacagcttcgccggtgccgacatgggtaacgcgatttnnnnnnnnnnnnnnnnnnntatcgccaatgtttcggtgctgaaagggcccagcgcagctgcattgtacggttccagggccggtaacggggttattttgattactacaaaatcgggtagaggcggcaaaaaggggcttggagtttcactcaatacggctatggtgctggaagtgccgctgcgttatgtgccggtgcagaacaagtttggttcggnnnnnnnnnnnnnnnnnnnnnnggaagagcaggagaatgagagctgggggccgcgcctggacgcgggcgaacaatgggtgcagtggaacagtaatggccagaaggtcccgctggtctcgcatcccaaccgtttcaaggattttttccagacagggactaccaataccaataatgtgtcggtaaacggcaattatgataagggcaacttccgactgtcggtaggtaatatgaaaaacacgggcatcgtgcctaatacagacct

SEQ ID NO: 75030 - DNA, 539 bp, Arabidopsis thaliana landsberg
  unsure (1)..(539): unsure at all n locations
atcaagttatccgtctgttactgaaagatttgtaggtatcatttacggcttcagccctggtgagactgcaccatgattaacagagtcgagttgtgaaagaggcacagttttaatgctagttcttgccttcgccttggggctcggcctgggagaaagaatattatggnnnnnnnnnnnnnnnnnnnnnnnnnnnnnnnnnnnnnnnnnnnnttttccttctcggagtataacaggcgaatttggagtcagtaattcaggtctgtacaaaaacttcataacaactcgagctctctcacccgacctcagaactcctgcggaactatctacttctactcctgcatctaatgagctgttcactgcgcctcttggtggttcaatggataacactctggcggcctgacgagtaacaccactgtggataacagcctgatatcccttagagatcgtagtagcatgatgcaagactgaaacttccaccgaaaatgtccaagacgcatacggagcagtccccttggaatcaagaggcgcgacaacatact

SEQ ID NO: 75031 - DNA, 531 bp, Arabidopsis thaliana landsberg
cgttgcccaggaccgcgtcgtcgtagtcgacgttatcaccgttgttttgccagacgggatggatcaggcgggttggataccgccagtccctgctgaacaggctgcgtgagcggtcgtggcctggaaagtccacattggccatgtcgaccagcgacgaaaaggtgttgttgtcggtcgcgcgccggctggcgttggctcggatcgtggcggccttgtcagggaatgccttcgcataggcatcggagtaccagaacaaggcgggaatggggaattcgtaacgattgcccatggcatgaccgtgcttgtggcaggtggccgtcggcaaggtttccccatgatcggattcgtaccaaagggctgccaccgtacctgatcgtttcagagcatggatgatgctggccagaacatggtcggtgtagacgatagaattgtcgtaactgttgatggtttgcttgtagcttgtgtcgaacgcgttgccatcgtgccggcaggagtgaatcgtttgaggcgggtggatgcgactatcgtatc

SEQ ID NO: 75032 - DNA, 598 bp, Arabidopsis thaliana landsberg
  unsure (1)..(598): unsure at all n locations
aatcgtgctgtgcacgaacactatattaaccaagcaattgcannnnnnnnnnnnnnnnnnnnnnnnnnnnnnnnnnnnnnnnnnnnnnnnnnnnnnnnnnnnnnnnnnnnnnntgaagtcttatgtttagaaattgttaaattcacgtaaacatttgacctaaaactatcataacagatttaaataagcatccaaaattgtatatcagttagaaatcgaacaagtgaagtgggtaatttnnnnnnnnnnnnnnnnnnnnnnnnnnnnnnnnnnnnnnnnnnnnnnnnnnnnnnnnnnnaaaattggttcttcgataggaagagatatgcacatgagaaaactaaatgattctttagtaaaccgctcttacaaaccgtattttcagatgaacacaagagacaaatataaaaacgtatcatgatgatactttcagatgctgatcgtaatgacgtcatctcatcgacgtcgtcatgtagaatatccgagagagagttttacacgacgacttaagaaagatctttggtcggttttcttaataggtcttatgatcagacttattactccacataggatcaataaactaaaaacacttcctgaa

SEQ ID NO: 75033 - DNA, 520 bp, Arabidopsis thaliana landsberg
aaacccatgagcatgaaagagagcatgcatgacattggcgagcgaccatagctgcagatcttttgagagatgctactaatattggtagccaaagatagtcattcactttttataaagctcatgtattggcctttctttggtgttgatggagacacttttcccgtgtgtgagctgatagattcatttttgaaccctctacactttctcttattattagttatgaaccagttattggcgtgaaacgacatatgacatgcttccgggctaatctcatcgacataatcagaaactggaaagttggccatgggaaaatgattcaagacatacaactgcagaactgacactgatgtgaacatgacacttaaccataacgtggaaattatggtctactcatatcggcggtggaatacttataccttgacctatgaagtatgggtttatgtgcattctattgcaaacgcccaatactattagacatgaacgagtgatactagctatatcatctatgacacagctaaac

SEQ ID NO: 75034 - DNA, 303 bp, Arabidopsis thaliana landsberg
gcttcacacacatacaatgaacatcgaaagtgaacatgaatcttaccaagattgcagaaaacattattttttaataaaattaaacccactgcaatcacaatcaaagctgagtcatatcagagtggtaggaaccgatattacggccacatatacctgtcttgaaaaaggtcgcgcttcaagacatcaatgtactatagttgggtgaacttaggctcgtgatttatccctaccaatcacttatataatgatgataataccgtgtaaattaaccttagatatttccataccatatcaaatctatgt

SEQ ID NO: 75035 - DNA, 457 bp, Arabidopsis thaliana landsberg
  unsure (1)..(457): unsure at all n locations
accgacagtacggcctgctgctgggcgacggcctggccttgcttgaccagcaacgtcgacaccacgcctttggacggcgcacgcaacatggcgccttgctgcaacgcgttgcgtgccgattggtggcggatttgcgacagcgactgctgcacctggtcctggcggtcagccaggtcgagcggcaactgggccagttgctgtcgcaccttnnnnnnnnnnnnnnnnnnnnnnnnnnnnnnnntcaacaacgtacggatctggcgttgggaagtgattatgttggcaccttcctgcttcagctgcagtgccaaaacgtagcccttgcggcgcaatggccacatgctgaccagcacgccgttgatgctttccacctgctggttttccagagctatctggccgactnnnnnnnnnnnnnnnnnnnnnnnnnnnnnnnnnttggtgcgccattggactgcct

SEQ ID NO: 75036 - DNA, 582 bp, Arabidopsis thaliana landsberg
aaaacaatactaataatacaaacttcgtccttgtaatgactgccgcgtggcatttactcatagtcctcgtaaatcccacttgtgccttatgagacctctggctctcatcacacaactcaaaaattcaaaatacgtaaacaactgtcatgttgaatcacgatgtttaagttttacttaccaacactacacgatttaccttttattttctaaccgtacgagctaaacgcacataaatattctttagtttgtctcgggcaacgtatattatattttgttccacaaaaacgataggattctagttagataaaaagtttcatcccaagttaaagtgaccgtatatggacttgacgttaaagcccaatatattgtgacaaaagaaaaacccaacactgataaaaggggcccatatattattgtctgcgagggaaccttactaagtcatatgctacatggggatgatagttgatgatacgaatctggatactatatgttttaaattaaagaattgtgattttacatataatgagcacctgttgtatcaaaaaaatcaatcaacatgtctcactaaaaaaacaaaaaaac

SEQ ID NO: 75037 - DNA, 565 bp, Arabidopsis thaliana landsberg
cttcccttgtactttcaatttgatgttcttggaatcttccttcagagagattagatccttttactcataaagttttaacctttgctctgtttgtatagaaaaatcttataggtctctttgcttttacatcttcaaacttgacttgtgcttgtgatttgattgttgtcttcttcttttgctttcttaattgtgatattattaacaggtaggtttggattctatctcttgtgaaaaaaacagaaacacaaagatgaacgctgagaataatcagactactactactcactcgaaagtgatctcacatgtattctgcactggtactgctaagctaggctctgttgggccacccattggtcttgttgatattggcgtcagcgaagttgcttacatcttccgagtctctcttcctggcattgagaaaaatcaaggtaagccttcacatttcttttctccttatgtcctgttgttggataatgaaaataacaacctgttaataccggaatggattcctcatgttttgggttagataatgaccaatgaccggaaaagaaagctggtttctttt

SEQ ID NO: 75038 - DNA, 605 bp, Arabidopsis thaliana landsberg
  unsure (1)..(605): unsure at all n locations
ccggtcctttgcggtcaggggcaggggcgggtcgagcaggacgttgttcttgttcgagccttggccgttcttttcgaagatgatgccgntccagcccctgagaaagtcgtcgaccttgtagcgcttgtggcccagtaccgggtcaccgatatacacccagcccttgtccaccttctgcatgaccacgaagtgcttgtagccacgcacgtccatcagcaccacgaccgggatacgtacgctgtgcagggtctcggctgccacccggtagccgcgggcacgcatccccaggcttnnnnnnnnnnnnnnnnnnnnnnnnnnnnnnnnnnnnnnnnnnnnnnnnnnnnnnnnnnnnnnntgggccagcatgccttcgatgatttgttgctcgtccacgtccagccagtaggcctggcgcaggatggtggccagcgcggcggcgccgcagctgaagtcggtcttctgttgcaccaggtcggcgaacttgcgctcgcgcaggctctggatgggcttgaacaccacggcgccgtcctgcaggacggacagcngcatttgtgcggcttcgctcacgctgggccagcacagcataaacgccagagcaatgatgc

SEQ ID NO: 75039 - DNA, 603 bp, Arabidopsis thaliana landsberg
  unsure (1)..(603): unsure at all n locations
tacctccaccacagcagcaaagcctcttactcctcattcttgngtatcctgccctgcttttatccaggaaccctctccatttttccctggctcttccacaactctacctttctcttgtggtgacagnggctcctgtaattgatatggttagcacattggttttgttttttacaatttcctcatttattattgtctccatgtcataattgtcttcagttctcaaaatttcagagctacagacatattaaggaatctcaattgaaggtgtgccctcatcagaatggctggttgctatgtctgtgagagatagtgttgatgatattttgggaaggcttttctactgagggaggcaatattcttaagcaagtgggcctgaactggatgagagctagctgagcatgggacagtgatgaagtaagagaacaagccaagaaacagtgtttgtccttatttattttccttcatattctagctccagtttctattctaactttccagaatggtggacagtgatctgaccgtaccatgtacaacaaccatctactacctgagttgcttttacttgaagagtctttcagcagcagagttgcagtttgaacaaca

SEQ ID NO: 75040 - DNA, 591 bp, Arabidopsis thaliana landsberg
aaaatgttactgagattgcctctgcacaagagacttgatgcagtcgtcacgctctgttacgaggtcatggcaaggattcgtgatcctgtctatggctctgttggccatctcttctctcttcaacaccaggttcttcatcaaaacatcttttatcacacaactgattatatatacagagcagctaattaacaagcaagactgtgtataccttaggtgatgaatctacaagcagagcttgctcatgttcaagctcgtctttcaacaattcagcggtttcctctacagtcgccacaacaaatgcagccaccgtcttttgatcctgcgcataacaatgaatatgcgatggaaccgagtaacttggatagtgtgtggggggaagaacatttacttcaagatggaactggagatggggatttccaagaactggcgtcgcagttcgtctcaaggtatttaccggcggtcaaacttccggcttgcacttaggtcaaactacaagtcaagaatttatgtattatagcactggagagtagaagcgagggagggggctctgttcccaatagttgaccattccgcttaagatcatcttaagag

SEQ ID NO: 75041 - DNA, 107 bp, Arabidopsis thaliana landsberg
agggagaaggtgcccaatatatcagcgggtaacttagtggaactgacgtgggactgcaatcgttaaagcttttccatggcaaaaagaaaccctcgaaccttggtgag

SEQ ID NO: 75042 - DNA, 539 bp, Arabidopsis thaliana landsberg
gaccatgcagcccctgtctatcccgacccccgaaggtcccgagaccgtcgttttccatctgcggctctaccaggcgtggctgcgccagatcggcgcccgcatccgcgggcgccacatcgtcctcggcgccgtcgacgccgtgctgatcgcctgcctcgcgctctgcctgttcgccatcggcctcggtctcgaccgcatgtacccggtcgtccgtcccagcctgaaccacgccctgcacgaggacctgccggtccgcccctatcccagctgcgaggccgcccacgaggccggcgtcttcagcatcccgaaggattcccccgcctacgcccccgagcaggacggcatcaacaacggcctggcctgctagccgggctgagcgcggccccgccctcccggtcgaacgagaccttgcgtcccgccgtcgcgccccccatcctgtcgccatgagtcggacccgggcggacgcccttgccctgatcctgccgttcagcgtcgtcatctgcgccacctgcgcgttccatgtgggcgccgcgctggcc

SEQ ID NO: 75043 - DNA, 499 bp, Arabidopsis thaliana landsberg
  unsure (1)..(499): unsure at all n locations
gaaattaagtgttagaaactgatttttggtttagatcacaaaacgactggataaatttgtgttatttagaggtcatagctcgaaaaacggagattgttactttatgcgtgtattccagaaatacgacaaaaataatgtttattatatatagtcatggcgtttggacgaaataacaaacaaatcactcagttttccacgatcacataatttacgtgactgttgcattagtggaaaataaataacaaagcaaaacaacttactaccacaagttttaaaacaaatgttttannnnnnnnnnnnnnnnnnnnnnnnaccatctctttttttttttttggatctaaggccgcatgtgccatctatatatgtaatatcacaaaacatttttggatttgaaattacagattaaagtgtgtttcatgggtacatagacatattacacgacatagacacgaatatataggattataatgatatcttgagcacaaaggaaagacacgag

SEQ ID NO: 75044 - DNA, 162 bp, Arabidopsis thaliana landsberg
taaccctagggatattggtgtgatgaccgggactcgcctacaagagttttaaatcttttcaccggaaaatggacatgatgaagggaaggggggtgaatgagaaagaaattgaggagggaaccaaaggtattgcccttaaattagaatccaataatgtgggga

SEQ ID NO: 75045 - DNA, 105 bp, Arabidopsis thaliana landsberg
ctagcattctaaccttgtgtcaggacctacgggccaagggacagtctcaggtagacagtttctatggttcttatgcctcccaaaaggtaacggaggcgtgcaaag

SEQ ID NO: 75046 - DNA, 504 bp, Arabidopsis thaliana landsberg
ggggacgactagaagagtccatcaactacatacaacattgcaaattagttccaaggataagcatagataggagagttaaaggtagtgtcggtcactgggaaatttaactagctataggtggttagggagagttgagcaaatagacccttggttctagctttgtacatcggtagcaaaattctattttaaaaccaagctataaagcagtccagattccagcagaattcattgcattcaaccaaacacaaaacatagtcactcaatagtctttctacttcatgaatgacaaacaacgtgttaataggtaaaaacttaaaagctccttttttgtttcctaatcccaaagttcagactcacaatcaagagcaactcattataagtaagactataagatagacatgccatgagtaaaactaacctgtcctcttaggaacgtcagtgtgagtaagattgacaatggtgactcctggttgaggcttctcgaaaacgatcttcacctgaaat

SEQ ID NO: 75047 - DNA, 466 bp, Arabidopsis thaliana landsberg
gacagcattatctggacttgctttgctagatcatggcaagcaagctcattgccatgtcttgagacgtgaatttacgttttacgcgggccttcagaattctcttattgatatggactcaaaatgtgggaatctttcttacgctagaaggctttttgataacatgcctgagaggacagcgatttcatggaatgcgctgcttgtgggatatagtcaacatgggttaggaagagaagttcttgaactttttagattgaggagagatgagaagagagtaaagcctgatgcagatacccttttggctgttatgtctgggtgcagccatgggagaatggaagacacagggttgaatatgtttgatggcatggagaccggagaatacggcattaagcctggcactgagcattatgagagcttcgttgatctgcttggccgtgcggttaggattgatgaggcatctgacttcatg

SEQ ID NO: 75048 - DNA, 448 bp, Arabidopsis thaliana landsberg
atacggttgctagctccgttatcaagataccaaagatcatcaccacatgtttcgattttgctaggcacacaatgtttctcattcaggtaaacgatctcattcatcatgagttcatctgcatcttttgtacttttagcatcgttttcttgtgtttcctgcaacttaagaagacgatctgaacattgagatgcatagtgacccattttatcacaacggaaacatattacttgtgaaagatctcttgaaccatatcttccacgacctctttctctgtagtttcctctgccaccacgtgctctgctaccatgataatctcggtttgaatctgaactagcatacatcaacttgctttgatcatcttgagtctcatcttcttcatcccatactctttcttcataaaccttaatccgttcaacaatgtttttaaaggttgtttttcttccaaatc

SEQ ID NO: 75049 - DNA, 581 bp, Arabidopsis thaliana landsberg
  unsure (1)..(581): unsure at all n locations
ggttctgctaatattcattaccccgggccatttgtgattcctctggttagagattatgaagaaagtcacatctttatatgtgtttcttttccttctaatatactttgtggtctattgtgattcctcgggttagagactatgctgacaggccttgttcttgtattgcaggcttgctcaaacatgctttaataaatgtgtggataaaaggtaaactatttctccttttgatgttctataattacgtcgtggaacttgtctgcaattgttgaaacttttcttagctgagagatgagtaagttgcacctgttttgagattctttgcctaattctcaggtacaaggaagctgagctaaacatgggtgagaatagttgcatcgaccgttgtgtttccaagtactggcaggtaaggctctctgatacttcaacaattaacaatttgatacttcaaatcttctcatagttgactactattattcaaattcaatgcttatgttctttttcattaaatttgttttcaggtaannnnnnnnnnnnnnnnnnnnnnnnnnnnnnnnnnnnnnnncgtgtaatccagtttaaag

SEQ ID NO: 75050 - DNA, 315 bp, Arabidopsis thaliana landsberg
tttttgggttttttataataaggagaaggagcgtcgaaactaaaatttttgattagactattgaattgtttacagtcgagagagcgttatagagagagaatggtcataacttttcaagggaagagacaactgatcataacaacatgaagaagacgacgaggattgttttttattccgatgatttctagaagacggagcgttatattgttacttggcctactgaggtctctattctcttctattgtctctatataatattggtcactttttgcttttttagctttgatgactgaggaattcttgttttgagttttt

SEQ ID NO: 75051 - DNA, 594 bp, Arabidopsis thaliana landsberg
acccatatgtgattaaaatctgtgagtttatatagattgatcccttctggcacggatgctagatagatcaattaaatccattaatcctgcatatggacattaattaatcaaatccatcgattcatgaactaaaaacttaatactagtctaaccatatatatgcttgtgatattttttcaacaactctcttaatttatcgtattggagctgtgggacagaggaataggtacctgaatttaataatttgtagcataattagttcaactatttttcattttaaaatttttatttagttaatatttgtaggaaattatactagaaagccttctatttttatctctcttttcattctgaatatatgtatacacacacacatattaaagagtagtcatatatgttttactaatattggttggcccaaacacacattatatataaattgattgccagcaatataatatactgtaatttgcatatactccactacattcgcgacaagtaaagaacaaaattagtggtgaaaatattgattacaggacaaaattagaaatatcttgagaaggtaacatatgaattatgattactgtaatgatt

SEQ ID NO: 75052 - DNA, 495 bp, Arabidopsis thaliana landsberg
caccgattacccgacgctcaccatggcgcaacgccaaacggcgtaagcggtccgctgtctggacacctggccccatcccgcgcaaccgaacccacgggcgcccaaccggcgcccgtttacaacaaaccatcgcgctcaaggtgcttgcgcagggtttgcctgcccgcagccgcgcacgggtcgccccaacaatccagattcgcaaacggctcctggcgcaacgcacgcttcggcttgccgttaccatcacgcggacaagccaaggcgccatgccgacggcatgcttcttccgcaacccaagccctcgatgacgacaacggcgacaaccaaacaagcagacgtcgtgatcatcggcgccggtgcggccggattgatggcagcggccacggccgggcatcgcgggcgccgggtgctgttgctggagcacgccaacaagccgggcaagaaaatcctgatgttcggcggcacgcgctgcaatttaccaacctcaacgcc

SEQ ID NO: 75053 - DNA, 575 bp, Arabidopsis thaliana landsberg
  unsure (1)..(575): unsure at all n locations
tgggataatgaacatgtgatgattcttcatgcggctcttattcaagcgtaattcgaaacaacgatggacaagcctgggagcctttggagaacagcatggaagtggaaccagacaaccccaggctgtcagatttttaacagagcccacaactaagtcataagacagctgtgcatagacctgagagcgtgcttcccaccaaattttcgcattcgctaaagctgaatcttcaatgtcaagtatagaacctaagctgagtgataagcgcaaaactatttaggcgtattttgaggcggctcgaagcgcgcagcgtctgcttacttcgcctcagttagccaaaccagctctattgatgctgcgccttgctcttgcaagggtctatgtacgagtcatgccgcctttgccgcatttttatagggctgacttccgtatctggccgccgcatgacgcatcaggtcttcttatgttgtcatatcgaaagattgtatccttgaccatattttctactacgtatagaggcatatcaaaagtttttcagtgttcatncagctattttctactctacacgtcatgacacg

SEQ ID NO: 75054 - DNA, 363 bp, Arabidopsis thaliana landsberg
attattctgcgtctctgtcccatgattgaatattcgcttattttctgcagccgtgactttcatctcattagcgagagtgtctatgcatcctttctctagtcatgaatgcagagctgataatatcgacatctctatctgcagggagcaactaccctggcagtgatgacggaaacagaatattataaaacaccaaagtgcatagagaatttatgcaatgattggcggaaactacttggaaagaaccatatgattcaaagtatagatgattgtgactgcactcccatatatgaatggtatatgcaggagaaggagacaaagaaacaaatgactgcagacgtaaagaacaaaccctataagataaag

SEQ ID NO: 75055 - DNA, 656 bp, Arabidopsis thaliana landsberg
aggttttacattataacgtaagtttgtgcttatagttgaaatttggaattatgatcaaaatctcctttaatagtatgtagcattcttgtaatgcttgaaattgctatgtgttgcgaccactgaaaagtgcaatggatatatttctgttttatcttattttattggaatttcctataagattttaatcagttatatcaaaacaaattataattatagccagtatagatccgacgttggtgtgtcaagccacttaaaagatgatggaaatggatcagatttactgaataactgacacacgaaattcctaaataattgttttctgtagaagaatatgtacaactagaagataatatatgattaattattcagattttatcttaactttttgttgtgaacgtaagtttttattttggaatggtcatactacaaataattttcaagcattttataaagaggaaatttaaatatttttgtcacataattacaatatttattacacaggaaaaagggtatagaaaaatatattaaaaattaaattttagtcttcatttaatggaagtcttaaaaaaaaaaatacttgtttaaaattcctaaactattttttgatgcgaaattatttcaaacaaattcttatgtaaaattttttgtttcttact

SEQ ID NO: 75056 - DNA, 295 bp, Arabidopsis thaliana landsberg
tatttgactcccttccgcaacgctggaccactacactattagttaaggagaaaaccttttgttttatagagctaccaggcccattgcttatgatgctctctatgggagggctcttctagacccggaaactagggcggttgggcaagcatgagatgccatcatgctaggcggcctggagaacggaggtggtcattaacagatgcaggccccgaagagtcctctgaagagctatactagcaattgattttttctattcaacaaacaaagagatcttatccctaaacatggaatcaat

SEQ ID NO: 75057 - DNA, 326 bp, Arabidopsis thaliana landsberg
aattattaagatcaaacacctataaaacttatattaaaaatcttatgaaacaccttgccagcttgactctgatttaaaggaaattgcaagaaatcaaaacaaaacaaatactgcagagagcaatcttataaacaaaaccacatattatatgtcgaaagcaaagatgagcttcagaccgaaacacattggcaacttgagagcttataagacttggggacgctaggcacaacaacattgcacctctcaacctccccccaaatttggggtccgaaataagacatactctcctctaatctaataacagcacaccaaattttcttatcttg

SEQ ID NO: 75058 - DNA, 362 bp, Arabidopsis thaliana landsberg
gcgcgatccccgcatactcataaagattattacatgaatatttgtgataacaaaggacaaaggttatgggcacgaggcacattgtggattatcttcctgtggataacagttgcccggaataacgcctcttagtagttcaggaatcttaaaaggaaaaggtctcctgcacttgtagatcccattgttcatgttttgacttgtgatctcagaaacccagctacaatacctatcagcgaatgcagttcccattacagaagtggaatcattagaccatgttatgtcacattacaccatgagcaaccttttagacctttaacagtattaaagcttgcagacattgtaccctccatcagactgtttga

SEQ ID NO: 75059 - DNA, 411 bp, Arabidopsis thaliana landsberg
gatgggcatatatttatgacgaggctttatcacctggctgttggacgtttgtcccgcgggctttgcgcttgatcttctgcgtgcgtttgcgcagattgtgccgcttgtaggcgacggcggcgcggaccttgcccgtgccggtaatcttgaagcgttttttcgctccagatttggtcttcattttgggcattctatcctcacttcttggttcacgcgggtgggctgccctggaccgaacgcaactcgcgcctatcctgcccgtaccgctgggaggcggcgttatatccatgccgtcctgggttcgcaaggcggattcgcgggaaatagatcaaagtgggctgaaatctgccattttttggcattttgaggctcttttcatgaaaaaagccccttcctgttggcaggaagggg

SEQ ID NO: 75060 - DNA, 587 bp, Arabidopsis thaliana landsberg
  unsure (1)..(587): unsure at all n locations
gccatgaaacagttttgcctcatactaacatgcttctggaatagggattaacatttttatattgtttccataataattgatattcttatcagataatgttaatacacaaaaatttggccaatgataatttcctgaaagttagttgtactatggaagctgaaaccatataaaagaacttttaacactcatagtacaaaccattggcaatcttgcattttataggctattttacccatgtatgattttattacaggacattggtcatttggaaaatactggtttgctgatattctgtattttcacatgtatatgtttagtttacatgtgataacattttaattgcatcaaaatatcctcataatattgagaagctaccatatgcagttactacatatctgtttttcggaactatgatttctacttaaacacttggctatatttattggcaaccaacacagtaaatnnnnnnnnnnnnnnnnnnnnnnnnnnttgttccttcttgagaagacatttgacaaatattactgaatatccaacttatcattgttctttgaagaagttgtttcatgacagatggagctttactt

SEQ ID NO: 75061 - DNA, 439 bp, Arabidopsis thaliana landsberg
  unsure (1)..(439): unsure at all n locations
tggcgagcgacccgggccgatgccggctaccgatggcgcgcattctagggaggggtgcccaaaaacattaattgggtgaaaccggcatcacaggatgaatagcctaaaaataccggcgggccgattcacgaatctggacgataatacccggtagaatgctactannnnnnnnnnnnnnnnnnnnnnnnnnnnnncccgcgagggtcgccgaatagatcagatcttgcgggtttcgcgcacacggattaccgggtggcgctcactgggtaagctgcagattgacccgcgtcggagccaggtaagacagatggtccgcaccgtcacgcgcgaggtggtcgtaggctttgcgtttcaagtaggtcagctcgcggtccgtggccgagttcacccagcgggcggtgctgacactgatcggatagtcaaggcactccaccccata

SEQ ID NO: 75062 - DNA, 418 bp, Arabidopsis thaliana landsberg
tccccggaacaaaatcctgattatgtttttagttattttggactattgccaccacagagttatctagcacttgaatttaatcatataaattgttggaagaatcttctcgaacccagtctagaatcagcactaatatgctctgtttacacaggacattcgtttatcaaataacctctttttatcagtaatcaaaaataattataaaccaaaaattcagaatttcaccgatgtttttcttaattaatcacatatatgaggtcataaacattctcggcatgtccttcaaaccactataaaagccacttcgaaccctccatctttctccaacatccaattcacacataccattgaaaacagtactgtttgtgtttgaaacctctcccctattacctaatgtgagatgtatggtggcatcaag

SEQ ID NO: 75063 - DNA, 420 bp, Arabidopsis thaliana landsberg
  unsure (1)..(420): unsure at all n locations
nnnnnnnnnnnnnnnnnnnnnnnnnnnnnnnnnnnnnnnnnnnnnnnnnnnnnnnnnnnnnnnnnnnnnnnnnnnnnnnnnnnnnnnnnnnnnnnnnnnnnnnnnnnnnnnnnnnnnnnnnnnnnnnnnnnnnnnnnnnnnnnnnnnnnnnnnnnnnnnnnnnnnnnnnnnnnnnnnnnnnnnnnnnnnnnnnnnnnnnnnnnnnnnnnnnnnnnnnnnnnnnnnnnnnnnnnnnnnnnnnnnnnnnnnnnnnnnnnnnnnnnnnnnnnnnnnnnnnnnnnnnnnnnnnnnnnnnnnnnnnnnnnnnnnnnnnnncatttgagctccatgcatattgatttagtcttattaaccaatgattctttcttcttttgattttgctactcaaatatttgctatatattaccttaacatatatcc

SEQ ID NO: 75064 - DNA, 554 bp, Arabidopsis thaliana landsberg
gaaactcattgtggaaaggtcgaggttgcctggcgggctttaaacttataggctttggcccatctgtgttgatgagaggtcatacctaatgcttcttgcagcgcattgctgtcaactttgatgaccataccatcaatttcatagggcagactgtcacgcatggcttcaaaatcgcctacatgggagatgacggcgtccatggtgtcaaagatttcgctttctttggttggagatctgagtccacacttccaaagcaatgccaaattaccactatgggtatccagcagctgtgtaggctttttaccttctatcagtacgacactgctgatatgatataaaaaggcgtctagtcccctatgcctgacagcagccggatcttttaagcgcaggctcccgctggccgcattgcgtggattggccagcacttgcaaaccagctttcgtctgtttatcattgaatttttgaaaagagactctactcatcatgacttcacccctgatttctatttgctgtatgccgtaagttgcaaaaggagcactaagcggaacggatcg

SEQ ID NO: 75065 - DNA, 721 bp, Arabidopsis thaliana landsberg
atcaaaaactaaacacatcatatgatcgttcacttaagaataaacaccatacgatgagaatgatacctgattttgaattcatataatgtagatttgaatataaaaaatgggagtttatgaaatgtttctagatttcataacaatacatcaagtattttgagatttccataaacattttttttagcacccagaaaaaagtagtatgaattattaatttataccaatttcgatactcaagtctttaacctatatgctcatagatatgttttcttttaaattatgaaaatatttaaatctaaataattcccaaatatgtaatcctaattttcacatgttcgaatgaaaaaaaagagataaaaataattttaattccgttaacgtacatttcaatatttcatatagtttgtaaactgaatatacggttcacacttttgtatactctttttaataagtagttatattgcgtaaaacatagttagtatattttaatggaatattcctttattttgatgtttatagatctagctatcgtggagaagtgaatattttttcaaaaaaatgagtgagaaattttctaatgacagatgcatttattatagtttgcaagtagtaccgcaccagacgcaccttgtctgaagggagtaaatccgagaacacgactttgtccaatctaaaaagtcaaactagttaaaaatattgtctattggcctttgaatttaat

SEQ ID NO: 75066 - DNA, 615 bp, Arabidopsis thaliana landsberg
ttttctacaaacattttttaaaatttctaaatttgttaagagtttaataaaataatgatttggcttggttttgaatcaaaataaattgttaaaaaaggttcttacaaaacaccgaatctttccacatgggtaggtatataaaccaaattgcagataaaaaaatactacgcactaataaaaaatttggtatggcctccaagtggtcttcaagtgaaagttttagagaataacaagagttactgggtaacaataaaaatagaccatgataaatattttatgtgctcagggtggaataatatagaagcaagaaggctcaaaacaggcgataaaattatattgtatttacaagataacaaattcatttttactatgcattgatttctttattggtttattttcttaaaaaaatggtttatctcctcaattaatttctattttttaaatataaccctatttctaattattttggtctttaatggataaatatttttggatggggtttatgtattttataactacaaaaatagcttatcaatttaaatgagatctaaattctaaatatgggtatggagtatatggagtatagttgacttgctgtcaaagcttatcaagttg

SEQ ID NO: 75067 - DNA, 551 bp, Arabidopsis thaliana landsberg
gcgaagctcatattgtacgaagactcaactcttgctcgtatttgttttgacaagttctgacctctgaggtcaggtgctggtgctctgatttgtaagttacaagctttacatttactactttcaactctttattttctttctccagcgcaatctctgattctctcctgagaatcatctcaccctcgtactttctttcaaactcctcagccttcaaacgcgtatcatcaatttcattttcaacagcttccagatgaatctttacgtactttatcctctcccgttctatggcaagcaaagtttctgtctctttcctatgcctcaactctgtttcatgcttgagctccaaagctttaacttgaagttgcaatttaccttgttcttccttgtaagactcaagtacctgttccatcatcactacttcttcctttttcctagcaagagcatcttatgcttctttcctaagctttactctttcattgtaatttccctacaactctactacctgagaatcaaactaccgttagagagatatatctgcaaccaaacgttaa

SEQ ID NO: 75068 - DNA, 501 bp, Arabidopsis thaliana landsberg
ttctctaccggcaagaaagacaccattttgtccacctttctggcctttttctagggtttccgcatcgtgggcatgtctggcttgaggaaagaaggatcttcttctcgtggacacgcggttaacttgaacttttgcggtccctgtacgtagaaatccgtacgcctaagagacggtagtgatagccgacaacagccgaatagtgccggaacgagagttaagtggacggaacttaatccgaatgcaccaatgaaaccatcgctggattgaccaggtgtgtctatgggcaagaaatcgacacctatcaagaccttaactaccgccgagccttgcagtcaaggatcagacagattcttgcaacatataatacaacgtgccactctactagctcacaatagccactacttgtgtactctatggatacgccaagattgattagggccatccctggcactgtcaggaatcagatgtggtgcgctgcaacgctgattcatcgggaatagc

SEQ ID NO: 75069 - DNA, 456 bp, Arabidopsis thaliana landsberg
  unsure (1)..(456): unsure at all n locations
gcatccggtcgcaatggcggtttcgtctgccccggctttgcttcgggcagcgacgacatcgcccgcatcgccgggcaggacgtggcgactaaactctttcatctgtccgccgaaggcgtctaattcatccgcgacacgatccgcgacctgaagatcgacagcgccgatgtgcagccgggcatcatcagtgtgctgcgctatgacgacggcgcatcgctcaaggcctatcgcgaacatcnnnnnnnnnnnnnnnnnnnnnnnnnnnnnnnnnnnnnnnnnnnnnnnnntcgagctcttctgaaatccgagcgctatttccaggggcttcgcaattcttgcgccttccatatgcatccgctgaattatctccgcgccgtggccgcggaaatcgagcgtcttggcggcaggatctacgaaggcttcgggggcgacggccacccaccttccgggcaccga

SEQ ID NO: 75070 - DNA, 610 bp, Arabidopsis thaliana landsberg
acatcaaaaacaaactgaaatactatgtgttaaaaagaatattaaacaatttataaaccatttttcttgcataatctatcttttaatcctatattaataaaaacaaaaacaaaactacatacacttttttggtcgaatcaaaactatatactgtacattgtttcatataacattattttagaaaagaaaaaactcttcgaaataagtaactcatgcagataacagtccccaattgggaatggatttgtattttctcaatttaaagattaagttcattttcatacttatactgtatatggagaaaatatgatagagtagattattgaaaatgggcctattagttatgtagtatagacctaatgctataacctgctaataattaggccttattacacttccgttttagaaatgcggcccaatgggttttaaagagggaaacaaaaaaacaaacacacatacctgtaggctgtagtgttgtagtacagcttgaattaaagctttcgagaaattgtgtgcgacaccaactttttccaaaagcaagtagcccaagcataaaaagtgaaactgatagctttaaattttcaggaatgaaaaaaaaagaaaaagctta

SEQ ID NO: 75071 - DNA, 497 bp, Arabidopsis thaliana landsberg
gatggcataacttattacgattggcctactacattggagatggtgcgtaagatacaaccccatgtcattttctttagcgatgccggtccggatgtgcgttgggtaggtaatgaaaaaggagaagccggcgaaacaaactggaacaccattacgcctgataccttgtatgcgggaaaggttggtgtggaaaaattattgaacgaaggttccgaagacggtgccaaatggatcccggccgaagtggatgtatccatcaggcccggttggttttatcataaaaaagaggactcgttggtaaaaacgcccgagcagctttttaatatttatcttacctcggtagggcgcggctcggtatttgtgctgaatgtaccacccgatcaacgcggtttgttcaatgaaaaagatttaaaatccctgtatgggttttgcaatctgctgaaccgtgaattaagtaaaagtaagttgtttggcgctgtcgcatcagcaaccaattaccg

SEQ ID NO: 75072 - DNA, 465 bp, Arabidopsis thaliana landsberg
tacatttgattttctacttattctacttttgaaacttacgcttcctatttttagggtcacatcttccaattgtcatttgtctcattatcctttttaaacaagattttgaaaaagtaatttgtctcattatcctttagaaagaagatttgtcaaagtaatttgtttagtttggtcgaaaaagtaagaatagacaaagcataagaataggataggagcaaaaaagcagagtaaagaaagcgagaataaagggataagattaagagactctttattatttgtggaataaaattacgtctaaatgaagtctatccattgtttccctttatagaatcgaaagctcgtattaactatttacggaaataaatgattttcttaagagcataagtggctagagagagttatatgaaatatagtttgtgattttgagcttgacataagatatatacaagattgagattgatctga

SEQ ID NO: 75073 - DNA, 602 bp, Arabidopsis thaliana landsberg
gagggaaggtgttccctagtcagttatttaaagagcttttgttttctacctctcggccaatgcaaaagaggcatcatctgtagttgtcaaacccgaccaaatcataacttcatccaacaatgaccagcatatccaaaaaccagtcagatctgagagaagtttgtagatggacttagcaaaagctatcgtcaaaatctgtgggaaaaagatgatagagcctgaagcaatagaatgcctttcaattggtgctcgtgagcttacaccttcatctacagttggtgcttcatgcgtgtatgtgatgcggagacccgataagagattgaacattggacaggtacatacttaccatattaatactataaaacttctcttagaatagacagaaaacgaaagttattgattatgaggatattctgtaccaaactgcagaccgatgatcttgaaggacgaatacctgcgcatcgagcaaaggaaggaactgaagggtcaagttttctataccttatggttcaaggcaagagcatggtgttgtcagctagagactctattgattaattaacctcctgaacaaggctacttttttggttaccttagcgatggaa

SEQ ID NO: 75074 - DNA, 653 bp, Arabidopsis thaliana landsberg
tttggacaagtgatcatttatcggtttgagactatgtggaggcaaaattggagtcgccagatacctttgatcgacggcgtgagttgaatgcgaatgaatctggtctagttttccaacactaatcttactccttgtgttttctgaacttcaaaaatttaacaaattaacagaagtggatgaatggaactgaaaacccgaatcgaaaccaacccaaaaaaccggtttgggtcaagtaggatataactaatttacctattggatcctatgtaattgtaatcttgggtatcaggtcgcttcgggtattacccgatattcgaacgagtaacccgattacccaaaattagctacacttatatggatagaagctttacttacatcggaaaatctgataatatttcggataactaggtaaaaatttcggataatcggatataatatcagttaatcaagtaaaacttcgagtaatcaggtgcaatcagatataaaaatatttgaactgaaaagtaccgagtttataggttatgaaatcttaaattcgacccaaatccgaatcgataccaaacccgtttttatatatatcttattggatcctcaatttgtgtacttagggagcctcctcaaacatgcgcctccgaatgtcgagcacctagtgt

SEQ ID NO: 75075 - DNA, 906 bp, Arabidopsis thaliana landsberg
tttttctttcgtggaggatggaaagcaattttactaattagttaaggtgtactgtacgtaaaaaaaaaaatgaaatataacgttatatattgaaatcatactaccattcagttttgagatttgctggaacttatttgtgcataagagttatcgagtaaacatgttctgcttacagaaactatgtttgggaatactttcatctgaaattttgttattcacatgtttctctttccatacagaaagttttttccagttctcattttcgtttgttttgcgttgatatagttaggggcgaggcttctacacattctcaagagattgcttccaatttctgtatatcttcttcaggtaggtactgttttctttggtttgacggtatcatactcatgatccctttccagcaaattttttgatgtatgttctaaatttgaatagaaagaaggtgaatatttaagtgggcatgaggtgtttctcaagcgggttgcttcagcattcaacagttttgtggagtccacagaaaaatcatgtcgtgacaagtaattctatttccaattcctgttcttaccatgtcggtgcctcctacctgtgttctagtgagctttagtgattgatcaccctttggattttatattgtttgcagatgtatggaggatttagcaagtacaactcgctatgttacatggtctcttcacaacaaggtcattgctacagccctatagctctgtttcaatccaattgagttgtgtacataccatcaagtatccgtttctgattgagtagttttcgtttctcaatgttatgtagaaccgagctggtctacgtcaattcttggactcatttggtggaacagagcataatacgacatcaggtaatgccataggatttagtcttccccaagatgcatta

SEQ ID NO: 75076 - DNA, 494 bp, Arabidopsis thaliana landsberg
  unsure (1)..(494): unsure at all n locations
tcaggaatcattactcctagacgcagtcagcgatgatcccgatgcccggtttctttttgattcattcgtggaggctgtccaaaacatggcgaaatcagagtctgctttgtatgcaaagctagttagtgatgaccgcctgagcaggactgctgaagatgctgttaatgtacaggaggtatcggcgaacgttctgcgcaaagactcgatcctggcggctgcttcttcaggcccgcataaatatgctgctctatcttcaaatctgctgtcacaattgggccggaggatacgatctgcaagagataatgagctcgaagctctcgaagaaaactgctcaaacgagcttgctcgcttaaatgtcctgaaagtgtctgttatggagaaagaaagtcatgtcgctcgactacggaagnnnnnnnnnnnnnnnnnnnnnnaagcgaacatattgtcacgtgagatatccaacttgctttccatcaacgatgcactggtactga

SEQ ID NO: 75077 - DNA, 545 bp, Arabidopsis thaliana landsberg
  unsure (1)..(545): unsure at all n locations
ggatctctgtgctgactgaaactcgctcgcagatgcttttatggatttgtcagcatgcgcccctccccaggctcttactagnnnnnnnnnnnnnnnnntccccaagtctgagcgaatgccatgcgggaatgctccgtccccgccatgcaacaggcaacgtgggtgtaccaagagttatgattcctgtggactgcctggctgacaggtttccagagttctttgatgggatactagacgcccagccaattgccgcaacatctgctacaccactatattcaaatgctggatatcagattctgggctatgcaatcgaagcaattgcccaaaaatcgttccatgagattcttatggagcgtattatcgagcctcttggattgtcccgttcgagtcatagcccgcccgacccaagtctggcgatagttccttcagacctgacctctagtcagttcaatttggacattggagatgcaaccccgtgagtttgcgatctgaatttcttccttcgaaggattntgctaatgcagcatcagtgctgggggcatcta

SEQ ID NO: 75078 - DNA, 352 bp, Arabidopsis thaliana landsberg
ttgtgttcgtcgagcacggcggctccggcggccgcgtcgcgtggccgatcgcgatgtcaatccttgagagctactttacgaagatccaccccggggcgccgcccgaggaggcggcgaagccgtgaggggcacggggctccagctaccgcgcgcgacgatcggcgtgagccggtggcgctggttccgcgcggcggtcgactggccgttgatcgccacgatgctcgcgctgtgcacgatcgggctgctgaatctgtacagtgcgacgcgcggcctcaggcatcacgtcaagtacgacacgcacgtgaactggatggtaaccggtggctttcgcgttcatagtcgcgactcgcat

SEQ ID NO: 75079 - DNA, 450 bp, Arabidopsis thaliana landsberg
  unsure (1)..(450): unsure at all n locations
gtccattcatatttactgtcactacctcgtcttcctcgtaagttgtatcattttcttgactataagaatggtttaaaaaaaaattcaactcttcctgccaatggagcatacagaagaaaatgacaatagaggactgataataaatggattgagaaattcactgacttgacgtcaatcatctttgctacagatttgtcatctgcttctcgagctttttgtccaaaaaagtgtccctatatttcatggaagatatcatatagttgttacatagaagacaagaaagacactgatcactttcaaccaaaaatttctttccaaattgtaccttctcacgagtctgtgtgctcgctcggnttctcctttggagaatgcttctgcagcctgtcaaaaagaagagggtnttagttatgcaaccatcacatcatgacaatcatatagccattacacaca

SEQ ID NO: 75080 - DNA, 501 bp, Arabidopsis thaliana landsberg
caaaactctgttgttgaaatatctataaacaaaaaaaaagaagcacataaacatagagtaatttttttattttttgatataccctatcagctaatgtggccaagtctcagtaagaacacatcgaagtgctactgagtatgacttcgggagtaaaatatccttgttaccttcggttgagtgggattaagaacttgataacgcataacactttatccttcttattattttcgtcaggcctatactcttatatgaaccaagcagctttctttggatcttctccttcacaaacatttcttggctcctcattttccgaaaattgaaaaatgcttctgtaaccaagaaccttaccttttgacttgataactatatgaccttctacgatcctccagcaaccaccaccatcacattcatcggctttaccacaagtctttgttctgttagcaaagatacaggttccgaactctataaacttgtcatctagaggatccacaagcgtcaacg

SEQ ID NO: 75081 - DNA, 228 bp, Arabidopsis thaliana landsberg
aaaacaccgccttctctggcaaacctgtcattcgagtcaacgtcttggtcaaaatttgatcatacattttcataaccaacagactattttaggtaaccaatagctcaatcaaaacatcacattaaatgcagatatatgctatgatcttgtatgaaatagaataaactatataaagactcaagggatcactaatcggctaccgataccacgacttggtggtcgaataaa

SEQ ID NO: 75082 - DNA, 495 bp, Arabidopsis thaliana landsberg
agcgataaaacgctgttgaatatcgaaacgggcgactatacgctcggcggtgacgtatcggtagcggcaggtccggtcagcaaaaatgcctccgctacgaccgattataaactggaagcggaagtgtattcctattcacgtgccaagggactcttcgcaggcgtgaccgtgaacggtgctatgctcgcggtcgacgtcagggctaataccggcttgtacggaagtaaagccactgtcaaatctatttttacggagtcaaacatctcatccaaggcaatcgacgacctccgcgaaaagctggatgatttcaactaaatgccgctatgccatccacagtcgttgcacagatgatctacaacgaggagaagcagacattacgcatcgtatatgtttcggggatggtgtatgactacaaaaacgttccctgggaagtgtaccaggccatgaaagccttccgctcgaaggggacgttttgaataacatattaagggcaat

SEQ ID NO: 75083 - DNA, 266 bp, Arabidopsis thaliana landsberg
ttactcttacatggccttgctgctttcttcccatttttactaaatgcatgtctatggcggtgaccagaggcattctacacatcactcaagtggtatttacatgagggccagaacgcattgaaccagtcttatacaaaagaccttctattttataaaagcacctgacccgaaaattctcggtcacccaagtcacaatgggctctttctgaacaccctctgtcaggggcgctttcactgcatacgctatcttttaacgagctgacgaa

SEQ ID NO: 75084 - DNA, 486 bp, Arabidopsis thaliana landsberg
gagactgcacataaggtgtagcatttagatgtaccttaattttaaattaagatcccaaaagtgggacatacaacatttctaccgtctagtatgtttgagtcagctattagctaaaactttaaatgaggaaaaacaatctagcccataaatgtattatgatgggataaactcagaaaagctaattagaacagagaaacttacattatcctcataaagtatcaagacggaaatcaatgcatgcaaaacagagagctgcgaagttgagagtaaaaccatcgagtttgctctctgcatgtaggtcaacatttcctctgccggtgttttagatgtcttccactcagagaaatcccaaatatcaatacctaattcagtctgtatttgctgagtgtcaaacaaacagtcccccaaagccatatttacatgcttattaggcatctggttatatttctaccaaaagctcgtctccactagatactggaaaagctc

SEQ ID NO: 75085 - DNA, 543 bp, Arabidopsis thaliana landsberg
ctctattttgcatcatgaaagcgacccatttcaaaatagatcggaaattcttttgggtagagttgggttgtttgctttttttgtcttttggggtttcactcatcagtgacctggaatacagcgcttatgaacagcacgatataagccggtttgctgaagatatcggctaccgcctgattaccggcagcttttcacttattacttataccatatattactttgggttcctgaagcagtacgtgttcagccgcaaggttattggcattgttctttgcagtgttggctttgtgattgcagatcagttgatgggtaagtttccaagtaactgggtcatagttcatactaactgggtttcaaacagtttaaaagaacgggcggttgaggacctgttgaggccgcgtatcatttttacgtttaattacaggattgttcgttctatacttccgttaatcggattggcttttttaatcaggtccctcactcaggaaaaggagatgaaggaactgacagaacagcaactggtttcagagcttaactacctga

SEQ ID NO: 75086 - DNA, 497 bp, Arabidopsis thaliana landsberg
gtccaggttagaattgattcctcaaatttcaattcttcgcattacattacccaataattccgtctacatcttcgaggatggggggaagaaccgcgaaagtaattcccagaaatgtcatttttacgcttagtaggagttccatttctgagtctccattgctttctccgagtcgaataaaccctagattatccagtagtttctctttcagcatccgattattgagctatttcactgttagaaatggcttttgtcccgattgttctgtaccgagagaccctaattttgttggattgactacacaaagtcggagtattgtcaggagattttgtagtgaaaagagtggaagtagtgaatctagtggctggacagaggaggttgagtatttagatgagtcgggtagtgtactacacagtggtaagggaataagatcagtagagccagggcttgatgaccatgtaatggttggtggattgaagaagccttacatgaatgcttct

SEQ ID NO: 75087 - DNA, 597 bp, Arabidopsis thaliana landsberg
  unsure (1)..(597): unsure at all n locations
tatctatactcgatgttgaaaatagctaggttacttgatacgaaagctaaagagaatttaaccaaggaggaaagaaaattttgtccacacaaatcacctaattcagttgccctgcatttctatatgatataggctatatcctttgctggacatttcttttactttaatttgttctcattaacttagaatatgcgatctaacaaataggtcactattattttcagaattagtgaaaaaatattgaaaatctgtaaatagaaatttatacagagattcggaactcacattactttgttctaattgggaatggagaaacaatgatacgcataatatcattctttaatggtcacggtcattgtattcacataatttagggaaagttaagtgctctttttgaaaatattgtgttgggactttcaggaaaaacaaatttacttgggtttacattataacccctataatgcaaattttgttatgaaaaggatttacatacttttagatactggttaagggcccaactatttattaagtttacgtaaagaagaagcangagcatgaaagtagcgctcggatcagacaactccaagaaaatgtgca

SEQ ID NO: 75088 - DNA, 459 bp, Arabidopsis thaliana landsberg
  unsure (1)..(459): unsure at all n locations
ctctcctcgagctcagctccttttccttcaatactgaaatctgattccccttctccatctctctccctctctctctttctgttatcatgtctaaacatgttttggtgttgaatctgttggaggaaatatataattgtggaaagataacaaaactgttgaatctgcaggagtgaacttagttgaccaaagatagtaaaaaagagttactacttgtacttgaattggtgtgttagtattatcattctaactaaaattcaaattgtaatatgcattatggggtctaaattcggaaagtgatgctaacaaattagttggttatttacatgtcctatcaatttagactcaaaactataattttattatgttgtcggctgtagaaagaaagatatttngttggtttgtaaaaattgaaataatcaaaaaaacaaagaaaaggaaaaatcgttaacacacacgtgt

SEQ ID NO: 75089 - DNA, 419 bp, Arabidopsis thaliana landsberg
tgttctgtttagcacgaacctcacagtgggctgaagagttttcggaatagctttggatggggtgggtgaaagttcgactcaaaatgaggtagaagagaagcctgtgattgttagagttaagcgaaaagttggacatttctctgctcgatgctttctgtaagtattcttctctcttcctttgatgtttggtagagattctgtctttagcaatcgtgtggaagtggaaaaactgatattgctttggcatttagggttggagataaatgaaagaccactcaaacggccgactttggatttcttaaagctatctatttcagattcaggggagagaggtaattctatattatctcaggctttatgttgcttgtacgaggatggtttccacttcagcggagctttaatatgtgtttacatggata

SEQ ID NO: 75090 - DNA, 407 bp, Arabidopsis thaliana landsberg
ggaattgaaaatcagtgattcttggttagttggtttggttggtcgtgaatttatctttggattcttttttgtctttgcatttggttggtaggcttatatatatcacatctcaacacaagtcatcatgtaaacttttggatttgttcaaaagtgttttttggtatatggattttttttctttttttctacgcatataaatatcataattaggttttacagacttgctaaatattggagataagtagtactagtgggctgcgtttgtatattgggcttagccgacttagaacttacttggtcggtaagtctcgtctagggttttggggttaagtcatgtgtataaatacgttgtacagccgttcattgtaaagcaagcaattgaatatcggaaaaaatggacagctatc

SEQ ID NO: 75091 - DNA, 416 bp, Arabidopsis thaliana landsberg
  unsure (1)..(416): unsure at all n locations
gacaacactatacagataacagcgagcttatannnnnnnnnnnnnnnnnnnnnnnnnnnnnnnnnnnnnnnnnnnnnnntaataaatggagctcaggcagatttctcttataccgggaatgcctatggaagcaacttagcttgtcgaattatagggaaccacacttaacgaatgtatatcatactgaaaaccaaaacaaaagtgaacctaccatcagcagttctcaactaacatatgccaatgctgtatatgactaatctagctcaagtatgaacatatattgcgacatatatatgtctatatgccttggattgaatatatatagctgacagccttaaatattgacatgtgactaaacaagatgacgcatcccataaaaaaaaacggaacaccatatatacatatagatacattat

SEQ ID NO: 75092 - DNA, 493 bp, Arabidopsis thaliana landsberg
  unsure (1)..(493): unsure at all n locations
gatcgcgaggcggcaaatgcaagcaggcgtgttcacgcagnnnnnnnnnnnnnnnnnnnnnnggtcgctgtgcgccgcattttatctgcaggcattcggcgagcgcacgctgcacctcgattgtgacgtgatccaggctgacggcggcacgcggactgccgcgattaccggcgcgatggttgccgcctacgacgccttctcccggcnnnnnnnnnnnnnnnnnnnnnnnnnnnnnccgctcaagcatttcgtcgctgcaatctcggtgggtgtgtatcgcggcacgccggtgctcgacctggactatcttgaagactcggcatgcgataccgacatgaatgtggtgatgaccgacgccggccatnnnnnnnnnnnnnnnnnnnnnnnnnnnnnnnnnnnnnnnnnnnnnnnnnnnnnnnnnnnnnnnnnnnnnnnnnngcaacaaggtattgacgacctgatcgtgctgcagaagaaggcgctcggcctgact

SEQ ID NO: 75093 - DNA, 378 bp, Arabidopsis thaliana landsberg
tataacatataacaaaaaaaatgatatacagatcggctgagaacgaatcagataacatttattataataataaaaactaagatagataagaaccaataggaagaaaggggaataacacatagatacatacaaacataaataaaaaaaacacttatgcaagtgtaaacagaaaaaaatatgcgctcttatagaaaaaatggacatcgttgggccgaagactgaaattacagtaaagctataaaaaagaatgtaaataacaatacggggaacataataaaggaaggaaaagatattatataagatataaacaaaggctacgaaataatactaaggtaaaaggtccacaacaaaaaaggatgatataataaagagatacct

SEQ ID NO: 75094 - DNA, 538 bp, Arabidopsis thaliana landsberg
gagaaggattcagttagaatatgttttttctttgagggactgaacccgctgctcattgaatctctgactggcatcttaaaacatgctaaattgtcccctgaggcgaactgcgacttcagaagcagatcctgaaatttctcgctgtacaaggtctctttctggcttctctgggcactgaagttacatcatttgagttgcaggagaaatttaagtggccaaagacagctactcctgctgctctttgccaaatgtgcatcgaacagcttcagctgttgctgtcaaattctcagaagattgagaaaccactatctaaaggaaatgccctggaacagcccgatgatcctgtttcatactttatgaaattccttagcacgttgcagaatattccctcagtttccctcttccgttccttgaatgaagcagatgaaaaggctttcacagaattacaagaaacagaaagtaaacttttaaggaggtaagtttcttactcgttttgctttaatgttactgtaagttgaaatcttaccaaaataatgtc

SEQ ID NO: 75095 - DNA, 498 bp, Arabidopsis thaliana landsberg
tttttgttaagcatatctaacagttatggttgtcaaaagtctctttcattttgcaaaatcttctttttttttttggatggaactttgctttttaagctacacatttagtctgtgaaatagcatcgaggaacagttgtctcattcaacttgcatgttcttgtaactactatttgtttcagtatgttgatgactgctttgattttgtaggtcaaaatgggagtatactctagagcggttgcgttttcggtctttgggccgtttatgctgtgtttcactgcttattctaagagaaatgatggagcattcatagttggcctgaacaaactgaagttggatcctaacatgcgactagcaacacgctttggttccaagcaagaagaggcctcgagatcttctatgcgttcgtacaacaacaatcgtagtggtgattctggagaggctcatatcgccccgctcaagaatagctaggatgctcagtactatggcgagactgctatt

SEQ ID NO: 75096 - DNA, 582 bp, Arabidopsis thaliana landsberg
tcgatcaactcgctgttctttcttcgtctacggttaggctgttaaataggcacaccctccgtctccgctcccaaagtcgcttgcactccaccccccacccaaaattcccctcctttgcgttctcccacatccgtaaggccggccgcatcttacgatgtgctgttcaacttagccagcccactgcgcggctcatgcctgatcgtgctgcaggtctttgaaggccctctgcttcataatcgcgcggaagtaggtgctctagagaagcccgtctcggagctctcggatgaatctcctgaaagctgcctggcgagtgtgtccataaattttccgtagaattgagccctcattccgggttggtcgtcagctccccatccacctcgtcaccgagaatttgctgctgcaatacgatgctgtacacgctcgctttcagtaacgtgaacacaagactggttttccgttccagtccgcgcaacgagtcgaggatctgggtgctcgggttggccgcgagttcagccaagagagcggagaactaatggacattgttagcccagtgacatggacatagaacgggcgatgaacgat

SEQ ID NO: 75097 - DNA, 461 bp, Arabidopsis thaliana landsberg
  unsure (1)..(461): unsure at all n locations
aaccataattaagaatgaatcaattttaaaatggagaatacaaacctcgtcagcgaagcaccttcacatgaatccaaaggccgccgttatatatctcatgacttgtgaagataaaaaaatgaattcaacagatatgcagatgacatatacagactaactatatacgtccactacggattttatcttcaacctatgcatatagtaagattaaggttatttggaaaactgattgagctggcataaatataaattcgaattactagctagtgtagttaataaaacaatgaaaacaagtactatagatttaagtaaaagtaattacatagttcttgtacactaatgccacgttggaaaatgagttagagggagattaattagttcggagcacacaacacatatttgtgatttttcacagacgctgacacaatntgntgtgatnttccgtgcacacacatacatat

SEQ ID NO: 75098 - DNA, 444 bp, Arabidopsis thaliana landsberg
tgatccgatacaacatatgtatggttatagaaatgcaagtaaaaccagatggactgatgttagagtgttttattctctaacaatatgcgcttcattacacttgtgccacacatattgtattgcgatccacacttctttatattcccactgtcacgcttgagaggggaaagcttcgatatacaagtatgctagggtgcgagatatataagataaattactatatcaagttgaaaaagaaaaaactgagaaaattatgggagtgcataactcaaaatgacttgtacgaagaacattaggaaaacttaatggtcagagtggactgtggacctaactagcattcaaaagtcagttcaaaagaggaggaattgctacacacttctctatttacaaagaatttcgagaatttcctatgagggacgctacactagtgaatgtacgatatac

SEQ ID NO: 75099 - DNA, 689 bp, Arabidopsis thaliana landsberg
cttttgtccggctgacaccaataggccgtcggagtgaatgccaagtgcgtcctgcaaaccaatggacgcacgtcgtagatgctgcagcgctcgtcgtgcagaaacacgcacggcttgccatgaaacgtgtcctttccggatggctccttgcgcaatggacgatcgctattacgagcgatgtaggaggcctcaaccggatatatctttacctcgtagtggcagcatcctgtgcaacctgcacggcagggcgaatatgcattgaagtgagtcataacttcgtcggccatcatatgcagacgccgaagcttggcgtgcaggctggcgttcaacgcgctgatccgctggggagcagcttcctcgagggcgatgatactctgcggaaccgaagcaattgcggccttctcgttcccctccgcgaaagcacgatcgctctcgcaatcaggtgcctcgcgcgagatgtcggtccgatctgaatttgcccggttgtcattcattagcttttgagcgcctcagtagcggcagcaggtcaggcagagtccttcgtcgctgatcacgttgccaaggcagcctgcgcacaacggcgtcgatcatgttggtgtccaagcattcagccgcacacggacttccgcatggggcaagcggcagcgtggatgggcggcaattcggttaagaccgtcgtgtagctgggc

SEQ ID NO: 75100 - DNA, 503 bp, Arabidopsis thaliana landsberg
catgtcttctccagggctcatagaacaacagataagcaataaatttgaattttctttttctgtactgttctctgttttggatttgatgttgtaacctaataataatgttcattggtgggtattacgtttagttcggaaattcaagaaacgaacattaacctacttaatctgtccttgtatcattcatacacttgacaattcaatcctgtcttcattcaacacaactataacccagacaattcactaaccacctagtggcatgactaacactaatcactacctttatgcatagccaatacagacatcagaatatataagaaaacgttatttagaatagtattcctctggacttactatatgtcccatcttgcccacgaacccactgtctagagaacacaaaatctctctttgactgccatctgcaaaatatactatttaaccaatcagttcaatgaagaaaatgtaagtgcaaaactatccactgaatgaagtgatatatggag

SEQ ID NO: 75101 - DNA, 417 bp, Arabidopsis thaliana landsberg
tattcttatctctgccttgccggcagacgtcatcgcgcatgtggtggagaagttcgtgctgcagtttgatttccagcttgccgaccgcaatgtgaccatcgaactgacgccggaggccaatcactggctggcctcgcgtggctatgatgaccagatgggcgcgcggccccttgcccgtgtcattcaggaatcgatcaagaagccgctggccgatgaggtgctgttcgggcgtctcatcaagggcggtcacgtcaaggtcaaggttggcgacaaggacgatcttgtctttgaaatcgaggaagcgcctccgcgctcgttcccgcccgcgaagaaaaaaggcggcggtggcggtgtcggcggcggcatgtggtggtggctcaaccacacctaaagtgccggtgctcgccgaatgagcgc

SEQ ID NO: 75102 - DNA, 544 bp, Arabidopsis thaliana landsberg
atacatccgtaacaactcatcaacgtttagaaaatttcgtagctaatttcaactttattttattgtttaaagaagtttgggttgaacaagttttctaaaccgttgaatagataatttgttgaattcacacaagaatattgtaactaactagatggagcagtaaatatagtgtgacaacagttttggtcgtctcttgtcagactttcaggtagcgcatatatgaaatatctagcgcgacacattcatatataggagtagtatttgcttttgttttgtttttacttttattactctaatagacaatggccttgatatgaggaacagaaaaaagaaaaaaagacaatagtcttaatagactccgactcaccaaccatagataatataggtaaattagttacattatggcatattaattgatatagtcacattactccaataccatactttcttattttcaacaaaggtgtggttgtacaattggaagattgataggtcgactttttcgaatatatccatgatagttagctgttgtactaccatttga

SEQ ID NO: 75103 - DNA, 683 bp, Arabidopsis thaliana landsberg
ttggtcgtgaatttataaggaatttttgtggatgaattttcactcctgattagtgttatataaccaatatttacaactctacataaattattgaacttgaacaaatgtagttcacttattttttttttctgcctcttaatatagctgaccaatttgtacaacttctttgtactctgttatgaaatttattatgtttgataatagaccaacatcttgtaggtgcgtcaataatcactattagttgtccttcaaaatcattaatttcaccaaacctttgtgtcgcaataacaaaaccaaactaccaacttgttttcttaacttcgtggtgcatttactaaccacccgcatatacgtgatggacttgctaaacctatatatttttgctccatctgaattgaatccttgtctattataactctatattattgcctgatagctaagtgattacaaatatgacccaaaaaaagacttcatgtttggtcatttgcattacacacatgctcgacataattgttgacggttgcttgctaggaagtagatgagcatgtactaaggagaaaatgggttacgatcactcggagcacccaaagaaaagggtcctaagtattagttttatgtgaaaacctgaacaaacgggatattattatcccaatcaaaaattgatttttagcttccttgaaaat

SEQ ID NO: 75104 - DNA, 691 bp, Arabidopsis thaliana landsberg
  unsure (1)..(691): unsure at all n locations
acttcgtctaaattagcgtttcttcgttatgggcatatcatcatttcattgctgattacatatttacgtatgaaattatggattatgggataaagtcacgaaacacgttggaattgtttaatcagccttaaagatagacgttgacagttttgatttttttttatggagtaagtatatttttagttgaattctgattatcttattctttactattactttttgtgtggcggtttttcatatctgacatcagaaagtgatcgataactacaatacttaatctattaattaaaaatatacagtatggaagttttaattgataattcttttatataataaacttgaggtatttaaaatgtgtggttgttagttgagggttttgttttaataaaaaaaaatacatgttagaacttagaaacatatatcaaacatttgtcagttcaaataaaaattgtggttaacattattcactgcataataagtagaagtattaatatatatgattttgccacaaatcataaataaaaaaaaccatactaaaacggaaaaaataactatgttattttaccgattattattatatatattttaactaagagattatntttatgtagaatctctaattgaaatgaataaaaatgtcggtataatcttttttaatatttcacataatttaatttaaatttgtacgctt

SEQ ID NO: 75105 - DNA, 134 bp, Arabidopsis thaliana landsberg
atatgaaatgcacttaacgacattaatattagtatttggagtgtgtttgctccttcatgtgtgtaacgaaaatttgtgctacttatgagacacatccggcggaagatttgtctagctcagaggatacgggggat

SEQ ID NO: 75106 - DNA, 682 bp, Arabidopsis thaliana landsberg
caatactctatctagataggtgataagttatttatgttgtggtacagtggggaacctataattgcatgccccaaaggtaccaaattcaatccttttaactacactatttttttttcttacccttttgattaataggctaaaatttcacaattaaacctgaatattatatttgtacctaaaaaacaaaaaaatgaatattatatagttttcgattggttggtggcatcattaaattttagttagaaagatcaaacacgttgatcactcgagtcacctaatcaaaacaagttaaacacgaatattttattagtctcaatctatcattatttcaatgctggtaccgaaaatcatcatttaaacaaaaagtcttatattggctctctcttcaacttttaattttctaccaaacatatacatcaaagcttgactctctttttctctcccatggaatcaacaaagaagcaagtctcgttggagctacttccatggttagttgtccacaccgatggaacggtagagagactagcgggaaccgaggtttgtcctcccggtttggatccaataaccggggttttctctaaagatatcattatcgaaccgaaaaccggtttatctgcccgaatctatcgacccttctcgattcaacccggtcagaagattcctctcatgctctattttcatg

SEQ ID NO: 75107 - DNA, 213 bp, Arabidopsis thaliana landsberg
  unsure (1)..(213): unsure at all n locations
ttgaaagtattgacacccattactagaactctnntatccaagaaaaatattgtgttgtgttatgaaaannntcctacagtaacgaggggcagcttgagttaaattgccgacattgtggtatgcaactttcgttcacgatgaaatgctactgtcttctctgtaaaatgaccacgtatgacagtgggagcggttggatgcctaacnnttatctta

SEQ ID NO: 75108 - DNA, 463 bp, Arabidopsis thaliana landsberg
agcaatgcatgaaaactggtgtatggaaacattgaaatatttgttggcggcagtattgaatattattacttattagtttatgtgatacaacgatgatgcagactagcactggatcgtctctgtgctatctccagaatacgtgcgggccatgggaacatccttgattgttaatatacgcaacccaaagtctctaatatgattatatccaacgaaaaagtgttgagtattatcgataagaaactaacccatcgggctcatctatttaagaagaagaagtcttgagtatatagcttgcttacaatatgacatagtattacgccgttttataaaaaatgaagacagcattgcttgtctgacaagaaactgccgatgaaagaggctgtcaatccaagcaaaactgtgatttctgatacaaggatacaaacgggacctgcgcttggtcattgagagggcaatctactga

SEQ ID NO: 75109 - DNA, 562 bp, Arabidopsis thaliana landsberg
agcgctgacgatcacagcggacgaccagagcaaggtttacggttaagttttaccgtcactgacagtacactacagcgcgggttgtaaacggggagagcagctcggtgctgggcaccgcggctatggtcagcacggcagcgaccgcgatgtcaccggtaagcggcagtccatatgcgatcacggtaagcggcgcagcagcggataactatacgatcagctatgtaccgggaacactgacgatcagcaagtcggcagagacgctcacgtttacgccgatcgcggcgaagacgtatggcgatgcggactttacgatcacagccacgagtaccaacaacagtatcccggtgacttacagcagctcaaacacggcggtagcgacggtatcgggcaatacggtacatattacgggagtaggcgctacgacgatcacggccagccaggcgggcgatgcgaaccatacggcggctacagatgcacagcagacactgaacgtcagtgcctcgggcagcacggtgctcacgtttgcaccgatcgcggcgaagacgtacggtgatgcggactt

SEQ ID NO: 75110 - DNA, 692 bp, Arabidopsis thaliana landsberg
tatattaagttaaaagacctacaatacaaacaaatttcaggaaacctaaaatgaactagttccaataagaaaagacatattacatcaattatctgaaactagataacataacttaccatattgtacaaatcatctttggcaagactgacacggaaatgtctctccagcacctcttgaacaactaccttctcagtgtcatcacgcagcctttctgcaaggatgtaatacccttctctggcgagttcttcatgagatgtaccgtcataagtcctgaaacgataggcccaccggaataaatctcttggagttatataaccatgttttccagcaaaagctttgctactctgcctattgcgttgcaggtctttcatcacttcaaccatttttgaagcatgactgttagcaatactacacttcgtagtaagaatttcactcagttcatcttctggaatttcatcaacatgaatctccacaaaccgattgcgaaaagctcgagacagtattttgcgtccaccatataaagtaggagggttctgtgtagcgaagagcataaaattaggatgcgctgagattgtttcactcagctcaggcacaaaaagctccctattgtcaacaagcagcctgtttagtgcctctaagacatcagatggagccaaattaagttcatctaagacaatccaatgcgcatcccc

SEQ ID NO: 75111 - DNA, 459 bp, Arabidopsis thaliana landsberg
ctcggccttgcgccagtccagcagtgcgccgacttgtggatgttcgtcgcgatagggctccaagtgcgaggcgcgggtgtcctcgacctgaacaccgagcgaccgcaacagatctcgcacatgcgacgggttgcgcagatctgtcgtaccccggcccggcacgtgccccaggacgagctggtcgcgttcggcgcggatccggacggcgtccgcttcgtcggccggacgtggcccggcgatgtcggtgatgagtcgctccaggaccggtcgatcgaccggcaatccgtgctcggcgagctcagcgcacagcagtgcagcgccggactcgctcgtggcagtgctgaccgcatgaggccgccgggcgagcaacgcttcttgcgcggcggccgtccgcaacgccagctgcaccaggtcggccaggtgtgccgcgcgccaatctgcctgggagcaggccggatt

SEQ ID NO: 75112 - DNA, 616 bp, Arabidopsis thaliana landsberg
  unsure (1)..(616): unsure at all n locations
agggcattaccttaatatgtttatccaaaagttctagaaacttaaatttaatttatgcatctcttttttttcttttaaacagagttaactaccaaagctttcttaaaagaaaacatagcctaaaatgataaaaaggatactacattttagtttaatctattggttcctttggatctttcaattttttttataatctttcaattttgcgataaatgtacgtacgtagaatagtctttacatagaatagaccttaaaaacttttaaaaagccaaacaataaccggaaattaaacttggaactagaagaaacagagcaaacatatgggtttcaatctaaccgaaagataaccacacaataaccggagaatgaacttgaaccagttacagaaaaccatggttcaggtctttaactcttagcctcagtaatgatccttgaagaagtgtaggcagaaacagagagcgaccaacgttatgaatccttggaaaagacagagatgaaagactagagagcaacgagtcagctcagcctaatgaaactcaagcacccaaaagaaagcaactcanagaggatagcaatcttcaaagttngacaactcaaacgaattagatttataacc

SEQ ID NO: 75113 - DNA, 273 bp, Arabidopsis thaliana landsberg
ctaggccctctggtgggctgtcaatcattggtgcctgacctttctgttcatatcagcgagcgacatactgcactgctggcgtgtatatagaagggtttattcagtctaaatgaacacattcctattgaaaaccttataagacattgaggacaattattgctggaagacatttcggcgttgctgaacacattacaatacatgaatttaaggcctgttggaatctaaatcgtatgtgaaaataacaagcatgacctgaataaaatggtgaccgtg

SEQ ID NO: 75114 - DNA, 603 bp, Arabidopsis thaliana landsberg
cgccccatgtcttcgtcgatctcgaacgaaataccatcggaactcttgaacatgaccttcgacgacattttaatttttcgatttttctcaggaaagcaaggtagatgtaacaagattgtagaagaacttagagagcgatttgaagaaaaatgatgtaacgaacttatgaatctatgcgtctgtgtatttataagctccaactgtcacagtcggtgggatcaacattttcagtggagtaaaccaagctgaaccgggtcgaattttacaattggcccagtttagttgattcggcccaaaacttgatcgacatggattaaatgtcaaaagaaaaaaaggatttggttggtgttttatgcgagttgtagttattctcactcacttcaagatttgccatcaaagacaaagttcaaaatgttacacacacacaaaaacgtagatatacaaattcgggggtttaacatcacataaagctacattacatataatcttgtcaagctgaatgatacatattctagtaaaaaataattaacgctacataaaaatacactcgcttattttacaacaacacatcttcttttgagaagattctttttcaatgtcttg

SEQ ID NO: 75115 - DNA, 141 bp, Arabidopsis thaliana landsberg
taggattcaggttttaacgttaacgtttagggagtagggttcaggttaagggtttaaggataaaaatttatggcatacggtctacggatccaggatatggattttgcgttcagatttacggcttagggtggatttagtttg

SEQ ID NO: 75116 - DNA, 450 bp, Arabidopsis thaliana landsberg
  unsure (1)..(450): unsure at all n locations
aaacgggttactggatcggggacaccgatcgttcatacttttggggtttagggatccgtggggaagaaagcggagtatgggggaaatggcctgnnnnnnnnnnnnnnnnnnnnnnnnnnnnnnnnnnnnnnnnnnnnnnnnnnnnnnnnnnnnnnnnnnnnnnnnnnnnnnnnnnnnnnnnnnnnnnnnnnnnnnnnnnnnnnnnnnnnnnnnnnnnnnnnnnnnnnnnnnnnnnnnnnnnnnnnnnnnnnnnnnnnnnnnnnnnnnnnnnnnnnnnnnnnnnnnnnnnnnnnnnnnnnnnnnnnnnnnnnnnnnnnnnnnnnnnnnnnnnnnnnnnnnnnnnnnnnnnnnnnnnnnnnnnnnnnnnnnnnnnnnnnnnnnnnnnnnnnnnnnnnnnnnnnnnnnnnnnnnnnnnnnnnnnnnnnnnnnnnnnnnnnnnnnnnnnnnnnn

SEQ ID NO: 75117 - DNA, 521 bp, Arabidopsis thaliana landsberg
  unsure (1)..(521): unsure at all n locations
cctgnnnnnnnnnnnnnnnnnnnnnnnnnnnnnnnnnnnnnnnnnnnnnnnnnnnnnnncatcgtcttctatacgcacgcgaatgttccaccactttttgtcgcacgggctgcccgcaggaatataaatacccggctcaacggtaatgaccatgccgctttttaacggtacgccataagcgcccttatcatgtacatccaatccgatatgatgcgacaccccatgcggataataacgaccgacttcagcggcgctcttgatgatccctagttgtatcaggcgggacgataacacctcgcgggtttttacttccaggtcgctgtagttaacaccttccttgcacagtttaaaaacttcttcctgcgcatcataaacagcgttgtaaatagccttttgttcatcggtaaacttgccgtttgcagggaaggtgcgggtaacatcggcagagtagccatgatactcggcgccaacgtccatcaaaacaagctggttatccactttggtatccgtattttcctcat

SEQ ID NO: 75118 - DNA, 611 bp, Arabidopsis thaliana landsberg
  unsure (1)..(611): unsure at all n locations
agcaactacttgtcgggttttgtatatttaatttgttcatgttttattttaaatgtatttaaatattgggaacacgagactgtatcccactaaatcatcagacacgactttaaattattagaacttcgaaaatgaccatgaagatgagcttattttgtcttcgaacaatgacctaacaaaagatcgccaaaatcttaaagaatacaactaaagtgcgagatacgacaacttgaacgtagtttaataataattagccaagatgtagataatcacgcatacgaaaaaataactgattatggattatttctctttcgccgtctaaccattgagtataacacatatgaatagtgatggtccaccaccgcgagatatcatcattcatcacgagtttctccactatggaaagtgcgtccatgttctccattagattgcataattgacattgaatatagatctaccacaaaaatatccatcttaattttcatctaacgactatagttttgatgatatagctcgtaatggtagtaattcactaatgctccaacaaataaaatatcgagctaatgctccaacanaaaaaaaaaaaaaaaaaaaattatcgagctaaaagc

SEQ ID NO: 75119 - DNA, 417 bp, Arabidopsis thaliana landsberg
ttgcagagagtatgcattgctcagggtatgttagagtgcataacggcacacacgaggggcatcataaggttcatcatgaacttgtagtatgaaatgcatgatgatcagtggttgtgctaatttatgtagtcacctaagaggatctctaatagtagagttcttaggtgaatttcttaactaaaatcaaaaataattaaaaaagaaggatgtatagttaagatgagctcttgttttaagtactcattagatattttttaagagttcatcatcaagcacagattttgaggctgagagagagagatatagactaaagacctaatacatttacatatgccttaagcaataaagaagattatgttgagcataagacaatttttccctgacccaaaatcagttcttgaaaacaatcaatagtca

SEQ ID NO: 75120 - DNA, 184 bp, Arabidopsis thaliana landsberg
  unsure (1)..(184): unsure at all n locations
cgcgactagagcttgaccagctccacgaatccagttacccacagtgtaaattgctcgtcctagggtncctaattttttgtgattctccgattacccaaagtgtgaaaatgagaaggctttgttgtttttggtgtcgctccaccagatagagagaggtttatggaggcgtattgatgggaggatt

SEQ ID NO: 75121 - DNA, 558 bp, Arabidopsis thaliana landsberg
actaatgaatacagaagagacatatatataatcaaatatagatctaagttaagggcctcgtgccagacaacattcccctcaaaaggaaaagcttcactgaagaacatggactccatataagaaaaccctagcttttaacagagagagagagagagagagatgagcttaatttataaagaaataaaagctgaaagaggaggagacaagaaagcaatgatgaaaagaagagagggaggatattattaggaaaagattgtggaaatgtagggggtaaaaaaaacaaaagcttaataaaaaggcaattcgaaaaagatagaaaagtcgaaaagaataaacatatattaaagtcataatgataaaaaaaatttgatgacttatttccacctctttttttagttcatctttgaatctaataataatgatttcacatgtaaatccgtgagtcgtcaatattctagctcttggaataaaatgaacgtaaaactatctcgtgttttttttttaaaggagtcaactattttttcttggatatatttgattttgaatgattactaacta

SEQ ID NO: 75122 - DNA, 601 bp, Arabidopsis thaliana landsberg
  unsure (1)..(601): unsure at all n locations
atgcatttgtcatttcgaatgcacgatgataagcgcggtgaagtgatgctgcagaacactttcgcttccattatctctacagcctgaaatcaccggcagccttcaaaggcaggatactggagaatgccctcacaggactggtgatgatggtgaacgataaagaagtgcatttccgccttattggagagttcaatgcatacaacctgctggccatttacggagcagctgtttgtttgggtgaagatagcgaccaggtactcactgccctgagcatgctcagcggtgcggaaggcaggttcgattacatcatcagcagcgaaatggtgattggtattgttgactacgcccatactcccgatgcattggagaatgtgctgatgacgatcaaaaaactgcgcaagggacatgagcagagtgatcacaagtagtgggttgacggtggtgacagggacaggaccaagcgcccggtgatggggcagatggcatgtgacctgagcngacaagtgatcttcaccagcgacaatncccgctctgaagaccccaagccatattgcgggatatggagcagggactgagcagcgctgccaggagaaaatacatt

SEQ ID NO: 75123 - DNA, 461 bp, Arabidopsis thaliana landsberg
gttctgctgacggtcgcggtacggggcgggaatcgccgccgagccggtcagcgacattcccagcgcctttgtcagcgagttcatggtcgtggccgtgcccatggtgttgcaatagccggtcgagggcgcggagctggccaccagcttgatgaagccggcgcggtcgatctcgccggccgccagcatctcgcgggccttccagacgatggtgcccgagccggtgcgctggcccttgtgccagccgttcagcatcgggcccaccgacagggcgatggccgggatgttcacggtggcggcggccatcagacaggccggggtggtcttgtcgcagccgatggtcagcaccacgccgtcgatcggataaccgtacagggtcttcaccaggcccaggtacgacaggttgcggtccatgcccgcggtcgggcgcttgccggtctcctggatcggatggaccgggaact

SEQ ID NO: 75124 - DNA, 543 bp, Arabidopsis thaliana landsberg
ctttaatcaagacataagctctccagaaagctatatgatgaataatccgtttttgcatcaaagacatttatagggcatttgaaagtataaaattataagaaaatatgctgataaaaagactttggtctaccaataaccttttccgacctacgagtagcaaactgtatggtgaatttgccgaaataccatgaaaactgctttttatcggtcaatagtggttttctgtgcttaaggatagatttatatgcaataaagcatctacttttatcttcataaactttatagctatgtttctgaacctaaaacttctatcaacatttatactaactatctggactttggccttgatagctcaaaaaccttttgctttgacaaacccacccgcacaagccgaagtattcgggataagcaccggattcagcgaaagagattttgctatttcacccgatggaactgagattttttatacgctacaatccccacaaggtatttttcagactattgtttattgcacgaaagcagctaatggcatctggagcaaac

SEQ ID NO: 75125 - DNA, 440 bp, Arabidopsis thaliana landsberg
  unsure (1)..(440): unsure at all n locations
ggtacagagccccagaacaaacaatactatgcatgtccctcagagatatgtggttttgtttcatcacgcagagtctatatgctatggaggttcaagtaattcttcgagcaacnnnnnnnnnnnnnnnnnnnnnnnnnnnnnnnnnnnnaagaggaaataaaggacatggaaatgtatgcctacatgggctacgcaattgcaaatattaatgaaataagtcgctggactgtagatgcatctcgacaccatctgagaatatgtgccatcttgtcaggcgcatcaagttgattgaaaaatatcgacctgctttggaatcgaacattcgaaccaggtctggtccatgacccattctcatcactgatgtgggctggcctttgtacgccttttcctttattcacgggcgacgaatcgtcattgtagtagcgcatatctgcacagtg

SEQ ID NO: 75126 - DNA, 141 bp, Arabidopsis thaliana landsberg
tataaagggacaagtactatggaaagattgtttctttctcaccaagaatgtcacccattccggggggggtttttttctgattcctggaaatccacacaaacgtctgaataacgtcccaaacccaagtgaacatacccattt

SEQ ID NO: 75127 - DNA, 600 bp, Arabidopsis thaliana landsberg
  unsure (1)..(600): unsure at all n locations
atatcgaaagcccaacctctttcatccatnngtagagtcatacccccggacannagttcggtatggttgttactcgtatacanntatcagcctatgatccacnntgactaacatgcggtttgggagtcgacttgtcattaaaattcaacctagtnnaaaaccgacccaacctgccttatagtaattaacaccgtcgaannttccggtttggtgtctcacaaagtcacnataccgtccggatcccccttgcccatttagctttatcagcgtnngtttttccccattaagtttattattttttattaacttgatggaccagaaagtttttggttttgggatgaagtcacgaggacaagaagaaatggaaaaggcatcatgacttgtaagggttaacaacaagagatagaggttatatgcttacgcggtcctaagcacgaatactagaagcttagggttaggaccactagagatataatgcaatttggaagtcaccacaatgtttaagaattttattagcaactttggttgaaaataataaagaagaatttagttcgaaggtttctctccatgattttttgaaactgatggaccatcaaaaca

SEQ ID NO: 75128 - DNA, 432 bp, Arabidopsis thaliana landsberg
aattttaatattaaggcaaaccctgttgtcatgtgtctatcaattgcaaggctacgtgacgtatacagactcgcttaaattgaagatatttggctgcacacctgaagttttcactacgttgttactaacctgccactctaatactaagctgatacccctgcatatggctctccccagcgaagcacatatcctcaaagtccctaagtgaaaaccaaatacagttccagacttacgaacaaatatcctaacaggcaaaccaatcaacaaataaggcacaaatctcatgtcgatgttgtcacagtagtagagaagcgtaaacttacagcgccgagactttgttgtgtttgtaagcgaccaggttcacccaaatttgtgcgccatgttatttgaaatttacccaggatattacttccctggattctcgtttgcccg

SEQ ID NO: 75129 - DNA, 504 bp, Arabidopsis thaliana landsberg
  unsure (1)..(504): unsure at all n locations
gaaggcccagttntccgggaccaccatcatggtctttttccagtttggagtactggttatggagatgaatttgacgtaatcatcagggctcaggcggacgacgtcccgggtcaaaggtcttgggcgtgtaggtctttccctggtaaagaaaagaatcggggacgctgcccaggtagctgtccaggacgccggagacggccttttgccagttgggagtcagcacgccgttattcggggccttgatgacggcgtccagcatggatttaatgacggacatcatctcggagaaatggttggtcttggcgccgtgggtcagcccggagtaatcggattccggcagggttccgtacagggcgtacatattgactacgtcatgcggctcgccgccgtcgccccagttcacggagccgtgcatgcggacgtagttgatggctttttgcatgtaagcacatcgcgcggtgtagataggagacaggtggatggccggccccccgtttctgatca

SEQ ID NO: 75130 - DNA, 217 bp, Arabidopsis thaliana landsberg
  unsure (1)..(217): unsure at all n locations
gcagatggacaccagngaccaaagacgagaactngccgacccgncttcagaacaacaatttgngccccacaccgaggcggagcagcaagggaacggcgggaacttgaacaaccccggccccaacggaacagccggagnanggagaaacaaagcccccgaggaaccnggnnggcggcccgaaaggaccaccgcggaggananggacanagcagnccgc

SEQ ID NO: 75131 - DNA, 147 bp, Arabidopsis thaliana landsberg
aaaagttcaaaattatcaaaaaaaaaaaaagttgtttaaggcttagatgaaatatttatggtaagccaaatcttttcatatcattttctacggaatggaccgatcagattctagggtcaaaagggaatgggaccattctaaatcaag

SEQ ID NO: 75132 - DNA, 219 bp, Arabidopsis thaliana landsberg
ctttgtttgttgtgttgcgcatacatatatggcttctggttctggatttttaggtcagatatcgttcttgtttatagctgattttgccgagaaagatccttctggccgttacatcagggaaacgaactgtcttcgttgattcatgtgtgaatttgcattcaatctcgtttggttgagtgttttttattgctgattcattttgaaataatatccattctt

SEQ ID NO: 75133 - DNA, 492 bp, Arabidopsis thaliana landsberg
aaggtagtaccaaatattttgcttctttgtgggctctccatgtgacctcactgccaccactttttttccacaaaaactacttgcgattttgaatgtttggcaaaaacaaatctaaaattatgaggtggttagttgttaggcaatggtttttcttaaatttattgtgatataaatcactaaacctaaactttatgtagaaaataaaacgaagaccctttattagaaaatataaataaataaatagatcacaaaatcaaaaagtttcagtttaccaagtaaagtgaaacgaattgttgtatagggtgaaagaaagttactgtaaaacctaaaatttatggtcagatcgcaaaactaaatgttaactccactaatctattcggacattactcaatacgtgtgcgtacttacatacgtagtttatggaatatatagctagataaattgataatggcctgtgagaccttgggcctattcgattttttatatggttgt

SEQ ID NO: 75134 - DNA, 292 bp, Arabidopsis thaliana landsberg
gaatggttagtgtctatgaatctagagccaatgaaatgtaatgaaagttacattgtgtgtggccaggaatctgtgtaatttgtagccgactttcctcctcgaaaacagaaaaagaaaagacagcaacaaatagaaatatcatgaatgagtcacaatcctacaaatagaactcatttacaagtttgtagctgaacctaatttcatacgggaaagtatgaatgaaatcatgtcagaaccctcagttcctctgtagtgcgtctttaattcatcaaaccctttcttttctgaattt

SEQ ID NO: 75135 - DNA, 653 bp, Arabidopsis thaliana landsberg
tatttcgaagttaatttgatgcacattttaaaataaaacataaagaaattaaaccaatattagctctcaaatttctataaacaagacacatgaattaactcaagaatatattgtaatttattatataaaagtaatcatatagttgcttttagtctctagaaatgtttcctagagtggcaattgtataaatcaaaaattacatatgtacatttattacaatctaatctattatatgaattttcaggaggaatgggtagtgtgtagggttttcgaaaagagcacggcagcaaagaaagcacaagaacaacaacttcaatcttctcaaccatcttttggatctccatgcgatgcaaactcatcaatggcaaatgagtttgaagatattgatgagcttccgaatctgaattcaaactcatcaaccatcgattacaataatcatatccatcaatattcgcaacgcaatgtttactcagaagacaacacaacaagtacggctggtctcaacatgaacatgaacatgaacatggctagtactaatcttcagtcttggacaacaagtctccttggtccgcctttatctccaatcaactctttgttgctcaaggctttccaaatcaggaactcttatagtttcccaaaagagatgatcccca

SEQ ID NO: 75136 - DNA, 503 bp, Arabidopsis thaliana landsberg
tttcttagcgcaactccaattcctgagagtcctgtttgtattttctcaaagaactaatcttaaaagaactcacaggttatagtatgtagtaaatgacattatctactgtgggttttgtagacatttggcgaacaaccagcttagtggtcctataccctctagtctcatagagagactagactcgtttaggtacttcaaaaaaaaaacacttttctttctcatcctatatatgttttgagaaaccgacggttaactcataatccttagtatctaatgcagtatcagtgggaatccaagtatttgttctgcaaatgcgtgtgaagaggtctcacaaaatagatcaaagaagaataaacttcccagctttgtcattcctttagttgcatcacttgcagggctgcttcttctttttatcatatctgcagctatatttttaatcctcatgagaaaaaagaaacaaggtatgttttagtgaaagtacatgttttcaagtttatgggaag

SEQ ID NO: 75137 - DNA, 656 bp, Arabidopsis thaliana landsberg
  unsure (1)..(656): unsure at all n locations
gttggcatgaccatanggctcaggttacccctgaccaataggagataaaacgtcaagaaatcagtcggaaaaacactctaatatcaaaatcaagagcactaacaaataaacactagatgctgaaaaccagaagttggatcaagtccaagagcttttaaatgcttgcaagttacccttaattcaaactacatcaaaagaatctaccagataaacatgcagaactgtttacagaacagctatgttattagcctattactaatattcacaaaacatagggtactgccggaataaacattatgttcaataatttggtacttgacactttttaagactgtggcttagcttaactgaaactacattattcataacttagcatagggacctgcaacttagaagctagaacaaaaaaagatgataacatgattatctaagagcttcctgaaacgaactttatatagatccattgtaataagtttgaacagaatagtaccaccagaacacacaaaagaccttttaaatcaaataagtagtaacgatgagaaaacaaaaagcttaaatttacaaaaaaaataccattcaatgaaagccatagcgagataatataagtgattaagaaggatatatagtcagtgtgtatgacaaacagagagaaaata

SEQ ID NO: 75138 - DNA, 512 bp, Arabidopsis thaliana landsberg
tctaccacccctttgtcttttcgtattacgagattcccattacttctttattcctttcattctttttttctttcttccacacagagtcgtaacgagttcttcattttcatatatctccgtttctggtttttttttttttccctttcaagtttcaattttttcttctgggtttttcatttggtgattaaacgtttgcattagacgaatcctgtattgttccaagagtcaaaaccatgtccgatggatacatcaattcgaagaagactgatgatatttgcgaagatgtctgtggacaggtttggtttttggttttttttttgaaattggtttctgtaaaattcgtctgaaaaaaaaaaaatgtaactttttgaagaatttcatcgcgagagctttttttttctccgaaagaaatgatttttaattggtcagattgttttctgttgcttgaaaagatctacactaatatataaaattgattttttcatctcatatgaattggttttctttttttt

SEQ ID NO: 75139 - DNA, 624 bp, Arabidopsis thaliana landsberg
  unsure (1)..(624): unsure at all n locations
gaaatacacggaacaaatcaaataatggaataccggaaagactttagctgaacatatagagttttcgaaaagaacaacatgaaatgttaaatagtattagtagattaatgatgttttaggtattctatttatattttttgacatttttataatatatagcaaaattatttttcaaatatacagaaatgcaaaattttgacggatattctaactgataaaacatagctgatcatattttcaaatgtaaaaccatgaagcggtatattaattaactatcaacaaacaatttcacgaattattgtggaaattaatttaaattttatgataagatctccggttaataaaaaatgtaaaaacacttatgggtttttattttggtaaccgaaaaatttggaccaatcttcgaaacatgatacaaagtttttatcatttaatgtgtttatagttaacaaattcatagtggtttagtggttgaataattcatganaaagttaaaaggtttagcatttcatgagtcttctcactgtattttcaatcaaaattaaacggtaatgggggtgttgtagaataatggctaatcataattaanatcacaatgaaatacccattcagccactaaatcac

SEQ ID NO: 75140 - DNA, 679 bp, Arabidopsis thaliana landsberg
tttctggatgcactcaggatcggaaatcgaccaaaatcaaccttcactactttcatgcgattttttcaacccaaactctaaatccattcctttatcaccccgaatccacataattttcaaataatccacatgtgaaatggaaactattagggtcattaatagagtatggtttagagttaaccatacatttgtttcagtaatgtaaaccggtataagataaaccgggttttgccacttactataaaagaaacactctgtactattgttacattaatgagaaatgcagagaaactttacctttcttctttctctcgtctctaacaaacttgtttctattagtcatatttgaaaattagatttcttagatttacacacgtgtttgtaatcattttttaatgggtaagaattaaaattagatttttattttttggttaaggggtttatcagtgttttcatcttcttcttcacagcttcttcatatttttgaagagtttttgaccaaactagatcaaaaccacattacgctgcggagtactatttaaaattgtattcaaaataattacaattaattaaaaattaagaatttgaccttttactttacttaggttattggaggtcttacttttgagaattatttcttatttgggtggttagattttgtaatataaaattaatctaa

SEQ ID NO: 75141 - DNA, 344 bp, Arabidopsis thaliana landsberg
atgaattgttttcattttgtaacaacaaaaattgagagatacaaaattatatttttgcaaaatctggaaaatcaaatcaaagaaacaaactaatgaagaagagatgagaggagacagagaattaaattagaggagctgatgagagagagagagagagagattaatatggtcatggcggcgttgcagagcgctagaaagatgatttaaatctctcttcttgttcttccttcttacatatctctgtgtgtttattaaatactctctgtctcgtaccgacaaacaagttgtgctttttcatcagagtctcaaaaagctattccaacttcaatacactactaacccag

SEQ ID NO: 75142 - DNA, 352 bp, Arabidopsis thaliana landsberg
acaaaagatcacaccactatatactctttatatcaaagatggaactagttgaaaattttggcaagacttgtaatatacgcaaaggttgctttaagaaaattagatcaaatattaaatattataaaagaaatggtttaagaaccaacgcaattagagcggtgataatttgtcctactgttatcatcaaccaaacccattaacctctctatcttgcattatgtgtttttgttcacataacttttaaagaaaactttactgatataatgcaaaaagaggataagcctaaaccctaactctataggtagtgattgcagagaacaaacggtttatctagttatcttcatgtctgact

SEQ ID NO: 75143 - DNA, 773 bp, Arabidopsis thaliana landsberg
aatcgctggacacatggaaatcactaaaaaaagtcatcatcactgtaaatataatcatcattattgatccatcatcatgtttttgtattgactaaccagagaattcaagaaagtttcaccgaggaggaagatagcattgaccgagtgcataatcacaataaactgtagtaatgtttggataaattttagccacaagaaaatctaaaacaaagtgtctactgtcttggttaaaacttacaaagtcgagattgaaatctttagctgtgagaaaaggatagataatgaaccaaaacacaccatctgtgagcaatacagctcctgcacaagtctgcaaatccaaaaacatgttcagacttcagaaacagagaacgtaacatgttttgacacttaaaaatctcaggaagacttacttgaaaaagaatctgatgaatgtaacccaatgtagttgcaacctgacgtgtagacatgttttctctatcgtgtccgcttgaagatttaaacacattcgagttttcggcattcccgggaggtctatacgtcccttgctcttcatctactatactaactctgttttcaccattatcaggagacctaaatctgtatatggacaccaatgatccaagctgcaatacatcaagccgactttaggtttcgaaaaaccaaaatgtgtaaccattactaatctcaggtagatgtgaagtaccatgataaggtgaagaaaagccataccccaaagtaaattgtgaccaatgtgaaagtccatctgatatata

SEQ ID NO: 75144 - DNA, 335 bp, Arabidopsis thaliana landsberg
ctgaactcaagtgacgtgcagccgagttggagcgcagggcggagtcggcccggctaagtatgcgcggggtgcttcagcgtatggcctgggcgctgcgcaagcggtacctcaaacaggccgaggattaccggcagttggtagagatggcggagaaggcatgaaggtactcagttgcgttgcggcagtcatcggactggcctggttcggcttcatcgtgtgggccatctacaccgtggttacgtggctggtgagtaagtgagctacttcggtacgagcacggcgggcggtccgttcggcgactggcccaacaagggagatcggatcaaggtgaccgg

SEQ ID NO: 75145 - DNA, 519 bp, Arabidopsis thaliana landsberg
tattaccggtggggtgctgcctttgctggtagcatttctggctcctatggaatccatggtaatatgcgagtatgtggttttcattgtcttcatggccttatccgccctgatcgctgcaagggcaggaggttcatcgccagggaaagccgttgtgcgcatctgcttctggggcacgctggccatgggcgttacagccctggtaggatacctgtttggcgtacagactggttaaaccgcagacgtattacataaaccgcagtttctcctcttcaatatctatctggtgaaggtatttgcggatgatgtcttcatcaaaatgaggctccgcacggttttttgccagcagccactggcgctggtggtcaagtacagacaggtatattttcctgctttctgtgggcaatgcaggatcactgtcctcacgcattttttcttcccatcccgaagctatccgttgcagtaagggatgctgttcaaaatgtgtacgatagttggcagacaaatacttgaatgcatttt

SEQ ID NO: 75146 - DNA, 164 bp, Arabidopsis thaliana landsberg
cggggggacggaacaatgaaaaaaccaaaatacttttacattctcaaagggagagagacatctcgggaccttgttatttttcattcttctcccccctatcaacatttttccttcaaataataatttccttatttaattctaattaatcactttatttattgatt

SEQ ID NO: 75147 - DNA, 445 bp, Arabidopsis thaliana landsberg
  unsure (1)..(445): unsure at all n locations
tatgggtattaaatcgttgcaccatattgtcagaagtcggcgcacgaatacatctaaattttttcataatatataggtcttgactatttcaattttcatatatgttttacataagaaaacgagggtcagatattctattagtaaagttttttcatttttaggaagatctttgaaaatggtaaacgtaaacactggaacacatgattgtgcatgcattcatnnnnnnnnnnnnnnnnnnnnnnnnnnnnnnnnnnnnnnnnnnnnnnnnnnnnnnnnnnnnnnnnnnnnnnnnnnnnnnnnnnnnnnnnnnnnnnnnnnnnnnnnnnnnnnnnnnnnnnnnnnnnnnnnnnnnnnnnnnnnnnnnnnnnnnnnnnnnnnnnnnnnnnnnnnnnnnnnnnnnnnnnnnnnnnnnnnnnnnnnnnnnnnnnnnnnnnnnnnnnnnnnn

SEQ ID NO: 75148 - DNA, 232 bp, Arabidopsis thaliana landsberg
  unsure (1)..(232): unsure at all n locations
acccacccagaacggcangcgccggtgaaagcgacgacaccgggcccggcaagccccccagacaaacaacacgcaaaaaaaacacgacagacggccagaccgggaaacacacgacgccaccaacgaccccgagcagacagacacggggaagaggggcccaccagacaacncaacacaaaaccgggggcacccgaaccgaaagaancaccngaaacgcagccacccagacaca

SEQ ID NO: 75149 - DNA, 350 bp, Arabidopsis thaliana landsberg
atgggtccttgtaccatcactgcgctctctttcctggagactgtcagtggcagagtaaaagcaaacagccagagtacatgttcatcttaaggcgaagtacagtggtagcatgcagtaatatacctaacttcagggtactatctgttggtctgaagaatatcgttccctgcgagaataagccctgatgttatactttcaccatccaaccttccacgggcaagagaacagatggctaccgatagacacttgtttatagtctccaaggcagcagaaaatgcacccaccctgttgtgtaactctatggactgagatgatagaaagcatggtgaacgctctattaaaagacttac

SEQ ID NO: 75150 - DNA, 347 bp, Arabidopsis thaliana landsberg
  unsure (1)..(347): unsure at all n locations
ccgactgtaatcggcggaggtctccacgtggcgctcggtattaaaatcacttcgtttgattggtcggtgaggcaaaagtcgactgtgttgactaatttctccgccgtggattcgcttctagagatatctccgggagtttnnnnnnnnnnnnnnnnnnnnnnnnnnnntttgcaaattatcgatctcgataacggcggattcgttcgtacgactctgaattgggaaaacgttactaggtctagctcaacggttcaagccataggttcttctcatgagtttttgttcactagctttgaatctagtagaaggaactcgaattcgataatggtgtatgaccttcctagctg

SEQ ID NO: 75151 - DNA, 558 bp, Arabidopsis thaliana landsberg
gcagcttgggctgtagcgtgctctgtgttaatgtaatcttctgcccatcggggtgaatggtgtgtacgagacgtcgtcggcaggcttcgtgagcatgtctccttgtaagtggggaatcatctccgtgcactatgcagcaacagcaccattacattgggccgcgcacagcactgcacgcgcacagcccggatccggacaagactcctcaaaacctagaagcatcagcagcacacagcacccttacgagatcgtactgaactcggatgagcacacaacaacggtactgggttgtgtgtccgtgcagaagcggcgctggttctgccccacttgcgttgaggaccgcaccgagcggcagaccaggcggctcagcaagcggcagagcaagaaggagaaaaagaagcagcgcaggtcggggcggccgcgtaagcaccggcggcggtacagcgatggggacgacgacgttggcgatgacgacggggcaggggccatggacggtgctgaagctgacgtgtagggtgctggcacggacggcgagtggccgggaggccgtcggaaccg

SEQ ID NO: 75152 - DNA, 481 bp, Arabidopsis thaliana landsberg
  unsure (1)..(481): unsure at all n locations
cttatgcccttgaatttatcgcattacaaaacgcaggaaaatgaacggaatagggttctcttcaacaaaaaaggcagctattccgatccggaagcatacatggggtatgggctgcctgaactctgcaaaatgtaccatgaacatnnnnnnnnnnnnnnnnnnnnnnnnnnnnnnnnnnnnnnnnnnnnnnnnnnnnnnnnnnnnnnnnnnnnnnnnnnnnnnnnnnnnnnnnnnnnnnnnnnnnnnnnnnnnnnnnnnnnnnnnnnnnnnnnnnnnnnnnnnnnnnnnnnnnnnnnnnnnnnnnnnnnnnnnnnnnnnnnnnnnnnnnnnnnnnnnnnnnnnnnnnnnnnnnnnnnnnnnnnnnnnnnnnnnnnnnnnnnnnnnnnnnnnnnnnnnnnnnnnnnnnnnnnnnnnnnnnnnnnnnnnnnnnnnnnnnnnnnnnnnnnnnnnnnnnnnnatgctctatgcaatatgggtctgc

SEQ ID NO: 75153 - DNA, 523 bp, Arabidopsis thaliana landsberg
atttccgctattcgcgcagtagtattgtgcaataacacttgtttttgtaacgaatactggcgttgaatttttaataatggtggttgtggcagttgccgtgcaaccggttttcgtgttttctacagtaagcgtataatcttcgtcgtcaagcaaggtgtaataatcctgatctgcgcctgaatcgtttgtaccatctccatcctgcaaagtaacaggatcaacaatgggcgttgaggtggcggaagtccagtcataagtatagtcaaatgcaaagggtcccgtcaccgaggcatcggtgatgtcaacctgaagttctccttcgtagactgtactattacatgatgtattccgaaaaggcgttaaagtgaccaccgggtttacgtgctagtcttagatgtctactctgaaaggtgttgtttcacaacctaatcccacaacgggcagggtagctgctgctcctccttttcgtgtcgcaatgacataataagtacctgcacccatagaagggtactggccgggcgca

SEQ ID NO: 75154 - DNA, 249 bp, Arabidopsis thaliana landsberg
agactatcgaaccttagtctggttccctcaagtttctagatagctggctgacgcgtctatgggtagctgaaaggcattgggggcccccctacattaaacttaaatgtggacggcgtgttgtggccgacacggataagctcgggcattggtagagaactgcagcgtgaacgagcgttacggccactgcctacctaacccacggggtgcataacagagacggtaggagcgaatcgtagagggacactactg

SEQ ID NO: 75155 - DNA, 600 bp, Arabidopsis thaliana landsberg
  unsure (1)..(600): unsure at all n locations
cctaggacagcaaatgttcgcgtagccatggtgtcccgagctgagatgacctctgcatgcctcatcacctcgtctgaattgggatcctgctgcaccaagttatggttttgtgccttcactgacgagtccatcacgtgttcggcaggcggannnnnnnnnnnnnnnnnnnnnnnnnnnnnnnnnnnnnnnnnnnnnnnnnnnnnnnnnnnnnnnnnnnnnnnnntagatccgtcacctattccatggtcggattgggaagcgtgcgaagtggccgacggctggacttgcgacgatgtgtttggattgagactcgggatatccccaaggtgggaatatggatcctggccattttctagaggatacgtaatctcgctataaggcagcagaggagactcatgcagattaacatgctggagttcttttgaagatggtttaagaactgtcaactgataagccctcgtattcgatccaagcttttcgacttgggttagattgctcattgccagatagacgcatgtgcccaacatgctcgatgtaaacaacccatcattccagcactgtgaacaaaatcagcaaagagctcttaagaggcaatacata

SEQ ID NO: 75156 - DNA, 481 bp, Arabidopsis thaliana landsberg
aaaacgaaaattggcataataaatagtccgcaatagcaccccgacacgcgatcggcggcgtcggatttgcattctggctagcttaaataatagcacgccggatggcctattggatcgcttcaggcggcggctttgcgggggcggccaacggcttcacgaaagggcatgagcttcacgccgagcacctggaccttcgccttgactttgaggcttgtcagggcggcgaattcatccactggccggtaatggtctggaagattgtcgacgcccggccatcgttccgtggccggatgaaaatagaactcgctggttccgcgggggagacgatcaagaaactgcaagacgcgtgtttcgaccatcgcaccgctgtcattcaatccgaacacataatcgtttaccgccaagcccgccttgattgcgcgccgccgcagaaggcgagtttgagcgagaaaaaaaatccaggaggaaaggcggtcgcgaa

SEQ ID NO: 75157 - DNA, 456 bp, Arabidopsis thaliana landsberg
  unsure (1)..(456): unsure at all n locations
gcaaatgagaatctggaccatgtagctaagaagattgataaggaacgacgagcatttcattaatgattttgaggccttccgcgatagcggtactagggcttggcatgtaattggagccgggcttcaacgttttgtccagatgactaactggaggtatgagttgaactacagccataattcatgcaatctaacttatcaagtgtcactaaccaatgtcgatgtgatttgtgtttggataggtacatggattcagacaaaagggttcagcatgtacttgatgcttgtggtgtgaataaatcactgaagaatatgggcgttaaagaaggcgataccgtcatcgtaggagaggtttgtttgagtttctctgaaccttttgtttgttcaacatgtacttgatgctgttgttagtctggggnnnnnnnnnnnnnnnnnnnnngtgtgtgtgtgtgtgtgtgt

SEQ ID NO: 75158 - DNA, 562 bp, Arabidopsis thaliana landsberg
gagcacctcccgagcgagagcctccgcgatggcagcaacagccgcaaggtcttcatcaagacctatggctgtcagattaacgtttatgactcgacgcgcatgagcgacgctctggcccgcgacggctatgaaccgacagaggatatggaagaggccgatctcgtcctgctcaatacctgtcatatccgtgagaaggcggcggaaaaggtctattccgccctcggccgtctgcgcgagatgaagaagaagaaggctgcggccggcaaggagatgatgatcggcgttgccggttgcgtggcccaggccgaaggcgaagaaatcctgcgccgcgcgccggccgtcgatgtcgtgatcggtccgcagacctatcaccgtctgccggaagcgctgcgcaaggccaaggaaggccagcggatcgtcgatacggaatatgcgctcgaggacaagttcgagcatctgccgatcgccgaaacgaagaagatccgctcgcgcggcgtcacctcgttcctgactgtgcaggaaggctgcgacaagttctgcaccttctgtgtggtgccctata

SEQ ID NO: 75159 - DNA, 581 bp, Arabidopsis thaliana landsberg
acatttgtgcccattcaccatttttgctcaatttcattcattccctccacttttcctaacttattaattttatctataatttaatctttcttaattacaaaacattaaaataaatccatcatttgtgattttagttgaaattaaaaaacttacaaaaatatattactctctttcattattattccaaacaatgatatacacttcaagtcaaattttcgtataaacgaagatatcgaaatttcttgaatttctttcatattcatttgatatcattatgaataaattgtaatactacctacagcaattattttagaaggaaaaatatatatgaatcccaaaaagtaaaataaaaactaattaagtgaaagggaaagtaaaacaaatgagagatagagtttctaatgcttatgagcagaagtgcaaggagatggaatgtaactatgatcagaaggtctaaacctaagcgcacagcttaggttacactctaacttaacagatcctaatggttcgactcgccaccgagttcttgagccacctttgagctcgaaagtaataacatcttttttaaccgcatagtctac

SEQ ID NO: 75160 - DNA, 403 bp, Arabidopsis thaliana landsberg
tacagcagatgataagacatgatggatacagctacgttttatatagatcgtcgcctaaaagccgaaaccatcattaattgtgatttactgtttctcctccttacgtcatctcaaacgccgccgttttcgattctctcaccaagacagaaaccacaaccatcacttcctaccaccttcttgtcggacacaacaaacccgtctcgtgacttacaacatctgtcttcgtcatccactgggtaatccaaagggtcaacaataggcccaaggtcccggtggcaacccgtcattaacgcgggggcgagaaaacaaccggcatgtactcgcttatctttactcctgctagcctaacgtcttggaaaggtccccttatggcctcaggaccttattaaaaaaacaggttttt

SEQ ID NO: 75161 - DNA, 524 bp, Arabidopsis thaliana landsberg
gaatgcagaattgtttttgtattttgtttaaatattcactccaaaagcttattattaaataactattcatataatcgtaaaaaaaacacattaaactataaataaaagctcatatgtataacttccactaaattatcacttacccatcagaaaaagacctttcagaaaatcctggttgacataatttagcttattgatatgaataataagaattatatgcaacgggaccaatattattgaaaaaacgaattcttttgacgtcataatagatgttataaaaattaattgcagatgttcgaaaattgaagaggattaaaaaacgtgagaacaagccaaaaggaagactctgtagttcgttgccacctcgccaccacccaaataaatggaagagaaaaactatgaaattttgcatatagtccttataccaagaactaatatcgttaaaatcgccaaactaataatttgactagaatttatgtaccaatcaatcttcacccaatctgaagatccaaacatttcttttg

SEQ ID NO: 75162 - DNA, 443 bp, Arabidopsis thaliana landsberg
cacgtctatgtttagaagaaattcataactcataagtgtgtgtgacttacaagctcatccacacgactcgtaaaagcttattccattaccaacctttatactcttttctccatcgttttgacgtttgaaaactgacatcgaatttaattccaaacaatttcttagttgctcatatcataatcttcattccccacgaacactaaataacttacttttaactattaatcttcaacgatcttcaaacaaagaaatgtcgtcattacatccaaatcatcactaatttgggagaaaataataataagcctactatcgaatttacatcttttgaaaaaaaggaataagaagattccctcatctgggagcgaaagagacggtgatattcgctggccgttttatattcgccgaccatttgttcgattctaaatacagttagtgaagttttt

SEQ ID NO: 75163 - DNA, 791 bp, Arabidopsis thaliana landsberg
gaaatccgagatttaaaatttgaaatcatatttcgatatgtatttttggcagcgtttgatgttttcataaaatcatgtttaattagtatttcttaccttatatatattaatatatatattgtatcttcattactttctttcgtaatatttcttatattttattgttatcatcacttacattcgatatgtctaatcatattaacaaaagataaaaatgtaagatatttaattaaaataatactaaaatacaaatattttgatgaaagactcatataatgtctcactaatggaagtataattttagtatgatttctctaaataaaaaatacaagaaatattagttatcatattgataaaatacccatagagtatcacagaaatgacaatgatctaaatatacaagttgtcaaaatgaccaaagcccacaattcagcccttaaccgtgtctaaaacgcgttggaagtcctccaaatattttctacgaagcttcttcttcatctgctcataatttaattttctgcttgcttggaaagtcatcataattttgggaaatcaaaatacaccatttctttgtatttattctcttcccaaacaagcaaaataattataaatgggagaaaatatattaaaataataatataaatagtctgcacttaattctttatttataaaatatctcttaaaacacaaagaaataatggcttactgtattctctttttttcatgttaaagatattagaatatgaccattgaactttctatattgaccctatatttttaccaaaaaaaaa

SEQ ID NO: 75164 - DNA, 464 bp, Arabidopsis thaliana landsberg
tcttttctttcgttcaaaacaaagatcgatatattttctgcctctgtatagcttacccttgcactttcattggttttttttgtaatgctaggaaggtataaagaggacaatagattcattctcacacttgaaagctcaaaatcaacccaaaacagaaggtacttatagcgatgtctctagatattttctgctttgagataaaatcatatgacaagttcagtgaaggtgtcaaaagtcataccattgtgattgtattcttaggaataaggatcaggggtttttcgatgcggagacaccgtaccgaaacattcatattagattagattaggtactaagattcatgaaaacccaaaagaaatccaaaccggaatcttggtactaagggtaaactaccctacttatgataatagaaattacccttgtaatcttgggctcagatactgagaaagacttattgatgacat

SEQ ID NO: 75165 - DNA, 512 bp, Arabidopsis thaliana landsberg
agcacgagtcgatcggcttgctggcaggcagactctggtttgccgtttgccaagcatgatggaaatctcttggccttccggggacgggcgcaaccacgataggctccttcgtgatagggttgacgtctccgacagcaatcgcttgagctagcgagctctctaggtccgcaccgatgaagggcaagttctcgatgtcaagatcctgaaccgcatctgtcagaaggacaagctgcttcttcgttggacagtacacccgctggtagatgaaggtgagttcagcttgtttgaatgccgccaggtagttttcagatactcgatgtttaccatcaaactggagcatcttgacgactcgttccggggttttgtactttcggatcatccggtacgccgtcttgagccccatattggcgatgctatcgaggtagtcgcagccactgaagatggccatctggcgaaactcgccgtcggtccaccccgtcagtgagatttctcggcaggcgcagaagtctcgc

SEQ ID NO: 75166 - DNA, 145 bp, Arabidopsis thaliana landsberg
ctttgataatttcttggatggccttcttggttgaagaaggcatttgtactctatgcacagctttcttttaaattctcagatcaagaataggggagcgtgggcttgttttagaccctacaacgcactataacgccctcgttgacga

SEQ ID NO: 75167 - DNA, 524 bp, Arabidopsis thaliana landsberg
caccgacacagaaggcttgggccagccacggcctgaaagaagtcggtcgggccgtgctttaccgcttcaatattggaggttcggccgtatctccagaagtgcaacgggacgagccgatcaaccggcgagccttgtcggaacccggttatgcagggaaaaaagaaatgtcggtatcatgggggcgccgttcccggaggggacgcctggcacacgttgcagtggcccaagcgcgatgcgaagaactggcaaaggaagctgaacgagaagttggcgcgggacgagcgcaaccgccgccgcaaagaacgacggctggcgaagatgacagccgaggagcgggcaaaatatgacgaatgggtgaagtatcatcgcccgggatcgaaaattgaacgatcgaagccgcgcgcggttaataaggcggccgaggaattcaggaagcggatcgagaatgacgagccgcggtcggtatctcccgaactcgccgagatgcaggccaagattgccgcgcttgaagagatgcgggatca

SEQ ID NO: 75168 - DNA, 495 bp, Arabidopsis thaliana landsberg
gactcctagcatccagggagctatggccgtccgggcaaacccaccatcgaggttgacgtgtccaacacaaatggcgttcatgtttccaccctcaaagcctgaatcggtttctaagctgctgaaatccaaccttgagattcttttcgagatctttgaatcttggttcgctggggcggtattcgaagagttagcttccagtagaattcgctcttccactctgatcttggagattggctcggcctcgctagctccatagaaaataaatgatacacctttcacgccacgacgcatgatatcgagctcggaggagaaaactggcgcgccacccaggcacagtacttgaacaggcaatggatttaaaaatttgccatactgatccacgccacccacttgctctagatgctctaggacacgaaggaagaatgcaggtgaaccaaacgcaacttggacattgtggcggatcatagcttgcacgagaggagcaggattaacacc

SEQ ID NO: 75169 - DNA, 268 bp, Arabidopsis thaliana landsberg
gccattgtagagtaataggtaggtgcatggctggttttttttggtatttagaggatagaattgtccttgtggttgtcaattgcgaaagcgagggtctagccacaggtagcctagttgatgaacacagaggggttccttattttttgtttctctcttgctagcgcgcgagggatctcaatcttgcttagagctaaccttttgggtttacgagccaattgaatgatcgtgagcacgttgaaaagaataagatctagttagagtaactagg

SEQ ID NO: 75170 - DNA, 449 bp, Arabidopsis thaliana landsberg
  unsure (1)..(449): unsure at all n locations
aaagccaccccctgtggcaagaaggctagagcccacccagttcaaactttgtgacccgaacaagacccccgcggacaggggaaccagaagaccccncggcccgccaaaagaggnaccagncaggaggaagggagacgaagcgcccacagaccncgcggggccggacacggaacgagagcaaaaggagncccacanacagggaacaccccgcanagcaccagagggagcagagacagacgccagggaagggaaaanaaggcacaaccacggaaagcacagcaagaggcagngaggcaccaacaaaacaccacaagggncaacagaagaaggaagaaccgccggaaaggagcgagcgaccacaagagaagaaaacgggacagaaagagcgaaagaacncaaaaagaggccngagaagcacgaagaaaccacagagaagccagcccacaccg

SEQ ID NO: 75171 - DNA, 497 bp, Arabidopsis thaliana landsberg
caaactcggtgttattatacgtgggttcttatctaaagctattaattgcctcattatttgtaacagttctatacttaggcggttggaatatttctattccggatctatctattcaggagctataacgaagggatcaaattattggaccaacacttggtctctttattacattagctaaaacttatgtgtttttgttcgtacctatcgcagcaagatggactttacctaggctaagaatggatcaactattaaatcttggagggaaattactcctacctatatcccttggtaatcgattattaaccacttctttccaactcttttcactctaaattcgaaacgaatctaaggtatccattatttgttttaaacacgagacagaaacacggggaaaagctattcactgctaattacagtatgcttcctatgattaggggtaagatgatttatggtcaacaaaccctaccagctgcaaggatattggcaaggtttcatga

SEQ ID NO: 75172 - DNA, 534 bp, Arabidopsis thaliana landsberg
tgatgattttatattacaggtcgtgttgtattcaatacgcaattgttcattatcttcatggacagttggtctccttaattagtttcctaattagactttgctttcgagataagtctcacacaaaattgaattgattcaaacatttacataacaactaattggagccatgcatgatctagaaactactcatccgtcctatatcctagatcattaagtcacgatccacggatattagtttacgaaactttaaatttcctatacgtatataacattatgttattatcgtttgcatcttgccaaatttgtttcggactatatgcaatttacgaaaagaagaagaaaatcattaacatatgtctcacgtacactcattaaatttagatgcctatacttattaacgtgaaacaccgcaaaagtactttatttgtaaacctaattaattcattctctatcaaccaaaactatgatatgatataagactatatatacatagaataataggggctagacatttatgtgctaaaacttaaaaag

SEQ ID NO: 75173 - DNA, 517 bp, Arabidopsis thaliana landsberg
tgatttcttaaccggtgcctggacctgtaccaggaaacacaccagtatggaggcatggtcagtacttatatcaatatttccgacacttacagcagcgagcgggaatggacaaaagcaaagcaatttgctctaaaggccctggaagcggcccgtcaatcgggaagtgccgagaccctggccgaagccagcgaatggtacagcaatatcagctaccgtactggcgattacaaagacgcatacgacttttacgtgaaatataaaaagcttcgcgacagtctttccaacgaccagatcaaaaaactggcatacgaaaaagacctgcagtttcagtatgaaaaaaaagcagctgccgatagcctgaaacaggtgcacgaagataaattggtagaggcccaacgcaaagcagaaagaacagaaaggtatgcgctctataccgggctggccatgcttctggtaattggcggatttaattaatatcgctttcgattacccacaggcaaaacacatcattgaagaa

SEQ ID NO: 75174 - DNA, 538 bp, Arabidopsis thaliana landsberg
  unsure (1)..(538): unsure at all n locations
tcgagagcggccttgatcatcctggcgcggttggcgatgttctgcagttctatgccggtgcgcganccctncagcacagctgnattaaagccaacgccatcatcactgatggaaatggaggtagattccggctggctgttaatatgcacgttaatggtgcgggcgctggcatgtttgatgatgttgttgatgatctcctggatgatgcgatacaggatggtatcgttattggcatccacaatataaaaatggtccgaggcagtgaaatgcgtggtataccgcccgcttttttcagggaaaacaggagctgcctgatagattcgataatacctatatcatgcagacggttgttctgcaggttatggctcaggtcgcgcaggtccttgatggcctttcctaaaagttcatctgtttgttcgatcttttcttcggtggcggcatcacccatggtgttcaggttgagcctcacaggctcaatatctggccgatgtatcatgtatcttctggcttatgtagctgaacgcctgctcctggatct

SEQ ID NO: 75175 - DNA, 282 bp, Arabidopsis thaliana landsberg
tatcgccaccaccgcccccgctatggtcattatacccaccataccccgagttcccgcttcggtagctttcgcctccgccttcaccaccgccttgacctccagaaggagcaggtgtactgcacctcatgcattgagttcgagacgcaaagttctggaaattgcatttaggacaattccagtctccaggacggaatgtgatggaatgtccaccaccaccgtcgtcaccaccactaccaccaccgtcttcagacgcataaggatggtggtgatggctgtggtgag

SEQ ID NO: 75176 - DNA, 397 bp, Arabidopsis thaliana landsberg
  unsure (1)..(397): unsure at all n locations
ttttatactttgaggacaatctcggaatgtcacgcgttggctgaaagaccgaagagagcctcgtttacgtctgaggcaagacacaggaacattggcattgactgagtgtggactnnnnnnnnnnnnnnnnnnnnnnnnnnnnnnnnnnnnnnnnnnnnnnnnnnnnnnnnnnnnnnnnnnnnnnnnnnnnnnnnnnnnnnnnnnnnnnnnnnnnnnnnnnnnnnnnnnnnnnnnnnnnnnnnnnnnnnnnnnnnnnnnnnnnnnnnnnnnnnnnnnnnnnnnnnnnnnnnnnnnnnnnnnnnnnnnnnnnnnnnnnnnnnnnnnnnnnnnnnnnnnnnnnnnnnnnnnnnnnnnnnnnnnnnnnnnnnnnnnnnnnnnnnnnnnnnnnnnnnnnnnn

SEQ ID NO: 75177 - DNA, 568 bp, Arabidopsis thaliana landsberg
attgccacaagacaccgtctgccccccgccactacaacctcttcaaagaagacaaaaccctaatcatttggacttataggcttgtatttgtgtgagcttttatttaatgtttgggcaatcaaagcccaaatggttttaattgaatcccatgaataaaatacgaaaaaattaaaagaaaataaaatttaaactcaaaatggcgatttttttggcgatttatatatggttacttaaccgttctcccaccatcactctggtgacggttcttctctatttttccgacgatgtggtttcctttcgacccatttctccgacggttatctccatgactataccaccttctcgtcgtgatgatattggagcaattgtaaagatctcaagtctatttatacccagatttgcaattcgtctattcacagttcttgaaaaaattatccctcttagactccctttccccttttgatattatcacactctacgcaaaatggctgataatctacgaacggcagtacaagacattaacttgggtgtggatgacgaaccagtggcgctttcggcagcagtggtg

SEQ ID NO: 75178 - DNA, 627 bp, Arabidopsis thaliana landsberg
  unsure (1)..(627): unsure at all n locations
gctaccggcatcgtgctctcctcgcatgaagcactctgtcgcaatactttacgatcggcaatgagccgcaatcgaatgccggaccattatcgaagcgaccctaaaacgatcaatatcacgcccgatagtaccaacagaatcccccgcatccgccatgcgcgatcggtgctggccaatggataggcgtcaagggcgcggcgctcttcaaaataacgctcgtcgccgcctgcatccagttcggcaatccgcacagcgcgttcctgctccgccgccagccgtcgccnnnnnnnnnnnnnnnnnnnnnnnnnnnnnnnnnnnnnnnnntcaacaccgatcataagcgacagcaaattcaacttactgctccgcaattcttcattgtggaggaacaagcatagcgaagtaacggtttcaattacaacgtcgcgttttctcagccgctcagccatgcgcgatcaccacgacgcggacgagcgactacgccttccggcccgtccacgtntcccagaagggcgtcagctcggcgggcagcgatcctgcgaactcgtcgtcgagcggatagtgcagcatcgcttcggcgacagcatcgagcagcgcgttgccctgatcgtatccttgcggcgcttg

SEQ ID NO: 75179 - DNA, 293 bp, Arabidopsis thaliana landsberg
  unsure (1)..(293): unsure at all n locations
caatccctttcttcacacctatnnnntatcgactcagagaaaaataagtgcgaggagaggggggagaagggactttaacaactgaccgatgagagatcgggggttgggagagggtaccaaaacagatatgggttgctcgaataccctgagaaagacaggtgggggagaaataacagagaactgaacnnnnnnnnnnnnnnnnnnnnnaacgagcatgggattgcgagacgcgagcgaagagctagacgggaccgtaaagggaagggacccaaagctaagactcttgagccctt

SEQ ID NO: 75180 - DNA, 810 bp, Arabidopsis thaliana landsberg
cctaaatactatctcctcattttgtacattcgaaattagtgattgaagtcgccaatttagggtatcaattagcgtattctaagtctactctacacttttgcttgctttgtcatcatacaaacgtatgacatttccatagcttagatttggacaactgattttctataatcaaattagaagaaaattgtattagcaaactaaaagaaagtcacaattattatacgaataagagatctaaataatacgatcaaacaaaaaccttaggattttataagaaaaagtgtgaatgcgtcagtaatctgaatattgtccacaaggataaataattacccaatcggatcaaagtgaagaaataataaatttgatattcatcattcgcattttccgatcaaattaagtttgccaaaaatcgtaactttgaagatcaatttataaaaaaccaaagatgtggacgagtaacaatcagatcgtgaaccaaaacaaagaacgactgaaacgatatctcggccagattgatttccctcgccggttcatcaaggactcagagacaccgttactctctcttgccccatttttaagaaccccgaggtttttctttttccaaaatcaaatccaaaaacacttaaattcagaaactcagatccaatcaaagagacgagactaataaaagtaagacatttaataaccctagaaatcgagataaaaaggcttccgagcgacagagaggtatttataggctgatattgactgatgccctaaattctccaagacaatgtaatttgcttttgggccctttgggctgaaatgtaa

SEQ ID NO: 75181 - DNA, 619 bp, Arabidopsis thaliana landsberg
aactattcttttcccaaccgcttttttaatgtttagtctaaagcctttctttgtgccttgtagattctgtgagagagatcgatgaacatgttgaacaatttttggtttgcgatgacgtggctatggttagttatgtaggtttgaattcaaggagtaaggaaggcgttgttgtgcatgatgttagaagagagattctttgtgctaaggaagaagtagggagagagatcgatgaacatgttgagcaatttttggtttgttatgactcgactgtggttagttatgtagctttgaatccagggagtaaggaagacgttgttgtgaatgatgttagaagagagattatatcgtctttggttctagaaaatcctggagttgttcttgaagatgtctaaagacttgcgaatacggttagttttagtgatttgttagatattaaagttttgatgagatatttgcgttttatcagagtaaattaaggtttgatttagctaagtttgatgaacatcgatctatataggacttgaacacaaagaagatgaatcgtgtcagacatcgttgagaaaagtgttcatggtttgctagaaaaaagagaaaatttaatgaagctaatctttatgat

SEQ ID NO: 75182 - DNA, 491 bp, Arabidopsis thaliana landsberg
cattgattcgtcgggtaacgcaattgaatttcgaattttgattttatagggtttatgcttttgatctttgtcagttagattcgatttcaggccatttggagttatgccttcgctgttccatttgcttacagttgtaggttttcctgtgagaggcgtgtactctactttttcttgggatggtttcagtatgagcaatcaatcgaaataaggattaggatactactaatgataatgtcttgttctgcgtcaattgtggataaacttgagctggtgatgtttaccactggttctattcggatgtaaataatatgggatgagattggcgaaagttaccatgaaagagatatgatgctgctagaacttgagcacgaatgtctggatatatacaataagacggttgaaaaaactctactgttcagagctgatttcagcgaacttagctcagctgaagctgagattgccagcctcatgtctgcgcttggtgaaaaagt

SEQ ID NO: 75183 - DNA, 396 bp, Arabidopsis thaliana landsberg
  unsure (1)..(396): unsure at all n locations
nnnnnnnnnnnnnnnnnnnnnnnnnnnnnnnnnnnnnnnnnnnnnnnnnnnnnnnnnnnnnnnnnnnnnnnnnnnnnnnnnnnnnnnnnnnnnnnnnnnnnnnnnnnnnnnnnnnnnnnnnnnnnnnnnnnnnnnnnnnnnnnnnnnnnnnnnnnnnnnnnnnnnnnnnnnnnnnnnnnnnnnnnnnnnnnnnnnnnnnnnnnnnnnnnnnnnnnnnnnnnnnnnnnnnnnnnnnnnnnnnnnnnnnnnnnnnnnnnnnnnnnnnnnnnatgagttggggccgacaaggcggggaaggctctgcggtcatgcatcttctgtatccggaccctatcgaaccgcgagaagacttccttggcaggggagatcagctcatgacgcttcgagcatatgaga

SEQ ID NO: 75184 - DNA, 449 bp, Arabidopsis thaliana landsberg
  unsure (1)..(449): unsure at all n locations
tattcctactatggaaggttatatgacnnnnnnnnnnnnnnnnnnnnnnnnnnnnnnnnnnnnnnnnnnnnnnnnnnnnnnnnnnnnnnnnnnnnnnnnnnnnnnnnnnnnnnnnnnnnnnnnnnnnnnnnnnnnnnnnnnnnnnnnnnnnnnnnnnnnnnnnnnnnnnnnnnnnnnnnnnnnnnnnnnnnnnnnnnnnnnnnnnnnnnnnnnnnnnnnnnnnnnnnnnnnnnnnnnnnnnnnnnnnnnnnnnnnnnnncagcatcaatcccctctgctattagtagttatacatacttcgtctgcagtcctgatcaattggatattctagtaccaaaccatgagtgcatagaaagtgacgtatcatacatcattaaaggaagcaaacgaagccgggattaccaccatcttgctgtatagtcgtagcaactgttcatttggtgttgatt

SEQ ID NO: 75185 - DNA, 154 bp, Arabidopsis thaliana landsberg
acaaaacgagaagggggagaaaaggccccggcaaaagaaacaaacgcccgggaaaaacaaagccaaaacggagaaagagacgcacccagacaaaggcaaggaagaaacaagaaaaaaaacaagggccaaaagaaaaaggagacgaaaaaccaag

SEQ ID NO: 75186 - DNA, 194 bp, Arabidopsis thaliana landsberg
  unsure (1)..(194): unsure at all n locations
cccccccgcaaaaaaaaggaagccacnaacaaaacgagaagggggagaaaaggcccccggaaaagaaacagccgcacgggaaaaacaaaaccaaacgggagagcgagacccaccngggcaccgccaggcaaggnaccccaaaaaaaacaagcaccaagccgggnccccgacgagaaaccacgggcggaccacaa

SEQ ID NO: 75187 - DNA, 789 bp, Arabidopsis thaliana landsberg
cacatagagcttagaagtgttataattaggtttgtatacttgatttggtgactgttgtgatgacattgagattgaagtgatcatatatatgcagctcatgtatcggttcatccattaaattttaccaagtggaacaaaaatataattaagaatttgaacaataaccgatattaccacagctaaatattagttccaaaaatactgtaattttccaaacaaattcaaaaatataggaagagttcttaaagatttgagtcaaatggtaattgatttgacgactgattacataacatagtcatcaatagttgtacatagtgtatatatatatatatatatatatatacattggaggttaagaatatatgatatgtcgaacgactaaaagagaaaaaagaatatacgaaatagaaaagttgtgttacgtaatatatatagacaatacacacaaatttcaagcatcacgcatgacagctttataacggaatagattcctcatggatatatagagaagatgtgcgaagtatatacatttcaaattttacttattggagctttctttaaaaagtttgttcttaccagaattatatatccataggttagtataattacttcttatttagtttttagtattacaacatgttctttctaaaactattatacctattgaataataaatttaaaatatatgtttttatacattttatttctcttcacatcttttcgagtagtataacaaatgagatattttttctattaagaagaaaggagatcctttcgaaactctactaa

SEQ ID NO: 75188 - DNA, 551 bp, Arabidopsis thaliana landsberg
ggccagccgacgggccgcctccagccagatcgcccacttgaatgttagtttcgctcaccgtctgccccacgtactgcgagagccgcgtgcccgcggtcacgaccaggaccaccgagccgacggtgaccgcgcgcggcccgggcgcgagggcgacgatgacggtgctcaccacgaacgccgccccgaacaccgcccaggccccggccgcgcagacggcgctgatccaccgctcgcgggccagcagccggtgctggcgctcccacgccccggctcgcagccgccgcacgaattcctgcgtgcccgccacccgcagctccttgctgctcgcggcggtggcgccgaggacgaacaggctccgcgccagccgccggtcggccgcgcccgccagctccgcccgcttctcggctggcgcacgtcgcgcggtgaccacgacgctggggagcgcgcagacggcgagcaggccgagccacggccggaccgacatcagcaggctgaccgtcagcaccagccggacaacggcaccggcggcgctgaacacggcccggtagagc

SEQ ID NO: 75189 - DNA, 875 bp, Arabidopsis thaliana landsberg
acaataattaaattatagtgtgttatctatctgttatgatatactactttagtagataaaaagtcctttagaaattattttgtacctagaaagtatttttttttatttatcgttaggacgtcatgtcaaattctaaatccctaacacatattggctctagttaattggtctttgggttgtgttagtatgagttcaaatcttacatagcgcatgttcgataaaaacaatcacaactatattaaatgtattatatgaattggaagaaaaaaaaaagtaaatagaaatgtgattgcattccaatattaacctgtcattgtctcttgcttgtgggagcaggtccgttggactgagtcggattcgcatttaatttatttactcaaataacttttattttattatattctatagaaattaattattaattatccgtataatgcaatgcacatgacctcgacggtaaaataaggctggctgctgataattaatctttagagtccagagattattttcttgggtctcaaaatactagagactctaatgtacatacatctgcctatgattattggactttaacatgataacgcatcatgctagtgcaggaaaaaaagaagaaggaattttgtttattttttagtaaaagaaacacaaagttgttatttctatcgcattctttgattctttcactatgtcattcggattctatgacggagaacgatcgaagaccataatggaggacaggaagaaaaataataaaatttctataccctttatgtcgcgtttggaaccatgaccaatacgttgaaaataatgggaagaagaatggaattttcgtttttatccgaacagagaggacaaaaatccccccatcttttttt

SEQ ID NO: 75190 - DNA, 338 bp, Arabidopsis thaliana landsberg
aggtgggcatcccttacgggggagtctgtacacaggacgttctttgttggatggcctgggagcgactacagtgtgctgttggcgagcaacgcgtgtgcttcttccactggggtgtgcacctcactgctccgtagtgaaataccaccggtggtgttgattttgatgttgagattgagtactagcctgagtactctattccaaaccatggtcagacaggggactgcgtgaattaagttaccgggacggctaaggaagtgggagccgtattgtgtttggagttgaggttgcgttcatgtcccgcgttggggagccaccaaaaactgacacactccagattc

SEQ ID NO: 75191 - DNA, 575 bp, Arabidopsis thaliana landsberg
tgacctatgtgacgttaaactttttctcctaagataatcatttttatgttacagaaggaattatttaccaattagcatgaatgcatgatacttaaatctggagttggtgggtaaagagattctttgttttgaaaaggtaaccaataagctatggttttggtctcactttaatatcacaacaattcaatagaccctttaaatcgctttcaagtgtgtgtgatctttgctttaatttttaccaacttttctgtttgtttttacctttttgtaattatatattttcaacttttctaatagttttgcttacataatatatctctaatctatcttcaaatccgatcaaatagattaatgcactacaaccacttaaacacgtatataaaaaactagatccatcacttatgagcaccatatcatatcataatttgagtttgacctcatttcgagttaaatatggttttgaaaagaagaaagaagtgtatatttgtattatgtcattacaataatgtcaccaacatgtgattatgaatatgaaaaatataaccgcatatatttatctattttatacattaata

SEQ ID NO: 75192 - DNA, 318 bp, Arabidopsis thaliana landsberg
attaatagatgcattgatggttagcgtccctcatatttaggttttgatgataacacctaaagcgataggtataatgtcaatgaaagtgacatatccaatctcatgagtagtgaacgccggacgaatcgagactgacatatttacgagataagacctaataggatgcggctgaaactaatacacactaatggttatgttatagcttagaactactctcaatcgtgcactgaatgcgacaagtgttatggaggaatgaataataacgtcgacatgtatgtgtgtgaacaatgtgtacactattagaaacagagtcgatca

SEQ ID NO: 75193 - DNA, 132 bp, Arabidopsis thaliana landsberg
aaaaataaaaaaaaaaaaaaacaaatgaaaaaagagaccacaaccaacataacataaacaccaaatataacataccccaaaaagaaatgcaccaaaaaaaaaatagacacgaaaaagagagtaaaacagaca

SEQ ID NO: 75194 - DNA, 399 bp, Arabidopsis thaliana landsberg
acaaatgtgaagtcattaactatcaacgtattggggcccaatgataatctactggaacacccgtgctataaaaccatgaaacattttcgattattctaagaaacaaccacaggtttaaggataggaaaaccagtgcgagatgcctacgtaccacaaatatgaagcgaaaaaaacagtacgctataacctataaatatatcatatctctgactcagtacacatgtgggacgaacaatactgaccaactacatgcgtggcggacaaacatatgtggcactacatgatgcacatattactcagagacgacctaattatcggtgtgcttgacacgtaacattaattacttgaccgaaagattctcgaacgtcatccccctgagcttggttttccttacgcaga

SEQ ID NO: 75195 - DNA, 423 bp, Arabidopsis thaliana landsberg
  unsure (1)..(423): unsure at all n locations
gtcatcttgcgactgctgacagtttaancgttttaatttttttatttgtatcgtnttactgtnnaccgttaaagaactgataccggcgtgttgagttaccaanntatgatttgcattttttgcgttgaattactttagaaaatgantcattttctatttgtatgaaannnatgatcacttttcttgtggtaccgaaaannatgatatttacgtttcggttcttaatcnaattaacatntnntatttgtctggttatttaatatttaaatactttagaggggttcaatgggttcaagaccntttcagaagtattttaatgcncaannnaaagaangcncagnnngtgaggggaatgcnnatctgannaatacaannatttgcgatcttcnngtgaatcaattcnnacatcaatnnacagcgatt

SEQ ID NO: 75196 - DNA, 480 bp, Arabidopsis thaliana landsberg
acagacaaataaacgttaatgataagaacaaactaaatatcattttcgtacacagaaaatatcattttcatacatagaaaatatcattttctagtattcaaccaaaatgcaaatcatattggtaactcaaagcggtataagtctttaacggtacagtaaacgatacataaataattaaaacgttaaactgtagcagtgcaagatgacagtataaaaaagtgaaaatgattttttcttatattgctttggtattgtttttatgtttaattaggataaaaatggaataggacttagccaatcaaaacctctatttttaggctcaaaagcagatgggacactaaaacacaattttgatgtgagtctacactcaaaactctcttatgaaacactaaagatgacacaagtttaatgtgatgatatagcatcatttacattagttgatgcaacactttttacaacactaaataaataactagcata

SEQ ID NO: 75197 - DNA, 801 bp, Arabidopsis thaliana landsberg
caatagtacaagatcgaaggcagatccaaaattcgaacagataacagagaagcccaaaagcaaaggaagtgccgattgataccatttttagccgattgaaggaaaatctttaacagtgaagctcgattcccagaagagatctccagaagctgatgatcgtcgaaagtattcttctgtgtccgatacacatataagtttgttggatacggatcttgtcccgggtcggactcattaaaaatttactttttatttatttttcttcagttggttttgtatttactggggtagtgttttaaatctggaccgttaaacaaacaaaatggggactgatctgacggtccgacttaatcggattgcatttttacagattaaaaattgcaacaaaatcacaactttttattaaaaggtttaggcaatttttcaaaatgagatattattgttgtaaaagttagaacaaaggaggaaacaaaatatcaacaattgatgtgcaacctgaaaatattgagagtagattataacttgtatgagcctcagcgtcactatgcatgcataataatttacatttttacgtctatataaatgatcaaatttgtcgtaacataaaattcattacttcaattgtaagagaagtaatcagaaatcaataatgataaaactcttactctctttggtttaaaatcaataatgaatggtggtttagctctctgcacagtctctactgcttactttctaagatatcatcaaagacccatacacacacatgccatgaggggagacttcattgcctcaaatgctttattt

SEQ ID NO: 75198 - DNA, 476 bp, Arabidopsis thaliana landsberg
  unsure (1)..(476): unsure at all n locations
ctgcgacgtggacggaacggcctattacgacttcctctccgcctattctgtatgtaaccaaggccactgccatccaaagattgtgaaggcgcttcaagaccaagcggaaaagctggcgttgacttctcgagccttttacaacgattgcctgggagcatttgagaagaaattgacggatatattcaagtatgatcgagtcattnnnnnnnnnnnnnnnnnnnnnnnnnnnnnnnnnnnnnnnnnnnnnnnnnnnnnnnggggatatcgtgtcaaaggcattcctgacaaccaagttcgtctgatttttatgagcggcaatttccacggaagaaccactctttgcatctctgcatcggacgatccaatgtctcgaaaacactttggtccatacgttccanatattgaccatgtaaactntggagacgcagatgctttggaacgaatcctgaataagcaggggatgtgacagctgctgt

SEQ ID NO: 75199 - DNA, 513 bp, Arabidopsis thaliana landsberg
cagattttttttagtttttacccggtatttgacctgttaattaacccgattcttatgtgtccggatcttattaataacactttccaaatacaaaattccaaataaaaatcaaaacaataaaatgaaataatatcgtatctagctacagttatgacatgtaatatttttcgcagtaatttgataaaatgaaataatatcgtatctagctatattcctttctattcgattgatgcattcctttcctataaagatggaaacgagtaaattgtaaatcaatttggtttcttaaaaaatgaacaatatcaatttcaaacaaccttaataagtttcctaaataaaaggaactatctaaaatcgatattcattcacaaaaactgaattagaatgattcctaactaagaaaatttattcttatttcctataacatattctataaaaggtaggatcgggaatatattctaagatatctaatacttgcttatcaagagttggtatattctctaatcaaaaaac

SEQ ID NO: 75200 - DNA, 400 bp, Arabidopsis thaliana landsberg
gaacgaactacatcaattgacgtaaattattggtagtttttcatgccatggcagtgtaggcaattatgggggcatggcaaagaacaaacaataaaaccaaaagttctgattcccccaacttgttcacatataacattatgtctttatgtggaagaatgctttaaaaaaaaatcaaacataattgatacaaatagtttttgctcgtcaatataatgactcatataaattcaaacatacccagcatgaaaaatgggaaattttatcaatttataaaaactattcgtgttgttgccatcaatgatgaatggctggtctttaatatgccaaatcccattatgagatgtccctaataacatttacaataaaattgtttggtggtacttaccctgttttgtgaaat

SEQ ID NO: 75201 - DNA, 565 bp, Arabidopsis thaliana landsberg
gcagtattttagatttaattattgattaacaaagatcttgacacgttaatttttcttttatttacagaatgaagaccatatttctacatacggtatgattttttgttcatacaatcgtatttaattagactaattatgacatggttttttaaggggaatacataaaagattcgtaataagaatctaattatttattgttcgtggtatttattatagtcacgtctttcttgatacatacatagctttgcagattctgtggtccaatgtacataaattgaaagcaaaaattcgtttttattttattttttctataaatagtttgattttttttttatgtattctataaagatctctttaaaagagagattatttaattcgaacctgtctcgcttctttatatgttaaaattcggattcgaggcaagaaaaaaaaggcgattagcagaataaatatttatggatttattgcctttacataaaaattaaattattccaaaaggatgtttaaaactttaacacaacatagtggtcaaaaatacaaaatgaaagatggaccaaacaccaag

SEQ ID NO: 75202 - DNA, 318 bp, Arabidopsis thaliana landsberg
accacaaacacaacagtgatgaaaggggggagactatgaggagcagtcgccgccatcacgttaccgacagggaacaggagtgcagaaccagatgacaggatagccaaaaccggagacacaacggaaccgatggcgtatctatatctgtgcgaatggacataacatggttgtaactttagggactacgcaaacaaaaggccacaccagctctggcctgaacacaagggaggctaaatgcactaaacgctcatgctaagaaacaatctaccgtgacgtacacggaaaggccgatggcaacccaaccggtaactgggattg

SEQ ID NO: 75203 - DNA, 400 bp, Arabidopsis thaliana landsberg
  unsure (1)..(400): unsure at all n locations
cctgggagaactaacagtatacgtttatgtgaaccaagtagaacattgagtttaactttgatttgtgttccttgacatggatgttaaaaaaaactgtcctgtttcttaattccttatcattaatctgtattgctgtaactgagacattttagaacctnnnnnnnnnnnnnnnnnnnnnnnccttcttgtgtacctaagttctgttacaaccttaagagctacacagctgcctctatcatcaatgcctttagtggcacaatgaatttcgggactcttattgctgcctttctttgcgacacttactttggtcgttacaagactcttagtgtcgctgtcatcgcttgtttactgagtctactcttattattaaacttttatgacttcgggttcgttttcgcca

SEQ ID NO: 75204 - DNA, 562 bp, Arabidopsis thaliana landsberg
gcagatcgtcatagaggaacttgccgcccgccattcccgcgctcggagagaacagcaacgtgtagccgtctggcttcttctgcttcacgccctgcgcaccgatggtgccgttggcacccgacttgttctcgacgatcaccgtctgcccggtttccgccgccagcttggccgcatagtagcgcgcgagaatgtcggcgccgctgccggccgcatagccaacaaccatcgtgatgcggcgttcaggatagttctccgccgacgccggcgcgagcgttgccgccagcgcggcggcaaccagagcaagtctgcataggcttttggtccacattgtttcctcccagggtggacttcgttttacttcgcttcggattacccttcttgcaaagccgtctcataagccgtcttgcgctagcttccggccgcgcgttccgcatgcggatcgaacgcgggcgcggcaatcgcgccgcccgggtcggaaaacaccttgccgcgcggccggttgcggtcgaacgcctcgacggacggaatgttgcgcgcggcaatctgcgtcatcttgcgcttt

SEQ ID NO: 75205 - DNA, 350 bp, Arabidopsis thaliana landsberg
acccagtcgctatgcttatgtcttccccggatagcatatagccaccatactgaaccgtttgggggccctttaaagtgcacagaagactaacgtcccctaggaccaccacatggcagcggcctatcatccggagtgtatttagccaaccaacgactatcacgttctgaccagaccagcggcaaaccctgacaaaatgtcaacaccgagcgccttaatagaggggccgcgaggataccgaaatatggtagccaggtcactagcgaggtcagacacacatggggggccatcccctgcaggagccacctgaatacaaagggtgtcctcgaaaagaaacaagagccaacggcagg

SEQ ID NO: 75206 - DNA, 469 bp, Arabidopsis thaliana landsberg
  unsure (1)..(469): unsure at all n locations
tgacaaaaaaaaaaaacaaattaaagagactccaacttaatttccctattttcttagttttttttaagtttttttttttctgttttttagttcttctttgtattttttttaaaaannnnnnnnnnnnnnnnnnnnnnnnnnnnnnnnnnnnnnnnnnnnnnnnnnnnnnnnnnctacaacaatggattcctttttccttaggtatgttttcgtatatgtattcatcaatcgaagatttgtatggtctaatgaaatatttatcgtgtttttgttatccaaaagaaagcacaatccaatagtcccgaaaacccatgcaaccgtgtacataataatatatatatttaaaaatccatgtccaatctccaaaccattttaaaacaagagaaacactagtttgaaaatatagaacattgcgtgtgagtgtgtcataattcataaatgcaaagacaaatgttggatctttgattgt

SEQ ID NO: 75207 - DNA, 392 bp, Arabidopsis thaliana landsberg
ccctaacgaacgttccatacagatttcactgactcaatcaccttgcattgtaacaaccattatgaaagtttatgctaaatgcatgcagaaaagaactacattttaaaatgccaaaagaatcgtacagtttaatgtcattgtactgctactgtagacctttttagtcattgaatatgcatggctctcatagattaaggaaaaagtagacaatctgaaaaacatttatgtgatgagaaccaaacccccctcatttacattgatacgaaagattatccacatgtacaatattcttgtgccgtgatcgatgctttaacaactttcagttactgtgtttggggcttgagaaccagaaagataaataactttgtcaccgatctagttcttagccctat

SEQ ID NO: 75208 - DNA, 401 bp, Arabidopsis thaliana landsberg
taaggaagagaaacttgcattggcagtgttatactggcaaacttcatgtgtgatgatagagatattgatgacaataacagattgatgcctattgatcgagaaagtggagcagatgacttaatagttgataggaaaccatgcattgatctacgttttgatgagagtaaatgacagttttttcattgacgaacagaagaaagttgttcgggttcttttaagttgcaacacaaaagttaaaagcctctacgagtttacgatattggagataatagatatttgagaacagtggatcttgaataagctggagactcataagaatttgtggaggtcggagaacgcatgtattgttcttggtcgcttgagtgctattgatcttattatgttccaagtttggtgaaaat

SEQ ID NO: 75209 - DNA, 521 bp, Arabidopsis thaliana landsberg
  unsure (1)..(521): unsure at all n locations
taaaattacttgctcttccaacaagaatcttcattgtcttttttaaaaattgatttttttttttatttttttgcattaaggacgagaagttgggggaccaaaggcaatatcttcgagcagcaacacaaagagtcaatttgtttatggaggaggaagcatnnnnnnnnnnnnnnnnnnnnnnnnnnagatgaatggagtaaacctaaaaagcagaacattgatgagttctgcagttaaagaaagatcattacttgatgcttatgatgacgagtatgggggagtaatagtagatcatggaaaattaccatcaaacccttatgctttcgcttctatgcttcgagcttctctatccgattggagaagaaaggtaaaaacgataaaccctataaaagtcttaaacccttttgtttttgtacatatgtaaatttgggggaaatttttgtagggaaagaaaggagtttggttaaagatacctgcggaacaatcagaattagtccccatagctttaaagggtaaacaat

SEQ ID NO: 75210 - DNA, 244 bp, Arabidopsis thaliana landsberg
  unsure (1)..(244): unsure at all n locations
agacaaacacatagccacaaaccttgggaggggcgaaccttaaaatttacccgccacagggaaaacccggggcgcggggaaaaacccaaacccccacccggagnaccacagggagaggaccnaaaggaacaggacgaccccagacgggcaaanacccagcgacaaaccccgaggagccnnacaaaacagcagacccgaacaagcgccaggaaaacaagccgaaaggccngaacaccgaggagaa

SEQ ID NO: 75211 - DNA, 597 bp, Arabidopsis thaliana landsberg
  unsure (1)..(597): unsure at all n locations
acctgttgaccaccgggttaaatactatcgactgcgaatggaaggttagaaagacaacaacaggagcactttcaaacagtcatcaaacccaaagaggaaagacgagaaaggaaagcaacaccgccgtaaacagtatgagtatgagctcacccagcacctctactacaacaatcgtagaaaagcggtgcagagggtgatcaactcgaaagacggcgcangaaaatctgaagtaccgattagtgaggcagaggactactacaaaaagctccttgagacaccgaacgaccgacaactggaacactatccacagagtcctcaaagctccaacatcacaatcacagtcgaggacactgaaaaggccatcaaggcgatcagcatcgatacgtcgcctggccctgaccgtgtctacagtcgtacgatcaaagaaacgggtcaggcggcaaccattacagccatcatcaacatcatgctcgccactagtatagttcccgaggaaatgaccaaagggcgtaccatnctgatacacaagggctgagacatgtagatgatcaccaactaccgtncgattaccatctactcgtgatcagaagaatcatc

SEQ ID NO: 75212 - DNA, 383 bp, Arabidopsis thaliana landsberg
ggtacggcgacggcttgccgccccatggaagagcttccacttttgtcgcaactgatctggaaaatcaggccacttgcgatgacagccatcgaatgcggagtatccagagccttacaaaaatcatccagcaagtttgtggatgaacgaatcttgaatttgctggacaaaatgtcggccaacgagattgacccacaggcgatcagcgtggccaactggatttctacaccgaccccggcgccgaacgacgacaaagcagactaagcctttgcgacttggcgctttagatgaacagcgccagctgattgtattccgcaccacccaaatgcgctggcgtgtaggccaattcgcgcgattgacatgcgaatgatggtcaaacccatgcc

SEQ ID NO: 75213 - DNA, 462 bp, Arabidopsis thaliana landsberg
  unsure (1)..(462): unsure at all n locations
aacagcagatgcgccacgataaggctcgccgactgttctacaacggtgccgaccaggaacacaacttgctcgttcagcatgcgcgaatagatgtcgtacgagcgcttgccgcgcccggactgttcgataacgaacggtacgtatccaaggccggacggagaccgggtgaccgagtccgagccgtgcatggacgcatagaaatcagtgaaatgcgacatttaggcgtttcccatcaaattatcgaannnnnnnnnnnnnnnnnnnnnnnnnnnnnnnnnnnnnnnnnnnnnnnnnnnnnnnnnnnnaagcacaaccgcttttatttccgtgcgggcgttcgcggtcggacagataatacgcaacgacctgggcaagctgttcgtagcttttcgcgaaaacttcgatgcgttcgcgcacttgctcgggcttgggccttgagttcggcggactcgaagagctcgg

SEQ ID NO: 75214 - DNA, 407 bp, Arabidopsis thaliana landsberg
cattgcgaccttgaccacactgctggtggccagagaacacattactctttttgatgggatttcacacgactggctaccgttacattgcgagtgctcggggtacaagtattgcatataggtgtccccaagctaagaagattatggatcgactctcactcctagatagaaggtggaacaataatcccaccgtgggacccgcggagaggatacttctgatatgcttcgaatggacactactaagatccgatatcttaacctttaaaggagagtatcaagaccagcgacagctatttcctagacaccacaacagagacccacccattgcccgatccaggtcctacaccaccctgaactccaattagaagcaggcatgatacacccccagagacattgggagaacccaagta

SEQ ID NO: 75215 - DNA, 631 bp, Arabidopsis thaliana landsberg
  unsure (1)..(631): unsure at all n locations
gccaccaaacgctccttatccaatgctgtcggcaaatcgttattgttatgaccattttcatccaggatctgttgatcaatcggcagataataattatccatggaaaaaaccgtggggtgaagttccccataaaatgacgctaaacgttttaaaagtgttgtctttccagatccgctgcctccacaaattccaataatcatttttgcttatattcgaaggttaaactgttttttgtcggcaattgttttgtgtcgaaaaccagccattttgtattcaattcaactacaaatttacttggaaattccgcagtaagcaaacgactaggattggaagttgcctgatcaatgcttcccgatacaacacctgtgccggaagtaaagctgtggaaatgtccttcgggtttggaagaattcacataccagccaattccttcatccatccggaaacatcctacctctaagtcttttttggcattgtatgccccgcaggtggatgaacagactntgctccactcctttccctgcagcttgtaactgatcagatntgccgtcgtgccgttcagctcgatcccaccgacatagtaatcctccgtggcaaataccagtgttcccttttcgtgggttcacttcgt

SEQ ID NO: 75216 - DNA, 531 bp, Arabidopsis thaliana landsberg
  unsure (1)..(531): unsure at all n locations
aagcatccctctgcgcacgcatctgaacgaggaggaggcggcgcgcttcgcagtcaaccgttttcgctttccgggcgtggagatcaagtcgcgcctgttccgccactacccgcaaggcaagctcggcgcacatctggtcggttatatcggccgcatcaacgatcgcgacctgcaggcgctggacaaggcggacgaactgtccaactacaagggctccgaccatatcggcaagagcggtctctagcaatactacgagcgcagcctgcacggcaccacgggcttccagcaggtggaaatcgacgccgacggccatgccgtgcgtgtgctgtcgagtacgccgcctatccatggcnnnnacctgatcctgtcgatcgacagcaacctgcagcgcatagccgagcaggcattttgcgagcggcgcggcgctctggttgcgatcaatcccaaaaacggcgaggtactggctttcgtcagccaaccgggcttcgatccccacctgttcgtcgacggcatcgacagcgaaagctggaa

SEQ ID NO: 75217 - DNA, 516 bp, Arabidopsis thaliana landsberg
  unsure (1)..(516): unsure at all n locations
cctatattatgatgataaaattggagaatgttttaatatgtgattatagaattttttaccagtttgttattttataaatgtctgtagacagagaaatggcgaaagaaaaactaattaaggaatctgcattaggtttaccgtgtggcgaagtccataagtcatcacgcgaggtttagatctatattggttagtggtggttctcggataagaccccaggaggattctttgaacaatgcaatagatatggttgttggaacccctggtaggattcttcagcatatcgaagaaggaaacatggtgtatggagatatcgcatatttggtacgcactactttgggatcttgactttatgttncctgattcttatggttttaggatcaacattaaattaagggcaatgcgaatctctttactcaggtattggatgaggcacacactatgtttgatcgtgggtttggtcccgaaattcgtaaattccttgccccactgaatcaacgtgcgttgaaaacaaatgac

SEQ ID NO: 75218 - DNA, 329 bp, Arabidopsis thaliana landsberg
acacaccgtccgtaataaatttccaaaaagcagcttttcaaaatttaatgaacttatatttgcgtgtgcttgacaactgatattaaaactatagacctaaaatatctattcgaagatattgtctgtaaatattatataagtctaattgataatgtataaataaaattgtttttgtactaaagacagtaaaggagagaagacgatcattttttacctatgttaacaataccaaattaaatacacactcatatatcactttcaatttaaaaaaactaagatgaaacaaaatcaaccccaaaagaaaaaatattagactacaccattaaggg

SEQ ID NO: 75219 - DNA, 562 bp, Arabidopsis thaliana landsberg
gccgtttgatttgaaatgcggtgctcatgagccgggagtttgaaatagcattccagaaaattttgcggtatccgatcacgaaatgggcaggagaggaggcggaaagggatatccggaacgtcggtcgccttcatcggagtgcccttgttcagttgaaaaaacgaggtaaccgaattgtgcttcctgatgatcatatccttaaaaaacggttggtttcggtaccgtctcggatcaccgtcggttcgaaaaccgactccgtagacacgcccgaaaaccgctttgtaaagcacgcgctggaagttttcgcgggttttgtgaaccatatcaagcgcattgcgccggagcgcagccgctttcgccatgaggctgccgtgctggaaaatcatttgaaccagatgctttcggccccgttgttcaaagacatagggaagccgctccgactcgcattgaatggtcctggcctggttcggaaagaagggtataaacaaatcctgagggtgtggctgatgttcgatctggctgcgcgactggtctggcgcggtggcgacgatgtgtatcatgc

SEQ ID NO: 75220 - DNA, 569 bp, Arabidopsis thaliana landsberg
ggattgctctgccgtccacccagttccgtcggaaaccaaatatatagactttcccgccgttacctccatgtcgatcgccgtcgtcttcttatgagcctcatcggtcggttgggcttccgttacttgacggcgaggtgagttatcggaacggggaattggacggtcaagcttaacaccagatcttaaagctcggcccctagaccaccgattcaatttgggactaatcttcagcttcggactcgacgaacctgtcggaattggaggttcggaattaggctcgtgatggcccgagatgccgtgtaaattcatatcgccaaagtttatgataactttttttttttttttttttctgagcgacggttaaggcgttaaccgctaaattgcgttccgatgaaaaattgacgaaaatgtcctcactaattacttgggcttgaaaacagatatttgggctttaaaaagcctaagtaaaaagtgcccaaaagactcgtggaaacaataataacacgcgcatcgctagagcgtactgttgacgcgtatcgtcgaccacaacatcgatatcgatcgagccg

SEQ ID NO: 75221 - DNA, 345 bp, Arabidopsis thaliana landsberg
aacaaagatcgatcttaaactaagagacaacgtatgccaacatgattaaaactatcgttttataccttaccctttgataattccgtatgtagggggtaatctcttaaacatgttccattaatgtcctcaacattaaatccaaaaacagagcacattgtaggatgaactagtctaaatctacttccagtcgctgtcatcaaaattcagcatttttcagaaaaacacaatattctcaccttgaagtccggctctggagaaatagaatccatttacgtggatgccacctggaaaaatattcccaaaatgaaatacctctctggaaaactataattattaggtctaaca

SEQ ID NO: 75222 - DNA, 501 bp, Arabidopsis thaliana landsberg
aaacggtgtaaactgcaatgggacacatcctacagtgggaggagatgacgtaccaacttttatttttgttaaaccacccaaagcagcatgtaagcatttacagaaatttctttatacttgaaatccattctaaacatccatgtggatcaatgcatttctgattaaataaatttgtcccggtatcagcaagcctagatgaatctgatgacaaatcaaagccgccagttgtgcagcaaagagggcgttttaaagtaacttctgaaaatctcgacatcgagaaggtaactctctttttttttttttttggttttaagaggaaaaaagagctttcttgtatcaatcacgtttgtgaggccttccttttgtattcgctatctctttatcaggtggtggcgccttccccaatactgcaaaagagtcaccaccatgccggtgtgtaaattgttttgagttcaacttgatcagcttgatacgaacaatcaaatgtgttttaccacaact

SEQ ID NO: 75223 - DNA, 533 bp, Arabidopsis thaliana landsberg
  unsure (1)..(533): unsure at all n locations
aagcccatccgacggactaccgatttgtgggtttgtgtgggtttgcgcttgaacgcggtggcggtgctgggaatcgtgatcttgacgacaggctctggggccattggggtgctctcgccttcacaagcatagcgaagtgcatcgatcatgtggatatccttgtccttaagcatgggcagcannnnnnnnnnnnnnnnnnnnnnnnnnnnnnnnnnnnnnnnnnnnnnnnngatcatatgcgcgcagcgcggatgcacgatgatatcgaagctcttcaggaactcgacgcccttctcaatcgaacgcgggcccttgatcgcgggcctgatgcgcgggaagccgcggttgcgcagatagctgatcgtctcaggccgtgagctgtccgcagtggaccaccatttctcgctatcgggcacacccatgaacagttgcggctggttgttgatcttcgacgtgcaggccccatgcctaatggtcgacatacagcttggtgccgtcgatataacagcgctccagacaggtaggatcgatgc

SEQ ID NO: 75224 - DNA, 174 bp, Arabidopsis thaliana landsberg
ctgaagtgaaaaagatgtatcgcttcggaatcctttgaagggttctgattggaagggggtagactgtaaacaccattactggttcaactagaatgaataaaggatgcccaccaacatacaaactcaaccaggataccaacactaacatgagaaacataagtataccaacacata

SEQ ID NO: 75225 - DNA, 529 bp, Arabidopsis thaliana landsberg
  unsure (1)..(529): unsure at all n locations
taataccattataaaacaatctgctgaggaatgttttgaggtttaatattattataaaaaaaacgttaaaaaatgattttttgtctgaaaatattttttaacagaaataaaatctgactgtttcagtgacaattaattttgactctgttcaattgtactacatacatactgtatatgctgatgcaaatttcatatcaacatttattttggtgcatagtaaatgttttccgttcgagcttttaatttggaatttatttagttttgctccagccaaaatactggagaaaaagaacttcaatattttcaattttttaattaaaatatttaatatccaactgtatacttctccaaataaaggtttgtaatggtggaacaaaaaaatgcatattttgtgtttgaaatcttttttattttgtgttcaagaataagacagcagtagcactgtaatagtggaccaaggaaaatgcatattagcaatttcaaccgaattagtaagttagttatagactntaataagacaaaaattaac

SEQ ID NO: 75226 - DNA, 588 bp, Arabidopsis thaliana landsberg
  unsure (1)..(588): unsure at all n locations
ttaaatacaagaaatatcgtccgagtcagccaatttaaaacgttaaagcccacctttaacttcgtccccaatccaaacttttaatttctcgattgtccgctacgctccacctcatcccaaacaaattacccgttttacccctttgttagataaagttaaaactatttgttagtttctttggtaaaacgaataatatcatattctccgtctatgttcgttattctgtttttaattttcggttcgttacagcttccacagcaagctcaaatggtaatatcattaatcatataagggcatttttgtcatttaacatgagtattatattaacctcatcttcgcttcatcttccttttcgcctatcttcctggatttttctctttcgctaaaaagaaccttcaagctctgtctctctcatcgctatataataaaataaaatcaatcacacacaagactcgtgaaaggggacgatacgcgttttttatnttgtacagactcaaattcaattcaattcaattttattcattaagtctgggtttgaaatttgaacaatngaccgagatttgggaccatgggtatggacttgagagt

SEQ ID NO: 75227 - DNA, 517 bp, Arabidopsis thaliana landsberg
gctctggctctggagaaaaccgccggacttatgactgcgacatctgcaagagaggtttttttaatcctttacgccctcggtggtcacaataacatccaccgcagggaacgcgaaagatacccctcctcctctccttcttctcactcatttccattttctcttccgttaccatctcagtctccctcctcctccacaaacttcacaaaccctgctccttattttccgaccattgagtcatacctacaccaagggtctcagccacctattaaccctagccacaacacacaatactttggatcatcatcatcatcaagaggaggagggagatttgctcaaggggcgtctcatgatcttaatttgagcttagggctcggatccatgaatgaagatgatgacactcaccggagcccaccagagaccggaggctctcaacctcaagatggtgatcttgatcttgatcttcgactcggcggtcatcgtcatcagtaagcttgcagcggtttccctcacgttcgat

SEQ ID NO: 75228 - DNA, 391 bp, Arabidopsis thaliana landsberg
  unsure (1)..(391): unsure at all n locations
ctaaacatgctgcacctatgcgatggcgaagaggaatttgagtttggacagaattttggtcctttctgccatgccgttcggcgtcttggtcgatttctcgttgccgaggttgacgatgcgagagactgccatcacgtcgtcacgctgggccgcggcgcgaagaccctttgtgttcagccagtaagcgatggagacatcaacggcgannnnnnnnnnnnnnnnnnnnnnnnnnnnnnnnnnnnnnnnnnnnnnnnnnnnntcgccgtacttctgaaaattatagcggccagtcaccattattaatccgcggccgaaatatttggcacccgcgccagggtgcgttttgcccaaatctgaacggccgccattagacggcctcagcaattcgctg

SEQ ID NO: 75229 - DNA, 417 bp, Arabidopsis thaliana landsberg
acaacacaccagaattctatatggttgaaaatgaatagctatgtctcagtccatttatggcggttattgctcacctgttcattgaaaatgcacgtagaggaggaaggatcatatctaccataccattctggcattttgcttacgtgaacaaccatactcttcatacattctattcatctgagtgctcagacactatctatggtgcacatcattcaccccacaaaagtggccctgcaatgagggcttatattcttgcgtcgacctcctttaaccctgtgggaattactacgcgaagatatctacctcttaaagactgactatcactccattggtgttcgtcacgtactatgcagtcgctggaagctctttcggtgccgaacctgcaaacataagcggttggaccgatacatgcgcatt

SEQ ID NO: 75230 - DNA, 491 bp, Arabidopsis thaliana landsberg
  unsure (1)..(491): unsure at all n locations
tggcccgcttgggccaggcagatgncagggctggtgagcagnactgcggggcgctgacttagccagccgtatttgcggngcgggagcagctcggncctcacgtgttggaagccgcgctgctcgtagtagcgatggagcgctggattgtcccgccagcagtcgagccggacccaggtccggccctccagagcggcgagccggcaagcccagtcgagcatcagttcacccaggccggcgccggcctgaccacggccgacgatgagtttgtagacatacagcgctgactccagagcgtccgactcgtgcagaagtctcggtccgggccgtcgcggctgatggtgccgacgacgtcgccagttggtgaggtgacagcccaggatcggccgtcagcgatcgagccatgccactttgcgatggcgcgcgagccggtctcagggtccgaccactggtcggtgccgagcgtgtgcagacactttttccgctcggtgcgt

SEQ ID NO: 75231 - DNA, 565 bp, Arabidopsis thaliana landsberg
caatattaaatgaagtaacttgaatctcatctccattgaaacagatactgaaggcaaattcttcaactttagatctctaatttataccaaaatcaacctaattgttcaaagttaagtccctttctgagttttcctatcactcaataaacagaatccccaaagttacaacctttcgatgaatatgattatatgagagcagaaaactacgaaagcattcaaatttgaataaggaaacacaaacccaatttagtgtacgatcccaagaaaactggaacaagcaagacaacaagagacaggtagagaaacttacaggaagccatggagggagacaaggattcgagaaacagaagaatgtaaggaagagagattgagattttttgagctgatacgataacgatatgaacgaggacacaacgatttggcgagtgtggagatgatttgatcaaatcaaaatatttgaggtgaacgctcgtcgttggttgggtttcgctcgttcgatacaaccagagtggtgtctttgtacagcgaagcacgaaacttcaaacttttgttcatttgggcctta

SEQ ID NO: 75232 - DNA, 595 bp, Arabidopsis thaliana landsberg
atttattcgtatgatcttatgcttttctttcttatgtttaacttttcattttcatcgaattatatattcttatgttcttgtctcaacttttttgttttggatttactcatagttacttgtgacacgtacgtataaaaagtaatttgaaataacacaaagttggggaccaacaatcggtagtgttgttacatgaatatggaaatgaaaattgacatataaatccatgggtggtccaaatttgatgatgaccatttattttctgtaagaaattgttcatttgctaaagttgccgaatattttcacttcggctatagtttatacatctaagtttgtgtttgcatttatatttattgaaattgaatatattttatacgcaagtggacttctttttgttttgtatttggctttatatagtcttgagtcccaatatgttgggtcatgaatgcattggtttttatcaaattggctacgtctatatacaatgctatatataacgtttaactatttaagctataaatatattttttggcttgcattaatctaaaaagggtagtttgaaatttgaacctttggctttgcgaacccttattgattg

SEQ ID NO: 75233 - DNA, 188 bp, Arabidopsis thaliana landsberg
acaacctacaggtcccggatgacgtttaacatttgcctcaccggttagtgtgccatgaccaaatgcttcgacctgtgcggacttgacaaactctgcagtgattcttaacctctactagccgtaccttacgaactgccgcagacttctattctgtgctattcaccgcctcgcaacctaaaccacttcat

SEQ ID NO: 75234 - DNA, 1241 bp, Arabidopsis thaliana landsberg
  unsure (1)..(1241): unsure at all n locations
gctttcctcatttccgctcccactttcttatagtaatcattcattctctctgcaaaattcaacaaccaatttacacatgcttttttaaaaactgattcattgctcgtttgtgtgaacaggataatagggattcatgttcctttaccttcatcaagggctacttcagtccctgcttcagcagctacacttgctaagggagccaaagaattgccttcctcatcaagcacaaccctcgacccaaatggtctgtgtagattgatcttcagcttcttgtttttcaaaacacgatttcctggtctgaaaattcaacagaatttatacacataattaagcgtgaaaagactggatcgaatgaatggaaaaaatgttaacggaatgcgaaaaccatacatgagaacttcttcttccttggttgatttttctactactttgccctctttacgtggcttgagagcaaaatcctcttcttctaaatcttcaccaagaagatcttttttgacaaccagaggtgcttcatattcctgtgcattctcagtctccatagcgatagaactctcatataccccctttttcttcgttttaaggtttgtgaatcggattctgggagtcattggcagaccaagtgaagcagaaaagttttcaatcgacagctttgacacatcaaaaatctctttgtcccttcttttgtggatggacctcaaatatgtgatgatggctctctgagcaacaccttgaagatctggatacttgactaacaaagcagccaagagcctagaaacctcctgcaacttttggttgtttgcctgtgtgacaaatttttttacagtcaaatgtttccaaccacagtcgaaactcaaagaaaattgaggacgggagctactaccttgatgagttttataggcactttagcttcttgtaatttctcaatcattttttcctctgaaggtgtcagaaagaggagcgacttcccttgagtatagaaacgagctgtacgcccaacccggtgaatataagaagctacatcttcaggacaatccacctataaaataaatatgatgacatcacacttcagcccgacaagatcatagagttttgtaattctggatgtggattcatacctgaacaacccagtccacagccttatcaaaatcaagacctctagcaagaacatcagtacagaacagaactgattgtctctcaatgaactgagagtacactcccatcctttnttcctgactcat

SEQ ID NO: 75235 - DNA, 237 bp, Arabidopsis thaliana landsberg
ccaaacttatcgatgagctcttggagtccacataaagatgaaaccgttttaggcatcagcattttatttgtgtttgggtgcatcaaaaagattcatggtaatgaactaatcctagcttggtgaaaacaaagtattgtcctaagaaaatcgtacctgcacctgttctcaagagctagttcacggtacgctgataatgaaagtgtgctatcttattaacactagcgccatggcgtttca

SEQ ID NO: 75236 - DNA, 553 bp, Arabidopsis thaliana landsberg
aacttatcgatgagctcttggagtccacataaataagaaaacaattttggtaacaacacaaaatttgttttttcatgcataaaaaagattcatttaataaactaatactagcttgttaaaaagaaagtattgttataagaaaattttacatgcaagaatacaaaactacgattacaaggaaggactatcattaaagtctcctattttcttcacactaccgtgttgccatttcaaaagatttctaaagatattatagtgatttatcacatatgcaccatgtttctccacttgtccttaaactcaaaggaattataagtcttctgaaatatacctttttccatctccaaaatctgcctccaacgtatgtttttattgattgtacctgaaagtttcttcacagtaatgtgttgtcacatcaaaataattacgaatcatgtggaatgtaccttctcctgtcttcaaaatcttcctctaatgtatgttcttattgattggagctaaaaatttattcacactactattgtgccactttaaaatatttctagagatatta

SEQ ID NO: 75237 - DNA, 492 bp, Arabidopsis thaliana landsberg
aaacggcaagagcctgatgggcttggccagcacatttcttcggcttttccgagggtggcggcagccggtgcggcaaccgccttgcaaggagagaagcccaaccgccagctgtacgatgacgaaaaggctcgtttcaaggcactggctggtggtgatccactggaagaagccaagctgacggctgcggcttgctaccttgtccactgtgcagtgcaataccccaaagacagcgccgagttctcgtacttcagcaagggggaggcgttgggcatttaattgaccatcgaacagaccttgctcaaacagcatagcgatacccattacatttatctgccgagcttgatgcgattctggccgaaagtatcttaacggaaagaaacatctgcatgttattttgtttacagcgggcggtgacatctttttcggatgaagcataagtgattgaacagcactgtcaagcctgaccacacaagcaggagggttttttcaggc

SEQ ID NO: 75238 - DNA, 575 bp, Arabidopsis thaliana landsberg
  unsure (1)..(575): unsure at all n locations
ttgcaggaatgtattggtagaaggcgtcaccttcgagaactcgcccgcatggaccatgcacatgatggtgatcaggcatatcaccataaaaaatgtaacggtaaagaatcccnnnnnnnnnnnnnnnnnnnnnnnnnnnnnnnnnnnnnnnnnnnnnnnnnnnnnnnnnnnnnnnnnnnnnnnnnatacgggagatgatggcatctgcattaaatcggggcgtgatgaagaaggaaggaagcgcggattgcctaccgagaatgtaattgctgtaaacacaactgtgtaccatgcgcacggcggttttgtgatcgggagcgaaatgagcggcggtgcaagaaacctgtatatatccaactgcacatttatcggtaccgatataggcctgcgttttaagacggtgcgtggtcgcggcggtgtggtggaaaagatatatgcatccaatatacagatgaannnnnnnnnnnnnnnnnnnnnnnnnnnnnnnnnnnnnnnnnnnnnnnnnnnnnnnnnnnnnnnnnnnnnnnnnnnnnnnnnnnnnnnnnnnnnnnaaatgttgccggtaacggaagcaa

SEQ ID NO: 75239 - DNA, 437 bp, Arabidopsis thaliana landsberg
aggtaatggcgataacggccccgctgatcttacccaataccattttaaccgctttaaatggcgaggcatgtgtctcctccattttggcatgcacggcttccacaaccacgatcgcatcatccacaacgataccgatagccagtacgatggcaaacagggtaatcatgttaatggtgagcccaaagatctgcataaacataaatgccccgatcagcgatatgggaaccgcaagagtaggaataagcgtggagcggaggtcaccaaggaaaataaataccaccagcgccaccaggataaacgcatctcttaaagtatgtactacgttctcagtcgaggcgtccaggaagttggacacatcataactgatctcgtaatccattccgggagggaaagattgtttcagttcttcgagtttgagcttaacgttctcgattacc

SEQ ID NO: 75240 - DNA, 368 bp, Arabidopsis thaliana landsberg
gaaaagggaacccacataaggaaggagagcgacaatctttgaataccaatggttttaaactcactttgaatgatctgaaatacttgatgacttacgctattgtgattgaggaccttctgccgtcacacattgacggagcatgggagaaaaggttgacccatggcacttaagcactgcaataaagaggctgaagcaccaagactgagatatggaattctatactgcacactcactaaaggataggacatactacctctgcgatttggtatcaaggatgagaaaaaagatctgcaaggctagctggttaaagccggatggatatggccaatctcaactggttctgtcgaccccagtatggtcgttgaagt

SEQ ID NO: 75241 - DNA, 764 bp, Arabidopsis thaliana landsberg
aaacctcttacatatttttgttccatttagttcttccgatgagttactatatacatggtttttatttatttataaaatcacaatcattatttagccaactttttaaaatttatttgttttatgtctatagcaaaagacttactcttatccaatcactcatgtggtgtcttatattatacatgagtagaccgcttataaaatatcaatatttttcaactatttttcaactaccctttttatacctaatttgtatttattttttaccatttgtatttttttgtattgttagttaaactatgtttaaacatataataaataatatttttaattccaaagattatatataatgttgaacattttttattttgaaatagatggaatatactgttacagcttttaggacgcccaaacgcaaagtcaatgatcggttttagatataagagatccaaggtgtataaaactacaatttgccttacatttatatttgtgtttataaactaataaatttagctcaagttcatcaaaatatctttgctttttcatcaaatatgttttaaactttatatataaacattcttttatggttcaaattaaagttttagcaccttacacttggttacccaatcggtcgacattatgaccctaaacccatattgaattcataatcccgccttttggaaaaaaaaatcccttattagtttttttggggttccgggtaaaaaccggtaattaataaattttttttttttttttctgggtaaatt

SEQ ID NO: 75242 - DNA, 607 bp, Arabidopsis thaliana landsberg
ctccaaaaccaaaagaaaactctaggcttgctctaagaaaaaaatattttggcatttcttagagttagagcacgtaatattcttaagaatccgtttccacatattttggttctacattcccgattattagaattcaccttagtggctgttgagaggacagactctccccagatgtagtggctgcggtcgtgaattgggttaccaaagcttgttgttattctgtttgtgaatcatgaaaacggtcaaagatgattctaaggtagaataggattagaaatcactagacaatgcatcctatattttaatgattatgtcattgaaaaactaattatggtacttattttaatcttcaattaattagatcaacaatttactcgttataaaacatgaacagaaaaatactccattatgttactagaacgaagtctacgtcattgtaagcaactttgaactgtccgtcttgaatgtttggcaatcgatcatgtatgtgacatagtccatattaaaacgttaacatcttacacccatcaatggtgtaatatatatttgcaaaaagaaatccattcctaaccctaagaatgtttcagttaagcctttctatgatcca

SEQ ID NO: 75243 - DNA, 459 bp, Arabidopsis thaliana landsberg
tgttccgtgtatccatcccagacaaaccatttgtttttggcatttataccaaaaatatttgtttccaacaattttttttcttaaacattattttcaaatgttttacgtaaaagctctgttaacaagaaacttagatttatgtatggaagaattggttatacatgagtcagtaagtcatgaaatctgtataatgggaagaagttaatcagttaaatcttatttattccaagagggtgattggagaaaaaaagaagaagaagagagttattggtaactagtgttatttatgtattaatgaagaagagagttattggtgttatatatgtattaatcaatcacaaattgaactactagttaattatgcaaggaaaatcaattgaactgcaatattaaatttccatgaagattttaattatagagaaaattaaacttttctatccctagatagaataccatggt

SEQ ID NO: 75244 - DNA, 417 bp, Arabidopsis thaliana landsberg
gactctcttttttaggtatagttaacagaatcacccgttgcgtaaatcctcaccggtcttatcaactctagcaagttttgagtatgttttttcttgaattgggaagtcaagacggttactagaactgaagttctctccttgcggatacatccagggcattctattaaccatagctctcgagcttgaaccaacatcttcatggaaagacggactagtacgtagtagtagtagtagtctctctcttttgagaaaccctgaacataggaaacggcaagacctcgactccatgattttcatctgcaggcctcatcaactgcttagagcagattggtctcacgatcatgaaacttcacttaactacctgactgagtccaacgacctatccaagctgcttcatatggattgactgacgaattc

SEQ ID NO: 75245 - DNA, 590 bp, Arabidopsis thaliana landsberg
cggccgacgtctgcggcgatccgtgcagtgtcaccgtcgcgcgcgaagtctttgcacttctctgcgcgatctcgaccagttgctcggggttcggagttcgtatccgacatcgaggcattcctccttcgtgccgcaccggcgtcgggccggttcggcttccactctcacgcgtccaaactctcccacggcgtcccggcgccgtcgatctcctcgaacgccagccaggtcctcgtgcccttcaccccggggatcgcctggatccgttccagcaccagggtgcgcagcgcctggttgtccggtgcgtgcgcttgcgcgagcacgtcgaagtcggacccgagcagggcgatgttgtcgatgtagtccaggtgcgccagctcctcggacaccgcgcgccaggtgttctgctcgatggtgatcgcgatgtaggcggtggtggtcaggccggcccgctccggcgcgatccgggcgccatagccggtgatcaccccgtcgcgcgtcagtcgctcgatccgcgcataggccgtcgcccgcgacaggtgcagccgctgcgcgagcgcgcgcacgggagacccggcgtcgcgctcgagttc

SEQ ID NO: 75246 - DNA, 287 bp, Arabidopsis thaliana landsberg
ttctcggggagtcgatgacgactcatggcttttcctttgtcaccaaataagaggtccaccgaatgcttgaaatctgtcctagaagggcctgatgcgccagaaagagaatatagaggaactgcccataaccagatacttctgtgggaccatactgcatactagatctcatgcataaagaggaattgagaccgatgagtgctagtaccaaatagaatgctagatactaactgatcatatgatatgacgatgcgactgccacggccaaaagaaacatctagatgatgaga

SEQ ID NO: 75247 - DNA, 435 bp, Arabidopsis thaliana landsberg
tcgcggccggcccgcggctgtcctacgtcaactccttcaagggtatcaccaacctgcatgttcccagggacgtgggcgtgtacgcctcgatgccggccatgatccgcaacggcggcaagctgtggggcgccgacggtgccgaggacgacaccctcgcggtcatccccgattcctcctacgccccggtctacgcgaccgtcgtcgaggacgtgaagaagaacggcccgctggacccggcgacgatcggcaccgtccccaacgtcggtctcatggcgcaggccgtggaagagtacggctcccacaacaagaccttcgagatccccgccgcgggcaccgtcaccgtggtgaacgcgtacggcgaggtcctgatcagccacgacgtcgaggccggcgacatctggcgcgcctgccaaaccaaggacatcccggtccgtg

SEQ ID NO: 75248 - DNA, 331 bp, Arabidopsis thaliana landsberg
tatcaaaagaactatcggccttatttgtggtgttcctgcaccaaattatcacggacatacccttctattgcaaccaacttctgaccctcctaaacacaagcatcagacaggttattacatttatatggattcagaatctaaatccaataaacataaaaaactgccctcacaccattattacagaaagagtgatactactaatacagtgaacaccctatctatcactgcccctgcctcactagcgcactataccgcttattctaatttatcgacaaccaaccagagctagtatgtaacaccatcaccaacaaaaaaataacttaaaaggtgg

SEQ ID NO: 75249 - DNA, 362 bp, Arabidopsis thaliana landsberg
tattgttggccaggcaggtccaaggctgaggacgacggagtcttcgtcaccggagaagctatattggttgttattatacattgagtagagagaaagagagatgagagagagagatggggttttgaggaaatggtggagaaagacaatggaggctggacgaaccggtaactaataaatgattctttttattttgtacttgctttggctttattttcctcctcgtaaatttacgtgttacgagtgacaagcccatgtctggttccaaatatctatatagctattcactttttacaaatgtatatatatacccaccacttggttgctgagttttgatgctacttcaacttactacctttttttac

SEQ ID NO: 75250 - DNA, 468 bp, Arabidopsis thaliana landsberg
gttttgtgttcttttgaagagaggccttaagcaattgcgtctttattctttctctggcatgaaaggggctcagggattcatcgtctctttcctctgtggtcttctttggtggcaaacgaaaatttctcgattacaagatcaggtattttagctttaactacacacttttgtctacatcattgtctatatccatgaggtgaccatacttgtggtttattgttgcagatagggctgttgttctttatctcatccttttgggcattcttccctctcttccaacaaatcttcacatttcctcaagagcgagcaatgctccagaaagaacgttcttcggggatgtacaggctctcgccttacttcctgtcccgagtagtcggggatctaccaatggagcttatattaccaacttgttttcttgtcatcacatattggatggccggtctaaaccataaccctcgcaaacttttt

SEQ ID NO: 75251 - DNA, 501 bp, Arabidopsis thaliana landsberg
agaaagtgataattatactaaaacatgtatttgtctaaaagatctaataaaagtacattatggagtacacacagggtacactccagtcaccaatcatatcttttgtcaaatctacatagttgcttcttctcctgattcactgtttgtctcaaccaaactcttattttttattgctctctttctctctataccccaatttgtttacatacctatccaacaatattaactatttcatctctccaataacccacatgttcttattaatacaaattctttacaatatatcaaacccaccttacaaagacatgaacccattcattaacaaacacaatataaggaagaacccctattttagattaagaaggtcagcatttcaataccccttctgcatctttcaaatggacacacatagaagatactaagtgaacatgaacgactgaaatgagatatagtcaaaactatctctttatttctttactatctttaccatctttgaacact

SEQ ID NO: 75252 - DNA, 504 bp, Arabidopsis thaliana landsberg
  unsure (1)..(504): unsure at all n locations
tttatacaggctttaactttacctgcgagtaactctttaatcgcagagtagtgctatgcgatctgtatcgttccacagtgtaacgttaccttaataagcgagatgggagaattacactttgatgttttacttttattttctttgctcatcaaaacattgatctattgtatagttgcatatagtcatgccatgcacgattcgcccaccaaaaaaatatcatgcataccgccaagaaaaaaaaaaaactttagagaatannnnnnnnnnnnnnnnnnnnntacgcttgtattgccgtgtgtactcgtgagtcgtgatacaaggaaagctctgtataatctatattcgctttggtcccaaccgtatcaaccaaaaaatgcgggcctcgtcatgctctatcatattcattcaacccgtctgtgttcttgtacagtacacattgaaatcgctctaaaaataattcctaacacccaaatattatctttggtccgccgtgtgtcgcgattg

SEQ ID NO: 75253 - DNA, 577 bp, Arabidopsis thaliana landsberg
ttgattacaggctgtacagcaactcgtgtataaacatatactactgtaatataatcattatttaacacgtataaatataaggcatgccatgggtagaaatcaaacgattcctcttctatttggaccgaagtgggcgaagcgagaggttttgttgaattagaggggatggtcgtattaatcgaaggaggaggattggatgttgttacccttagaatgggaactgccgttggctgtgtaccgatgatagcattgagtttcttcagcgttgggctggtagccttactacttgtggtattggatcgtgttggtgatctaattgattcgttcggtgatgtacatgtagcctgtattggtactgtcacggatctgtgctctctctcctctgcagcatgcattagttctttttccagttgctcatctgttcttagagctaaggcaataaaatcgtcacgattagtgggataagccgattcactacttcgttgtttaatcgatgatgttacggatcgacgcgtctcttcgccaattctgtccgatgaagtcttcgctcgtggtctctctgaggttcatcatctcg

SEQ ID NO: 75254 - DNA, 671 bp, Arabidopsis thaliana landsberg
aaatgcctcgactctcacgactctcgctcttatcctcgtaagccgtgaatccttgagcctgagattggttgaattttatgtttcttgcagggaaagtaatcttatgaagagagaaaaagagagatcagacctgagaggaggcacggattgcttgagcggcaagggaggaatgagaagagaaagattgagaagatctgaaggatccgccattggagtgacctttgagatcaccgtgatcgggatctggtggttgatgatagatgtcttctttgaatgttgaagctcttgtgatcccttgtcttctccgatacgccatttttgttcttttgattctttctctggcttttgtttttgttgatattaagaaatttgtttatcacaaattctacaatctatgatcctctggttttacgtaattcacgttctttaataagttgatatattaatcagaaaagaaaaccatcaaccttctaagtaaatgggttgactcgctcctaaatgtgtatgtaattgggctgcctaatgggctataataataatgggccaacggctcaccaagactgaagggccagaagaatcaatgtcattttggtttataattaaaatatgttgttcaaaacttttgactttgatagtctagaaatttattaaaaaaacttaaaagcccctat

SEQ ID NO: 75255 - DNA, 492 bp, Arabidopsis thaliana landsberg
ttcccgagaaaaaaaaaccaaataccgctttaaaatttcatatcgaaaccattttcaattttgtagagtaggagatatggctataatccattgtttttgaaaagagaaaatcttcatagtaatatttggcaaccgaaagttacaaaccatcgatcatcaagaggaagatacaatcaataaacctgtaccaaccatctgctacatctctaccatataaatctataacgactaatacaaaatgaaagttccaaatcggtgttgttactgttgccttctcatttgcataactgctaattatcattagagagaaacatgagagaagacgaagcctgcatatgactaatgttactttggatcccacagcttattttcttaatcttagcctcaaattccttgagttcctcaagcgtaagctcctcaatgggcttattgaacttatcctgttcagcagattcaagccacttgtgaagatcttcaccatgttttcttctc

SEQ ID NO: 75256 - DNA, 292 bp, Arabidopsis thaliana landsberg
acagttgccttttcagtctgatgcatgtgcgaaaggcgtttgtttttggtcatggcgatcgggctgacgccattttgcatctattttggatttgcctttggcggtcgtttctggccggaagtcgccaatcttgcacttgtggcttctggtttgctgagcgtgatcttgtcgtattcgcgggatttttcaggtcttgtcgcgtcacgacgctccctgcagaacgaacgcgccgcggcggagaagctgagtgcggacaatcttcgcctcgccaatatggacacgctgagcggac

SEQ ID NO: 75257 - DNA, 823 bp, Arabidopsis thaliana landsberg
acactagctgataataaatgtgtatgtcaaaaaatgcatagtaattagtaaagatactcttgactcaaataaacttttgatttcataaaatcttaacatattaatgggatagttacaactgtagatgatgatataacagagataaacacggaagtgtcaaaatcataggtttaaaaaaataaaataaaaagtgtcgaaatcgtcggactcaaaaatgtatttaaatacagttaagaaaaaacctctttagccacatcaatcattctcatcctttcttgtcttctctgatatttttttttctccaccattattgtttcttctctctctctattaaaccctcaaaattaaaaaataaagagacaagttcaatttttcttccttcttctcttttttttttcttctcaattttaattttattttggttggtagagattctctcttttgctcttcgtgctttgtatcgtgatcatcgtcggtgttggtaactgcacatttcaggtatttactcttacctcctcactttcgcaacaaattttgatttctgggtttttcatgtttttcttcttcaattgattgggttttctactgaaaattttcaactttttttctgggtttttgtctaaagtctaaaaccccttcttaaagggtttcttctcttttgttatgtcggcgatttcgatcaatagtgtctctgaaagttttcagctttttgatgatcggagattataagacgtaaaattgggttagttttctttttacctagtaaacctaattcttgtgttggttttgatcttcttaaatgagttttaaatcatgtttattt

SEQ ID NO: 75258 - DNA, 568 bp, Arabidopsis thaliana landsberg
tccagtcgccgacccggttgacttcgggcgtgccggggcctgagggcgacgtcgcggcgccggcctgggccagggcggcgccggcggtgagaaccaggccgcaggcggcggccgacagggtcttcatggaaaacagcttcatcgcgttactctcctgaacggcggccagcgcgcccttaaggcgtggccggcgcggcagtctctgccggcttggatgtcgccttggcccgggcctggctaaccatatcgtcatgggcggcggaaaagcccttgagcgagaaaggcagcgccaccttgcggccgtcatcgcccaccaggttgaccttgcccttgccggaggatcgcgccagcgattccaccatgtcgttttccaccggcatctgcacgaagcagccctcgcgggtacacatgcggtatttgaggaccggcgaagtgtagggtgtcggtctgcatcaccgcgcccttggggatcgccacttccagcggcacgttgatcaccatcaggtgacggttcacgctgggcgcaaaggcgatggagatcgacagcacgcgctgggccgtctgggca

SEQ ID NO: 75259 - DNA, 506 bp, Arabidopsis thaliana landsberg
agcgagcctctaggcgccgtgcgtattgttggcttcatgctcatcaccctcatactcggcttcgtgctcggtgctgcatcgctgctattggtcacgcaaaacacggaggtcgtcccgctggccttcttgcagtggcagttctcgctccccatatcagtgctggtgctgctcgcgcttctcgtcggcatgctgctgaccctgctctcgctccttccgggcaccatcggcgacagcttccgcatgcgccggctgcgcaagcataacgaggcgctcgctcgggaagctgagcggcagcgcgccgaggcagaagcggcacatgcccgccttaccgcagcgcagacaccgtacccggacgtgatcgacctttcccgggcttagcgggggagaatgtccgcaagcagatcggaatcgtagaactccttggcgagcgcaccgaatgagcgtgtgccatcggaaagcgtgatggccgctccgcccacctgcggattgtggttcgggttggaatg

SEQ ID NO: 75260 - DNA, 415 bp, Arabidopsis thaliana landsberg
  unsure (1)..(415): unsure at all n locations
ggccttcgggtaaagccttcgggcgccagagnnnnnnnnnnnnnnnnnnnnnnnnnnnnnnnnnnnnnnnnnnnnnnnnnnnnnnnnnnnnnnnnnnnnnnnnnnnnnnnnnnnnnnnnnnnnnnnnnnnnnnnnnnnnnnnnnnnnnnnnnnnnnnnnnnnnnnnnnnnnnnnnnnnnnnnnnnnnnnnnnnnnnnnnnnnnnnnnnnnnnnnnnnnnncgcctttgaaaaccaccgccggggggaaagaaaattttttttaaaaaaaaaaaaaatcctccccctccctcaatatcaggggtgggggggggggggggggtttttttttttattatactcaccctctttttattttttttatggaagaggtattaaaatttttccctcccccctctctttttttttttttttaat

SEQ ID NO: 75261 - DNA, 588 bp, Arabidopsis thaliana landsberg
caacattcataaccccactaaagagggttggattgaactttattgacaggtcatggtggaaccaccccccggcagggggccacattttgattatcaagaaaatttactctcgcctatatataacctcctcaacattctatgaaacagcgtattaaaaaatgataattgtatctcatttcacttcatttgttacgtcatccaatttccgtcagaagaaaaactgtgataagatagattccattcaactagttggtaccaacaatgagaagaagtatcacttttgaggatgttcactaatgttaactttcgtgaataataactttgtaaccaattcaacgtgcatgtctagttggtaagaataccagactattccacgtactaccaagattagttggtattttagccggcttgcataaaagtaataaatattattttattattcttatttccataaattatgagaaatctgctatgaattgctgcataaatcatcttttattaattggtccacaaagacagatcaaatccagttacgataatgttgaaaaggcttaagggatatcaaccttattaaagactgaacaatga

SEQ ID NO: 75262 - DNA, 550 bp, Arabidopsis thaliana landsberg
tcccacgccagtcattgtccgatggtcgcagctggcgccacgagccgctgcgccagtaccactgttatcgccgcgccgcgccatgccatcgacgcgatcatcgcccgccacgaggtgttgcagcgaatcatcgacaatggctggatgatcctgtggcagtacgagaacggtcggctgatgcgccgtgcggccagcggttggcaggtgctgggctgatcgtcgcgaaccggcggcaacacgttgccggcactcgcttaccaggcgatgcagacgtttttcggctcggtgaagaagcgcagcgcttcgctaccgccctcgcgcccgacgccggaatgtttgctgccgccgaacggcgtgcgcaggtcgcgcagcatccagcagttgatccacacgatgccgaaatccagctgggcgccaagccgatgcgcgcgagacaggtcgcgcgtccacagcgaggcggccaggccgtagccggtgcccgtggcgatggccagggcttcggcttcatccttcaacgggatcaggcttaccaaccggccgaaaattttct

SEQ ID NO: 75263 - DNA, 432 bp, Arabidopsis thaliana landsberg
  unsure (1)..(432): unsure at all n locations
gcgtgttcgccgtgctaatcgacgcctagttgcgcctgtcgttgcaagaccaccatctacgaagcctgggctggtggctaaggctctgtctgaaggaagataggacagtctattaaagtatctggccttggctatacctgcttatgccgtggcctgctttaagcgttctaacctcgctacctattgccnnnnnnnnnnnnnnnnnnnntcatcggcgtcatactactcattctcagcatacaactcattggcttagtcatgacaggtatccaaagcctgtgtctgacgacggctgtggaagccaatacctctaatcctttcatctagcattgctagcatcgctcgcttcgtggatacaacacggacctgattgtcgagcctcaagcgatctcgagaactgatgctgctcataacccgctttaactgtacctg

SEQ ID NO: 75264 - DNA, 518 bp, Arabidopsis thaliana landsberg
gcgaattgccccggagctcgcgccacgggggaagtgctgtgttagcgtgacttgcctggtatagcataggtggcatttcaggggaggtcgcatattcttagaaccacggatccaattctttctcgactttcgaccttgccttggtctcgggatttgacctttttcttcaaacctttcttctcttctttagcctgttcagtttttaacaggcctttaccattcaggtccctcggttgtggattcttgcattgacgacggcccgttgtttcgtcgttgaacctggtgtcctgcctttgagtcttgacagctcgtccggtctttttctcccccagagctcggctgcttcgtattttcagcccggccagcttacccctttcacttcgcccatccgctcttcctcttaaaaaaaccatcgagaccttgactacgaaccggaactcgcacgagtgaataaatcatggctgccgacaaggctgccgtcgcctcgggcgctgaccttggcgatggtctgaagcagc

SEQ ID NO: 75265 - DNA, 555 bp, Arabidopsis thaliana landsberg
  unsure (1)..(555): unsure at all n locations
ggatcgtcggcatgacgcccaagacgctggacaccttgtcgcgccagccgatcgcttcgcgctcctgttgcgacagcgccggaccggcgtcgcggtcgaaccagcagcgcaccagcacgtagatgcagaacagcagcgccagcagcaggccgggcatgatgccggccaggaagatctggccgatcgacacgttggccaggccgctgtagacgatgcccagcacgctgggcgggatcagctggccgagcgcgccgccggcgnnnnnnnnnnnnnnnnnnnnnttcctgtcgtagccgcggctgagcatcgccggcagcgccagcgtgcccatcgccatcactcccacggcgctgacgccgctcatggccgcgatcagcgtgcaggcgagcaccgtgccgacggccaggccgccgcgcagtggcccgaacagcatgtggatcgcgcgatagaagttgtcggcgatgccgcacttgctcaagatgctggccctgaacatgaagaacgggatcgacacagcgtgttgttgaagatcgcgcccttgatgtgaccggacat

SEQ ID NO: 75266 - DNA, 469 bp, Arabidopsis thaliana landsberg
  unsure (1)..(469): unsure at all n locations
taccatgagtagaatgcttagtttcanaaccagggaacgcttaccgagctaagttgttatttaaacccgttcattcctacaccctgaattcttnnnnnnnnnnnnnnnnnnnnnnnnnnnnnnnnnnnnnnnnnnnnnnnnnnnnnnnnnnnnnnnnnnnnnnnnnnnnnnnnnnnnnnnnnnnnnnnnnnnnnnnnnnnnnnnnnnnnnnnnnnnnnnnnnnnnnnnnnnnnnnnnnnnnnnnnnnnnnnnnnnnnnnnnnnnnnnnnnnnnnnnnnnnnnnnnnnnnnnnnnnnnnnnnnnnnnnnnnnnnnnnnnnnnnnnnnnnnnnnnnnnnnnnnnnnnnnnnnnnnnnnnnnnnnnnnnnnnnnnnnnnnnnnnnnnnnnnnnnnnnnnnnnnnnnnnnnnnnnnnnnnnnnnnnnnnnnnnnnnnnnnnnnnnnnnnnnnnnnnnnnnnnnnnnnnnntaa

SEQ ID NO: 75267 - DNA, 748 bp, Arabidopsis thaliana landsberg
  unsure (1)..(748): unsure at all n locations
ttctttatcatataccaatccttaacaagcacttcttctgtctcatgccacaatacttagcggcagaactggaaactccagcttttcttgtctctctctttccacacacaaatatttacctttagtttttgaaataagaaaatttgtcattagttttttttcttcatttatggtcatttgaccaaactctataattaataagcacaagtagtttctttgtatctttagtctctgtcagtcaatatgcctctggttctctgtattaaacaaagattttcccctctcagtgattcgggttcaaggaagtagagatacgttgtatacaaatataaatgtctttgggattttcgattttagtttatatattatttaattggatgacccatatatgtcccaaatcgttgactaaatgaacgaaaaactagcctccatttgacccctattatagcattatggcagatgacaaatgttttccaaacaaacaaaataaaaactttttccttttaactaaaaagtaaaaacatttctgacctattttccattccattatttcttgaatccgtaatccatccgtttagtaaaggatgttatgatatctaatcttagcttatcaaatatttcttgacatgtattcagtttatatcttacatgttgatataatctangtggatctcttgtgtagttgtgtgtatgtatctagaggcgttaagcatgcatacatattactatatgtcaacaaaaaatggaa

SEQ ID NO: 75268 - DNA, 522 bp, Arabidopsis thaliana landsberg
gttaggttcgtccaaaggggtatcatggttcgtaattacataagtagcctcactatagttaccttgtgtcttttaatcggactattactccactttttcaggtgatgcttcaactgttttcacgataaagttgtgtcattaattttttttgtttcttttatcttagaaaaagacatttataacacgaaatttgttcgataggatgattttaaaagtggtcagcaaggcaacaatctcgtgtttgagtgatgactaggataagttggttcttaaaattttcatttcttttctgtagatataatcttagaaataaggtcatgtctacgttaattagctaaatgattctttagttttatgtatgaaattttggaaattagcatgcgtaactgactttcttttacatgacttttgaccatttctagttactcgaatttaatattcaacactacatactatactacaaaaatttaacagtgtcagccatatgcaccataaaaattcaccttacatattatcttgatc

SEQ ID NO: 75269 - DNA, 485 bp, Arabidopsis thaliana landsberg
cactgggcatgctattattgatgtctcgggttttgaaattttttatcataataaaagaagatatgattacttgggcaaacatatcgatacagggccaacaatccaacagacgtcatgctctgatctgaagaggaccaaagacagaatggaaccggtaccgtaccggatgaaccttacatccgaatggggcaacaagtcattacaacctagagataaaatatggaagccaatagattgtaacctgttttaaaccaaaagatgaaaatcaaagctagatacacgctatatatcatcaaatggacaataagagcaacattggactacctatatgctgaaatgaaagaattgttactgagctgcattatgttacagagtcttgatagaaatatgactttgtgatctttgctgaacacgagacagcatcgttctaatgggttaaataataaaatgcaagcgctcacacgatacactatatgactctacac

SEQ ID NO: 75270 - DNA, 276 bp, Arabidopsis thaliana landsberg
tatcctcatacactgaaactcgaatccgaattgtatatattgaatacgaacctacgctttttgtttgacattccggtaaatgaaccattgtgcttatggcagacaattgatcagcccggtcaaacattttgtcaggctgtattatgcgaaccattttgtgttttatagaactctttccgcccctgccccgtcaccatatccgtatgttgctggatcggtctctgtattagaaaaatagttcagggactgaccttatttgtgtggctgaggcattat

SEQ ID NO: 75271 - DNA, 554 bp, Arabidopsis thaliana landsberg
caaatgcagaaaccatttgaggaagcaacttacgcgctcaaggtttgatttataagcgacattgtcgatacagacagtggagtccacatcattaagagaacagcttgaccttatctgatctgatagaaaatgtattgaaggtgcctgcttcgtttcccttctcttcttgaccagaagaacatagaagaagaagaataagaagaatttaactcaaggttattgttattgtggttttgattctgaatctgtctacgaatttgatacaactcaaacatatgataaaatcagacaagctatctcatttcttcttaaaggcttcataagcactccctgtcgtagacagtgacttgtataatcacatttcagtatctttgtcatggtcttactgcaacattctggcatcttgtgtgttgacattttgctcttaaactcttgatagtctttggctctcgtctccactcttaatatttgagaaattggttactgttaggcgtaattcaatgtttaaaaccagttagtaggctctgagcgggatgtctggatttttgcttttt

SEQ ID NO: 75272 - DNA, 521 bp, Arabidopsis thaliana landsberg
aataaaaatatgtacgtaacgcttgtttagtttcttgtctattagttattaaattttatttttcttcataatatcattataatctgttttgattatttttttctctaatgttttctattttggtagatagagttgagatggagaaatgtggactagtagttgcatcagccatttttaacgaccatgacaagataagacaaccagtgggacttggagttaagaccttagaaaccgtttgcttctacatgttcatcgtcgataaaaccttaaattctctcttccaccacaatgtcatcctgaaaaacaatccaagtgattatagagttggtgcatggagaatcatcaaaatttcgaaatccgaaaatctataccttaatccggctatgaacggggttataccaaagtatctaattcatagattgtttcccaactcaaagttcagtatatgggtcgatgcgaaaattcagctcatgattgatccgctacttctaattcattcaatgttagtaggtgcctgaagt

SEQ ID NO: 75273 - DNA, 299 bp, Arabidopsis thaliana landsberg
  unsure (1)..(299): unsure at all n locations
ggggcaaatnccaaacagagnactaaccattagggaacaggggatgttattgcagcccgtgtttaaaccgatcctacttatcacctctcgtattatactgggtattataccttacaactatgagaagaaatccaagcttgaaggagaatatgatgaagatgaagctacaaaagttatgaacttgattatactctcttataaggcaaaccaccatatacagagannnnnnnnnnnnnnnnnnnnnnnnnnnnnnnnnnnnnnnnnnnaagcgctgtagataaccaatgtgatgtccttca

SEQ ID NO: 75274 - DNA, 558 bp, Arabidopsis thaliana landsberg
cgtgtaagtgtgtgcaagcggtgtcgctgtgctggcggacaagaggtacaacagattgctcttcttcctggcctgccctgaaatcggatatcaacgccgagtggaccgctggtgattgtgatgatgatgatggtggtggcggtggtgatgtcaacagccgcgagaatgagtcggcggcggtgtacggcaaggggacccgatcggtgaagagcaaaacgggtgctgctgatcaaagactacttcttctgctgatgatcgtcgtggtggtggtggtagcggctatggtgactgggcgacagagcagcacaggcgacaatcgacgacgagtcaaattgagcaagtggatgcagtagtagcagtcactatgccttcactacagttgatgtgaacgcacttacattattgcctcactcgtcagcagcggcagaagcagcggcgttgctgctagctgcagtggcacgcctaaacacactgtggctgcgtcaggggtagcagcattgattgcaatacttgtcgccagacttcgaactcaaggacgactttttttttttggtcctt

SEQ ID NO: 75275 - DNA, 306 bp, Arabidopsis thaliana landsberg
accgacggatcatgcgcttcggtgggcgctcggatctgttgagagtgttttgatctgcacattgtcctatctggtatggaatatgggggtgatcagtaggagtttctacgactttcttaaaggaaccaagagcgttatcttgtaacttgagtcgcgcttgattggatccacgagattccaactgtccctgtgtactatgcagacataccccactcgagggaaaccccttgggaaaatcatcgactatagaagaccctgctgtgcttgactctatctcaactttgagagaggactagagaggcgttg

SEQ ID NO: 75276 - DNA, 398 bp, Arabidopsis thaliana landsberg
tacttcttggtcccggggtagcgcttggcgccgaacgaggccagcgagccccactggtccgaggtgaaggctctccgggatgctgggctttgaatcgtcgaaggtctggacgatggcgccgtcgttgcgctgaaagcggttgatctggccccagggcgtcctccacgatccgaagtcggtcgtcaggcggtccgacgcctctgccagggcggccagcttatcggccggcgccagccggtcggccatgtagtcgtaggggctgatccccgccgccttggcggctggcgcggtcttggcccacatcgcttcgccccagaacacggccagcgaggtctcggtcgagtggaggccccatttgcggtcccaggccttcatcgccgcgacctgctcggtgagct

SEQ ID NO: 75277 - DNA, 367 bp, Arabidopsis thaliana landsberg
  unsure (1)..(367): unsure at all n locations
agacccgaaaaaccncggggaagaaacggggagttctccaacacttctcaccaccggcggaanaccaaaccnggggaagcaaacggacggaaacacccccaggaccaccgcgggggcgcgggccggagccgcnacagacaccacccacaaggagacgcacccaccgccaccagganacaagcanncccataggagggagggacgaacggacccangaagacgaanccccacacaacaaaaacgcccaccncaagaaacgaanacagcggcagcacanaccgnccagagaagaacccaacaccncagcacggagcgcaccccgccacgaacccccgagactccgacaacagagngggccaccacagac

SEQ ID NO: 75278 - DNA, 339 bp, Arabidopsis thaliana landsberg
  unsure (1)..(339): unsure at all n locations
nnnnnnnnnnnnnnnnnnnnnnnnnnnnnnnnnnnnnnnnnnnnnnnnnnnnnnnnnnnnnnnnnnnnnnnnnnnnnnnnnnnnnnnnnnnnnnnnnnnnnnnnnnnnnnnnnnnnnnnnnnnnnnnnnnnnnnnnnnnnnnnnnnnnnnnnnnnnnnnnnnnnnnnnnnnnnnnnnnnnnnnnnnnnnnnnnnnnnnnnnnnnnncagtattaaaaagccctgcaggaggggaggggctaaggttttgataattcaggcgaagggcaatttttgccgaggaccttatcatcacgatcggtgccgcatgaaagtttaaccaccaaagccgggaaggaat

SEQ ID NO: 75279 - DNA, 362 bp, Arabidopsis thaliana landsberg
tcaaacggttggggaaagctctaagtgcctgtgtttgcgtatgttgagttgacagctaaactacaaccaagtgggtcaagtgttatgtatggggagccctgcaccactgtttctgtgtacaagcacttaacactattcagatccccattcgggttataaagtcaaaaagactacatttgcactcccaaattgacacacacggcactcttgggaaatgttctcaatggatgtttgttcaagtgttctggatctagtacaagaagaagtttttattttttaaaacttctttggagattaaattaaaaagacgcacctttgcaacccgatacagcaggaagcactcgggagacttgcatattgaa

SEQ ID NO: 75280 - DNA, 550 bp, Arabidopsis thaliana landsberg
tgatcttttggggactgaggaaatgacaagaacggtactggttgaacgacgtttgggcggacgcacctccaccaacacgattgtggtggcacgcggccgaaacgccgaaagggcccagatgcagccggcaaacgcgctggatctggcggccttcaagcccggctatgtcgctcgaccggaaccgacccaagatgatgcgtgggctgcggccaacgcgttgttctcccggttttaaaccgggcctgcgacacgaatgacgaagggcgccgcaaggcgccctttgttgcgtttggaggttactccttggcgggtttttccgcttacggggattcttacagcggcagcggggtgccttccgccgcttccagcgcggtctcttacttcggcgtgccgaggttgagcatgctggcgggcaggcgcgtgaccaggcggaccttggagccatcggtggcgaacaggcgcacgccctgggtgttgcggcccatgaccgagatgtcatccacccgcatgcggatgagttggccatcgcttggggcgatcatgatctggt

SEQ ID NO: 75281 - DNA, 496 bp, Arabidopsis thaliana landsberg
gctgaaggatgatgaacaggccgcagcacacgagcgccaagggcagttcgaacagccttgcgaacagcacggagccgggcttgcgccgacgcagctcgacgaggatgggccgaatctggatgggcatggcgctctcctcagctggacttcaattgccaggccggctgcacgtgcgccgcgcgccacgccggatagaacgccgccagcacggtggccgcgatggcgaccgcaaaggtgagcgccatcagcgacaggtcgggcttcgccagctttgccacttctggctggaacagcacgccgatgcccgacacgcccagtgcggtgagcaacagtcccagcgcgccgccggacaggcccaccgtgccggcctcgatcaggtactgcgtgtagatctctccgcgcgtggcgcccaatgcccggcgcacgccgatctcggcggcgcgacgcatgaacttcgccagcagcatgccaatggtgttgaccaggcagatcacga

SEQ ID NO: 75282 - DNA, 477 bp, Arabidopsis thaliana landsberg
gagagaactaatcggtatgtagaaaaagatatgttttgtcatgaactacacaagatatattattctaccaacacaggactagagcgcagtcttctatattaatataagtgcgaatttgtagcaaaatttggtagaaagagtaagagtcctgccacatatacagcgtcattgactagaagaacagaacaagcaaaacacgatacgaaaacaatccaatgatacattgatattcctttcattattcacaaactcgttgagaaaaaaaacgcacaaaaataggcaaataacgttcataagcaactcaatcgctcaccctttgataaaaaaaacaacaactcaatcattaattatgtgagttccctctcatcatccatacatgctttaatgacaaaaaccatacaaaacaaacaaatacttctcaaatatacatgaaaaactttatgcacggcttgtcggtcagggtctcttaacatcact

SEQ ID NO: 75283 - DNA, 613 bp, Arabidopsis thaliana landsberg
  unsure (1)..(613): unsure at all n locations
cgaacccccaggcgcttcacgcccgcctcccgcgcggcctggagcaggatgttttattcctcgggcgaggaatggccggtggcgaggacaagatcgttctgggcgcagagcttgaagatgtccgccatcgccggcaccggcttgccgtccctcacgacgggcacgaagggctggttggacttcgtggacttcacctgattctccgcgtcgaacgtcgggcaccagaccaccttgccgcgcttgccctcgacttcgaccatgcggcggacggcctcgggnnnnnnnnnnnnnnnnnnnnnnnnnnnnnnnnnnnnntcgtagacctcgatgccgtcgacctcctgcatcgcaagctgcgcgagcgcggcggttgggacataatggttcttcagcacgaccgcgcgcatcccggcggccttgtccgcgcggatcacctcgaagctggtggcggaccgcttgctgacgtcaggcgcggagtgcgcatggaaatccatcacgccctggagcgaaaccgncgccaccgtcgcgggcgtcggcgcgaccgcaagcgcgtttttcgcgccggtcggcagggcgacgcccagcataatggcactcgtcgcgaggagcgggc

SEQ ID NO: 75284 - DNA, 616 bp, Arabidopsis thaliana landsberg
  unsure (1)..(616): unsure at all n locations
tttattgaacacaatgctttatcatagtttatttatgaatttcgactcaatatacatattctaattatatttttgattactacagaaaaaagctattagttatgttcataataatatcaaatttaagactttatccaattttgtttttgaaaaaatcaaattattgtcatttatgtcagacaataattttgcacgaatgattattttttaaaaaaaacaaaaaaacaaagagaggaacaaaaagtcttatttggtgtctctcattctcaaatctctctttttgtgtctgggactctgtctctatacattcaaactcttcaagattacttcttcatctttacttggagaggaagaccaaaccattaactcttcaaaaatacaccgaccatacatggcgttggtgagttcaagagcaacgcaggactcaaaaccttccggcgaaaggaaatcccccgtcgtttattatctcagccggaatggccaactcgatcacccacacttcattgaagtacctctctcttcccacaacggtctctatctcaaaggtagcaaaagtctcatctntttgctctgtttttcttctcctctggtttggatttcataaaagtttgatttt

SEQ ID NO: 75285 - DNA, 354 bp, Arabidopsis thaliana landsberg
  unsure (1)..(354): unsure at all n locations
aagagancgcaaaaacgcccnaaaggacaggcagcgcccganaagaanccacaacgttccccccatggtacccaaaagcgagccacaggaccaagaacagngaccaggcccgaacccggcaacccgcaannacccagacaggaggaaaacagagaccaacacncaacccgcaaggacgaagaaacagaaaaacaaggcgacgaagaaagggaaagagaagaaggaaaagaagaaaaagcagaagaacaagacgaaganaacaacgccgcagaccaagaagcgcacacaacacggccagaagacgaaaaaaacganaccgcacccacagagaaagaancacaaaacaaaaaagaa

SEQ ID NO: 75286 - DNA, 361 bp, Arabidopsis thaliana landsberg
  unsure (1)..(361): unsure at all n locations
tagaaaggcaccagcaacactctgaagcgactggttcagaaaccagcagagaccccacgaggggcaggttaaccgaagngaccaccncaccaaaaacccaaaccccnccnagagaaaaaaaaaaaaaaacgcacccacngcngggcaccaggcacagagcgcgngacacaaaaacaaaaaacaccaacgncgaccggaaaccaaaaaaaccaacccacaaagcacnaacaaaanagagaaagacgcacgcgcgcggcacaagcnangcaaccagcagaagaaaacccaangccaaccctgaggccccaagaacgagcgnacatcacactccgacacaacgncaagcagaggnagaggcgga

SEQ ID NO: 75287 - DNA, 357 bp, Arabidopsis thaliana landsberg
  unsure (1)..(357): unsure at all n locations
cccacaaagtaaaaggcccgcccgtgaagagaattaaaccccccggaaaggaccaaaccaaacccacgaanngcacccgccagaccaacatacacccccggagaaccagcaaacacaccagcaacgaaaaagggcagggaaaagaaacgcaccaaagcccgggcaccagcaacggacaagcgacccacaacggacaaaacaaccaaccccaggaaagcaacaaagacccgaagcgccccgaaacggcggaaagaccgaacaacccgccgcgcagacacataaaggccccccgccaacgaaacgaggaggaaacatagctgacgccgaacccaaaggaacaaccgccggcaagaaacc

SEQ ID NO: 75288 - DNA, 565 bp, Arabidopsis thaliana landsberg
tgtactatatctatagtctactgacatcacatatcatactgtctttacaaaaattataatgattatttttttcatttttaaccaaaaagagaaactgaacctcttctgattctctcgagtgttttattgtctgaaaattcgtaagaaacggtctcccattgggaagcgcagaatctaaacaagcttttatttaaaaaagagcctctgattcctagtcctatgtccagccaatgtaaagcaaaaagccaaaagctaaaatatattacaatctcctccctccaaaagcaatattcaaactataattagtattagataacgaatcatacgttggagtaactctttgttactttcctcgtttagcctatatcttttacgagactatatccatctatatttttctaacccaaattgtttttgataggtccacaataatttgaccatatagttattacttattaggaacgaaaacttagaaaagtcaatcaggcctggctttatgtgggctttggcccacacaatatctctaaaccggttcgaccacattgattagcacttcttgaaacta

SEQ ID NO: 75289 - DNA, 174 bp, Arabidopsis thaliana landsberg
  unsure (1)..(174): unsure at all n locations
acaccaaggaccaacagnacaaccgcaagaaggagggcagagaggggaaccgaccccaccaagggaccaaaggaaaacagagaacgcaaaaaanaccacaacaaggaaaccaggcgggcaagacagagcaagacaaacacacgagacagaacggaggggaggagaacacaacca

SEQ ID NO: 75290 - DNA, 142 bp, Arabidopsis thaliana landsberg
  unsure (1)..(142): unsure at all n locations
ggaaancgaccagaaaaaaaaaaaagaggccgaggagaaagccgaccaagacaaggaatggtcgaccggtaccgaggaaaagccgaccagggaggagaaaaaagnggaccaggaccgagacccaaacgaccggggccgagga

SEQ ID NO: 75291 - DNA, 520 bp, Arabidopsis thaliana landsberg
ttctctgatctgactaatcctcagctttggctctggcccacaagccgcagtacaagcatgtgccctaacacgtgggtgttgttgacagtcatcatcgcagccccatccggcttggcagtacgaaagatgatgcgagaggagggaggaacagggggagccagataccgatcggccgcatcgggacagcccttccttttcctcgccgtggtcgatgatccagtctactggaatccaggagtatttcagcagcctgttaagtttgaccttcttgcaacccttcggcagtcttgtctgtgggctctctcgcgatccgcgtggatttgtcctttatctcagcgtcaaggaaagcaaatgcttgcaatgtacgaatatccagaggttcaccgtcgtcgaataagcccacacacagttacccgatcctttcggagtgggccctgctgatttctttttgattttacaacaggctgaaggcttttctacaacatttgattcgtctgaacccgctttaggtaaagccatg

SEQ ID NO: 75292 - DNA, 435 bp, Arabidopsis thaliana landsberg
aaatcctcgtatttttttgttccctgaattttgaagaagatcgacttactcctaatttctaatttgtataacattaaaaatgtgatcgagtgaggattactttagatatgaacaatactatcatttatttagcattctatatatatatgaacagtgtaatctttcgtcgctaaattaactggagctatatacaaagattgttattggagatttccagatagaagctcaatatagcttgcggcatttttaagctaaaccgtgagggattatacaaaaccagaagggtgctagaaaagcgatgaatatatttattatagtgtaaacatgttgtgttaaacaaataggtatcagttgcctccagagaaaaatgtccataaattgacaattgataatatgagagcatgctcctttgaaaagggacgggcaatgactatt

SEQ ID NO: 75293 - DNA, 536 bp, Arabidopsis thaliana landsberg
  unsure (1)..(536): unsure at all n locations
cgaaaagcccccagacggcgaaaccactgaaaactaggccccaggaaacgagatttaacacgattttttgacagaaagaaagaggacaaaacttaagaaaangaaaacggaactacacgacaacgagaaaagacgcgaaagacaccccacnacgggaanacaaagagaaagaagacacacccccacaagacacagaaccaccccaggggggacacaacacagagaaagcaacgaaagcacaaaaacgacccgccacgagccggaacaagcgggcaaagaccaaacgcgaggacccaaaacatacacccagaacggaagcccatatgacataatnnnnnnnnnnnnnnnnnnnnnnnnnnnnnnnnnnnnnnnnnnnnnnnnnnnnnnnnnnnnnnnnnnnnnnnnnnnnnnnnnnnnnnnnnnnnnnnnnnnnnnnnnnnnnnnnnnnnnnnnnnnnnnnnnnnnnnnnnnnnnnnnnnnnnnnnnnnnnnnnnnnnnnnnnnnnnnnnnnnnnnnnnnnnnnnnatagcgcatgc

SEQ ID NO: 75294 - DNA, 433 bp, Arabidopsis thaliana landsberg
tttcctatatagatgtctctgttcactgtggataaagaggacacccccttcccaggtttttctcagttttctttcccaggctcagcttccattttattcatcatgtccacactcctgtcccaaccatggaaaagtggctgaaggggaccagtgctctttggtagtgtaccccaaatgctgacattaggactccatgtctagctaggtgaaacactgtcactcataactcaatatccttggctggatctagaggtctcagcttccttctgtcggtgtatggtctacactcaagacagatctcaaacaccctgacgtgaaggttctatactgcttgcgactgctgagaaaatttaaatattgaacatcatatatccatctatggcgaggatcaggaggagagaagtgaatggggtgttagattgatggatgttgg

SEQ ID NO: 75295 - DNA, 172 bp, Arabidopsis thaliana landsberg
ctatgggcaacacctggtgttgctcctgggtttttcgatatgtttgtccttgcttttgctgagagattgtttcgacctacttttagaaaggcttgatttttatgacgattcgaggatcgcttttgggttttgtctcttggcttggccgattccgatgggattaggtcttggt

SEQ ID NO: 75296 - DNA, 725 bp, Arabidopsis thaliana landsberg
ctctatatgcagcaacatgtcaagctttctactgattttgctcattcttaattcgacccatttcagtctaatggctaatggtaagtaaatgagtcaatgtcacatttccttcttttcaaacattagtttttccataatcataatgcttcttttacttcttatgatatttttcaggtagaccagagcctgactctgtcgaattcaccaaggtacacgttttcaacatcctctgtttttttgttcttcctctactaaaacaagagtcaaattgatcttaaaaactcgtctttgatttgaaacagagtggagatcaagatgtgaagatgatgatgagaggtctaataggatcaagaccaccaagatgtgagagagtaagatgtcgttcttgtggtcattgtgaagcaattcaagttcctacaaatcctcaaacaaagcttcactctcctttaactacttcttcttcctctgagactattcatcttgactacaccagaggagatgatagtactaattacaaacccatgagctggaaatgcaaatgtggttactctatctacaacccttgaagaacattttgttttactttttcatcgacaatttttctctttttttttggtgttcaaaatctaaaatctgtgtacatatttatatttttagttgttttttattggtcaaacatatttttagttgtagtaatccttcatatttttatgggaattttctgg

SEQ ID NO: 75297 - DNA, 619 bp, Arabidopsis thaliana landsberg
gagctgaaacaggatgtgaacaaactgaagacagaatccggtaaggtggaaaaactttaggcagatttggctgagttcaggaaaatgatggaagatttgaagaaatcacaaccggcaaataaataaatttacccctgcatagcaatatgcaggggtaattgtgaagaggttttgagggcaataaaataagtattcctaaacactgtatcaatggaaaagtgtattcctgtgagtgtacacccctatgcctgtatgcaggggaaacacacacgcaaaacaaacgacacatccggtaatgcaaggcgtttccgaaaactgttttgtatggcatttgttgtactaaccacattggccggcgaagtgttgcatgcacaaaatgtatccgtagcgggtaccgtttctgctgccaccctgagcggtaccctcagttcgggaacgctgtcatgtattaccagtgtaggcacgctttcttcactcaccgtaaccaacacggcctttgccaatacattcagcgctgttactttaaccggcactgtaaataccgttgcacagcccaatatcacatcgataggaacacttacaggatttgatgtgaactgaacggcaagtgcaactacac

SEQ ID NO: 75298 - DNA, 697 bp, Arabidopsis thaliana landsberg
  unsure (1)..(697): unsure at all n locations
tacacaaacaacaattccgacaaacaaaatcgaaaagcaatcgtaggatagtatagagaagtaagaaaagatggtttattacagttgcccggcgagatagacacaccgggaaaagaaaatccccagattccgagaatttagatcaacagaaaaactcgggcaaggaagaagaagaagaaatttgtaaaggaaagtcaacgtcattcccatatcttcttattgtcttcttttttctctctttgactaagaaaaaattcgatttcaccaaccaattaaaactgtgactgggcttactaaggtctaaggcttttattcatttcattcaaaacttgggctttaaaacatattcaacgatgttgggaacaggcccatttatctagccttctcttctgtaataaagtatttttgtctgattaaaacatattttccaggtagattatataaatctcgttgtaatcataccttatatcattcactgctagatccaaattccatattgtttcaagccgtaaaccccaattataagaagattcgtatgaatgaattcaaagtgtgaaacaaatatctagattactaaagacattattaccgacatgagtagaaaaaccaatgttggaacaaaatctgacttgagnctttgataacactcaagtctcatgtaacacgataaagtggattactctcactttgtctcaca

SEQ ID NO: 75299 - DNA, 573 bp, Arabidopsis thaliana landsberg
aattataagaaaaggcttaccattgatggggtattggaacttttcttcacagactcttcagtagactatacccttttttgcggcttttttcctaatgtaaatgttaggagggggctgtcaatggtgaagggattacaaggtgacttcaacacatttgtcattattgcaataaggacaatcaaagacatcatccaactttattttttgcttcttgacgactctggcaccactttttctttttcccatttttttgttgtgttttaaaaaattttttatttttttctcgatctttttttgataattttgcgtaaagttccaatctcaaaggataattttttggatattgataaaaaattcttttgtccctttttggctttcttcctgttgaaactcttgcctgatttttcttttaattgaacactttgaggaagtttcctgggaactcatatgccaatatttccttttttttgttctcaagtccaagagaatttaggggttgatccttagaaaataaaaataaatagcagttaaaggactgttagaattttcaaccggtcgagagctctctatagc

SEQ ID NO: 75300 - DNA, 271 bp, Arabidopsis thaliana landsberg
  unsure (1)..(271): unsure at all n locations
gacggcagggaggnnggngacaataangagagaagatngcggcgacaccgtagacgatttttttgnggangagnccaaggccacgaacacgngcgaacccgagggnacgcccaaggctgaggagccagnngaccgagactttgnnnngnacaancgacncaaagcgcnggagagnncccgagggccaagcgcacaacgcgagaaggaagcaaaaagcgagggcgaacggaacccacgcgccnncgaggaaanngannaaggaagcagagaa

SEQ ID NO: 75301 - DNA, 419 bp, Arabidopsis thaliana landsberg
  unsure (1)..(419): unsure at all n locations
cacattctcctcatgttagcaaaccacaatttcttaccattgtccccaaaggnngaccctgggccattcttatctcccctattacagtaatagtccaaacacataaaataatctcagttacttattaaaaaaaaacaaaaaaaaaacaaatattcgcttgatgataggtgtttaatttgattcaacgacctcggttaggtatttttctctaacataaaactatataggagaacggctaagaaaagttatggtgttataaatacttgtgttgctttcgaatacaagtgagaaacaaactaatgaatttttgttattgttttcatgactatttacagagtagaaagcatgaaaacattcaatcatcataattcataatctatggagtattggaggttcatgaacgtaacaactttgagaac

SEQ ID NO: 75302 - DNA, 507 bp, Arabidopsis thaliana landsberg
agcaaattgcaattttaaaaaaaatagtacattttccgcttctgtagtttatactactatcacgtattaaattttgctatagttagtactatatcacttttcaatattaaattttgtatcatcacaacattttatagtatatcactattggaagccatcttccttaacaattgtgagaagtgatagtatattggaaaccattattggaagccatcttccttaacaaagtcgagttatgtgcagaagaaaatttcagaccccacatctttctttttgtttaaattaattaaaagttagccaacataggcaacttcgtattaactaaaataagaaagaaagaagttagtgaacttaatactatcatttataggctaattagtaattgctcatgtagtcatgttactacttactactattatagtagtattgcttattaccgtgatgccaacaggcaacaaccataatcaagctctctaaaataattttgtgatccataatactaataag

SEQ ID NO: 75303 - DNA, 163 bp, Arabidopsis thaliana landsberg
  unsure (1)..(163): unsure at all n locations
gagaccacggaaagaaccggaagaccaaaaagccgaaaacgagcagcaaccanagtggagactttgtaaggaacggcaagaggaggaagaagaaaacaagcacggccaggaagcccacgaacacaccgcacgagacgncacggagaagcgacaccgaaaaagg

SEQ ID NO: 75304 - DNA, 364 bp, Arabidopsis thaliana landsberg
  unsure (1)..(364): unsure at all n locations
aaaccaaacacccagggagacaaggggnggcacaaaacagcccacccgcagcacaccgagaagacacacaaacaaggacaaaaaaagcaaccnagcggagagagaaacccnggcggcgacagaaggannagcancagcgacaacaaccaacaaagcagcncggcccgaagccgaaaaagcgcgccgagcgagcgcaaccacaccacaaagcnccgcagcagcgaaaggagacacaaccgccggcgaacccgcnacagacggcaaagggagaaccaaccagcaaacaaaagaaaggcgacacccaacagaaaacccaaaagggcgcacgaaaaccgaaacaggcgggcccaagagaggaagagac

SEQ ID NO: 75305 - DNA, 460 bp, Arabidopsis thaliana landsberg
aatcggcccgttacaacaaggcaatgatacatcttttttggatatgagaatgttcgaatccggggacacatgtttggtggtgggtacatcgagagacaatttttcgattaaataaatttatatatatttaagtttgattaaaatcagcaaattcatacaagaactaacataatttggtcaatcctaatgcttttcggaactgattaaaagcatgaaattttttatgatagaaggggtaagactgaatgaggaacatcgagctagagagattcaatggaataagagattaatggcttgtaaaatctctggatacgcataatactctctcagtctctcacaaattgatgtattctgtgaatctaatggctgggaaaagttcctcattgtggatttcaaatccacataatccggaaaaaaaagatatgatctaaaaaacaacacagagtcaggaagaatgggc

SEQ ID NO: 75306 - DNA, 317 bp, Arabidopsis thaliana landsberg
tccaaaaactccaagttctaccattgcggttgccaaggcttccagcgcgcgactccggataatgtaccaactataatatccttagtgacattgtaggagaaatttaagaagctataatgtagtatatatatctatatactgtatatatatatatatgcaggcgcgcgccggtacccgcccgggccgggggggggggggacccggctgcaccaccacagccatgagcgcgcgcgcgcgcggggcgcgcgcggggggagcgcgagagcgcgcacccccccagggggcgcggggcgcgcgcacgcgcgcgcgcgcgcgcg

SEQ ID NO: 75307 - DNA, 739 bp, Arabidopsis thaliana landsberg
tctctgtctgttttcatctctgtctctgagtatctgtttcctagcgatttggagataaaatgttttatcccttgattcgattcctgtcatcgatttcttccaatgttgtttgattgatgtttgtgttttgattagtgtcaagggaaatctttttttttgtttcttctgaatctagttcttttgaatttagaaattgaaaaagtgttgattttgattctgtgagcgggaaaaattgattgattgatgtgtcctactgtcaatttagtttaatgggtttgtctttgtttcaggttttgtaatggcggaatcttccaaagtcgttcatgttcgtaatgttggtcatgagatttctgaagtaaagattaaaaaaaaaaccctttttcttctcttgattgtctttatgttttgggttttaagtttaattgtttcttctttgtttatcagaatgatttgcttcagctttttcaaccatttggtgttataactaagcttgtgatgctcagggcaaagaatcaggtctcttaaaacaaaactctactttcgtgttctgtctctctatttcttttgaggaaacttatggcttatatgaggcttcttgtgtactttgtgaaggctcttttccaaatgcaagatgttttcttctgccgtttagtgctctttcaagtttttttactaaaagttccacccccaacttttaaggttttgtggacccccattcacatggggccctttttttttt

SEQ ID NO: 75308 - DNA, 591 bp, Arabidopsis thaliana landsberg
  unsure (1)..(591): unsure at all n locations
caatcattataatttgttagctacggaagattttgccttttttttgtagaagcctaccgcaaatatctaatggttggtgttaaaaaaaaactaatgttactacaacaaaatttcagtatcttctagctcttagccctcgtcaaacccatagagttgcaaattgaatagccactttttggcgttgtttcggcaagtcttttgttgcagactgataggccaaaccgcttccatagtttattaaaattaagacagtcaagttgagggaaacaaattcaaacatcaaaagttaagacgacccactaaacagaaaccttaacttcagaaccacggatcacgcataaaataaacagtacaagtgcaagtctatcttcttttcctcgatttgaagcctctcttctctacccaaacgttgaaatgaggaagtttttgtatatgctcataaacttggccacaaatgctgcagtgtaacaccaacacaaagtaagaagatgatattttttatgtagcctatatcggccatatgcaataactgaaagagttatataccttctatgtganatatggctttctgacctaatcgcatccgatgtt

SEQ ID NO: 75309 - DNA, 336 bp, Arabidopsis thaliana landsberg
gtatccgcggagacactggtggcgtacgtggacgagctgttggtggagttcttggggtttttggtggattacgtggtggagttcttggggttcgtggtggaggaggtggtggagtcatttcctttgaacccatattgagaaactgctaaataagcttttgatgattgcactaaattaaggagtgccacttgtattacggtcggaggtgaacctttctatttatagcgtttacacgctttaattagttcggtatacctacaatatcgccactataccgcaaagaccttctttttttttttccgataaaccctcacacaaagttaattcccccaattt

SEQ ID NO: 75310 - DNA, 386 bp, Arabidopsis thaliana landsberg
aagaaccatatggtgtgaagtgaaatcatgcaacactttttgtccctctactgaatcaaaacttctatgaggactgcgttgcttcataaatctcaaacgagatggctcctaccaccaccgaacttactacatttccattagcttcatctagacttttctttgggggttatgggcttttatggactagagcatactcattatgtacacacaattatgacactcctgcctattaaacctaaaaaaacttctggagcctcaagtctttgacgtggcctagaaatacactcacacattcttaggattctctgacttcaaaataaaggcgtggaatatatactgtcgatgaccacacttgctaacctcaacttaaaattacaatctatggg

SEQ ID NO: 75311 - DNA, 580 bp, Arabidopsis thaliana landsberg
agaaattctcttattttaataatttttctactcacagtttgattttctcgcctttagatagcactgtaattaaattaaacaaaccgattttggtacgaacatgaacgatcttatgtagtagttaattacatgattaaaatacaaataaacagaaccgaataaagctaaaacttgattagttatagaataacggaagtagttttgtcctttattgaaaacttaaaaacaccgttcttctgatgacgtgtaccttctcttcatcttccctatctcttcatatagtgaaaaaaaaagattattcaatgtttctttagatttcaatttaattaagacaattgaatcagcttgtccccagaggatcttatcggtgtaagaagaatcacaaaacctcgacgaagtcataaagcttggatctttaagtttgactcgtttcatttctctctcttcttgttacttgcaggcgatgactcttcgttggtttttgattgaaatcttcttcttttgagtttttctcatctgggtcttacatttcctaagtaaattcaaagactttactgggaatttttgagaaagaatttgg

SEQ ID NO: 75312 - DNA, 405 bp, Arabidopsis thaliana landsberg
  unsure (1)..(405): unsure at all n locations
tggnaggcatagattccgngcgaggaaacaaagcccaccgagccgggccaaaacgaccaagaggccgatntactatattatccttttgggaaaggagaaaagaacnnnnnnnnnnnnnnnnnnnnnnnnnnnnnnnnnnnnnnnnnnnnnnnnnnnnnnnnnnnnnnnnnnnnnnnnnnnnnnnnnnnnnnnnnnnnnnnnnnnnnnnnnnnnnnnnnnnnnnnnnnnnnnnnnnnnnnnnnnnnnnnnnnnnnnnnnnnnnnnnnnnnnnnnnnnnnnnnnnnnnnnnnnnnnnnnnnnnnnnnnnnnnnnnnnnnnnnnnnnnnnnnnnnnnnnnnnnnnnnnnnnnnnnnnnnnnnnnnnnnnnnnnnnnnnnnnnnnnnnnnnnnnnnnnnnnnnnnnnnn

SEQ ID NO: 75313 - DNA, 513 bp, Arabidopsis thaliana landsberg
cgcccaaacaaaaagtatagcagaataattagttactaaatgtatcggcattaattataataccaaacaagtcattacttttgaattcggtttaaaaaatagttaattggtgacgttacagatcgagaagttattgatccctttaaggctttaattatgtaagagccaacacattgaagtcaccgacgatatgtcagacgtcggtccacacgagcatggaatcttatagtagattagatatgtaatagttatatatgtggaggtatgtttctatttttgtatgttttgtaattctccaagtatgcgtaatgtgatgttgcaaaagtttggtttctgagttttactttaagatatcttttataaaatgttttcatgaattgaactaagtgttgttaagttttgagatattatgcatgtaattaagtgttaatagcttaatcgataatacatctatgcaaagtttagaagtcactgatacgaataacatttaaggggacactatattaaatgtat

SEQ ID NO: 75314 - DNA, 407 bp, Arabidopsis thaliana landsberg
ttcagctttacataccatgttttcccgagtttcactggggaagatctccctaaatcattcctcagccaccttcttatttaagcttcatccccaatcaatcaatccattcatggacaccatcatcgatagaagccacgctatctcccctgaccttttatccaccataaataactcgatgatctcaatcctggcattctctaagaaatattcttcttccacctggtgcttgaatcaattggtgcatatccaccagttttataaagacttgactcaaattgtccttccgattttctacacaacttgatccttctgatgtttacaaagcttaaccagagactcttgcgagttctttaaagagacctgcgtggtgaaaacacaagatgccaagcaacaatggatagaacctc

SEQ ID NO: 75315 - DNA, 803 bp, Arabidopsis thaliana landsberg
ttgagagaacaagacacagagacaaacccagagctaaaaactttgttcccatggtggaagattgttatcacaaagatcaaattacactgtgttgtgaagcttgaggaaaaacaagactttaaataaaaccaaagtaaaataactcaacgtggctttttaatttaataatagaattcacgtggcttttatttttatatatattccacgttcctaattacaaagaattcaacgctattttttattttattcttgtcttcattagtttctgtgtatgtgaaacgcctataaattatgattatcccactcttaatcttgccaaaagaaagactaagaaaaatgatatttttaaaaaagtgaaaaaacgaaaagtttattattgaaatatatctataatggaatccactaatgctggtaaatccaactattaatcagtttaacttactacaatattatgaaatagaagtataatcattagagtataattaattatcctcataggccatagtccacgtattgtgaactactttgctgatataaataaataatgcgatgttcactacactactaccaaatcgtatctgttagacttggtatttatttatactataagataatattagcgtgctacatgagaaaattaaatacatatatatgattgacttgtgcagaactgacaaccacatgtgtcacgaccctaaaactcaatgatcggctataattaaattttcgttcggcagtaaattcaatatcaaaccttttagctggactaattttctagtttacttttttaccaatccactttt

SEQ ID NO: 75316 - DNA, 181 bp, Arabidopsis thaliana landsberg
acaacacatacacacacacatatacacatatacacgaatacagacacgaacagacatacagacacacacatacatatatacagacagacatacacagacatagacacagacacacatatacatatacacacatatatacacacatacatatacatagacacatatagacacagacagagaa

SEQ ID NO: 75317 - DNA, 545 bp, Arabidopsis thaliana landsberg
  unsure (1)..(545): unsure at all n locations
ttgcctgcgctgccaaccctgaagccgtgtttgtttgcgtagcaggatcaaccgtgccgaggagggtgttctttccagcaatacctgttgttgattcaaaaatgttgtaacctgcgagtccggtgccgatagcgccataagctgtccagttcaacactacactgcgatcacagatctgagacactgagctcaggaatatagtattcatggcagtgcctatagggctgatgtttccgcagctgtcgaaagcagccaggtaatattcttcggagcccagatctgcatcagaggaggcgtatgtgaagtctacattgataatgccataaacggtatcaatgggtatttgtgctgcgcctatcagtttataaataacataagccgctacatccggtgcagggtttatgttccagnnnnnnnnnnnnnnnnnnnnnnnnnnnnnnnnnnnnnnnnnnnnnnnnnnnnnnnnnnnnnnnnnnnnnnnnnnnnnnntgcccccataacagtagatactgaagtgcagccaatattgtctgctattttcacac

SEQ ID NO: 75318 - DNA, 489 bp, Arabidopsis thaliana landsberg
agacctgacttgggaagattttcaatcttcatggttcttgtcctcatccagattaattggcctccagtgatcctttactgatttgatcatttaggaactaattatatcgatgtttcttcatttaacttaaaatgattagagaaagtgataatacaagataagaatgagcctatatattaatctctgtcggttgttgaataaatcacaccaaatccctttagattgatgatttctccttcattcttattatttgctgattttacaaacgtaatataaaatctataaatatcaataatcaatttatatataattatgaattaatgacacaaatccatgtcttcgaataatcttgattgactaagtgaaaagagatgctgcatctctgtaggttcttcttgggttagtagaagcatgatgaaagctgatgctttcttggttgttgttgttgagagttgtaagattgttgtcatggccatgatgaggaaactg

SEQ ID NO: 75319 - DNA, 382 bp, Arabidopsis thaliana landsberg
tggactcttaattctgactacgcgttcgattttcatcttgagtggaaagatcatgaagtggtgtgtgcatgtgaaacccagtctacgcaataactggctgagaagcaagtctaagcgctgtaggagtcagctgcataaacctatacaaccagcatagggtcgatacccctgcccccattgaagccagtgaaagctatggcttggcaatctttgatatatgttgaatccttgagctgaatgtaatggtgaagtcatgtgctgccatttgagagactgcacaactgcaaaacctaggtggagagggtcagacaaagaacattggtgggtctgaaccctgagcctcgaccataacaagaggccatgctgaacacccgcttaccgt

SEQ ID NO: 75320 - DNA, 417 bp, Arabidopsis thaliana landsberg
  unsure (1)..(417): unsure at all n locations
ataattccgtacttgaacacatatgttcataattatactatcattttgtgcttttgctgcttaaactccttggttacgggattggttctaatgtccccgtaggcctaaatggaccgaccattcaccatactatttagacagtccaccagtttgatataatactgaatacaaggctggtctaagcgttctcctacatctataaacagtcccagtttnnnnnnnnnnnnnnnnnnnnnnnnnnnnnnnnnnnnnnnnnnnnnnnnnnnnnnnnnnnnnnnnnnnnnnnnnnnnnnnnnnnnnnnnnnnnnnnnnnnnnnnnnnnnnnnnnnnnnnnnnnnnnnnnnnnnnnnnnnnnnnnnnnnnnnnnnnnnnnnnnnnnnnnnnnnnnnnnnnnnnnnnnnnnnnnnnnnnnnnnnn

SEQ ID NO: 75321 - DNA, 422 bp, Arabidopsis thaliana landsberg
gggtgaaggctgagacatgtattcgccatcggggatgtatgctatatggaaactcccgtattcccgaaggggcatgcccaactggctaagggggccaatgcgcaggcaaagaatacggctgataattttcagcggctgctcaaaaatcaactactgaaaccatttgtatataagaaccccggcacgatggctaccgtgggcaaaagaaaagccgtggtagacctgccccatttcagtttccagggcaggatggcctggtttgtatggatgttcctgcacctgatgctgatactgaacgtaaagaacaaactcatcatcttcatcaactgggccatcagttattttaccaatgacaccacactgcggttgatattactgccttcggggaaggaagtgcggaaataattactctggatagttac

SEQ ID NO: 75322 - DNA, 339 bp, Arabidopsis thaliana landsberg
  unsure (1)..(339): unsure at all n locations
caacccaactngtgatgtccccggactcgagaattgcaagatgacactactgagacatgtcccatttttaacttttccggtattaatgagcgcaatggacactttgcccctcactactagaaccactggctacatgtaactgattagaccttgattcgccagggccatgatattcttatggccactatgcccaatggagctgcccgacgagggtggtgctttactcctacttagcgcgggcgagannntttcacaaccccggcccagtgcccagctggcttacgttgatattaagcaccttacgcatgtcttcatgcttccgaacatgacagatccctt

SEQ ID NO: 75323 - DNA, 545 bp, Arabidopsis thaliana landsberg
gttgagttgtgtgatttcgagtacgaaaccggtatactcatgtcttgttcaaaatcagttttttgttatcattactctttgatatatagcttatcatgttgaaggagttggtatagcagaattctgtgactcgagaccaatttgagtgttttggtttcttacattcaccgaacaaacctctgatttgaactccatccatgttccattcgtttcaaggtttgtcaaagtgttatctcggtggtcacaacacaggacccccattgctataattaccaaacgatgaatcaatgtcagtctttgagtcgttagaaaattcatgagacgatttataggtatacaattcaaagaagcaaaagaatttcatttatatgaagtcaaaaaataactttgcgtattttggtttcactcttggttggaaaagttgacagaacatagcatagataagcctaacaataatgtagagcataagccaatttatgtggaacatatctagaataggagaagaagaaaacaaattaaacagcctcttataaataaaaacaacc

SEQ ID NO: 75324 - DNA, 651 bp, Arabidopsis thaliana landsberg
cagagctttatattatcagaatttatgaatgttgtgtgctgcatgtaagttcaattctcattccattgtttattacgggttacaatactatattactatacatgaatggaaggtttataatttctcttgattttgaattaatgtggggcgtttttgataaaagaacaattcaggattatggtggaaacattgaaaatgttcggattgtcattccctgattattagacttttagcatcattatgatgctaaaacaacttttgctacggtagggttcttatttgctaaagataaagcggaaattgatttatacagccccagactcaaatcaacctataatgataaaaggctctcggtatatactgaatatttgttgcgtattgggaaaagcgaaaatgataatcaatatcattatgcaccttcactgattgacatgattaaaacgcatcctcagcatgaaattggtacgcatactttttgtcattattattgtctggaagacggccaaacattggcgcaatttgaggaggatttaaaagcagcgattaatattgcggcaaaaaatggtatcaacatagcatccatagtctttctgagaaaccagataaacgaaagttagcctgcaatatgttatgataatggcattcgttttt

SEQ ID NO: 75325 - DNA, 406 bp, Arabidopsis thaliana landsberg
tcctgtcctggctctgctcagttttattgattttctccttaacacttggggttattggtgagcactggcattctatctacaatgatgcttatttagaacaatatagataattacaagtggatgatcttaaaattcaaactatgtcaactgtgcctagttttacaagctgtagctgttgaattccattctaggtactgttctattatttaagtgaagggcctgcctttggggctgacctgagctaattagattcacctggacagtgagttagtcacttagaacatcctaaaaagccatacctgttcgggtgcattggggctaaatactcggactaccacatttggctatattgtttgcggaagtggctacgagggaattcatgaacggacttgatagcaaatgatta

SEQ ID NO: 75326 - DNA, 820 bp, Arabidopsis thaliana landsberg
ctagtaaactcgttaggttcaaacttgagagccaaaatgtacgtagtatatgtggacaatataatgctttgattgggataacaaaaattcaagtggtggtgagtgtgattaatatatatatcatagaccaagattatgagttatcccagatatacaataacctaaaatattctacaacaattatttgtagatatgaattcgatctctaactttgatccatatatggcaaatcctctattcactctactacatctacactattggtgtttaaatgaattttcacttatttgtttgcaattaattaaaacaagagtgaatctttaatgtaaaataagagtgaaggcaaacaaataaaaagtcaacagtaaagacgaaaactataaaacgacatgtcatcttgtccttgtaaaaggagattgaggcaacccatcccaaaaagccttaccacagagctcaataattagcatttattattaactgttcataaaaatccaatagtcttcttctctttactaattccgtataattgcaaacaaaaaaacaaatctctatagatattcctaagcccacgacattttcatacatttctcctcatatcccaaccatttagcctttatactctcatcaatacaaattttgaagggttggcaaaaaaataaaatcgcatataactactgttgtaatattccatcaaaaggtagagatggtatattaagttaatattttggttcctttctatatatatattttcactgattatgactatatatactttagtcatcaaaaaatttttcttccatcttgagagtgggtcgtatac

SEQ ID NO: 75327 - DNA, 118 bp, Arabidopsis thaliana landsberg
ttaaaaaattatacctctaatattcaaaaaactttttttttcttggaaccaacattcatcttttggggtcggttttttataaaactcttattcaaaacacactcatcatctaccttct

SEQ ID NO: 75328 - DNA, 346 bp, Arabidopsis thaliana landsberg
ataagaaattttgtaaagtaaaaaataaaacaaattattattatgtgtgtcaaaacctataaacaacatttttggagtatcactaaccaaaagttatatagtcacataaaacatagggatacattaattgaagaaattaagatacacattaaaaattgaaaaaaaacaatttttctatcataactcaaagtttatcaccaaaaattgtgttaattattccgtagctgttatttgtttataaagatttagatcattttgaccagactgtaactattagatcattttgaagaatcgtacaatcatactattttatttgcaattatatgaattagtccacactaatatt

SEQ ID NO: 75329 - DNA, 600 bp, Arabidopsis thaliana landsberg
acgaacacgaaagagagaaacgtttgttttcttaggatattaagaaggttttggcggatatttggccgattgtaagatatatatatgtttaatctaatatcaattggtgaacactttttgcttgacaattactcacctacatgtccacacacaaacacgtatacggactatctaaaaagcaaatacatggacatctccatacgccgtctatataacacgtacgttactatgacagaatttatgtttttcagttgaagataaccttcttatcttttggtagaaagaaacaaatcctcttctctttcatttatgtcttcctgaattacgtcaaattttgaaatttggaatgaaaccatataaagtctcagtatatgacctcattttctgggaccaatagttcttttcaacagagaaatatggtagtttcataaccttatctaatagtttgagttccacatctttataacaagttgcttttttcctttcttccatcacaaatattttcaattgatcacatcatcaattatgtaatagtctgtctacctcgaaagctgaaaaacatagtactacgaaaccttagttacaccagaaaaatacata

SEQ ID NO: 75330 - DNA, 606 bp, Arabidopsis thaliana landsberg
  unsure (1)..(606): unsure at all n locations
aaaccacagttttgtgcactgcttggttacaatgatagttaacgttcctaaagcttatcaatttttagttgtgatgccaaaaagtgaccatataaagtgtgtatacgtcttttctacagatcatatgcccatttatgctggatcaattctattgggcagaaaagatgtcttggcttggagttgctcctcaaccattgaaaagaaaccacctgcttctagaggactcaaatgatgagacgaacatcacggaagctgcacaagtggtagnnnnnnnnnnnnnnnnnnnnnnnnnnnnnnnnnnnagggctcgtgccatggaaattgctgaaatattatctcttgaggtaactatctacgttcagtttattattcttctcctccggatccatgcccccagaatcaaagtatcctttcttcacatggagtttttcttttcttttcgatgtagcgtagtcttttctttcatagttttaaggtatccagaaattaatgatttcaggatggagtcacagaagctgtgagagtgcttagagaagaggtgtgtgtagtttcaggcagcaaccgaatattttgatgagcatngtcatatatacaacgggaagctca

SEQ ID NO: 75331 - DNA, 629 bp, Arabidopsis thaliana landsberg
tgcagtccgtgcggtcgtgatatttgggatcgcaattgtgttcatatacctggacttgaggatgaagattgaaatgttacctttgcttggattatggatgctagattaagggaagtatcaacagtttataagggtgcttgtcccggggcttacatcgataaagcaagacagtatgcagggcaaggggaattaatacaagacaatattttaaagctagagcaacgctaccaggtccgattggatgatggcaagcgttctttttattttacaaaggagagtgatccaaacgtgagtgtattagatcaattacgtgctgaacttaaagaaaacaagattgaaaagtcccgagtgtacgatattttaagccaagaaggtgaggcatttcgtcagccagaggatattgcattacgcaatgaattgggtgattcagccaccgtagacagtgtttaaacacttaaaaaagaggctgaacaagggcgtcaatatgttgcagatcacatcgacgaagcagtgaaagctcgcgtacgcgctcatggtgatgcttttgacgaagagaaatacaaagctatgctagttcgttctgatgacttggaatatatcaaagatgaaatcaaacgtttacaaactac

SEQ ID NO: 75332 - DNA, 161 bp, Arabidopsis thaliana landsberg
gggatgtctggcttgtaccttcccactagttctgtcgatgttattcctgagaatcttttaaccccaattatgatatacttggcaaccatattaagatgggagtgctttgttcaccctccaatagggaacatgtgctggtgttagaccgctctgagacatcc

SEQ ID NO: 75333 - DNA, 607 bp, Arabidopsis thaliana landsberg
  unsure (1)..(607): unsure at all n locations
acacaaccaaacacataaatggattcaaagacaaagataaagttgaagttcttttgtgagcaaaacacactttaaaatataggaaataagcttctttatgggtatcaaaccctagtgattgtaggagaagaatcaggctggctcacagaagatgactttgatgcttccatcatgagagcagcttgctctaaacaactcttgttatcgtcattcgcattctccacttcctctttcgtgtataagtgtatcttccacaccacattgcagaaatcactgtccatagcagaaagccaatttcaagttaggagaaaagaagttgtgattgacctttagaaggtatgtataaagaacttactgccatggatcatcgccaacgaccatcatatcgttctcactatcagtatataagatcctccatcctttttcaggatccctgagaagcccttccatgttgaacagccgttcaagctccataaggagatcatcatacccgttaagtcgcgacaaatcaatagctctccccacttggcttccttgcttggtgaacctttgattacaattcacacaagaacttgatagaagagacatctaaaactgcnnactcaag

SEQ ID NO: 75334 - DNA, 121 bp, Arabidopsis thaliana landsberg
gagatggaacaaacgtggataccacggagggataccaagtatgaacgagcagacgacaacgagggaagggggaacaaaacaaacaagaagggcacaacaacaccaagagcaaacgaaaacg

SEQ ID NO: 75335 - DNA, 500 bp, Arabidopsis thaliana landsberg
  unsure (1)..(500): unsure at all n locations
aaacaaaaaaaaaaaggcctaccccttttcctaaattacaaataaaataattatgtcatcttatcctatctcgaaaaagttcgaagggataaaaggtgggtggttttgaatttatatcatacgaacaccaccgttcaatattaaatctgttggagagaaaaataaaagaatattctaatatgcatacaaccaaacatttacgcaatttcatgcatagaatagaaatacgtaataagaaaaaagtatattttatgtgtttttaggatttaagtatgatggtaaaatttgatagacttgtcagtaaaaaatttagctcagtaaagagaattaatcaagttcattttcttatattgtatgtgatctggtccagttaacatctaacatttgtacaacccaacatttaacttttgttatggcttttatctttttgagggacatcacanatagtcgatgaacttttttacattaaaatcaggatgtaaataccttttttttgagat

SEQ ID NO: 75336 - DNA, 561 bp, Arabidopsis thaliana landsberg
aataaaaatctaaactgtactgtggaaattacacaaaagagcttgttttacttttctcctctctggttcttcttagcttggagctcggatcttgggcttagctatacagagaaactgtcacatctctgaatctgattacaagaaagaaaagaagcatcaaacttgctgcttctatatactcttatcttctctgaatcagagatgtcggtttatgcagcactcgtcttcattcatagatttcgatttgaggtaaactaaactcatcagatattaaaaatgggttctttacttctttcgattccgggtgtcaaggagaaaccttaattgatgctatcttgctagatagctgttagatcatatgtctaagagaaggtcatattttcaaatggcggaagggaaagagaattcgattttgcgcaagtactggtacaagacgtttccttctgggaaagcactcggtggtcacattagaattcatacgaacgagaattcagttggttacaatggcaataacaaagataggttggtggatcagagaccgatgatggctcataatcataa

SEQ ID NO: 75337 - DNA, 613 bp, Arabidopsis thaliana landsberg
  unsure (1)..(613): unsure at all n locations
taacaaaataaggaaattttaaantcagaaaaaatagagaccgtccttttccactgtgaacgaagataaatttcgctattcctctctctctctctctctctctctctctctctctctcttcttcttctccgttcgtgctctggactcgctcgaaatcgatccgatgataatttatgcagctcgaaacttaatttagaatcatacctttttctggatttggctgacgaatccgttttcaattgcacgagttgcttcgccaggtgaatctatcgatcctaggttttctccgcctctgattttttcttgttcctgagtttttggaatcgaattttacgattggtagggtttgtgttcttgaggaggcttgtgaagtatttattatttggtttcgtttctcccatcttcaattatgtcggtagttttggtttctggaaatggactttgatatttgtgtacatagattgcaggtttgatccttgtttctgagcgatttgcttggtggagattggtataatctcatggagtcgtaatctattaggtggtttcatgcttgattgttcactaaatcacatttttatgttttaaagtatgttggtgttattggattctacta

SEQ ID NO: 75338 - DNA, 557 bp, Arabidopsis thaliana landsberg
  unsure (1)..(557): unsure at all n locations
tttcttaaatgttcatcttctctcaatcttaatgcccgatatatatcatagggatagagtggacgtccatttagataagaccagctaattgatttttcatttagtctaatgactttagttcagtttctctttacataatctaattgatttttttatatatttaaattctcttattctttaatttgaattttatttttgtttatataatagcaaaagtgactgaatcaatttacaaaatgatatttagataatttaaaaaacttttgaaaaattgaatctatgaaaggttagtttgcaaaaattctgcgtagaaatttatagaaaaatattatttttgtcctcaatgcatggaatcagttaagggataattttatgcaaaacaaagaaaggcttatgaaaatgtgtggcgttgcaaaatttttactataacaaaagcaaagttgcggaaaacattgcgaaacgtgaggaacacactaatgttcaggtacgaaccggaatctttcggtttacctaatatgttatcaaaacagctactcanaaagatgggcctgttttgg

SEQ ID NO: 75339 - DNA, 582 bp, Arabidopsis thaliana landsberg
actttactacctttgcttaggtttcctaatcgaatgattattatcttgatccattcaagatatactgtaaataaataaaaagagagcattggttaaaataaataagttatatacagtattttgataaatgagaaaattaaaaatgtcttagacgtaaaataaataaatagaaaagagaaaattttaaattggagaacctgcaattggcgcctagctaccaaaattaaagttgaaagcttttgaatatctttgtcactcaacatttatagtaaaaataaatttactcctactatttttaggtttacgtattttttttccagtgatagttgcttcttttcaatgtagacaaatctccaccccaaaccaaacaaatacctggcaaaaactgttggacacaaatgtttgaaaaaataaaacgttgaagattttgtaattttaaacggctaattaaaccaaatcaacctagcaaaatttatattttctatactacaatcagcctttgtctgggtaattattttttcaccatttcaagtttggtctacactaagcaaaagttaaatcaaatatgggacatataatatt

SEQ ID NO: 75340 - DNA, 460 bp, Arabidopsis thaliana landsberg
  unsure (1)..(460): unsure at all n locations
aagccgacttcacgtgacgattacttacttcttttttttttttagtcgggtcatcttccttccggttcctgatctataaaaactgcttcgcacatactctctcttcattcccactttacactttctactttttaccaaatcctatactcaactctaattcccaccatttctgatccacgatatggaaattgggtggtaggaagcagagttagtgctgccattgaatctgatctgatcggatgatagtgaaannnnnnnnnnnnnnnnnnnnncgatgaggaaaacggcctatgtaaggcggaatctggtgatcgttaccttcatcttcgtagaagtcagaaccctgactcttcttccggtgaccacctacacttcatgatccatgtgatcttgacaatgcaaacaccacaacgtaggagtagccaatattgaacgcgaagacttactagatatatgtatg

SEQ ID NO: 75341 - DNA, 553 bp, Arabidopsis thaliana landsberg
  unsure (1)..(553): unsure at all n locations
ttgtggctaaccccctacatgctggtcccatttaattttggacctcgncgcttccttattattttcaaaataaatacaaaaagtatgtagtaaaaatatacatatatacttcaaaaatccaatccatattctctcacaatttttttaattcttaaacaaatgaatagaaaattcgctacactactttaactaaatgatgcaagaactttataaattacttgtaggttcatgatccaaagctgtataaagtataggagtacttaagattatctattnnnnnnnnnnnnnnnnnnnnnnnnnnnnnnnnnnnnnnnnnnnnnnnnnnnnagtaaatataagtagctataggtcaaacttaattaatacatcgagctagaattccacgatccctcactatagttaattaacaactacgagaaaatagccgaggaccgttttgcatgattaaatcctcttgtttgatttatattacacaaatatatgagtaacgtattttgtacgttatacattggaagaataatataaataaataactaaaatgaggaaaaaaatg

SEQ ID NO: 75342 - DNA, 465 bp, Arabidopsis thaliana landsberg
  unsure (1)..(465): unsure at all n locations
gtctttgattgcttcgagattaccttgaagaacagataattgntatcaagttttactggaacacacatatgaagagtaagcttttgagcaaagggattgatccagccactcatagagggatcaacgaggcaaaaatttctgatttgaagaaaacaaaggaccaaattgtaaaagatgtttcttttgtgacaaagtttgaggaaacagacaagtctggggaccagaagcaaaataagtatattcgaaatgggttagtttgcaaagaagagagagttgttgttgaaaaaaaataggcctagatttgaatcttgagcttaggatcagtccaccatggcaaaaccagagagaaatatctacttgcactgcgtcccgtttttacatggaaaacgacatggagtgtagtagtgaaactgtgaaatgtcaaacagaggatactagcagcattagctattcttttattgatat

SEQ ID NO: 75343 - DNA, 520 bp, Arabidopsis thaliana landsberg
  unsure (1)..(520): unsure at all n locations
tttttggcacaaacttgttgactgcttgttaggggctaccaagtantaactttttttaagatacgangcgcatgaggccgttttaccttgaaacatacgtacattcttatttatttctaattattacatgatcttctgatagagacaccaaccctatatgccattttgcgtgcgaaaatgcgtttagatttgattctgacgattgtgttatgcgtcgctgcttcggcagcggagattattcctcaatatctaacgaatgccttcaccaatgatggatatgccatcataacagtgccatttataatgacaatcttggtatagttgcacagtcactcaatgccacaattggaaacacgggattgtacaagaagctgtactacgtcgaaggcaacggatttgagatggggtatgataactgtttttgtatgaatgcatcaaaataagtcgcctatgcttatttctcatgtgttacaagtatttgcgtggatatattgccgaaaatgagacagcgaccatgtgt

SEQ ID NO: 75344 - DNA, 587 bp, Arabidopsis thaliana landsberg
  unsure (1)..(587): unsure at all n locations
ggactgaggaagattccgttaccaatgaaaacaggatttccggtaggttccgaatctaaattcttactccaaagaatttgtttgtttcctaccaaataaagggtgttggattgcgtaattgccagcaggttgttggatcccggaatcgggtttaaactgcgcaggttatcgtccaggcgcaagggatttaatttgggaagttctttcgaatcggattccgaagaggaaacttgtccgtttaacagttgaacggtcgtgtgatttgttcctgtcaggcaacttaaagtgacttgctgatcccggtcaaaatgacgatacgatactttctgcggactatcgttgaataatttgaattttaaggtggtggattgctccagggttgccccggcttcatacgtaccgattattcggttgatgctttgttgcgaattggatataagtacactgttattgaaaatttccaggtagacttttttattggcttgaagaaaaggaaaagcatatcctttcagagtagcctgtttttgcttgtcggatannnnnnnnnnnnnnnnnnnnnnnnnnnnnnnnnnnnnnnnnnnnnnnnn

SEQ ID NO: 75345 - DNA, 385 bp, Arabidopsis thaliana landsberg
gacgagctcctcggcaccgatccggtactcgcgccggtggtcgagaagaaccccgttcggcggtgtgccgcgcaccgtggatccgtccgagatggcggtccgggccgtgctcggtcagcaggtgtcgacctcggcggcgcggaccctggccgcccggctcgtccgggcccacggtgacccgatcaccgacccgcacggggagctcacccacctgttccccaccccggcggcgttgtcgcgtctggatcctgagcagctggccatgcccaggacccggcgaaccaccctgctcgccctggtcgcggccctcgcctccggtgagctcgtcctcgacgtgggtaccgactggaaccaggcccgcgccgagctcgccgcgctgcccggc

SEQ ID NO: 75346 - DNA, 574 bp, Arabidopsis thaliana landsberg
  unsure (1)..(574): unsure at all n locations
acaaaacaatatttgttaataatattttacgaaaaaattacaaataagttcatgtgggtcacggctgttgaccatatcttagctgtgtttagccgttttgtttctcaatttacgcatttttcgatttatttcgtctgttgtgctttttaatttaaaagtaaatacgttcaacatctttagtattctttgttggtttcacctaattattagtttcacgttttctgtctccagatgtgttacgtttagatattgtttatatataaaaattgttgttgaaatataaatgttaattacgttacataatggtttaccaaattgtgtaaatgctacaagcctacaaccaagaaataacaaaagagttaagagaatttatgactgactagaaagagtttaaattgttttgtcttttacgaaatgcaattatattttgaataatattataaacgaatagttgcaactctataataatctggtaagctggatcactactgaacttgcgaaggtaattaatttcttagaagaaaacanatacataaatattgtatggaactttcattatgattaattaaagaag

SEQ ID NO: 75347 - DNA, 533 bp, Arabidopsis thaliana landsberg
acataactgccatagaatatctttgccacttgtattaaagaaaacgttttaccaattttaaaataaaataaaaattaagaagggttcaacgtgctaagaattacagaagatagactcttgtatggatttgtacccctatcttagatggaatgtaactagattttttttcttcttctataaattacgcttaaaatttaatgcctggaattaacatagaattaaaataatcagacgtttaaatgctttaaattctcagtggttaacaataagatttattgagtaaataactattcacattaatagttttctaacaattttttcaaaaagtaaaatgattgctaacaagttaagaaaaccacactagcagccaaaataaaacataaacaaacaccattcctctatagttggcccaatttatacttcacaacatgtaatcaattaattagcagaaatataatagttaaattgggataaaaatcttatgtggtaatggctttggtttattttaaactgatgagtgaatttatctcgag

SEQ ID NO: 75348 - DNA, 214 bp, Arabidopsis thaliana landsberg
  unsure (1)..(214): unsure at all n locations
attatgctcgaagaagtatatggcattgcttttttacttcttttataaaaattctcatanccatgggcattgtacacatcttttgcaagctagtcttttgggagtgaaaattggcaagtgctgactagtgactactgtatttttgacatgcagggtcctggcggagcagctgggcattatcttcttggtcttacatataggtgacgggtaaatt

SEQ ID NO: 75349 - DNA, 442 bp, Arabidopsis thaliana landsberg
gggctttgtagtctggttatctaagtgatgcttgccatttcctatatgacctggcagattctggagctttccctaatgttgtgtgctataatactgtgattgctgagtgtagcagaagtgggttaaagagagaagcgtaccagattttggaggagatgaggaagaacggtcaggctcctgatgctgttacatggcggatactcgataaactacatgattctatggatctaactgtggaaagagagttaatttcaaaccctgcaacctcaggatagactgtttcaaaagcaataaaattcatgttttggggctcaaggatcttgcattttgatatcacgatcactggtaaacgtaaaaaagtgggctcggtcgcttatctgtgaaattgttgctggcaaagccaaaagttcagtgggctattagcagtattgaagacaacatt

SEQ ID NO: 75350 - DNA, 202 bp, Arabidopsis thaliana landsberg
aagacctttgtggatagagtgctttgtcacttgtcatatggtctgtctgctaactgctatgtcatgttctctctttcctgtcaggaacacaccgctattgagacaaagcctgatcattctcttgatgatctccgcttgaatagtccatggcctgagctgaagaggttctctctttcatcacacctcctcctcccctcccctc

SEQ ID NO: 75351 - DNA, 576 bp, Arabidopsis thaliana landsberg
cctttggtttattgaatcagatacgaatgtttgaaagattttctgaataaagaatatagtttcaattttatttttaaatatttgacgctttagatttattccttatttccatttttggacagttgtatataaaatattaaattatcaatattcaaataaaatgttaggtactaatcgaccgtactccagcatctaaaaaaaacaaattattttataaccaaaaagaatctagaattgaaaaaaaaaagctcagtaattcttttttttttttgaagtgtttccaaagaaaacctccaaattcaattaaaaaataaattaaaaaaaaatgtagaacgatgtgaactctaaaccataaaaaagaaaatcgtttcttgctaaaaaaataaacacttaaagcccacgattggcccaatgggtttctatgtgtttcaaaagcccacgaaagcacctcccctacaataataatattcacagtcgtaagaaattggggacaaagggtttaagagttatcgtctcgaagcttaagcttgatcctaagattcaacaatggcgataatgtcagatcttccacgggat

SEQ ID NO: 75352 - DNA, 558 bp, Arabidopsis thaliana landsberg
  unsure (1)..(558): unsure at all n locations
cgtggtcgcagaagaacaccatccagcaccaggccttcctcgatcaggtgaccggtgacgaccggcgccgctacctggactggttcgccaccatcccgctgtggctggacctgggcgggctgcgtgttgtccatgcctgctggcacgagaagtccatggcggtggtgcaagagcactgcggcaccgacgcacccttcaccgacccggatcatctggtgtccgccaccgacaaaggccatccgctgtatgacgcgatcgagaccctgcttaagggccccgaggtcagcctggtcgagcacggccagccgaagtacaacgacaaagacggcatcgcccgtggccgcgcccggatgcggtggtggaacagcgacgccacgaccctgcgcgacatcgccgagatgagcagccgcttcacaaccgaggccgacgagccctacccgcgcctgccagagttggcgctgccggacggngccagggagttcgtctacccggagacgtccggtgttctcggccactactgcgncagggtcacccgtgcccgcgatgactacacgagcg

SEQ ID NO: 75353 - DNA, 573 bp, Arabidopsis thaliana landsberg
  unsure (1)..(573): unsure at all n locations
ttaacaaacacagaaatgaaccaacattggcataattaagacaaaaagaaagaatttcttgtttaatcttcctttgaagtactcacattttcatctttcttggaagacctagacttatcagatttagtaaaaccaaccaatgctttaatccatctccctgaagctcccattctatctcaattccaacgatcagcaacataaaacaacacaaaacctgcaaaattgccaatttagcaactaaattattcaaaacagtaaagctttctcctttttgataacaaaatagacaaaaatggaaactttaattgagttcactaaattctcctgacaatgttggatccttaaaattaaaaccaagaaatttagtaatgaacactaacaaaaaatccaaactttgcaaaattgagacacatcgaggagaagcaaaattcaaaaactttacaccggcgggcgaggaaagatcgccgatgagatctttcaagagagtgagtggcgacttcgtgatcttttcttcttcagtcagtgagcgtctttctcggctactntacttttttctctctctctctactctac

SEQ ID NO: 75354 - DNA, 139 bp, Arabidopsis thaliana landsberg
atcttaggaacttttgcaagtttttttgtaatgtaatatttaattttttagacaaaaaaaattaggttcaataaaatgcttgtatagcaatgcaagaaaatgaaatcacatcttccacaattttgagaaattagttcat

SEQ ID NO: 75355 - DNA, 664 bp, Arabidopsis thaliana landsberg
  unsure (1)..(664): unsure at all n locations
taatttattttaataatgaatgtatggcattataggaataaaaacactctaatgatggtatctttggaataatttctaataatcttgtattttagagaatcgtccaaaaataaaagacatttaagttgtattctttgagaagctcactttgtttttccactccgttaaacacatgccaatgtatgttagtccatgaaacactttacattattcttggacatttcctcggacataaaaaaaccaatatgacaaaagcttaagcgcaagtggcaaaacattgctcttaagaattactcaatctatctcaatataccaatgtactcaatctatctcaatggttggataactgttaccacgagcattaccacattataaacccagactctcacgtcaatagtcagtggtaacctcatgaggaaattcatgaagacttaggtggatgtcacccaaaagtcattcgtaaatcgtaataagtcagtcgcatatcaaaatctgatatttgataaccattctcataatagcaaccctcaacatcttgaacaaggtaaagaaaataactagtctcacccagagaaaagntgtatctataaaactttttcaaaataaaaataaattaaaactaattctcagtttttttaggcattttaacgaacaaattttgtgc

SEQ ID NO: 75356 - DNA, 780 bp, Arabidopsis thaliana landsberg
tccttggtgctgccattagatgaagcaagaatcctaagttgttagtgtttggataaaaatacaaattttcaaagcaaacaattttttgttaccagcaggtttaatgtcatagagtaatcagtttttagagatcatattaaactgagacaacattagataactaattattttattggtccataagaaaagtataatcagacacaaatatgattcaactattatactcttttttcttgaccaagttctaacattctggtgatgtgaattcttttttaccataatgataaacaaatatgtttttagctatgtattgtttcactgagataaaactacagtctacagctcaagtatttgagggggacacatgagcaacttctcatgtgccacgtagaggaagacatagcctacgagacgtccacaacataaggttactttcattaatttattgcatatatctttcagcagttttatatacacacatcatcatcatgcataataattaaggttttttcgaatagtggtatcgtttggaaaccgtaaaagatccttttggaatataagaaaataaattatagaaaaaggttgtggggattgtatataggtatggtcccaatcgcagctacaagaaaatgatattcgttgttgtgttagaagtcacatggtgcatgcttttccatttttagtcatttgatgtaacttgtgtctaaattggcctgttttagcttttgtggtttacatttattttgttacttttttatttaggaatcccctctttttaaa

SEQ ID NO: 75357 - DNA, 127 bp, Arabidopsis thaliana landsberg
atactgaactggttggttactacatacgataattttcttatatgatttatttatacgttcgtccagattaaactaataatatcttgatacttggaatgggaaacccaacaaaaagttagtctgcgtc

SEQ ID NO: 75358 - DNA, 439 bp, Arabidopsis thaliana landsberg
atagtaaataagggcaataaacgagacaatttatcccttttaataaacaacaattacttcctgaggaaaaagggttgttctttggattggcatggataaaatatagagaggtaaaaatattacgatttggattgggctgaagcccaagatatggttacacgattttcaaattctcgaagttgtacaagtagacaaaagacatcttgttttgtcgtgttgtcctttggtgtttgtcgttttgatgtgcttgtcaaagaaccctgttactaatctgaacgaatataacttgccagtgtagccacattacactaatatatagacaaagttgccatgttggtacaatcatgagtcacatatcatgtaataaagtgtcatttcaataggtttagaagtttagagcacataaataaatcggcccatctaaaatgttgccttatgg

SEQ ID NO: 75359 - DNA, 663 bp, Arabidopsis thaliana landsberg
agagaagtttggaaggaaagagacctgggtgacaataatgataattgaaagattggattcgggatctgaatatttttattggtttcctaaaatttccccaacagcttggtaaaagtgtagggctccagcttgttacttatgtgccttttacaaaagtaaatttctctgtaagatccttgttccccttttttccttttccattatacttgccataattttctctttatttcatgtataaatatctcttctcatcaattaaaactccaggattttaaataggtatatttctgagtgggaaaaaaatgaacccatcgcgtagagaaatatatgtcagtatacattctctaattacattgactttttaaggtcatcacatgactaatggtccaaagactttgaagagaaaaaaaaaactcttatttggtaggaaacttgtaattttgtaagtttccaagaaaattttggtactaattcagcaatttgtgtttctgatgaagttatggatataagttcgacctttagttagtccatatcactccaaaataataccatttttttctttgggatttgaaaagaactctaaaaggtggtttgttgttaactaaattcccgtagcttgggttattgggattaaaaccatagttaggagaggttttaaaaaaa

SEQ ID NO: 75360 - DNA, 662 bp, Arabidopsis thaliana landsberg
gcatcttacctaccaccccaataaacacggcttccatttcaggacatgtgcgctctttactttcttctttttttggccatgttactgttatattcataagcttcaaaagattacatgttttattttgctcatatataataaaagcaaaatattgcaacacctgaaaacatttattaaattaagtctctataactatataagttattttattttagtttgactttcaaaatgataaaataaaaaatgttagaccgctttaacataggaaataggaaacatttgttttccaacaactttttctctaaaacattaagaaaaagtagtttatttcatatcttatttttttagaccatcgttttggatttactgtacggtggtcatgtggttaaggaggatcaatgatagtagtaattcgtagaatagttaatgagttgttgtcctttgtaatcatgcatattcggtataattataattaattagtatggctgcctctttaattatgtacttggtctaggaaacgaatcttcagcctgggatatactaaaattttgttgtgatctttttttatatgggctgttgaattctctattgcggcatgtgcgttttggttattcgaccctttggcttgaaatggtttttttttttttctaacctcttttttg

SEQ ID NO: 75361 - DNA, 447 bp, Arabidopsis thaliana landsberg
ccccaattatgacaacaaacctcacgcgtagtgtcttcttcatcttgttctccttcatctaccatgattgctcttctctttcttcttacccttttcctcatcctcctaaacccaatctcagccattgatttcatcttcaacggcttcaatgactcttcatctaatgtctccctcttcgggatcgcaacaatggagtcaaaaatcctaactttaacaaaccaaacatcgtttgctactggtcgtgctctatacagcaaaattatccgtacaaaagatccagtcccatcctctgttttacctttctctacttctttcatcttcaccatggctccttacaagaacacacttcctggtcacggaatcgtcttcctctttgcaccatcaactggaatcaacggttctagctttgctcaacacttgggttctcttcaatttgacttacaaatg

SEQ ID NO: 75362 - DNA, 768 bp, Arabidopsis thaliana landsberg
aattcaaatacaatcattagaagaataaaagttgatttatctaatctaagttcaaatacaatattttatgggagatctaacattatttgatgcatgactatttttgtttcgtaagatatatcttgtttccccaaaaaagaaaaagaagaagattatatcgaaatcatttttttttaatcattgaggaaagattgtagataactaaaaaccattctgttccattttaaactctttcacttagattatccttataatattcacttgcgtttgtgtacattgtctgaattctgaaatattaatgtcctcggcatttcttacataaacatcattttttcagtcacgaaatgacgaatatgtcccaagaagaatgagcaaagaaatgcatgtcgttttgtgaataaaaatctatccactaacttgcaaagaccaaaaagatggctttctgtctctttcaacttttattaatttggttctctaatttgaaaattagcagaacatatgtttcagaaattagtgacttattaaaacaaacaacttcattatcctcaactacagtagattacatagcctgtgatgactgatgactatctcatgtttatttttcgaacaaaaagttcgactgattcttttgcttgtttggtttcttcttttaacttatgtaatgttatcatgtttggtttcttttgctttatttttacctgattgatggcccatttttttaaaaaagtcccattaacattaaagaaaatttattgttccataagggct

SEQ ID NO: 75363 - DNA, 873 bp, Arabidopsis thaliana landsberg
ccattttagatcgtgggagagatagatacagaaagagatgtggaggttaaagttatcggaaggagacgaagagagcgtgaatcaacatgttggaagacagttttgggaatatgataaccaatttggaacctctgaagagagacatcacattaaccatcttcgtagcaactttactctcaatcggttttcttctaagcatagttctgatcttctctaccgttttcaggtacattttttttttcattttccttataacgcatattggttcagcagcaactatcttaaattcagattttaaacttgataaaattttattttattttgtgcacccaaaacttgataattttattacttagttttataaatcatggctagcatatttctaactgtgaaatttagattactttttttacaacacatgatccacagttgcatgtaaaaggtcacttattaaagctgtaaaggctatagaacatttcaaaatttgagacgattatattctgatatgtcttagttttttttaagccagctaattttgggagtgactagaatattgactttaaaaggttttgaagactttaagaaacaaaaaaattctttaaaatgataatttatcccatcatgcattagtgattttaaagtcatataagtctggataaaaacactcacatccttattttgttctttcatgtttacaacatttcttctaaggccgaaattaaccgttttttagtcaaaggcattggtctttactttcttatttggggttaaaaaaaataaaaacccgatcgggtcattttatggttgaccatattttggcacaaaccatattgataagaattggattttgaaatttgttttgccaaccaaaaa

SEQ ID NO: 75364 - DNA, 583 bp, Arabidopsis thaliana landsberg
  unsure (1)..(583): unsure at all n locations
acgttggaaaacaaataagctattataccaatttatattgagtactaatatcatgaacggtacttcgttatcactcgtgcccgtcaacagtgccattggatatatgatgtattacatatcatggtattatgtaaaatgatcgagatcaaatatcatggacattctataagtgcatcgaggtcagttagacttagtatcgtggagcatacttcttgaccaccttactgtcggctaaaatttatatgtaaatattctcttgatacctcataatgatgtgacgtacgattctatttatgatgttgcacttttatttgttagatacacagtcattattttcctttgatatggttgtgaattcctctaatatgattatgtttttcttatatgacttggtctgaggtaattgatttgaacaagctgctgttagatttatcaccaactttatagaagaaaagattctgccactatgagaaattggcaaataatatagagaaaaatgtagtcaatttaaaataattattcctttatgagtgcttacnaaataatgatattttggcaaacaaaattagtatttataagtcat

SEQ ID NO: 75365 - DNA, 791 bp, Arabidopsis thaliana landsberg
aattgaacaattaagaaatgtcacgtcagaagagtttccgttggaatcctggatcgatgtttcttgataacttggttagtttcatgggagctccagggcaagctgtagagacaggtgtgtgagaaccataaccagattcctctgtttgaaggcagagaacaatactaaagatgttttgatacaaagactcaatgatttcttcatcggaacaagtagtaagagaatcaatcctcatgtgattattgtagtggtcacagagtggagaaattgcaatgattccactgtctcctttagagatcataggagttatgggttccacataatctgatgttccttcaatggagttttcttcatagtccatggtgatggtgtcacaatatctggaaaaagacagtaaaaccatacattcatacaaagcccttgtaaacgaaaccagaggaagcaacgagtttaaaatccatgattattgaatagtacctctaataagctatttcacaaattgcgttaagttcgagaagaaacatttagtcgcatatcgtgatgccattaatgaaaaaaaaatctaatctaaaagacaaaaagattgcacgacaaattagatgatacgaaatcatcgaatttattagagttatggcactttttcagaaacgattcaaaaaagtgagaaaatctctatacctttgactcatgaggtcctgtaatttccttgtatatccttttctttttattttcctttgaacagcaattttttttttggcgaaatttttaattaatttttttattaaaacttt

SEQ ID NO: 75366 - DNA, 726 bp, Arabidopsis thaliana landsberg
ttggtgtttacgggttagcagatcaagctttaaagctctatgacaatatgatagcatcagggattaaaccagacaatgtgacattcattggattgctgacaacttgcagtcattcaggccttgtagaggaaggttgcatgattttcgaatccatggttaaagattatagaatcccattggaagtagatcatgtaacatgtatgatagatatgtttggaagaggtggacatttagcagaagcaaaagacttggcgacaacttacagttcacttgtcaccgactctagtaataatagttcatgggaaactcttttaggtgcttgttctacacattggcatacagaattaggtagagaagttagcaaaggtctaaagatagcagaaccaagtgaagagatgagttttgttctgttatccaacttgtactgctcgactgggcggtggaaggaaggcgaagatgtgaggagagaaatggtcgagcgaggcatgaaaaaaactccgggatgtagctggatcgaagtaagaaaccaggtttctacttttgtagtcggtgactcttcacacccgcgcttggaggagctttctgaaactctaaactgccttcaacatgaaatgagaaacccagagacgtttggaccttgatcatttagggatatagaccaatgaaaaatattaaagccagataccccaacaaaacaacgtttcaacacaccatttcaactttttt

SEQ ID NO: 75367 - DNA, 449 bp, Arabidopsis thaliana landsberg
tcttttagtaacatcgagttgcgaaatgaaaagactcgacatggaagaacaaagccaatccagaagctgcttttgtaaactgtggagaataaagctctaaattagctttcataaagacaaagtctccatgaagataacccatcatgaaaggagattttctcctaaaggattcgttatctgaggagctttactagactcatacaatccagtacatctatgtagagagggtaaggattttcaaaccttgagttacggttgcagatggtaatcaagactaaaggcgcgaatatctgaaggactacttccaggcctgagaaagaacaaagcagataatagtcacatcaaaccataagtggaataaattagcatctcagtaaccactacatgcgggagatatcaattggaacgcaccttttatttatcgtaccatagtgaaactttagtttccc

SEQ ID NO: 75368 - DNA, 485 bp, Arabidopsis thaliana landsberg
ctcagaaagagccgttgcttaagtttgcaattgaaaatatcttagatctaagtacaagtttaacctacataaactaagcattaagcaatagggttgtttaaccatatgccaacctcaacccttgaaaatatattactatatactcactaatcataataaatacaaccataaagatcataacaagacaaattaatatatgtgagattgatagttaaaatctcataaaattattgaatcaagaaaatattatagctgaatagagggtttttatagaataatcataaactgttttatagcatagactaataaaacaattattagtttttttttaattaaacttgataaataaatctgtgtgaattaaaaatcaaaatcaaaatcagaatcatgtttggaaacgtgaaaacgttaaagtggcggcaaacgagtttatcttctgaaaatctgaacggcgaaatattgatataagtcacattttcaagtaa

SEQ ID NO: 75369 - DNA, 439 bp, Arabidopsis thaliana landsberg
atcctgaggaaactagggtgcattatctttttatgaatgcaagttaagcaattcgaggaattttccaactcaatgatttgaatggagtttaataatattattttaacaaatcttcggcgcgacatcgttcgagaccatgacaacagttcctttccgtgtccgtatgattataaatcttaatcatatcatttccccctataataacgtacttaaaattattaatactactattattggtaatctctccgccacataataagaccactatataaacgtttactccattaatgtactgtaatcgaatcgacaagtctctctcttctctctctctattcaaaaattataccggcaaaaatggacgatcaaccgccgctgatctgggcgcagtttgagtctaccggatatgctcgccggagatcatcgattccggcgattttag

SEQ ID NO: 75370 - DNA, 628 bp, Arabidopsis thaliana landsberg
tcgcttactatacgaagctaattcatcatttgaccattttagattctatcaaacataattaactattacatattttgtcatgcaatcagcacaacaatttccttccattcgttaaaatgtaaatggcacaagttccttaatctttgctcccaagttctgattgccttgatgttaatgtgcaacttcaaatgttctttgtcatcataatgtaggtctatatccccattgattgcattgcccaaatcatcttgtcgcactcagactctactggagttagtctcccctgcttcttgcccattcagaatcaccattcacaatcttgcccatcccaccctctttgtcacatatttaatgaacatccataaaacattatatatagttatattataactagcacttgttatatgataggctgatcatcatttttaaaaatgttcatccatttcatatatttagttttactataaaatgttattgaattttctgttactttttaatgctactttttgttttatcaggattaaaaatccaacgttagctagattcctataattatttgataaacacgatcatctacattctaacgttatcctttcccattttaatcttacattttggtttccaaaac

SEQ ID NO: 75371 - DNA, 438 bp, Arabidopsis thaliana landsberg
aatcggtgcaaagaccgttcctataccctatggagccacaaagatcagcactttggctctttacaccgtattccaaacttccctttacaaggctctgctcacagctttcaccgaaaacatcaagatagctaaagctcccgcggtgaagcctttcggtgcgtgcttctactccaatggaggacgtggagttcccgtgatcgacctggtgctgagcggaggggctaagtggaggatctacgggtctaattccttggtgaaggtgaataaaaatgtggtttgtttagggtttgtggacggaggtgtgaagccaaagttccctatagtgatcggaggatttcagatggaggataatttggtggagttcgatcttgaagcttccaaaatttctttcttctcttcttttttgcttcacaacacttcttgctcagtgcaaaggtt

SEQ ID NO: 75372 - DNA, 620 bp, Arabidopsis thaliana landsberg
  unsure (1)..(620): unsure at all n locations
tccatattgcttttctacataaatctcatttgtagtttttcttaattgagaattatattccttttagcttgattccaaagttcttaaaaccactaataatgagtttgttagttgtcaattctcatatctactaaactaatctttttcttatttgtcttcttctttgctctatcctttatatttatccaatacacaaccgatacaataaacatttgaacaaagattgtgtcccacaaggccacaaatagagatcaaaattatttttggtacatacatttacggtataaattatatatatagtggcccaatacatgttctaatttgtgttttaagcataaattgtaaatcaaagttcatacttttttttttattattattccggatcaaagtgtatactaatcttggaatcttacaggccaaaaagcgcatgtttcaaaacaacatagaattaaatgaccatgatataccaacgtttaattntaaaatttgcatttttgcttctattaatatgaaaatcactgattctagcctctcaaacgatatatagagcgaataaaatttgacctcaccaatacaaacaaaattaaaagtgaccattcacttctacatatataataata

SEQ ID NO: 75373 - DNA, 374 bp, Arabidopsis thaliana landsberg
ggcaggcaaccacgacccggggaggcgtttatttatttttggctttacgcgccctacactaatgtttgaatggattccacaccttggtcgactggcccggatgaggatggaacattaatcacgatggggacagctcattcccattgtagcactcgacccacggattattgctacacccaagccctcacctcgggtggactacactgttcggcttggtccacactgtggggtaacactaccagccgaatgatccccaagaacacctcaagctcgcaggctcgcaggagcggcggccgccgccacgcgctcagaagcccactgtaccttagagcttactggagggagaggcgagcacctgggccaccacgcagccc

SEQ ID NO: 75374 - DNA, 506 bp, Arabidopsis thaliana landsberg
tgctggtttcaagccgacagcgtggatgtccgactggtagggaagcagggcgacgatctttttcccttcctgatcgacaccaaactgctgcgcctgcttgatggtgttgaccgtatcgtgcccgccggaggcgatggcgatgacttgcgcgccagacgcttgtgcctgaaggatgtaggacgagaaatcgagcgtctgcaggggatgcctgaccgcgcccagcacttcaccgcccgccttcttcactgcctcgtccatcgaggcctgcatggaatgcccgaattcatagtcggcgacgatgaagaaccacgacttgagcccctgcccgatcatgctagccgcgacggcattcgtttgggcatatgtgtcggtattccagccgatgccattcttcgtgcagccgtcttcggtgattttatccgtcgcggcgctcgaatagaacgccatcttgccggcattcgtcacgaggccgttgacggcaagcgcgatgcccgaattcatgacgt

SEQ ID NO: 75375 - DNA, 614 bp, Arabidopsis thaliana landsberg
ttaattgttaagtttagaataataacaataatgataaatttttgaaaaagaataactaaaatttatttttgatgaaattcatttagtttattcattaatttaaatcagctataagtctttttgttaaattgctaatttttatgtgttttacatgtttgtgcttttccaatatctttttgtttgaaaactttaaaagtcaataaattactcaattttctaaaaacgacaaattaaatttgtcggatgcgttaattccaacgtgtaagtactttttgatttatagataacggaattaccattatatagatcacaaagacataaaaacaaaagtacaatgtttaatccagaattttctcgttgacgaagcgtgtattcattgattatgggatctaaattgtcgtgtgtgtttataatttttttaataattaaaattattataaagtcaatttacattgataatatgcaaatatatcaatcaaaatacacacataaatatgacgatttaaattcggctattatagtgttcaaattttaataaatatggaatatcgatggccaagttatttatatatttgacccgtaaatgtacatgtattaatttaaacgcacagaga

SEQ ID NO: 75376 - DNA, 699 bp, Arabidopsis thaliana landsberg
ccatgttttatttaattaattcatgaaataaaatttaatcaaaaacataagtcaatatcttatgtttttttttttcatgaactaatttttgtaatttttcgtaggcttacttccttgattggtctccttcatgcattagtcttgcattttcttaatacagcaaattatcaatgatcaaccgatcgacatagaaaaagagtagttaattaatttattatcatcaagttgagaagacatattcttattacattcatatacaattgatatcagtaatataacacaattacacacaaaaataaagatcttaaatcaaagtcaatgaatcatttctaactttacccaaacacctttgcttggtatgtcttgattcaccacaaaaatcatataataaccaggccatgcaatattcgccgacctcggagtcctcacttgaacctcatacatcggcgatttgccttttcttcgtaaacttaacattgtccaaaaccaaaaccctctgattcatcgcgaaactatgcgtcgtgaacgtcggaaataccataatcactttcgccggagacgtaacttttccggtgaccgaaaatttcaacttcaaaattcctcccatttttaatcattcacttgaagttcaagagatataatcttgggacgaagattccaaaacttccgctgtatgttaacccgaagagaaagcttttt

SEQ ID NO: 75377 - DNA, 786 bp, Arabidopsis thaliana landsberg
gaagagacattggatccctccacgggaaatacccgggattcagttttccttaagccagaagaagctcgtggagcacttttcgcagaccttgccgcgctgcttgccacacaaggacatcacgaccaagcaaaatctttgataacgcacgcgttaactctcttaccgaacaatgtacaagctacagttacagcagtctacattgatctcatgttgggtaggtcacaagacgcccttgctcggttaaaacagtgtacccatgtgagctttgttccagggagattggaagtgagagcctcatagaagatttgtactctaaattggtatggtttgttcttttttgaaattcaagctttagaaattagttggttcgataaatatcagagaataaacttttgtacaagttttttttttgttttaatttcttgtattagtactgtgagatgatatttgcactcgtgacttaaatttgggtgacttgggtcgttgagggattagtcgatttcttgttcaggaacaacataagattgttagaacaaacaccagtttttgtacttttgtttttaaatcttgtttcagacacccccttattctatggctttagtagatttgtttacttttgaacaatgttccagaaagtggtgggcgatgactcaactcatagctttggggtttaggtgattttaggcagtttaattggttacgacctggggtgtcaaaaaaggggtaagtaaccccaacccaaaccccaactttaataattaaaaatgaagttttattgaatttaaa

SEQ ID NO: 75378 - DNA, 125 bp, Arabidopsis thaliana landsberg
cccacggccaacgaggcatcaagacctaaaaaaagaatctttactattcccttttatacgccaacgggagcgaacacgcgcggcacagaggcaccggatcccaacacaactccgcaggcaagcgc

SEQ ID NO: 75379 - DNA, 304 bp, Arabidopsis thaliana landsberg
  unsure (1)..(304): unsure at all n locations
ggcgacgcgcatggaagggttaacgagaggcccactggccctgtttactatccagtgaaaccacagaggggggaactggcttggctctgttaggggaacgggaagaccatgctgagcgcgactctagtgcggctttgccaaatgacttattacgtgtatgataagtgggagccttagcacaagtggagctccaccactcataacgaatttgtacttactccatgaatcacaggggttgtacaatccgtgttgctgagacccaggttcgctacggagagtcgannnnnnnnnnnnnnnnnnnnna

SEQ ID NO: 75380 - DNA, 468 bp, Arabidopsis thaliana landsberg
atttgtaaaaccaaacttgtgcttgctagcttttgctttagagagaggctttgtgtggacgtcattgaccacgtctcttgcaattcattttgatgtacaaagaaaatgttattaaactgaaaataatagtcttcaagcgacggcaaaaagtctcactccattgagtatcctacacggaacttgaattgggttgcatacatatttcttgtttgaaaactgaagcgtatcaaggctatggacaatttaaatcataaatgggatcgatgtacctcttctcatgaaactcctctagacttcaaaggcgatgatatgcaggtttgttgattaattttcgagattctttgtcgtagcgtatagaaaatatcaattcttgaccttctaatatgggtctacactatggatactatttcacttgctgtgcacactagaaatctcaaatcctttgcttattggacaaggtcaaagaga

SEQ ID NO: 75381 - DNA, 529 bp, Arabidopsis thaliana landsberg
ttgaaacataatttgattataaatacctactcatattttattgaccacactaaaaccttcttttcttttccatgcgttttaaacagtccagcggatgctctcccggcaataggttataaccacatcccatacaaccgcctttccagctttctttttctttgccacattcttttgagaaatgaacatctatggtagttcttattttagcaaacaactttgtccaggttaaccacttcgggcgccactccctttgctcaacataaatcgttgttggtattatttcaccatcatagctatctgtataatcatattgccaactcttttgcatttgtttccactcatcagtccaaatatttttactattttttcgcgtttcatgctcccaggtatcattttttagtaaaatagatgttctaatccattgcttggttataaaaggaagacttcatgcccaccacctgttaccaccattattagttcctttacctcctttgtatatccaaaaagtattgctgtgaatttgaatacc

SEQ ID NO: 75382 - DNA, 447 bp, Arabidopsis thaliana landsberg
agaagcacactttgaattttggagaaatgggtaaaaacaaaagttgaaaggataataattttttttgcttcaaagcagccaaattcttataaaacaatttgacaaatgcgacaacaaggcgtggtaagatgtacattgtacatcagtcacagatctgttgtctctgacgcggattctatgatactacgagcaatggccaatcacattgaagatagaaagggataggggctagtgtaccgaaaggtgcgtgacgtgatgacattcgggttttcatagcatttctagtgatggaagataaccctccagaagaggcatactgaggaattagttggacttctcaactctgatgatgagaacaaaacaagggaatgtgagattgtagatctatcatgggagagattaacaacagagaccaatgccgtcagctaacacatgagatgtcaatga

SEQ ID NO: 75383 - DNA, 195 bp, Arabidopsis thaliana landsberg
gatcgcagatcaagcaaaatacccaccaaacttgcaaatgatcaaaccttggagatgcatatgatattaagagtatatatattacatatttacatgtgaacttggttcatacatatatatcaaatctcatgaacaactttttacgaagaaaaaatagattcatatacatgaacttggtgccatttttgttgcgaa

SEQ ID NO: 75384 - DNA, 598 bp, Arabidopsis thaliana landsberg
tggagaacaaaaaaattgtaatgctggaaccacgcaggctcgcggccaaagcagttgctggcagtatgtttttgttactggatgagccaacaggtactaccgttggttacagagttcgctttgacaataagatcagcaaaagcacccgcattgaagtacttaccgaaggtattctcacacgtatgctccaacaggacaattcacttgaaggtattggtttggtaatatttgacgagtttcacgaacgcagcctgcatgcagatctcgcactggcgctttgccgtgagatacagcaggtattacgagaagatttacgcatcctgattatgtccgctacgcttgatggagaaaaactatcttcattacttggaaatgcccctatactcaccagcgcaggcagacaatatccaatcacatttcattatatacctaccgataacgaaacatacatgcaccagcaaatggcaaaagccgtttgtaaagcaatcacttcacaaccgggtgatatactggcttttttgccgggagcgggtgaaatacaacgtacccaggatttattggaacaggaatattatagtattattagcgccattactat

SEQ ID NO: 75385 - DNA, 159 bp, Arabidopsis thaliana landsberg
  unsure (1)..(159): unsure at all n locations
aaaagaaaccaanactagaaagccanngacganggacagcnacgagaaggcgagaacccagcnccccggactgggnnncaaccanacnaaaaaccngncgcncccaccagagangggcaacgcaanaacccccggcacaccaaagggaacaagcaaacc

SEQ ID NO: 75386 - DNA, 416 bp, Arabidopsis thaliana landsberg
  unsure (1)..(416): unsure at all n locations
aggagaaccccnggaaggaagacgaaccagacaggcaataaagaccgcgccggcgcagggggcgacgggaggaacaaacccgcggccgcccaaaaaaagaaaggggagcaganggggacacacgcgaagcagggccaggggcaaacagaggccaccggaccgcgaacacagagggaacggcaagacgagaggaacaagnaacanaaagaaccagaaagagggcacacaagagacgacaaccgcncagaaacaagcacggcgaagaaaacaancgaaaggacaaaaacccaaaacagacaaccagagcaccaacagaaggagcnacaacaaaggcacgggggaaggaacccaacccaagccgacggngacgcgaagaacaccaaaacncgagagaggggcccacgcgacgggaagac

SEQ ID NO: 75387 - DNA, 202 bp, Arabidopsis thaliana landsberg
cgagtttgaagacacacatcaattgaatattacgagctgattggtccttgagatgctttcttcagcgtatttagtttccacactgagtccgtgaatgtttggacgtaagtacacgcaaattttacttctagtctcaattattttttcttcgatgtccgcttctaatagctgacactttttggacagacatttgatcaggggt

SEQ ID NO: 75388 - DNA, 467 bp, Arabidopsis thaliana landsberg
agaatttttagcaaatgatgagattttaaaagatccgacgaatctcaaaaccttatcgtttctttctttgatcataaggtaaacgtattttaagattttgtgcaaacaaatttttttttgtcacacatataattgattttgtgaaaaggttttagagtaacaaaatcttggtaagagattattttataattgaaaagcctatcatttagaatcagttgaacatgcatatacttttaattagtaggtgagtaaaagaattgtgcttaatcttttttttgttcttgatcttatgttgtagagaagaagattcaatgaagattcaaaaaatatgaataataatatagaataaggatattatcaccaccacatgagccttgatcttgaactttacttgtcaccatgtgtcatcgatctaaatcattatcatgatctaagtaattacaacataggttatgaggaagatgaat

SEQ ID NO: 75389 - DNA, 534 bp, Arabidopsis thaliana landsberg
tgattccttttggaaatggcgaactacgcgcccgtggcctgtcccgaacaagccgagcttatcatctctaattcttgcagcgtgcgcgaaaagccggttcacaaggtttcctccgaagtgggccgctaccgcgacatgaagaaaaaaaatccaaaacttcgcatcggcgtcggcggctgcgtggctcagcaggaaaaaaacaatctcgtcgataagaacccgctgattgatttcgttttcggcaccgacaatatcgaccaactgcccgacatcgtcgcccgctctctgggcggcgaaagaaaagtcgtctcggccaagttcgaacacgccaagccttaccaagttgaaactctgatccgcaacccgggtgtgtcgacgttcgtgaacatcgccaaaggctgcgataatttttgcaccttctgcgtcgttccttacacccgcggacgcgagcgcagccgtcgattgtcggagctcgtctccgacatccataccctcacgcaacggggagtgaaagaagtgactctgctggggcaa

SEQ ID NO: 75390 - DNA, 473 bp, Arabidopsis thaliana landsberg
accggggatgagaacacgagccctggcccgagaagccgacacccgggagcgcacgatgatgtgaattttgtttttgatataagaaatggcagatcagatgaatgagactgaagttccctacaagacaacgggctcgaaagaacggaaatacgaaacagggactataagccaacaaaagtaaaagcaggccgagatagccaagaaacactgaccaaaccaaacagtgcaaagaaaaccaagcatggtcaaacggcgtcatcacaagggacacgagaagactaaggtgtgaccaaagaagagccgatgcggatacacataagttcacctggacagggggcaataaagaccataaaaattatggagaggactggcaagcaggacttggatgagatgggaaaacttgaaagggggaaggaactcacaagagggaaagggacagagaggcgaggaagaacagacagggcggataaaga

SEQ ID NO: 75391 - DNA, 368 bp, Arabidopsis thaliana landsberg
gtttatatctctgggttgcgatgagatctgcctcgtgaagtcatgtatggcggtgattgatctttgcttcagctttgttttcgcttttcgtcaaatcttgagctttggcttgtttggttttcaaattccaataattgcagtttaatcaacaacaacaaaaaaatatggaatcagagagcgttaagtttggaggtaaatttggtttccaagctttgatttttctcaagttttattattttgggatttgagggtcaatgagcttctgggtttctaagtgtaggtcctagagaattgggtggtgcactagatcttataacacaatacaagttggtgccacacccatgaattctattggcatagatcacttc

SEQ ID NO: 75392 - DNA, 593 bp, Arabidopsis thaliana landsberg
gcagcaactaaatttaattaaaaataaaaaatactttataaattattattcagttcgataggtgtctagacctaggttttgggtgattacctacaatgatcacataaaacactatatattaaacttttttcgcggcaactaaatttaattaaaaataaaaaataaaaattataaattaaaatccagttaaatattttaaaacatatatgttccgtagtaaattttgatattgacggaaccattatcacgaaatattcagaaagaattttgattcatatttatcacaaaatttatagcacaataaaaatatatacacacacaaagtaggtagactctagattttatttatcttttgaaatttctaaggtctggtatgatttgccttatgctcaacccaatccatttccaattgactattaaggtactttttagactctcaaatattcattttgtacaaggttttttaaaatgtcaatgatacacttgatgaaaaaacgtcgactcggactgatctttacaaatttatgaactaattaaactatgagtaattacgttatactaagatcagaaggatttaatggtaaggtcttgac

SEQ ID NO: 75393 - DNA, 566 bp, Arabidopsis thaliana landsberg
aatagtcttcgcaacaaatttagttttcattgtttgacactttaacatgaaaggttagcataaaaaataataaagtgtaaacttgaaatcaacaaaattttcatgttcctttttaaagtataaaacttaaacataatataaatagtaccatatgatttaaacttaaactgtcttttttacttttttttctttcacagatttaatcttcatctcacatctcaaaagataaatttttattctgcagtaaaaaattcattagcaaactctctttaattaaatatcaaaatatgtttttaatgtaaaaatattaattaatatcttaaactttgtctttttagtgaaatatcttatatattataacagaagaagtatatatatatataaattaaagatgtatattggttacccaaaattagaagttcacaagaaaataaatattcaatatttactcaatgaaattttcaacaaaaaaaagtcttaaataaagaaagatttaccaactgaatctgctgaacccgtggctccgtcggttttgattagtcaccgccattctttccgaagaaaaa

SEQ ID NO: 75394 - DNA, 318 bp, Arabidopsis thaliana landsberg
gagacgcatggttagactggattacagacaaaagcctcttttaccatctgacaaagaattcgatataaggaccgttgtgtgcaataacatgaaataaacttctttattattatttatggcaatctaattttatgaaatacagccgaattaaatttattcaaagattgcaaggaaatcgataaaaaggtaaaaacgtacagtaatttttgtttttcttacacaatagtaatgtgactcaaattttttgttatgagttatcaatcaatttctatttaagggtatatattttggtgacaatctagattttatacattcaat

SEQ ID NO: 75395 - DNA, 617 bp, Arabidopsis thaliana landsberg
  unsure (1)..(617): unsure at all n locations
tggtacttgacatgagagttaaatctggttggcttgagaaaattatagttcggtcgtgttatccagatcgaaacaagtgatatttgagctgagaattgcattgaacgttttaagcttgtagatcacgtgtgaatggagaagatgtttgattggaataaattgatagactgtgagctatgcaaattagggttccagttgtgcttgtcaccattcgctatctctatttttcttttcgtcttcaagaagaataatatattaataaaataaaaaaaattgacggccgaatgatttgattgatttttatatatttatattttatttgaagtataaaagcttaacctacttcaaaggaatctgttagttcgaatttactcacgatattgttattcaaaaagattaaaaatttgaaaagaatccgtcaggtagtttcctaaatcctaagttattttctcatgcaattaacaaaaacaaaaggttttctcaagactttactcttctatttttagagatgtttacgatttttatttattcctctcagaacttacanattcgtataaattatattctttactatttacttcaaagagtgaaacactacaaataaagatgctccaact

SEQ ID NO: 75396 - DNA, 411 bp, Arabidopsis thaliana landsberg
  unsure (1)..(411): unsure at all n locations
acacgtatcagcaactcagcacgcaggcccggccctgttaataaagggctttggtttccaattatcttaagatgcgcccctttggtgtggcgtagtnnnnnnnnnnnnnnnnnnnnnnnnnnnnnnnnnnnnnnnnnnnnnnnnnnnnnnnnnnnnnnnnnnnnnnnnnnnnnnnnnnnnnnnnnnnnnnnnnnnnnnnnnnnnnnnnnnnnnnnnnnnnnnnnnnnnnnnnnnnnnnnnnnnnnnnnnnnnnnnnnnnnnnnnnnnnnnnnnnnnnnnnnnnnnnnnnnnnnnnnnnnnnnnnnnnnnnnnnnnnnnnnnnnnnnnnnnnnnnnnnnnnnnnnnnnnnnnnnnnnnnnnnnnnnnnnnnnnnnnnnnnnnnnnnnnnnnnnnnnnnnnnnnnnnnnncag

SEQ ID NO: 75397 - DNA, 557 bp, Arabidopsis thaliana landsberg
gtagaattattcatgtagacacacttacaaatgtattttgaataagctcactgcaacatattaagcttactttttttttttcgcccaacatattaagcttactaaaagttactgaatgttgaagaactgtcactgccagaagaaagcatactaaagtttgcaatgctcgataggtgattgagaaatatagtctgatatgaagatgtaatttaacttttgcttcttattattattttttcatttcatttttgttgtttattctttctttttcatctcactgaccttaatatctagacttgcctacacttgcctaggtcgctggattagtatctacacttgtctaggtcgttggattagttaagtccctatgaataatctacaatatataattcgtaaatgcctggaaactgatttacattcgagattttgctgcaaagtgaagtaaaatttattatataaaatttcatttgtcagatcctatgaaatatactccgcccaaaaaaccctattttaaatattcaccatttaccatcctttttcaaccatgccctttgtta

SEQ ID NO: 75398 - DNA, 679 bp, Arabidopsis thaliana landsberg
aagatgtggttagatgatgggattcatgagattgccaagaagtgacgtggagatcgaacctcaggttagagtggatcttcggatactagagtgaaagtatgacatgttgaatgaactaatggttgggatgactatatgatgacaagagatgtggcatcattgattctccaaacggagccactggttaagagaatctggaaccagagaaatgtataaaatttgattatgagccgaactatggaggtcagaatgatgggaacggaggttcttgcaggaagatcaatgcgaagatcttttgtcttattatataaccaccccaataatatgtgtgtgtagggttcttgatgaacaaatgtgaaggagccgctcaatattgagatagatagagactagtaccagcaaaatcacatctttgcgaaatatctatataccattttttttataataaacaaacatatatactttgttgtcaccatcctatcgtaataatacacacacacgcctaaatgattcatggtgtcaccaagtatctgatatatatctctgtagtaaaccgatgggttaaactttttaagtgtttaattattgaagatgaatcattacgttttattctactaattaaattgggaaaaacaacaaattaaaaaaactagaaaacagaaaaaataaagtacaatga

SEQ ID NO: 75399 - DNA, 390 bp, Arabidopsis thaliana landsberg
tggtacaatacaatccatagcaaagggcgaactgctataaggaacagagttaggtaaccaaagttaatttgtgaatgtggaaccttcggatatgggaaggtcgaaagagacaggacagccgatgcatcatggtgtaaccgaggaataagatcgaaacatgaagacagttcccatgagacgacagacacagaacaaacaacactcgaacggtagatagattcttcacgaaaacatcaaggagaaacaaagaaatagaggataatggaattttcaacgaggagaatgtgctgcgcattggcaggctaacaaaaatactggcacagagcaagaagcttgcatttgaagagagaatagcacagaaagggtacaaagaggtgagaaggaacattc

SEQ ID NO: 75400 - DNA, 603 bp, Arabidopsis thaliana landsberg
gcccctgaccctggcggcccgcatccagcccttgacgggcggcggggccggtgcagcgcccctcaggaaaagggggttatttactgtgtcggcggcaagcttttggcgccatcagactcccttgtcgttgggatgcgcgatcgcgtccttcaggggctgcgtcatggggaagttcaaattcaggcccttgggcggaatcggctgcgtgaaccaggtgtcgtacaaagcctggaactcgcccgaccgcatcaggccgaccagcgtctggtcgaccagggtcttgaactggatgtcatccttgcgaaggatcaggccgtaaggctcgacgcgcaaggcatcatccagcaaacgccatttccccggatccgcgctattggccaccatgctggccaacaaaatatcgtccatgacgaacgcatcggcgcgtccggtcgtcagcgccaggaacgatccggcatggtcggcgctcagcaccctgaccgtcttgaaatcatgctttttctcgtatgcgttcagcaagccgatggaggttgacgccgacgtcagcgcgacattcttgccggcaaggtccttgaaagtcttgaccgggccatccttgcggac

SEQ ID NO: 75401 - DNA, 261 bp, Arabidopsis thaliana landsberg
tatcttatatcctagagatggggttttattccaaaaaattatattgtttgtatcattcactaattctttttgtgtaaaatatattgcaggtagaaccgtctatcttagtttcaagtgttacggattgtttatcgctgggctttcccggaggacgacaaaataacttttattaaaaatatataccctgaatctttttaaaaatagggctgcacctcgcatgagacaactctttacccggagcatgctcttatctttccttat

SEQ ID NO: 75402 - DNA, 714 bp, Arabidopsis thaliana landsberg
  unsure (1)..(714): unsure at all n locations
tttatcacttaacttaggtatgcacannctgtncggttctaagctcatggactaagttccacttctttatagccactctaatttctttttacaatggtctctgataacatgattaagtttaggtgcaatccaacttttaaatgtttatgactgatacttgcttcacttctactctcaagtaggtgtacctattttaccgaattagttatcgaaaggaacaaacaaaacaagagtgttatcttttacacttaatgcaactaaattgatttattttttttattttgtcaaagatgcaactaaattgaataaaagaacaaaaccaacagattaacttttcatacaaccattcccactagttgttagttcctgtcaacgtaattctagaagcaggaaacatagagtaagagagaagagagaccactgttatgcaagtaagtaacaattttttggattgagcttcttcttcttctttcaacggctttcttccgaacgcgtcttcctcgacctcccacgagtcatcctgattgtctcctccatcactgtctcctttggaccttccgggttgggattttcattccctgattctgcctctccttccacttcttctatctgcattggttccacttgggtggttgactgtggtgggttcacaattggggaagctactgatttctgtgctatctgagtggtacccgcgtttttgggatctgcagc

SEQ ID NO: 75403 - DNA, 607 bp, Arabidopsis thaliana landsberg
  unsure (1)..(607): unsure at all n locations
agctcatcccttgaaactctaactcagctctaagccaatccgcaaaccgaagcaaagaaggcttctgaccatacaatcctataaacacatcacaacatctcaacctattataagaaacagatacagaagatgtctgagtatacgaagaagactcatgacctcttccatatctagaaggagtacaagagatcatactactcgaagtgattcgatcagcagcctcaaggctctgacattgattaggagcggttaaaaacgcaagctcaggctcttgaaaaccagagctggagctaagaggatcaaagctatcacattgagcatcagagcgagtagattcagatagttcttgttggattttaggagatcttggtgagaaaaacggagactgattagctgagaagaaagcagctgatgaagatgaagacatgttccttgtaggctttgnnnnnnnnnnnnnnnnnnnnnnnnnnnnnnnnnnnnnnnnnnnnnnnncaagttttcttttattgacaatctatcaaatcccataaatgcagccctatgaatccattgaagccaatctgattcaaagaaaaaaaaagtcaaacagctgtcaaaaaggagagat

SEQ ID NO: 75404 - DNA, 511 bp, Arabidopsis thaliana landsberg
  unsure (1)..(511): unsure at all n locations
taacatttgtctatccaaatgaaaatataccgngcatctttttacctcttattaannncatatcatataaaataatatgttatataaaataatatgttatcgaataaattgatatcttttattttttgctaatagtaagtgaaataaacgaatttacattacttcggcgttaatttgttacctgatgccaatgttatttcgcaagagaaaagactatttatgtccttttttgataagggtgcaacttgcaaattacttccttaattttggttgtctactttttattacaatattttccagcccttaattttattagtatttttaaagagttcaacaacatgaaaatgacggattagcaaaatagccgaagtaacttggttttgtgaatttgtgaaatgtggccacaactcacaagtattggacaatttttttgtttgtataaggctcttcagtcccaacccctaaaaacctatgataagtatgttagcttcacttttctcttaatttcaac

SEQ ID NO: 75405 - DNA, 558 bp, Arabidopsis thaliana landsberg
tggccaggctcggcggacccggcctggccggtatagttcacgaggatcaggtccgcgttgccgatctcgcgcggcgacacggggaaggtgctcaggtcgcccggcacgtccgcctcgtcctcgtggatccagacctcgaacagcggctcgtcggcgccgacgcgcgtgccgccgacattccagcggatgccctggatgaacgccttgaggttgcgccgcaccttgcccagcttcgtgcgcccgccgaacacgggcacttccgagcggctggaaatcatcaccctgatgcggctcgatgcatccatggcagtcctccctggcggcctgcgtccccgtgggcgcggcgcgcttcatggtagcggcatcaggccatgaagcccaggttgcgcgtcgagaagttcgccaggttcggcagcagcgtgagctggtcgctcgccgacaccccgagccagttcgccagcgtcgccgcgagttgctccaccgaggtggtgggcagcaggcggcccttgcccacgtcgtccgggccgtcgctggcgatcgccggcggcgtgcccacga

SEQ ID NO: 75406 - DNA, 651 bp, Arabidopsis thaliana landsberg
tgtgggaaatgtaacaacagaaaaggaaagagatagaaagaacgaacacaggaatattctttctcataaattaggaccactttatctagattttatgtgtctggtaattggtatagtttagtaattttgttaaatagtacaattttcatctgcttcgtacctcaaatcgtgaatatacgtgcattacttgtgatcaggtcaaatttaatatacataccaaagacttcataagttataagttttttttttttttttttgctaaaaagttataaatttcttcttataaatatattctaatctttcaaacattaacaataggaaaagtaaaacaaaaaacttctaaatagatgattagttatacactaaagcaattatggattaatgaagatcgtcttttaggtacgtgatgtgataaatttttctttaattagacggtcagttatatacacacgtccacaactatacagagataatcatattaatcaataaaagtaatttataaacatattagcataaactttcgttgccgtcgataaaaaaacattaccatgacctctgtatgatttggctagcgtttatatgagaccaaagtgaacgacatacatattggtttatgggggttttccccaaaatttgaaatttttccaccct

SEQ ID NO: 75407 - DNA, 627 bp, Arabidopsis thaliana landsberg
cttcgcgatacctgttcttcagctgggtggcctgggcgctgatgatcgcctgcctgctgctcggtggggctgccgcaatcacccggaacaagatcctcggctacgcccaggtggtgctctcggtactggccgcgctgctctgcttcgtcggccatcgccagctcgtcagcttcgcgggcggcatcgaccactcgttggcggtgtacgccggcacggcgggctacctggtgtacgcggccgcaggtttggctgcggcgcgctcgacccgtgaggtcgccgatccccgtggcttcctcgagaccctgatgggctggcggcccggtctgccgatggcggtgatcggcgtcctgctcggtctcatcgcctatctcgatgccacctggttctcgccactgcagaagaacatcgacttcgcgacgacccgcaccgacttcaagggcaccggcctgcggccactggcgaccgcctacctgaattggctggggctcgtgctgttcgcggcggctgcgatcgtcacgctggccgcctgctggttgcggcaccgacttgtctgttgggccgcggtcgagatcaagcctgtccggtgaggctgtatcaccttaaattctatctttaaaccaaaatctt

SEQ ID NO: 75408 - DNA, 494 bp, Arabidopsis thaliana landsberg
  unsure (1)..(494): unsure at all n locations
ggggactggcgacttgatggccgtctctgatctttcgtctgatgagagcagaccatgctgtatctgggtcgtggatggcccctttgcccaggtttcttccagtgatgtnnnnnnnnnnnnnnnnnnnnnnnnnnnnnnnnngttagaggcggatggtctgtgaaggggtactcacgtggaggagatcaaggaggtcctcggtgtacgtaaacggnnnnnnnnnnnnnnnnnnnnnnnnnnnnnnnnnnnnnnnnnnntgattgatggcttgaccatagggaatgtttccaatcttgggtcgagcgatgttggtagtgtcagggccattgggannnnnnnnnnnnnnnnnnnnnnnnnnnnnnnnnnnnnnnnnnnnnnnnnccgagcagtagaggtatccacttgcacaccagctgcgaaatttagcatttcttggtgttgagagtgtgcagacttacccggaatttgagcaatactcatcctcggtgcagact

SEQ ID NO: 75409 - DNA, 535 bp, Arabidopsis thaliana landsberg
  unsure (1)..(535): unsure at all n locations
gggaaggcgtgaccattctttgctcacacagatttttgcttttatggaatgactccattttaccgggggaacggggatgatacgaagaagtgcattttggtcagtatcattgtcagctatccgtagtccggctaacagcacccaagcatcaccgaacaagcttgatattcccccaggaacggttcagtgatttggtgatatcgtaccatgcaatcgacctgatgcagcaactgctacaggtcaaagaatccaggctatcaagcaagcagtacaaagctaatgactacttcttttggcctggctttcgtggtacagtctatgctaaccctgtcgatctgccgaacccatactacaaaggacgccatgtctatnnnnnnnnnnnnnnnnnnatcagagcccatcgtttcttgcgtgatatcccttgtgcggacatcttgagtcgacaaccaccctctatcccggatatcaaggacaacgcggacactaaatactttgatgagggaaattccactgtaccacatcaccaaatcaaatc

SEQ ID NO: 75410 - DNA, 298 bp, Arabidopsis thaliana landsberg
tgcacgcgcttgtcgaaaacctggaaggtttgacgccggcgcagaccgaggccgcgctttaccgttatcacgatatgcaggaggctctcctcgaatcgggttattacagccgcaccgaaaccatagagcgcacgctgcgcggactgtggcttgatgagcgacgagctagaccgccccgcgtcgtcgatctcgggcgggtggcagatgcgcgtggcgctgggccgctgcctgctggacaaacccgatctcttcttgggagacgaaccgaccaactatctctacctcaaagccaaggact

SEQ ID NO: 75411 - DNA, 631 bp, Arabidopsis thaliana landsberg
acacccgtccatggacgggttgatcatcgaacgtattgagggctacgaagacggacgacaccgcgctcgacaaaagcggctacatctggcggccgacacgatgtccgtcagcaccatggatgcacgaccatgcgccacagctacaaacccgaacagatacgtgccctgctgagggcggcagcgaaggtgaaggttaccgatatcccgggatacttcggcatctccatcggcacgtattacaactggcgacatcggtttggcgatgccgacgatgcaagcctgcggcgccgtgtcccaaagaagctactccaagcggccactccgcaccatgcggcgttgtacggcatctatcgacgcgactacaccccctcgcaagccggctggcaggtacgcatccatcgacgcggccgtatcgtcgtggacactcgctttcgggacaaggatcacggcggagcggatgccgcgcttcgtgctgcgcaggcgcaccgtgacttggccattcgctgtcacgctcccatgccgctacgcgaacgcaaccagatcctgcgccgcaacaacacgacaggcgttcccggtgtcactcgcgtgctggaccagaggaaaaaccatctcttttgcgctgccaccatgc

SEQ ID NO: 75412 - DNA, 636 bp, Arabidopsis thaliana landsberg
aaaaagtttggttatcattaattatagttctattaagatatacatttgtttgattattgacataagaattggtacaaggttataaattaaacataactttagaattcaaggcagttagtcactgtataaaactaacccttcatggggacttattcacacgttttttctaaaaattcatgcatcagtcttcctcttgatgcgctctttagagttaaagctttctctgggcctcgagaacctcgtctgactcatttttgaccatcttttttgtcattatacttatggaaaagaaaaacaccgtattcttactattttttcactatcatgatcactaaaatgtgggacactactgaagagtgaagaccataattcttttgctaggtgttactagttaatatttcctaaggttttgtcaattctttttggttttaaaccatattggagcgtaagagagattccaaactaccatattttgcttatttttatagaaattacacataaattagtttgtgtacacacgacttaatcttactgaaacataaattacacaaaatacattgtaaatagaatgacaatcaatgtgtactttatttgatataaatatgacttcacgtttttttaaaacatttatgattt

SEQ ID NO: 75413 - DNA, 680 bp, Arabidopsis thaliana landsberg
aaaggaatcgaggtattacaatcatctcactcatatcatgcatcgttttcgttacaaatcaaaattattgtttctgacagtgtaatctagtggcatatctaaaaattatatttcaaatgacgaagtgcatctgaagtattatataattccaaatcatctactttttttactgtttattgagatttgtttcgctttgcttcgaacctcgttttattggaggcgatactaaattcgtataacgaaatcaccaaccttttcacagttttaaattagtttttaatataaaaattgagagataagtgttatttctctttttcttttacgtagatatgccagtaagtttgaatctaaatcgcttcacactcaactggttcattgcttcgaaccttcttttcactggaggcaatactcaattcttataattaaaccaccaactttttcataattttcaattcgattttctttgataaagtttttgacagataagtgtcattttattttccttttaattacctagatctgcatgtagtgtgaatctaaaactcacactcaattggttcattgctccagtgaaaagttggctggagagtgatggaccacaaacctttcatgtggtattcttaccaattaatccataaacacaccaatacccaataacaacaaaacttgccaataaagat

SEQ ID NO: 75414 - DNA, 341 bp, Arabidopsis thaliana landsberg
  unsure (1)..(341): unsure at all n locations
nnnnnnnnnnnnnnnnnnnnnnnnnnnnnnnnnnnnnnnnnnnnnnnnnnnnnnnnnnnnnnnnnnnnnnnnnnnnnnnnnnnnnnnnnnnnnnnnnnnnnnnnnnnnnnnnnnnnnnnnnnnnnnnnnnnnnnnnnnnnnnnnnnnnnnnnnnnnnnnnnnnnnnnnnnnnnnnnnngttcatatctattattaccttctgctccaaaatatacatattgtgtggtcttcgattttttttacgacgtttaattatgtataggacttttgtccatcctatcattattttattggtaatccacttgtcttacttactgttttttaatggcttgtcattttat

SEQ ID NO: 75415 - DNA, 432 bp, Arabidopsis thaliana landsberg
gacacttaataaattgttggtacctactcctgattccattgatcgaaatgaaaatagtgtctttgattataaagagcaaagtgtggtaagtggtatttttaattcattcacagatgcaccgggtggttttcatgaagaaataaatgagctgatgtattccgcgggagtggagtactggcataacaatttattttctgtcagggcaggctactttaatgaaaacaagcataagggcgaccgtaaatattttacgctagggctggggcttaaatataattcactgggtattaatttctcctacctggtaccttcaggaagcggagttcaacgtgatccgctgtccaatacattgcgtttttccctgctgtgtgagctcggcaaatcatcagatttattatctagaatgacttctatcagaaccggattaggcgt

SEQ ID NO: 75416 - DNA, 551 bp, Arabidopsis thaliana landsberg
gacagccattgcaacatttgacaaaataaaaatataaaatatgaagtcattacaatgtagagtaaggtttctaaaaaccccggtctggtttagtagaagccccactaccacctcactttaatttcattcattatctcattgacgttgatactttaaattcatttttccacataaacttttaagtatgaaatttatacttagtatatattttatctatctttccatgatgaacttaaatatattacagtttgcctagcctttttagctcagctatatatatatgctaatgtggatacgatgtttattgttttatgtctatatcttatttacttttttgaattactaataaaatggaacaactatacatacatatatctaaatataatatattgtatctatatatattaatacaatttttaaagaactggcgggtttctaaattctaacatatgtactgtaagttcagcttcttattaagtcataggaacatggagaggcgttggcaaatcatggtcagtttggtttgcattcataatcgaagacatagtagt

SEQ ID NO: 75417 - DNA, 426 bp, Arabidopsis thaliana landsberg
gtacctccattgccatcatgtaagttcaatactgagctagttgagtaaaacaaaccagtaggggaagaagttacatttttaggaccatgaatctaacaagctggttttcccatatgcaggtgaagcaagtgtttccactgggattttacagccttcttacgataccaccggctctagcagtgatgaatctcctttggttctggaaaatcaccaaaggattgatcaaaacactctccaaggcgaaaacatcgggagtgaagaaacagtgatggttgccctgaaaaagattttttaactgcattcactttgatgtgtccatgaaaaattgattgatattcatgttgaggttgtcttggatgcccttttgggtttatgaacaaagagtgtgcaagctaatggggattgtgtattcaaacttttcagctg

SEQ ID NO: 75418 - DNA, 618 bp, Arabidopsis thaliana landsberg
cacgcagccgctgaagaccggcgacgtggtcacggcgcaagtcgacgccgaccgtcgccaggcgatcaggctcaatcattctgcgacccatttgctgcatgccgcgttgcgccaggtgctgggcacgcacgtgacgcagaagggctcgctggtggcgccggagcgcctgcgcttcgacttcgcccaccacaagccgatgagtcacgacgaactggctcgcgtggaagcattggtcaatgctgaagtgcgtcgcaacgccgaggccgaagtgcgccagatggggtacgacgaatcgatcgcgtttggcgcgatggccttgttcggcgagaagtacggcgacgaagtgcgcgtgctgaagatgggcgatttctccaccgaattgtgtggcggcacccatgtgagtcgcaccggcgacatcggcctgttcaagatcgtcggcgaagcgggcgtggcctccggtgtgcgtcgcatcgaggcggtgaccggcgacggtgcgctggcttacgtggcggacgaagagcgtcgcctggccgaattcttgcagctgctgtccagcacgggcgacgatgccgtggagaagcttcgcccagttgttcaacccgccagaaaaaaacttgg

SEQ ID NO: 75419 - DNA, 1578 bp, Arabidopsis thaliana landsberg
acctgttgtctgttaataatggcttttcttcggtctcttcaagttgaggaaatggccttgacatcattatctcgcaaggtatggctcgtctctttggtttagtatgttcattagtacttgttgtggacaatgcatataccctgtgatgttttaattgttctaaattatgttatgtttctatgttttcagtatggctttgttgcctggcttctgagcacatcagttggattgtcactctcgttcttgaggtactacgatttttttatcttcattggacagctaccaacttttcgcacaatggtcacaggattatgtcattcattggacagctaccaacttttctcacttggtcatttttatgttctcattacaaacatcatgcatgcttcaattttgcagtaaatcgtcagtacttctgggaatatccttgactgtgcccctcatggcagcatgcctgtctattgctgttcccatatggatgcataatgggtaccaattttgggttccacagttatcatgtggtgaccaggcaagagatttacgatctcccaggataaaggtctgtgtgttttccctgacctggttgcaagtatctctctttgtcaattaaatatctctaactaaactttctttccattttaggggtttattctttggatttgtgttgtgttgtttgcgggttctgtaatttctcttggtgcgattatatctgctaaacctttggatgatttaaagtataagctgtttagtgccagagacaacaacgtcacgtcaccatatacatcttctgtataccttggttgggcaatgtcatctggaattgctttagtagttaccgccattctaccaatagtttcatggtttgcaacttataggttttcccactcttctgctgtctgtctcatgatattctcaggtaatttgtgtttctgttagtttgctcacatttggttgggatttttttccttctcgaagtgatccttatatttcttttcctctactttctagttgttctcgtggcattttgtggaacttcatatttggaagttgtaaaatctagagatgatcagttgcccacaaagggtgatttccttgcgtgcttgcttccacttgcatgcattccggcgctgctttcactatgctgtgggatggttaaatggtggatgactatttcctcacgttgcctattaaatcttactctcagtttcaatgagatcgtccttttaaatgttttgtggttgttctttgcaggaaggacgattgttggatactctctcgaggtgtatatgttttcttttcaataggtcttcttcttctttttggtgcgatagcagctgtcattgcagtcaaaccatggacggtaaatgcaaattgcttacataattctcaaagtttttggcttacttttctcaatctgatacatctttgtgtttcaataataacagataggcgtatcttttctcttagttcttttccttatggtggtaacaattggtgtaatccatctttgggcgtcaaacaatttctatttaaccaggaaacagacatcctttgtctgctttcttgctcttcttttgg

SEQ ID NO: 75420 - DNA, 150 bp, Arabidopsis thaliana landsberg
cttattgcctgtgcccgattcgcacctgctggcacatctgctgcacgtcctcgatcattcaaacagttatttttgtagttgtgctttcacatttttgttgatgtgtgcgtgtgtgggggtgaaccattggtcctctaatgacaacatcat

SEQ ID NO: 75421 - DNA, 724 bp, Arabidopsis thaliana landsberg
  unsure (1)..(724): unsure at all n locations
cttttttcccccttctttttgtgcgcagttatttcatctcttcatgcttatgttctgaatgtttgatatgttatttgttttcagatttgtacatttttcattctcatactttctacgcacaccagggattcgataaattgcatgagagttttgaaatccatctagaaatcaaaatagaggcaacataacacaagaggaatcaactgtatgaacgtgaaattccgcaaataattttgtataaagaaacaacaaaacaacaaacgttttagggtttgggtttgcatttcagaaaaagaaggaaaaaactatcttatatgtttaagcgtcgtaatatattttttttggtcattatatgtttacatggttcattaatatttagtattagtaattatatcattcaaaagaagttggcccgtagatggtatgggctttaatcctagtgtattgcaaaatcagcttcacttatacaaccgttccatttgttgtgcaaactatttagaaatgcaacagactaggtccatgcattttaaatttttaatgtgtatgtaatgtaacccaatggactcaaaactgtgacgcaaataacattttcttttggattaaaccgttatttttttgggaaacgggattattggtttgttgttttaaaccacttggccccaatgcatacccgnctctttgcgtttgatccctttttttttttaatgcctgggcgttgggtttc

SEQ ID NO: 75422 - DNA, 529 bp, Arabidopsis thaliana landsberg
  unsure (1)..(529): unsure at all n locations
tatgtaggctcacgtgcatgtcttgaagcatgggtttaagtttcaatctggtgaagaagatgatatatttgttggcaattccttgatagatatgtatgtgaaatgtggttgtgtagaagagggttatcttgtattcaggaagatgatggaaagagattgtgtttcctggaacgcgatgattattggatttgcacaaaatggttatggaaatgaggctcttgagttgttcagagaaatgcttgagtntggagaaaaaccagatcacattaccatgattggtgttctttctgcatgcgggcatgctggatttgttgaagaagggcggcactacttttcttctatgaccagagattttggtgtggctccgcttagggatcactatacttgcatggtcgatttgcttggtcgagctggatttctcgaagaagcaaagagcatgattgaggagatgcctatgcaaccagattctgttatatggggttctttgcttgctgcttgtaaagtacatagggaacattacgttaggtaa

SEQ ID NO: 75423 - DNA, 405 bp, Arabidopsis thaliana landsberg
tatacccttgagcccgggacctactatatacttgattattattctacaaatcttccttttcattcttgttttgaatttgaatttgcaccttcagatgcaaaaactttgccatatatacacatatcattaatggagaagacgataatgcaaactaagattaagagaatccgctttcttccttcttcctcaactatttgttttccaatacgtacgatgttacactttagaaggagatatatttcacttagttgtaaaaattctatgtgatccctaacttaaaacattattgtacaactcagaaatatctgaattcgtgcggtttaattgaaaacataaaaagaaaagagatggagagtaatatggtggaggtaggagtatgtgttgagatatgtgaggtagggatat

SEQ ID NO: 75424 - DNA, 567 bp, Arabidopsis thaliana landsberg
  unsure (1)..(567): unsure at all n locations
atttttattcaaacttttgtcttcttttcaaatactttttgtttttgttttttgacatagaattgtggttcgtataattgataccacaagagttattatgatcagaggttggagagcctttacagacacatctagagattacatgtaaatatatcgtattcgtataactcaacttatagccaaattaatgaaaatgttttgtttttaacgaatagcattggaattagaatagtaaaggaataatttgctcgagaaacgaaagcccactcgtgcgagcaaaacgtgactcgccgctaaaccatgtgcttacgcttaatttaattaatttgctgataaaaacaacaaaaacagtacttagacattggataaaaaacaacaaatcagtacttaaataaagacttaatagtacaaatattagccggcgaaaaactcagtatagttgcggcttcattttctttctataataaaaatccaacaaacattacatctttaattctactaattaccctttcaaaatgtccatttgttaatactantaaagagaaatatagatgggtacagtaaaac

SEQ ID NO: 75425 - DNA, 165 bp, Arabidopsis thaliana landsberg
caaaaaacccccacacccaatgaatgtgagtttttctattttgacttgctccctcgctgtgatctatctagaatggataagatgctcgtgggattgacgtgagggggtagggcttgctttggtcctggagcctatactacctacgatatcctaacccaacccttc

SEQ ID NO: 75426 - DNA, 571 bp, Arabidopsis thaliana landsberg
agataattatagatttacaataatgaagaatagtatctacataaacataacaacaaaactaaattaccaggggtgaaagggcttgaagtcccgctgcacgcaggctccgcgacctgtcatcatccccaccttccagtcctaattggcacagctttgggagaaagccttccaagttaaatagggaactgccatccttctgaaaaatttggtcacatgaatcaatcaggctatttcattatttcatatgtctttaaccattctatcagatagcaccctgacatgtggctataagagaattctatcgaatatgtaagaagctgacctgattaattacaaattcgaaaagagactgacatccaactatttgcatttcatcttgtcgagtttgatccaaaagagcttgcaccgtccttaggaaaccactagaaaatagaggtctgaaaaaagaacaaagaaaaacaatcaagttacctacccatctatgcccggaatactcttgctcccaaatcccaatcccatgataggttacagtttttgggtaaaaccccttaggttcttatgttaagccaaa

SEQ ID NO: 75427 - DNA, 493 bp, Arabidopsis thaliana landsberg
acgcggccgggcagctcggcctggcggcgctgatgttccaggcgggtttgctttgctgcgcggctacctgcgcccggggagcgggcgggtcgcggggacgatcagcgttctgggcgtcggcgtgcccctcgtcgccggggccggcctcgcgctcgcgttcgagggacacgtcgcgatcaccgtgcccgggatcagcggctgggtgaccgcggcgttcgtcggcgtcaccctcgcgatcacggcctttccgatgctggcccggatcatcatcgaacggggcctgtcgggcacacggttcgggtcactggcactggcctgcggcgggatcgacgacatggccgcgtggctcatgctggccggggtgctcagcctcgcctcggggaaatcctggccgatcacgaaggccctggccggcgcggtgatcttcgcggcgatcctggtcttcgtggtcaggccgcttgtgaaccgctacctgcgcggaacttcggtgacg

SEQ ID NO: 75428 - DNA, 545 bp, Arabidopsis thaliana landsberg
atcccaaacgataaagcacgggcccggtggtttcattacgttcggtgactcttaaagtagttgggaaggatagggaatcgatttgcaccggctgatccagactttcataataagacaaatggccataccggggatcctcgtcattcatagagaaatgctggaaaggatcccatttagcagccggactgtaagggaatacaagcgaagtaattaattcattatccttattctgcattactttatcaatggagacaaaggctttatattctttggtcttttgccagtaatcggtgggtttagtgcgcgttgaataggagataaggcactctgaaacgccgtttgaatcctttttggaataggttatttcctctttttcaaaccaactggcaaccttctgttctttgttgcccgtcgaataaatcgcttcatcgactgcataaatgcggtaagagccagcggttgccgggaaataattgggaacgggcacgtgctcgtacggctttcgcagcgacgagaaaagctgagattcccgaatataacggcga

SEQ ID NO: 75429 - DNA, 542 bp, Arabidopsis thaliana landsberg
  unsure (1)..(542): unsure at all n locations
tttaaatattatttctaaaacattagtatggttttgtgattcttgtttctaaccagtttattgttcntaaacaagcnncngcatgtgtgtatcaactatagtaaggattcccattgcttacccgtattgagagcgtgtttttgtgtggtgaaaatttcaacacgtgtcgtcactggggaatgttatgatccacaattcgaattaataagtgccatgtcactactactctcattaaaatatcagaaatatctagacaaagttataaataccctttcgacctcttgataatatctgatttctgtaaaaagtttgttgtctttacaaaaagaaaagaaaaaagagacgcttgaaagaacgcgaaagcttgcgaagaagatttgcttttgatcgacttaacacgaacaacaaacaacatctgcgtgataaagaagagatttttgcctaaataaagaagagattcgactctaatcctggagttatcattcacgataggtatgtttgatttccaattaattcttttctggggtttgtcgattttttcg

SEQ ID NO: 75430 - DNA, 535 bp, Arabidopsis thaliana landsberg
  unsure (1)..(535): unsure at all n locations
tgtcgtagcgtttgaacgtatgatcataatgggtccatttagatantacgaatgtatgatgattagagtgatgggaaaggtttaaaaaactactacatgaactccatttcttaaccttaactttcttaccattggtgcgagccgatccgacgtggaccaatcaaattgtttctacaaagctgaaaaaaatttacacacttttgcaacttttctctcaatccttttttaaaaagaagatttagaaaaggaaaatagtagtaaaagagagcataaaattcaacaaacccttctgaagaaagtgacttttcttagttctattaatactctctctctctgcagatctgttacttcattatctcttcctttttttcattagattccattaaccttcaaaagtttttctaatacattctctctgctcacaacttttttttctttcaatacttgtaaagaaaaaatagagctttcttcttcttctcttttactggtagctttgcacagcattgcagctgtgaataactaaatggggagacat

SEQ ID NO: 75431 - DNA, 319 bp, Arabidopsis thaliana landsberg
gatgtggatggagttcacagacagaagcaattaaaagtgttgaaatatgcaaaatttcaccctatttgatctttcattttttactcggttgaatcgattaagctataataattttaggtgatgtcataaaataggaattctaagcacaatatgttgctgcaatagaatgtatccatcgactagtaatggatgttattatgttaaagtttaaccttgattttgatcatgtttttgtgaaatgggccattgatctatatatactctatttgctgggccaggaccagaattatcaaaatttattcttatatccaatgtttac

SEQ ID NO: 75432 - DNA, 225 bp, Arabidopsis thaliana landsberg
cacggtcaggcaaattcaatgaaatattatggcgtgaaaatgtctaaactcgggtttatttctctagcctgccagcctgaaccatagggcataggagggatatccttctggatggatagattggtagtggcagagagcaactctaatactgcaacactgaacgctcactggagaccagcacacgattacagtgtcagacatttttcatatggtgagaccgtccca

SEQ ID NO: 75433 - DNA, 348 bp, Arabidopsis thaliana landsberg
cttaaaagttgtgactgattctacaaagtaacttattatatgtttattaggtgatcactgtaaaacggggttgatgtgtattttgattgtaactggaataactcttatgatttctcccaaaataagaaacggtggaggataaaggaatcagtatataatgatttatctggcatcaagggagcttaatagcaagacacaaacgtgatgcatattgtcaaagctgaaaccggattgaacaaatatggactaaagaaaaattctgaaaggtgaaaacacaaactaggacccaaaaagaaacattttttttttgttacagaaaaacatatctagaaagaaagctgtcaactt

SEQ ID NO: 75434 - DNA, 473 bp, Arabidopsis thaliana landsberg
cacaaccatatatttatttccccaccacttcaacatgttaccatttaatttatcacttactttcactcagactcgcgggggtgtttacataatccaacctatatagctaacttccaatatttcatctcactcacttacttacactcacgaaaagtctggatatacttcttaaataataaacatcaagcattagctaaacctgttgcctggcaaaagacggtatacaatcaatgctacatgaaagccaataaactcacaacacataatgttctagagtactccaaccattatttacaatatctttgtaaaaacgaatgctttgtatggcacatgacatgttcttacacaccttaccatcagatactactcttctgatgttatctctgatcacacaaccgcccatcaacgtgtagctactttgattgaaaacgatcacaatgatactagtctacacactagatcacctactagat

SEQ ID NO: 75435 - DNA, 626 bp, Arabidopsis thaliana landsberg
gaattgaatcgccgtgcgtcgccaacgatccacatcagctcgctgtggtccagtccgcgaatccagtggtttgccacggcggtgttcttgcgtgccgtcttgcgcagcagcttgcgcaaagtatccagcccggcctgggtgatcggggtttgccaggtgcggtcgccgcggcgttcggcgaactggtcgagaatgcggcgggtttcggtgagtgcgcgcttgtcgcactggctgatcagaaggatgttcatgtagccagcgccgccgtttcgactgccacggctttcaacgtgtcgatcatgaaatccagtgactcactgcgggtcagcgcttcgatgcagcctcggcggaatgcctgttcgtcgtcgccacgcatggccgaaatgaaagcctgcggaagaatgctggcgtccttgaccaggtcggcgacatcgaacaccaggccgccacggcgggtcttgccgtgcaggatggccagtccgtgcggcagtcccagaacccaggtggcggtggcacccagcccgtaggcgagatagttgccgtgatcgagaaagcggttggctggatcgccgccgctaccacgcttggcgcgggtgaaatcaccgtaacccacggcgtcgacggcg

SEQ ID NO: 75436 - DNA, 435 bp, Arabidopsis thaliana landsberg
caagcgcaccgaacagatgctattcacgacttccaaagccggattcttttactgttttatcgtggccaaagcgcacgctggtggatgggacgcggtcgatacctttgataaaacactgcgagcgtcaccgcactgcagcgcgccctagcagaaccataaaactggcgttaacgccacgccgagtttcggcacaccttatacgatgaacaccaccttgagccgcatgccgatgcgcaagctttcgatgacaacggcgactatattggagagcatggccacaccttcgacgaggccgacataggcgacgacataatgatcgcccgtcttgctgtacgcgatgctgaacgaatacaactcgacctggcccgcgctatgcgtccaggccgcttcgtcaacgcagaacggacataatgcccgtgggtagaaatgcacctt

SEQ ID NO: 75437 - DNA, 242 bp, Arabidopsis thaliana landsberg
atatgcgtgtcagaaggtcaaaacaaaaactcatcctggttaatgtttatgagactagtggttcttcctatgggtagagtagcgattaaataccgaaaatacccattgcattctaaaatacctaaagcacacttttacgaaagccctttctgtggcagccctctttaggatttcctgtgacttaccaatgaaatgatttcgacaatgcataactgaaatgataataggatgatatgctacac

SEQ ID NO: 75438 - DNA, 327 bp, Arabidopsis thaliana landsberg
  unsure (1)..(327): unsure at all n locations
aacttatgcggctctaccatggatggtttattatgtggtacgagaccaccaacaattggggtgggcatgtcaccaaaagcgatatacttacatgattgtgggtggttgaatgcatatgtggcaatgggactgcactgaggcatcaatatgggccgagataggaatgactagattattttgatcnnnnnnnnnnnnnnnnnnnnnnnnnnnnnnnnnnnnnnnnatgccgcgagatcagaaaaaagagactatttatgagaaaccatacgcccggactaactacgaatacggaatattatgacaatagttagctgatggcgtttacgt

SEQ ID NO: 75439 - DNA, 547 bp, Arabidopsis thaliana landsberg
  unsure (1)..(547): unsure at all n locations
aactacgagatccctttcctagtgacaacgaaggttctactgactttgctgacactttctctatccgtatccaccattgtcgtgccctctgatcagagatgaccggaaactnnnnnnnnnnnnnnnnnnnnnnnnnnnnnnnnnnnnnnnnnnnnnnnnnnnnnnnnnnnntaacttttatctaaattgcaatttgaattccggattgagtatacctctgaatggaaaacggttggttgctatgtcttccttcagcgagatctatccggcgataccaaattgtgatctggttccttcagatcagatgattaaatgctcaccaatatctctacttgagctgatatatccttcctctttttctctcaaaacacaagtaatataagatgtaagacactaatcttcatggtagcaacangagttggtgataaacggtgatgactacggcaggacgttacggttagtgacgggttctccacttagttttgatccacaactcaacaacaacaatgctgcagctccgatatcataaagtatggatgatgatgac

SEQ ID NO: 75440 - DNA, 338 bp, Arabidopsis thaliana landsberg
gcttttgaattatatattcatatgatttcaattaaaagtgcacaaatggtttatttatattaattcgattggtttgtttaccatttaaaaattacaattgcttcatgatctttcggtatgtaactcatgcctcgtgtcgcgtggtaaagagatggtacatagcttaattttatttcttttggttggagctactgtatatgggaaaataattcattttataagtattgttgttttttaaaaactcattttcattttagaagtccatatgacaaacaacacgttgaaactaattattattgaatctagtcatttatagaataatccgactttaaacttta

SEQ ID NO: 75441 - DNA, 227 bp, Arabidopsis thaliana landsberg
aaaacctgaacagcgcaaaccctcccaaacaaacgggacatacactccatatcttctaatacgccaaatactgcactgcataaccccacaaaaccaaccatttacaacagtccagaaataatctataataaaaagaaaaaagactacaagcttagaacataccgtcctaaccgtaaacacatatatactctcgtgaataacattctccatatcgagtcgtgagatac

SEQ ID NO: 75442 - DNA, 576 bp, Arabidopsis thaliana landsberg
  unsure (1)..(576): unsure at all n locations
aatgccatgatctcagggcatgggaaaagaggatgtgagactgtggctattgaattttttttcaatatgcggaaatctagtgttaaatccacccgttctaccttaggaagcgttttgagtgctattgggattgtagctaatcttgatttaggtttggtagttcatgcagaggctattaaactaggtctcgcttccaatatttatgtcggcagttctttggttagcatgtactcgaaatgtgagaaaatggaggctgctgcaaaggtatttgaagctttggaggaaaaaaatgacgtcttctggaacgcgatgataaggggnnnnnnnnnnnnnnnnnnnnnnnnnnnnnnnnnnnnnnnnnttatggatatgaaatcttctggttataacattgatgactttacctttacaagccttttaagcacttgtgctgcatcacatgatctagaaatgggaagccagtttcactcaatcatcatcaagaagaagttagcaaaaaacttattcgtaggaaatgcattagtagatatgtatgcaaaatgcggagctcttgagatgcaaggcacatttttgagc

SEQ ID NO: 75443 - DNA, 573 bp, Arabidopsis thaliana landsberg
tttagaaaacccggcatttacaacggacttggaaaatcaaccgaagactctacgctgcagcttttcattttgtagtaactacgaacatgatcgcaactacttattcattcacatcttttccgaatttaggcctgtcccgcgtgcgtattcgacatccctcgccatacaacgcgatatctttgtatcgttctttggcgaaatcaaacccccgccgatagcctgtcaaggagaaaccgatgatacctatccatcttatcaatctgcacaagatatagatcgggaagaaccacccgtcagtgattccaatgcatctgcgccgaatagcgtgcacaatcaacactccattcacagtgaagagtcgtcagagtcatcattcgagacagactctatctcaactacatcaatctcgggatatcgagccaacttttttgatccacaagctcaattgagcgccgaatttcctggagagggggctaactttccggacgacgaccctgatttccaaagcattcagccgcacgtcaatccctccgatttgatcaaggatcttttgtcacagaagagagtgttatt

SEQ ID NO: 75444 - DNA, 733 bp, Arabidopsis thaliana landsberg
cttaccatacgtgagtgtgaataataatgacctcattttatactctacaacaagcttttgggggaatacttttagagcataaaaccctaaagcttatgtcatagtctttctactatgttggcgactataattcgaataatatcttatggagcattgagtcaatgcttatttaaatatacatgtggatcaccttatgataatcacgtttaaggcaaaccaagtaaaaaagtttactttagtttatggttcgactccggttcaataactctttaattttagactcggttttgattcaattggactagaagcttgttggtggaagtgaacttatgaattctgacttggttgggacaaaattagaagaagagaggattaatttaataaactttttcttacgtagctttctaggaaaatgtctcattttgtttcattacactaattaagtattgcctaaatgtagaaacataagtgatttttgcataaaatatttcttttccatcatttttttcgtcgccccaccatctttgtttggttaaaaaatttgtgagccctctcgtagacttttgtactcatggccatttgcaagaatagtataaacaaggttggtgatagcttgtattgacgtcacaattggtgtatattcatgtcgtaaactagacttctgcgattgtgcaaactaaaatttcatgttaattttcaactaaactgttgactgtgtaaagtcaaaaaatta

SEQ ID NO: 75445 - DNA, 591 bp, Arabidopsis thaliana landsberg
aaagtccttagtaatctggagacgagatattccgtgctttactcaaacaggtaataatctcatatcatcgaactccttcaatttctcaagttgtttttgtttttccggttgtagatagaaagatgaacacgaattagtttccgtgaaattttgggctacccagatctagatgatccgtgaaacaactatccagatccggatccactggatccattatccaactatccggatctggatctataaaccaactatccggatttggatccgttagatccataaaacaaatttcaagatctagatccgccaatatatgcgactatacatatctgcaaaaaaaatagatgaaaataagattaactattatttcaatgagtaaaaaggttaacagaaaatatcatataaaatatctaaatatctgaatttggatccataagctttggacaactatttctagaattgtatcaaaactcatatccatgatattctgcatgtgccttggtatggataatcttgcagatttcattttttttattggatataatattttttggtgagcaatatatttaacatttaaaaaaaaaaatgtttggg

SEQ ID NO: 75446 - DNA, 558 bp, Arabidopsis thaliana landsberg
caatttaaaggtttcagctttttggctcgtaaatatgattaatgaaaaccattttccaccaatttggagcggtggaccttaatttcatagttcctttagcatcacttgtcaccattccaaagaaaatcgttacctcagtgttgttgggcttaaacagcactgatttgttcagcttgctacgattctccactttctccggcggaatttccgaagaatcatcgacactataaaacaaccgcacacgaattcaattactcaattttaaaacgttactggcgaattaggaaataagcgagagatgagtttagaaatcgagagagatagagattgaacgcttacggaatcgagcagcgattcaggaaggaagaagcaatcgatcgctgtccaaaaaccctaattttaggaattggtttcttcatcttcttctcccattttgcctctctctcggagaagagacgtttttacttttttgtttcgtctttttttagtttctcactttttgccgcaactgcaaattttggtgaaagctatctgcttggcaaacattataaatactga

SEQ ID NO: 75447 - DNA, 530 bp, Arabidopsis thaliana landsberg
gggtctagaacctggagatatttggtcattgaacagaaaaacaaaattgtggtattcaagctctaaggagtattttgtagggtataggagtaatgattcggatttaagacatgttgacaaagaagcaatgatttaagaaaatggacctctcattatcttgctcatttgctttctttatctttggtaattagggtgatatgactatatccttgataaacacaatatatcggtgccactttcgaattaataataaccatgattaaagatggcgagtcatcaaagaaatcatgaaatggaaagaaatataaaaatttcagtatcgaatcaaatgaatgattagtgctgattccactccaattctattttataacctctacgtcaggtggtttagaaggaaatcaatctatcaagagtcacgtctatggattgggagtcaaaacatatacgtatgcttctggtagtagtcgtagtgattaaaggatcaaagttgttagactgaatgggttacaaacacaattacgggatcgatg

SEQ ID NO: 75448 - DNA, 544 bp, Arabidopsis thaliana landsberg
  unsure (1)..(544): unsure at all n locations
aattgtttctaagggaaagtaaaatacacaaaaacaaaaataaaaaattacaaagacatggtttaatttattccaaatctaaaaataattctaatgtcgtatataacacggaaaatcatctagttaaaaaaagaaataatgttactggttattagaattcaaattgaacatttggcttgattaaaaaactatgatcaaagcccaaagacatggaatcgttagcaacaaacttcattacacgagtaaatatctaaattgcttaaggaattgcttaactggaactaagtaaaacatcggacacgtgtcaggagaggacagcattgtcacgagatctctatctgctcggtnnnnnnnnnnnnnnnnnnnnnnnnnnnnnnnnnnnnnctatcgctttaaagtagaggacgaaaaaactcactctttcaaaatatctctctggctttctatcgctggaacgagggggtataagctggttttttttattcttgccctaaaatacggcgcctctctacttcatttggtttttggtacctcctaaccctta

SEQ ID NO: 75449 - DNA, 251 bp, Arabidopsis thaliana landsberg
gacgatgcagggaacgaaacaccggggaggctggccacacccggcccgaaggcgccccccaaggcgcacacggacagagagcaccacacggaccaagcccaagccggcacccccaccaacacgcggacagcccacaccaacgcagccccaaacaccggagccaacacccgcgaccccgacaccggaaaacccaacaccacagaccccgggcccaccgctgagccgaaggcaacccacccccacccgaaaca

SEQ ID NO: 75450 - DNA, 553 bp, Arabidopsis thaliana landsberg
  unsure (1)..(553): unsure at all n locations
nnnnnnnnnnnnnnnnnnnnnnnnnnnnnnnnnnnnnnnnnnnnnnnnnnnnnnnnnnnnnnnnnnnnnnnnnnnnnnnnnnnnnnnnnnnnnnnnnnnnnnnnnnnnnnnnnnnnnnnnnnnnnnnnnnnnnnnnnnnnnnnnnnnnnnnnnnnnnnnnnnnnnnnnnnnnnnnnnnnnnnnnnnnnnnnnnnnnnnnnnnnnnnnnnnnnnnnnnnnnnnnnnnnnnnnnnnnnnnnnnnnnnnnnnnnnnnnnnnnnnnnnnnnnnnnnnnnnnnnnnnnnnnnnnnnnnnnnnnnnnnnnnnnnnnnnnnnnnnnnnnnnnnnnnnnnnnnnnnnnnnnnnnnnnnnnnnnnnnnnnnnnnnnnnnnnnnnnnnnnnnnnnnnnnnnnnnnnnnnnnnnnnnnnnnnnnnnnnnnnnnnnnnnnnnnnnnnnnnnnnnnnttcttttttttttggtagaagctccccaccggtggattcttaggacttaaatctgccctataaccttatttatgatcttttacatcctaaggcttcccctccgctatct

SEQ ID NO: 75451 - DNA, 507 bp, Arabidopsis thaliana landsberg
  unsure (1)..(507): unsure at all n locations
cgatggttccgaaataggtcaggtcacgcaggtccataattcatgaatttcagttataggttcatcgaaagtagaaaatagacttgatcggttgcgccgtcgataattttccgcgctggcgctgtcagcctgcgttatcgctgtgcaaggagtatcgacattgcagatcgccccatccggctcatccatgaagctcttccaatggcccgctctattgctctgcgcggcagctgtcgggcaactgttgcatcacctgaccgtaccggcggggttgttcctcggccccatgttggtggccatcctgttcggcgtatcgggtgcaagactgagcctgaatcgacaggtatttcgcttcggccaaggttgcgtcggtctgctggtcgcccattcggtgacctgngcggtgctggtgtctgtggcgcaatcatggccattgatgttgctcgcgacgctgatcaccgtcgtgctcagcgcccttggtcggcctgggcaccgtgcgcttgggcg

SEQ ID NO: 75452 - DNA, 341 bp, Arabidopsis thaliana landsberg
  unsure (1)..(341): unsure at all n locations
ctaagatgtactgcactctcggcttacctgggcgatcttcacactacatggactgatatgcttttcatgttaatgactnnnnnnnnnnnnnnnnnnnnnttgatatgcatcatgtgcatggggccttacgcatgactgtcatgatgctcttgatgtgggactcagaaatggctttagatggaggacgaggaaacacaacttgttcaacttacatgctttgggctagcaatttagtcgttcttagggtactcacaaactcatgttacatttttatgtacttcaaagaaacatagggaccaagcgtcacatctaattattgtgtgatgacctctatatacaaa

SEQ ID NO: 75453 - DNA, 339 bp, Arabidopsis thaliana landsberg
ctattcacaaattacaaagccgcattcttttattgttttattacggccaaagcacaatcttgtgatttgtacacgtttaacacctttaataaaccattaccagcgttaccgcgttgtagccctccttaacaaaaccataaaactgacgtaaactcaacgccgtgttccctcacaccttaatacgataaacaccatcttgatccgaatcccgatacgcaatttttctatgtcgacggagactatagtgccaagcatggtcacaccttcgtcgaggcacacatatgcgacgacataaagatcacccatcttgattagcgcgatgcttaaagaatacaactc

SEQ ID NO: 75454 - DNA, 555 bp, Arabidopsis thaliana landsberg
aacgcaaatacctcagattccgatcttcttcttcatcgacttcgtcgctactctcgccatcggtatcatcatcatcatcatcgtcttcgtcgtattcctcatctgagctataaatatcgacgatctccttttcgtccgccatggaaatttcaaaaaaagcaaacggcttttgatttttcttaagaaaccattaaaactttgtcggagccccgactgggatccgtttggctgtcgtgtgcaatttacagttggatcctttatcctttcttaaatgtttttttttgttaaacattgatttcattgaagttaaatagaaactgaagacataatgtgatgaatcaatacgaattattatttatttattttgcatttgaggattttgtcatattaccttaaatattttacattttgttattttcttatatctaaaaaataattttacatattatgtttgagtttattttgttccatttcttttgggatttagtggttgttattaaggctatattgggtttaaaaaaatttctcaaatgtatagtttttaagtgacccaaa

SEQ ID NO: 75455 - DNA, 272 bp, Arabidopsis thaliana landsberg
tggaaggttcattatggggttcgagaccacgattaattcgttgggtcgcgttaacaaaaacgatatacttacacgattggaggtggtagaattctggagtggcgatgggactacacagcgttcatcaatgtgggccgatataaaactgactagatcttgtggttctggttgcagaagatccagactgatccagctggttgctgggataccacatcataacaaagaaagactgtctatcaaaaaccataagcccggttgaactacgaacaccc

SEQ ID NO: 75456 - DNA, 284 bp, Arabidopsis thaliana landsberg
ggggggacaaggactataatgctcttttcgatgcttttttgtgattgctcacatactgcccacaacgggggagggttaatgtccgcatcaatacatcccccatcaggttccatcttgtcaaaacgatgacattaactcggcacgatcacgtataggccgtgcgactatacgtgtgggtgccattaatactatacccacgtggtctaaacaacatccgcgatagtctcgttaatctggagcgtgctcacataaggtgagaatttaggcaagtccatgcgactgag

SEQ ID NO: 75457 - DNA, 345 bp, Arabidopsis thaliana landsberg
acatacacccagactctcgcggatcggatttgtacaacaccacaccagcatccccgagggggaaaaggaaaagcacgaaacacagctccccaaactggcaataacggaagacacgtacgagagcggaccccaacccactgaatgccaaaacccacagcgaaaaggcgaccaaggagacaagggaccccaaccacgaagccgcagaacaggaagacccatgccccaaaggcacggaaacccagacaccaaggacccagacacccgaactcccagacgccataaggccgcagggactacgacagaaggccacgaccacgaaggaggaccacacggaaaacaaccccg

SEQ ID NO: 75458 - DNA, 374 bp, Arabidopsis thaliana landsberg
  unsure (1)..(374): unsure at all n locations
gaccaccccgagagacagcatgaacggcagacaacgccactttccacacaccttgnctcaccagacncgnggggggaaacaacaaggcnagctcgccgaggagggagccncaccggaancacagggccaganngagnnccaggaagnagcgacggccggaacggagggaaaaagcaagcancagcgagcgccacaacggggaaaaccgggnccaccgacgccaccacaaagaaacgcangccaaccctaaccagccaaagaaaaaggaaaacagacgcagagacaacagaaacaagcacncngcagcagccaagaaccaagcaagcccgcgcaccncaggancggcaccagccgcgcgaacagncgccacagca

SEQ ID NO: 75459 - DNA, 103 bp, Arabidopsis thaliana landsberg
gaggaaagcccgaggagggaacagaccgatggggactagcaaccaacaggcacgagttagtttccaagaaagaacaacaggaaaaggggggggggggaaaaaa

SEQ ID NO: 75460 - DNA, 112 bp, Arabidopsis thaliana landsberg
acagccggctataagctcatatctctgcgtaagctcttcatgtggctgaacacaacaagaaaaaacttttttaaaaaattgaaacctggttaaaaccactggtcaggagctc

SEQ ID NO: 75461 - DNA, 539 bp, Arabidopsis thaliana landsberg
ctcatcgcgtttggctccgcccattttgaactcatagcggataagctttgtaacgccgcgcacacctgcacgagcttgggcggtcaggccaccctcttcacggagcgttttgccatcatcggcgggggtaagtgcttcgagttgcttcaatgtgatcttcgccaatctctacccctagccaaggtcgatcaccttggaattttgccccacttttgccccaccgaatcgcttggctaaaggtggacgctggtggacctgaatagatcaaactataggctataggccttgtatttactagcctgtaggctatccatgacggcctacagcattccatggaaatactttgtataagcgcatggggtgcaaggggtcgagtgttcgaatcactccgtcccgaccaacaattccctaaagaatccagtcactgagaggtgactggattctttaggggcgggattttgggggggctcattgcggtgcttgtatttggctggcgttgaaagatcgctgtgctagggggagtccgtaatacttgactc

SEQ ID NO: 75462 - DNA, 195 bp, Arabidopsis thaliana landsberg
tgcctcctatagctttccaggtctccttgtttcgaaggcaggtggaattttgagtggttcggatctggaagccctgggtcactaactgggcgaggaatgaaattttctagacagatcaagtgtctcacctaaaaacccaccagacatcaatcagcgctttaagagttgggccaactgaccggattgggccaaaag

SEQ ID NO: 75463 - DNA, 292 bp, Arabidopsis thaliana landsberg
gttcacaagagagttaccagagtaaagtagaacgggaacggagaagaaaaaaatcagactttccagtgagctcgtagtttcatcggcgagaaatctcggaggagaggcttcttgactaagctaaaaaccttggaaatttgcaaactgttttgttctgctttatttttttttgtttcggctcgctaacggctttatctggtcagaatgcagagggatccctgtgcggttattttctcatggtcttgagcacactcatcctatccgaagaggtgtttgacaaatcacgtttatg

SEQ ID NO: 75464 - DNA, 153 bp, Arabidopsis thaliana landsberg
aaggctacgaaccaattcccagcaatggcaaagaatttggcaagatcatctttaatcaaagatgtaggagtttatgtgctaaggctataataagaagctatggcatcaagcgatagcatcttcggatgcaaaaaataaaaagatgcagtctaa

SEQ ID NO: 75465 - DNA, 568 bp, Arabidopsis thaliana landsberg
taaccttacctctctcatcctcactagcttgagacgaatcccaatctttcccaacctcttcaacttttcttcttgcatttcgtctaacactttgttgatgctttaacttagccttctctgttcttccctcttgagaaatcgtagataacccacgatcctttctcttgtcttcatcacaaatcttcgaactcagatcatgattccgtatataaaacgaagcaaaagctatcaaaggagaagaacagagcaaaaaatagaaaacccaaggaagaaaagtgtacaagatgatcaaaaacgtagaaacaccagaaacaattgggtatctcttcacgtatctgaaaattgttttcgttgagaatctaagaattttccaaacgataaagcaaacatctttagcatcaaattttcccattttcttctccttctagtgaatcaaacaaacctgaaacataaaaatcattataagacctaaaacacacacgaaatgatcaaaggtattgaaggaaaacttcaaaattgatgaagaagagaggtcaagcttacctttgaatgataaccagtcaaaata

SEQ ID NO: 75466 - DNA, 104 bp, Arabidopsis thaliana landsberg
gacatcgggggaacccaggctacactaccacccaagcacgtcatggggtgtgaggatcgggcacaagccgagacgcaccacgatagcaagcaccgtaaaaactc

SEQ ID NO: 75467 - DNA, 173 bp, Arabidopsis thaliana landsberg
acaatcatactattctatgggcgtatttgtgccattgacactctgaggaatcaatgttggacttattggatcttatcaattcatgccaggattgtgattgggggtcgatagaaagccacctatgaacttttgacaaatcaaaaaatgacggactactatgcttttttttcatc

SEQ ID NO: 75468 - DNA, 233 bp, Arabidopsis thaliana landsberg
  unsure (1)..(233): unsure at all n locations
taacaaaaacaaaaatgatttaaggtttttaacaanacaacacaaaggccgtgcacaggctattctattgctggatccattgacaacaatgacaatatgtcctactaacctcgaaagaaaccttagcaagaaatacacttcactcaagcatacaatattaaaataaattattaccagactgattgaaggcataaaaaaaatattagtcacataccatctaccattaaacctta

SEQ ID NO: 75469 - DNA, 603 bp, Arabidopsis thaliana landsberg
  unsure (1)..(603): unsure at all n locations
ggtttcggatcgagatacatnggtagacgcttgaagcaaccggataagatttgttaaatattattggctttgtgtttgtatttttctgtgtggggaaaaacaaaacaaaattgtttccgtatatgattacaataaaaagtttatactaaatttaggattaaatatttttatactaaataaaaaaattatgaagatagaaaatgttagcttcaaaatttcatctctattcgtacttatatattactagtgattatccatatcctaagacattgcgctttgaagcaatcataactcagaaaagctaaataatagtttaatttttaaaaagaatcataaaagctaaatatttagcttataaaattatgattttttacatttattggagaaaatcttgatttgaaatccccttataaaattattttgttttacatttattggaaaaaatcttgatttgaaatcccaataatattagtgttagatttctttcctcaattgttaggacattatatataactttntgtgaaagtatatattgtatatcttagttntataaattaagataaatgtattcattcgtaaataaacagatggaagattatctta

SEQ ID NO: 75470 - DNA, 604 bp, Arabidopsis thaliana landsberg
gcgggaggaataagagggcgcgcgcggcgaggctatcggcgtgggcgatggagacctcgtttccgttttagcgggccgactgccgggcgaccatgcgcgcgagcaggcgcggctcgacggggcggccgagcgcggaggcgagcgcagaggcccactggtcttcgacggggggtgccatcgcgcagggttctcgcacggcgcgagcgagggcgcctaccccggacttcagtccggggtaggtgtggtgagagcccgccgcgccgccttggcaacgccccccgcgaaggactagaacccgcggcctatgcgctggatgcccgccctcgcggtgatcgccttcgccgccgtcgcggcggccctcgggatggcctgggagtacgcccccgtggcccaggaagccgccgggggcatcacgcagaagatcttctacttccacgttccgagcgcgtacgtgatgtacatcggcgtgacggcctgcgtgctcgggtcgctcgggtacctcattcagcgccgcccgtgtggggacgcgctcgcccaggccggcgccgaggtcgccgtggtcttcgcgagcatcgtgctcatcaccggcccgctctgggcccgc

SEQ ID NO: 75471 - DNA, 579 bp, Arabidopsis thaliana landsberg
  unsure (1)..(579): unsure at all n locations
ccgccgcccatgcggttgcgctcaccgaacaggaaatcgccatagatgccaaggccgccgccctgcattatcgacgccgccacggttttccagttgagcggcctcggcgtccgccccttgaccaactccttggcctgcaaggacacatagcccagcaacatggtcgagacgatcagattggccagcggcgcgatattgcccgcccgcgccttcgaggctgccggaacaagggtgcggttgtaataggtcagggggaaactcttgaactgcaacagggcgcgcatgacttcgccaaaggccgatccgcgcaccgatccgaacgccatatcgcgacgctcgcgcgcccggccttccgaggtcgcattgtccatcagatcactgatcatcgcccgcgcgcgatgccttagcgcctcatcttcgatgccgtcaaagctgatataggttccatcctcgatcctggctgcgcccgccctcagcttatcccagccgctcttgccgatgccatagcgtgccatcagctccgacaggtcagccggcagggcctcgannnnnnnnnnnnnnnnnnnnnnnntatggcgc

SEQ ID NO: 75472 - DNA, 553 bp, Arabidopsis thaliana landsberg
  unsure (1)..(553): unsure at all n locations
tccgtatctcgatcggaccctaacggaaatnnnnnnnnnnnnnnnnnnnnnnnnnnnnnnnnnnnnnnnnnnnnnnnnnnnnnngcgcgatcttttgcatctgacggataaagagatatctcaaacaataaaaaacattggtccggaaaccataaaattgattgatcggcagctgggcatcctcggattaacacgcgtcaaacccctcatagacccccggtcataacagaggatccttgatagatacccataaagtggtatcgtcattccctttacccttatgaacaaagaaaatacaacagcggaatcggctgacggtcgcggacttgaaacgcctgcaccacgtgtatgggatcttgatgaattcgtcatctctacagcggaaaaatccggcaatagtgaccctcaggtctggatgacaacgctgaccgagcaggaagtaacgaaaatcctggcgcactgccgttcgggaaccaccggggacgaatcgatgatcatcgagattttgaacaattcgaaggttccggataaactaaaaaaggacagggcatgg

SEQ ID NO: 75473 - DNA, 277 bp, Arabidopsis thaliana landsberg
tcccatcaaaagatggtttgccatagaacagggttttactccgtacggagataactgctccattggttcaacgtcaacatggtagaagtctcctcgctaatggaagaacatgctcgccgactttatgtccttcttcgagccaggatcgatctaaccatcattataaatggaaactgaattcaaaacatgggttatggatcaaatctcaatgcagaaaaagatcaatccagcgtctcgaccttcgtcaagaatcattaaccccgaaggatcaaaccca

SEQ ID NO: 75474 - DNA, 352 bp, Arabidopsis thaliana landsberg
aatcaaaacagttgttaaatgattcaaatatatatattcaagaaattgagagattaagactttgataatgacgatgacatagtttattacgcaaccttatacgtccacataaagttgaagatttcagtagactatccagtgttagattcgacttaaaataacaatttaaatgtagaaattggttgaacaaaagagaatgacattttttctaggagaaaaaaaaagagaatcaagcaaaagatacgtaaagaatctaaatacttcatcttcaacaaaacatcaagagacatgaatgatgtagacaacacagatagaatctaactgtttaagatagaatctaactgtttaagca

SEQ ID NO: 75475 - DNA, 222 bp, Arabidopsis thaliana landsberg
  unsure (1)..(222): unsure at all n locations
caaagccaccacaagggcggccaanagaacgaccaaaagaagaanaancgacgaggagggnaaagcagagcgaaaggacaaagaccgaacaaacggggaaaancaaggacacaaacacangcacacangcanacatacaaaagaggcagncatatncncacacaacanacaagcanangcgnggangangngnaaagagagagagaacgggcacgcgaaggc

SEQ ID NO: 75476 - DNA, 535 bp, Arabidopsis thaliana landsberg
agatagagaggaatggacgagaaagcaacatgacagttctctcttattaactttcactcctcttctttttattaatactgagatccaccagaaaagggttattgctattgattgatgaagatgatccattgctttacgagtacgattataacttctaagcttttttatatggtttcccatagatattcttagctttaactgaccaaggtagttatatgttgtagtcggaatagccattaatatctcaggtgcatcgcagcactgtaaacgccttgcaagcctggacaggtggacagtcatggtctagaagaagatcatgttcatagcttttttggagactttggcttttatagaaatcaaggaataagaaagtattttaaagtatagaggctttaggtattttaagtcatgctagaagtgaacaattggcatgggaggctgctcaattgaatcttgtaggagagataaaggaaagagaagtacttccaatgttttcttcaataattttgtgccagaccagttgttttaggaagat

SEQ ID NO: 75477 - DNA, 397 bp, Arabidopsis thaliana landsberg
gtgacaactgcacggtaaatatctccatattcctcgatatcacctttcatctcacattgggctctgtctcatataaaaagaatactacttttagatatctcctcgctcttataactaacttggtcacgggtatgtctaacttatacgacgaactaaagagacatattgggaaacaaaactggagaatctcctacttgctcattagtacattgggtgctcatgaatcttgtctactacttcttaaacttttctgtgagttgttcttcccaactcggggattgggcatatgtaggccttactacattgaatggaggtaggtttcttaaattttcagcataagtttccccttagtgtatctgagggggctatacattaggtaacaaacgaaactggacac

SEQ ID NO: 75478 - DNA, 428 bp, Arabidopsis thaliana landsberg
atgccgtgacgcgtggatcctcgggtaagcaaccgtggagtcattgagagaaggctgcttgggatcgggcgattgcattgaggattgtcatgagctttcgaatggttgcgaccattgcgagcttgaatggttttcccctgccgcgcaggcgctgatagaagcctgccaggacagggtcctttgccttgatggcactgaggaccgccatgtaggcgatgtcgcgcagatgttttcggccgcccgagcatcgccccgaccgattggaggccccggattggcgcgcatggggcgcgacgccgacaagcgcggtgattgccttggccgaaacgaagcccagatcgggcaggtctgccagcagggtgctggccagaaccgggccgacgccctttacgtaacgaagcctgtcatatgcgctgccgcagatgggt

SEQ ID NO: 75479 - DNA, 473 bp, Arabidopsis thaliana landsberg
ggtgggatttaccagccatttgaaaatatatatatatatatataaaaaaccgttcattgttttaaagaattgtagtttaacgtttaaaaaaacaaaaaaacttatacattagttagcaagatgttcgaaaacaagatgttttaaaagagattaaataataacgagtttttgtgatgacagtattttttattttcgattttaatatatgtttattgagctgctgggatgtcaccgatcaaataatcgttgaacctaattaagaatttgcttataattttgaatgttaagagtggtttaaatcccaaaaaaaaaaaaaggaatagaattttgaatgtttttacggtggatcgttgatgtatttacaatattcaatttgtttttatttatactctgcacaaacattcgaaataatttgtaatggtcctgattgaaagagtgactagtggaaaagattttcgttcgaccacaacatc

SEQ ID NO: 75480 - DNA, 437 bp, Arabidopsis thaliana landsberg
tcgacgacatcgactccattctcatcgacgaggcgcgcaccccgctcatcatctcgtcgccggtcgccgacgcggagggcctctaccagcgcttcgcgggcatcgcggcgaccctggaggaaggaagcgattatacgatcgacgagaagcaccgttccatcgcgctcaccgacgccggcatcgagaaggccgagcgggccctcgagatcgggtgcatctataccgacgccggcatcaagtacgtccatcacctcgagacggcggcgcgcgccaaggcgatctacaagcgcgacaaggaatacgtcttgcgcggcggcgaagtcgtcatcgacgacgaattcaccggccgcatgcagccgggacgccgctggagcgacggcctgcatcatgccatcgaggccaaggagggcgtaccgatccaaaaggagagccgtacg

SEQ ID NO: 75481 - DNA, 551 bp, Arabidopsis thaliana landsberg
tttggacgacgttgagtagatctcgatatcggcatcccccggccagggttggaacgggctgaaccatttacagttactgacttgacctgcagagttcataagatgagagaggagctatgtgatgatactttggcctatgacttggaattctagacacgcatcatggtattgtagctatagtcgaagacttggaccatcactatgggtgactacggtatacgacgcgagcttggaactggaaacttgagtttgaatcatgatgaaatcagagtaattggagagacataaacgcctatgtaaaccgtgtccgtatcatcacactttttgatcccgacccgacccataagaacaaatgcaaattgaggtaacgagcgataatccatctactccttagcgtccaccttctttgccgggtggtcaccgttggactcgtcctcacgggcgcgcttctcaccagtcgcttgcacgacaggaacacctcgggcgtccttcttgaagccgctcttttggttctctttaccgcgcttccgccagtcgcgcttgttcccgcg

SEQ ID NO: 75482 - DNA, 702 bp, Arabidopsis thaliana landsberg
attggtaattcgtgataatctcaaagatatggtcaacgaatattatcacattgcaaaaatggataatattatcacgtcacctaaggtcgtattcaatctccaaaaatacgcagagtaataaattagtcaataagagagtgtgcccagtacgtttatttttcttttttcagttattgtatatatttttatttgtgaaagttgttttttttcagttatattatgtcaattttagaaatacaagagaaaatgtgatggatataaataagtaacaacaaaaaattggagttactaaccctgaaataaagcctactcctaatttggtataaattgatctcatattttatacacttgataactatcagtctaccaataattattgagcatacattctaactagaaaatgaaccatctctatcaattaatataaaaactatatattataacgtaaatataacgttagaggaggttaagaaaaaaagaattctgaaaattaatgcgaaacaaaacaaatatatatgtaagagttttaaaagttttaaccagttgctaaatctaaaaacctactactactaacaaacaaagaattaaatttgtaatttagaacatacattacccgataacatacttactggggataaatctgaaaccggggcggatccttatttctgttctttaaaaaacctttcacaatttttttcaaaa

SEQ ID NO: 75483 - DNA, 208 bp, Arabidopsis thaliana landsberg
ccctttccatgattcgaggtcatcgatgtcagaagaagagcagagccgcggtgataccccctctccacgctttattgtaaaggggctgatcattgccatggtggtcgtcttggtcgtggttgtcggcgtatgcgcctacccgttgatcaagttgccccatacgggcaccgctaccggcactgtggtttctgtcccctctccatcctgc

SEQ ID NO: 75484 - DNA, 447 bp, Arabidopsis thaliana landsberg
acacgggtcatgctaagctaaatatagaaaagctgtattccttgaagagggagccgatcaaaaattgggtgacataacagaaggactccctcaataacacccggcaggataactgcccacgtatatacagaagtagagtgaatatgggagacgaacctgcatttgtctggcagagaataaacttaggtgttaaatttgaaacaaaggtggaagttgctatgtcatgctaagcagctattgcacctgacctttcttagacagaatgatggcaaaatagtggtgcgagactagagatcctctccatatgatcgtctatacatatggccatgtcatatatataacctctcacctgaaatcaggattcacatactgaaacctccaactattatcgccgatattatacgagagcatggagagaggtaaggagaccaaccttcatcatatcat

SEQ ID NO: 75485 - DNA, 528 bp, Arabidopsis thaliana landsberg
  unsure (1)..(528): unsure at all n locations
atgtactatacttataagaattagttactgctctttttttgtcaactggtattgtattaagagacnnnnnnnnnnnnnnnnnnnnacccaccaaaggggtgaaagagccagacatatgaaaatgaaacaacatcctcaacctttactcaagccatactaccatcaaaactcaaatttaatcagaacacaaagccctttcctcagcaaatacaccatcgatcgagccaagtaggatgactaaccgccacatacgattgtgacatgcactcgtataagcaatgatataagtcattgtttctagtcgaaagcaaatgatgtttggtgctgatattatttaaaagattgaaaaacacttaaaatgaaaaacaaaccaacattctataacgccttgcatttattcattaaaaactgctgcattttcaatttgttctctaaacattacaacaactttttgaaaaaatgcagaatactatgttctatgaaatgttataagggatttcttaatccgaaaataattaaacacatcct

SEQ ID NO: 75486 - DNA, 527 bp, Arabidopsis thaliana landsberg
tttacacgtggaatgtgatggcgggggattttcacgtgctggagacgctgaggaggcagaggttggatggataattcgccgggggcggcgctgttggtggcggtgcatactgcggggtatgagtggacaagggcgagtcagaggattacgaggaggcttggaacgatgagatgatactgggggtggtttgcgatgtatgatatcaaatgtgtgtttctgtatttatggatcttaggagttcaacaagagggtggtgttaaaacgtcggattttactcctcaatttgcattgtcagtgatttcatggacagcatgtgtttgtgcacataagtagtgtgaggatacaccacgagtttttataccacaggggatccattgttatttggtatagctagcagatatagctagcaaacacaataatccattccttggttacacgaatatttttttttaatcgcccgcttagttcgcggcgccagagatgaaaaaccacttgtcgatgctggggaccgatggtgaagggcaaac

SEQ ID NO: 75487 - DNA, 581 bp, Arabidopsis thaliana landsberg
  unsure (1)..(581): unsure at all n locations
gcgccgaactgatcaactcactggtttcttcacagaagcaggcgttgatacaggatttggtatgcaccggcgatnnnnnnnnnnnnnnnnnnnnnnnnnnnnnnnnnnnnngcgcctctgacctgaatgcatctccttttacatnnnnnnnnnnnnnnnnnnnnnnnnnnnnnnncacgcttgccagcttcagcctgggtcctgatatggccaaccttattccgttactgaaagagatactggtcatcaatcccaatatcaaaatactggctaccccatggtcgcctcctgtatggatgaaggataacggtaactttatgggcggcagcctgcagaaaacatattatgctgtatatgcgcagtacttcgtgaaatatatacagcagatgaaagcgcagggcattactatcgatgccatcaccccgcagaatgaaccgctgcatcccggcaataacccgagtatgctgatgctggcggctgagcaggctgattttattaaaacccatcttggccctgcattccagtcgggcggtatcaataccaagatcattatttatgaccataactgggacagggccgga

SEQ ID NO: 75488 - DNA, 522 bp, Arabidopsis thaliana landsberg
tccatcttcccatccttattctcgggcaaacaagagtgacatatgtgccatagcaagttgatacttttttgttttcctagtaaaagccgaatgcggccgcagtttcatatactcgatcaagtccgaggtgttgacatcaggttgaacatggtctggtcgtcccgttgatcgccacacagatgaagatcgtcgtcctgccattgatggtcttggagaatgtatcggcgaatccgtcatttcaacttgatcctcgtggatgacaactgacattcggtccctcctatatacagacggcgatcggctgggaaagtcaaagtttttgacaatcgacgaagtgctatcagagatatccgacgacggctgcggctctaaatccatttcatgaagccacacggtaccagcaacgctgagtttgcgaaacttcatgacgttgtctgtgagagtacccgttttgttcgagaagatgtattcaacctggccaaggttctcgagaatggtgttcgtgttgcaccgcgccggcgt

SEQ ID NO: 75489 - DNA, 610 bp, Arabidopsis thaliana landsberg
caaccgttatcgaaaaaaaacagagagatgacgatcgcaactatgaggacaaaatttttaacagagaaattttagagcatacgaacaaagacaaagaattttttgtaactttgttgtttcaaatggaaaatttggagagcctaaaagctgagcaagatggataaattctactttttgagtgttgttacaacaacattttgaacttattaaagtggcttacttaaattttgtaagacatgtgacatgaggatggttttgttatctgatattattttcctctgtttctgtaataaataataaaatgaggggtttatttgtaaacaactttagttcccagatttttctgtgtctgtcttctcgaagcaaatgaaaacatcatcagacagctgaaaacgcctctgaaactcgcgagatctattttcaaatcgaagaagacagcaattcgagggtttacttgtcttgtcttggtgactcgattcgtagacttttggtctgaagcttcttcgtgttttatcttaacaatggcgggttttatcaatcttgaggattccccaatgtttcaaaaacaagtacactacctttttacctcattagtgaaatattcaagttt

SEQ ID NO: 75490 - DNA, 587 bp, Arabidopsis thaliana landsberg
  unsure (1)..(587): unsure at all n locations
ccttgatgttgcccggattgaaattgatcgggtgattgacgtccttgaaatgcttgtcgttgaccgtttgcttgtttcactcgatctcgagcttctccatcgcgtggatgagatgataggcggccatgatcgcgttggagcccgcccccgcctcgaacacatgcaccgggaagccgcgcacgcggatgcggaaccagatcaccccgacctgcgnnnnnnnnnnnnnnnnnnnnnnnnnnnnnngaataaaacaggcatcggcgcgatagccacgctggatggtcgagagcgcaccgaccccggtgctctcctcctcgatcaccgactgaaaatgaatccgcgcggtcggcttcaggcccgccgccttgatggcatcgagcgcataaagcgcggcgatggtgccggatttcatgtcgcaggcgccgcggccatacatcctgccgtccttgatggtcggctggtacggcggcgtctcccacatgtcgagcggccccgccggcaccacgtcgcagtggccctggatgatcagcgacttgcctgcttcgcgcgccggacgataggtgccgaccacgctgcgcgcacgggga

SEQ ID NO: 75491 - DNA, 519 bp, Arabidopsis thaliana landsberg
actgagaaaaagcatatgttaataatgtagatgcaggcgagtatacacgattaagtaaaatgcatatttttaataatgtagatgcatttctcaaagttggtttaggttaaaatctattttgttgcttttttagagtaaaataatatcctatgaaaaaatgtcaaaagtagctactgccttcaatgtgaaaacaaaataagccacacaatctgcgaagctgtgcttaaaaaaagacttatgataaaaccgtacgaaatccgaaatcttaagaaatggtgccttgcttttccttttcttacgtataaacacgctgtctgaatccaaggcttcgatatcgtaagactaaggcatgctatatgtacacgcatccatatctaaagtttcaagaccttaaaaaccaaaataaaaccgtttgaaatgaaatgaaatgaaatgaattacggccacgtgtaattacatcacacgccttttcttttctcaggtgttgcgtgtacttgagctttgattccataccttctc

SEQ ID NO: 75492 - DNA, 567 bp, Arabidopsis thaliana landsberg
ataacgacttatatatctctatttcaaatatcaaatcaatttatttgtaataattaaatatttcattttttcaaaatcttaatataactaaaaattccaaaagattattatcttaaatactattttaaaacaataatgaataacaacattctaccaatgttaagttatgatttttattaagtcatgtgttattgttgtggtgcagattttgatgattcattattattgaaaacttataatatagtttacttttcaaaatcattcaacgaaaattattgaatagaagaaaagtttggtgatatgttgagctgaaaaatatgcttggaatgttggagattattttattttatatgatataacaaatattaagtgatagactttataatatttttagatattatcttattgattttttatattaaaaataacaaatcagctttgtgttaatatatatgtatatataatattatttcaaatttagttaaattttttttctctaaattcgagtttagttttgatttactaaaatatagctttaaacttaaattacacaaattgtcatttaac

SEQ ID NO: 75493 - DNA, 498 bp, Arabidopsis thaliana landsberg
gtattatatccatgacctttgtaattgagagattcatgacatcctacaatacctttatgttgtggtgagccagttcgacttagatgtcactctggcctatattagttaagtctggtttaataacgtcttatttacaaatgtggtttgcaggttggttcacagcaaaaagaactaatacattctactagaatcgcatgtgaaatacactgtcactgtaatggtagcagcaacttcttctttttaaaaagcgttaactaacgtggcatttttttcttctaaaggacacaatgtaacgtatctcaccaaagctgaccccaaaaaacagcattgctcacccatatcatcatcactgcatagaaatttcgattagtcaccaacaaaactacttcttccgaaattaatatatgagctcgcataagcaatatttatttaatataattgcaactcatgccgatggccacattataaacatttcatgtaagatccaatcatataatc

SEQ ID NO: 75494 - DNA, 550 bp, Arabidopsis thaliana landsberg
attcaggaggcgatcgcttcgctcgctggttatgctgaagttttccagcgaaacgtattcgtttgtggagtcgttccccagatcagtttgatcatgggtccttgcgcaggaggtgctgtttattcccctgctcttactgactttattatgatggtgagagacacctcgtatatgttcgttactggccccgatgttgtgaagaccgtgactggtgaggaagtgactcaggaggctttgggaggagccaagactcacactaccaagagtggtgtcgctagcttggcctatgacaacgatattgaagcattgagaatgtgccgtgagctgtacgatttccttcccttgagcaacaaggaccccttgcccccagtccgacagaccgaggacaccagggagcgcgcagatgccactctcgatatgattgtgccccaggatgctaacaagggctacgacatggccttggttgtgaagaagattgctgacgataacgaattctttcaaatcatgcctgactttgccaagaacattctgactggctttgttcgcatga

SEQ ID NO: 75495 - DNA, 552 bp, Arabidopsis thaliana landsberg
agagatgcctctggtcggcacaccggtgaatgtggtcaacccgcgagttttttcttcaatataattctaaatgtggttttcttgcccggctcggaagtcctcacgaacagctcgcctttatgaaactgttctatgatccgtttagaaagacttaatccaagtccccatcctctttttttggtggtgaatccgggattgaacacctgcctgatattttgcttggaaattcccttgcccgtatcctgcacatcgatatagatatcctgcggattttcttttattgaaaccgtgatggaaccttttccttccatcgcatagagcgcgtttttgagcaggttttctattacccagtccaatagcggcggcgaaatatttgcgactatcggtgcagaggcggtgcattcgattagaaaagttatgcggccggttgcgcgtttgcgaatgtagtcgaccatacggttgatgttggtcagcacatcgtgcggctcgagttgcggaatgctgccgatcttttcaaaccggtcggaaaccagactgagcctgtacacattc

SEQ ID NO: 75496 - DNA, 386 bp, Arabidopsis thaliana landsberg
tgttggattccacaaatgaaaagttattacttttaatgtgtttctcaaataaataagagtgcatgtgttcaaaattattacaaacttaaccatcaaagtcaaaatataattttcggggtgctttctagatattgataaagaactaaaccatgcgtgtggtatcttaagaaaatgtgaataataaattacatatcatctctaatctacagcatatcagtaaaatatacatatgggatatgaatactgaatgattaatgtacaaaagtctctgcatctatcattatattcctaagaatatccaatataattgatctttgacatcctctaattaaaaatcatctcctaactaaagatgctaagagccaactatatttgatatgctatga

SEQ ID NO: 75497 - DNA, 587 bp, Arabidopsis thaliana landsberg
gattcgggagccccgtcagcgggtcgcgcagcgcaaactctttgttgccagctccgcctgcttccgctcagtgagggggtgggagcaggtgacgaagccgatgcactgcccatccgcgtcgagcaccatgtcggaccagaggagcaccgggaagcgactcccgtcccgcctgatgttgacactctcccgcgtccagctcgaggtgtccttcacgtcctgcgggtccatcgcccggcacagctcaggcggaccgagaacccgcgcatgctctcccaccagctccgccacctcgtatccgtgcatccgggcttccgccggattcgtgtagtccatccgaccgttcgcatccgtgatcgtcacgccgagctgcatgttctcgacggcctttcccagcatccgcaccaggttttccagcgcccgccgctccgccgcttccacccgaagctccagctcggcgcgcaccaggccgaccagttccccgagctgcgagcgatccttcgcgctccatcccctccgttccacccgcgtcacgtacaggcacgcccccatcgctcccccccgcacgggatcgggaacgccagagtgag

SEQ ID NO: 75498 - DNA, 762 bp, Arabidopsis thaliana landsberg
cccgccgttgccgccgccgccgcgcgacgctgcactaccgaacagctggaacgtctcgccaccgccttctagtgtctatggccgcttcagccaacctggacgaatggaccgaggccgacctggcctttcacgaagccatgctgcacgccaccaacaacgaactgatggtttcgctgttctcggtagtcgaaaccgcgctgggcacctacttcgtgctgtccgcgcgcaccgccgccaatttcaagtactcgctgccgcaccacaagaaggtgctcgacgcgatccgccgccgccagccggaagtggcacgccaggccatggtgaagatggtggcctcttctcgcagcaacatccgccgccattcgaagaaggcttgagaagaacctgcgcatgaacggcttgatcggactcgactggggcacctcaagcctccgcgcctaccttctcgatgacgcggggcacatcgaggaaacccgtcatcgcccgtggggcctgcgccacttgccggagggtggcttcgacaccgcgctgtctgccatcaccgaaggatggcccgccctgccgcgactggcttgcggcatggtcggcagtcgcggtggctggcgcgaaatgccctatctcgacctgcccgccggcgccgcggagatcggccacgcgttgggccgcctgacggccgccgatggaatggacgtccatatcgccccgggcctgcgcgacccgcaaggaccggacgtgatgcgcggcgaggaaaaccaactggtc

SEQ ID NO: 75499 - DNA, 102 bp, Arabidopsis thaliana landsberg
  unsure (1)..(102): unsure at all n locations
ggaaaggnaaagaccggaacaggagaagagaaaggggcaaaggggaaaggacgagagggatacaaaattagggaaaacagagaccgagggggaaaagggaag

SEQ ID NO: 75500 - DNA, 464 bp, Arabidopsis thaliana landsberg
ggaagatgcatgtatgaggaagttgcacttaaggtttagggacgttcgtagtgagactgagacctcttgcgctgtcactgtttaggccacgacgaatcagtctgatccgttactattgccttgctgtttactaatattctttattatttataattatttaattgttttttttttaatcgtttaatgctttcacagttttattttaattataatatggaatacacttggcgattcgccaactaattcctgaataatttataattgaagatttgaatgggcgtagatgattgcgggtcattaataccaagttaactcccactacatttttttacatttgaacaatcaatatcaattattttaaattaaactatataagcatacccctccaaataagaacctatttatgatttattgtataaaaacacaacaatatctttaagaaacagtttttttttttgttgttg

SEQ ID NO: 75501 - DNA, 735 bp, Arabidopsis thaliana landsberg
ctttctccatatatattcaaattttcacatatgtttatttttattgttgtaaattattgatctcaattgaaaaaagagaaatgattaatatagtttaaaaaacattaattaatttaaagagaacaaaattaattcaattcgttttttcaataattaatgggcgaaaaaataaaaataaaaatgtaaagaaaaacccaaagatttattggtttgttgaattgtgattgaaggacgaggcaccgagtgacgcagttgaaaaactcaagaatctcctcggacaagaggagagatccagagtgatgtctgagaagattcattcaacacactaaacgaaactccccaaaatagcttttattgatggactcaaatttcaagtggcttttgtttgccatcttgatctctctgacattttcgggttttgttcttcaccatggagttctcgctgaaagtgttaaccctgatgaagctaaacagcttagagacgaggtaacattcctccacagatctggatttcgatttttgtcatcgattggtttaccagttgtccccaaattgagtcttctaggacacttaaagtcttgatctttggatgttgtaatcactcattgatgttaattatgttcgaaaggtaagccctttagcctttagagaagaacagttagtgttttaggtgagatcacttagtttggtggtggtttaactccttgtaattactcaattgatgttaattatttc

SEQ ID NO: 75502 - DNA, 124 bp, Arabidopsis thaliana landsberg
ggggatctccaaggattcgagcatcgaatccggtcggcgcctgcgtcggcatgcgcggcggtgcggcgtgcaggcggtggtgcaggagcttcagggcgagcgcatcgacatcattccgtggtct

SEQ ID NO: 75503 - DNA, 755 bp, Arabidopsis thaliana landsberg
cgcgccggatttcctggagcgggtggaggcgctggtctcgcagttccgcccggatggcttggtgctgacgccgccgatcgccgaccacgcgaagctgctggcgctgctgcaatcgcgcggcatgccgcatgcgcgcatctcgccgaagagccgcagccgcggcgtgggcgccacgctggacgagcgttcggccgcgcgcgagatggtgcggcacctggtgtcgctggggcatcggcgcatcgcgcacatcaccggccaccactcgcacggcgccagcggctggcgcctgctgggctaccgcgacgggctggagcaggcggggttgccgttcgatgcggcgctggtggtcgagggcctgttctcgttcgactccggcgtggtggcggcgcgccggctgttcgcgctccggcgccggcccaccgcgatattcgcgggtaacgacgacaccgcggccggcgtgatgtgggcggcggcggagcatggcctgtcgataccgggcgacgtgtcggtgtgcggcttcgacgacaccccgctgtcgcgccaggtctggccggcgctgaccacggtgtgccagcccagccaggacatggggcgcatcgccacgcaacagctgttgcgcacgatcgagagcggcgtggacggcgacatggtgtcggtgccgttcacgctgcaattgcgccgatcgaccggtgcggcaccggtgcgggcgcgggcgcgcaaggcgtaacggcaggcgcccggtgtccttcgggggc

SEQ ID NO: 75504 - DNA, 526 bp, Arabidopsis thaliana landsberg
taaatttgatgaaacttagcaccaatagcgtcttaactaatagtcaattgaacaaagtttcttcaaaggtttgaacctcatgattaaaatctattatttatctatatttacactagatgctatttgaaaaactgcatttaagaaacctccatcgaaagtggtttaagaaaatagagctccggctttgtatttacagtataccatacctaagccttaggcctctgtaaaacatggtcactgaagctagattgtgcacgataccgagacaacgaacatttacaaattacaatcgaaagaagtaaagaacatttacatttttatatatggaaatgacaaaaccaactaacaataaaagtaaagtcttaaccgtatatcatacatacacacattgaaccggttctaaccaagactaacagattatagcttaacaagacttacggacggttcaagtgataaacaaccctaaaacgggaggtacaccttcaacgtatctggcccagaggccagagcaactaaaccagaaata

SEQ ID NO: 75505 - DNA, 459 bp, Arabidopsis thaliana landsberg
  unsure (1)..(459): unsure at all n locations
gatgagtgggctatatgggggggggtttacttatatcctgaaaggctataccaacgctaattggtgggaaatgggcgatacggggccatgcggtccctgttcagaaattcatatggattgtcgcagcgaataagaaaggaagcaactgtctggcgctaccttagtcaatgcagatcatccccaggttattgagatctggaataatgtgtttatgcagtttaaccggggcaaagacggtagtcttttcccactggctgaaaagcacgtatatacaggtatgggatttgaaaggttaggtagggttttactgaacaaaacctctaattatgatacagatgtctttacaggaacattggaagnnnnnnnnnnnnnnnnnnnnnnnnnnnnnacagcttcggatagtcgtcccgacattgcttttagggtgctggcagaccatataagagccattgcttttac

SEQ ID NO: 75506 - DNA, 508 bp, Arabidopsis thaliana landsberg
agtcgcatgtctatgaccggaatggtccgatatgggattgaatttacctttctggaccattagtgatccttctacgagcccaatattgaacagcacatgccaatggacgcagtcgaccatgaattaagggatgatcgcgaattaaacgagactttctaagagccaagggattattaactcccatatcacatttcactccactattattattaatggttaatgtgaaacatatattcattcaataccccattgcatatcatttgtgatagtggaggcgataatgaatgtactaacacagcagggaaatgagaatttgaccatgggcactcgtgctatgggtcaaggattaacatcctgatgttcactacctacatgggatcaatacagaggatgagggaatgatatgcaaacgaatcgactatgtatcgctaggtaccttgagctctcaatagagccccgagttgctccacagcttcacttgcatcagttaatataaccccgggaggta

SEQ ID NO: 75507 - DNA, 572 bp, Arabidopsis thaliana landsberg
ctatgatttcatttaccgctgcgcccgtttcttcataaatttcttcctccaagccgcaaatgtttcattagtaacggtagtaccttctctgtgtgaaactttcaccttttggatcgttatacgagcgagcgatcgatcaattcacaaattacctcttccaaattaatttgactggcatcaatttcaggttcttcttttatctcttcttttacgttttcatctacccaatctttcgctgcagaaaccaatgtgaacaccatcaccatacctgtgctttcagcggcctttgtaaattacaacaattattcacaactcgcaatgatataaaagattgataccaatgaatccaaagtttccttaatctttgcagcttgttcatctgtgacaacatcaaccgcattaacctcgattattggcacctaaattaaactaatatatcacaattcttcaacgtcaaagtcaccaacctccgaaggatagttctctgtgtaggtaatttcgagcgtaattgtaggcaaaacatcgtcaactggatacgtcgcttgtaattgaattgaaactgaaattgacct

SEQ ID NO: 75508 - DNA, 630 bp, Arabidopsis thaliana landsberg
  unsure (1)..(630): unsure at all n locations
cttgatattgcgaannnnnnnnnnnnnnnnnnnnnnnnnnnnnnnnnnnnnnnnnnnnnnnnnnnnnnnnnnnnnnnnnnnnnnnnnnnnnnnnnnttctcctcagaacaggtatcaaaaactattgaccatctcatagtagtaagtaagtcaggttcagctttatgtcatctgggttgatttataattggatgcagcgaggctgagatatatctcttcggaggctgcattacttcttggaaagttgcgagtggtaaagatcttctttttgtcagaccagatgctgtcttcaataagattaagcccattaggtctgtgtgtgtgaacttcaacaattgttattaaaccagaaattgtgagtaatgtcttttctgttttcgccatactttttgttattggattagcggggggattccacattgttttcctcagtttggacctgggctaattcaacaggtactctcattaactgtttcctcgcttgatcaaatctgtttttagttgtgtatgcttatttggtggtcttgaaccatttttgaatccattagcatggggtttggaaggaacatggactggtctgttgtcgattcccaaaatgcagatgacaatgctgctgttcctttgagcttt

SEQ ID NO: 75509 - DNA, 530 bp, Arabidopsis thaliana landsberg
tactgtcatcaaccggaaactcaaaggagtacatgtattccctcatctccaaatgcattacatctggtatcccatttcaccactgtagaaacttcacagtatgaggactcggaatctcgtctgcatctgacattatcaccgcatctccatccgatacaccagcttctctaagcaaccagttcatcgcaactcgctgttgcccctcaagcaaaaacggatcctcatacggctgccccgtagaccgtttcttcccaggaaacactccatgtacaatcttcccctccgcaaacgcaaatctctccttattggaatcgaagaaaagcggcttcgggatcccggtaaacgtagtgtttgactccaatatcacaaacttcgacacataaggctccaattcccgccatctgacttcaagaagatcaagctcattactgaaaatgatggcatcaaacactcgcctcggttctaaccgcggtgtccagccgtgaagctcacaaagatgtcccatggaaacattctccgcataggaatgc

SEQ ID NO: 75510 - DNA, 341 bp, Arabidopsis thaliana landsberg
aggaagcccaatcacaaacaaaacaagacacactgagcaatgacgcaagtgacaaaagcaccggactaatttctgggctttgggcaacgaaatgatcatagccgaacactgacgtaaacaccgaaaaacactaagaaggatgtagacacacacccacaaaaccaaggaaacattaagcaaaaggagggaaaatgcgaagaaacgagcccgggcctactcactcgcaagaccggtcgatgactgtcgcgaactaaaaaccgccataggataaaccaggaagagccgcacacccccctgatgaacaacacaagatggcgggacaattagccaaataaccacct

SEQ ID NO: 75511 - DNA, 178 bp, Arabidopsis thaliana landsberg
gcctgctctgcttactatttactagcactttcttgtatttagcacgctataggtttacgaagcgagagcggttttggtttaaggcaaaggccaaacacttgggtcgaacgggaatgagcaacgacgaaatgacaagatgaggtgctccgggcacccccatttagatttagaaagaagg

SEQ ID NO: 75512 - DNA, 273 bp, Arabidopsis thaliana landsberg
ttcatacataatggcctcgttggcactattgcatgctttgactatgaccaaaaaacccagacaagcggtgcactgctaatataaaagtatcctctgtgtgtgaaggacgatatatgcatcaccaagagcaaccatgaatagcatccgttctgcgtatgtcaacagcaaagctgaagatgaacttggttacgaagcttttttttatcatcacccgtgttacgaagtagaaccaccgcgcatcaacattgataccacgcataacgcatgatattc

SEQ ID NO: 75513 - DNA, 439 bp, Arabidopsis thaliana landsberg
accaaaaggggaagttaaaaaaacaaggactttgtgttcgttgaactacaaaactgaaaatttcattttaagcttgtaccttttggttcatgaggagtctgcttagtttccgagattctactgttgatagttgaggaagattgaaggtatgatgcaactggattttactatctctgcctgtttgtcaattggctttttctcctagcgttgatctcagcagcccagctttttccaatttctgtttgaaacttgcctgcatttgaaattgatgaaaccaaatgatttcacgtttaaaactgtaaagcacagagagtgtatgagatgggttctctacctgctgttgatatgaaaaactcgtcgagcactttcccgtgttctgcaaggatgttcaaacgtcaagtgagattttttgtgatgggagagaaacaacaagcacatg

SEQ ID NO: 75514 - DNA, 573 bp, Arabidopsis thaliana landsberg
gatttcaagcatttgaccaaatttgaactaatataaacaaagtacttgtgttacaagttacatataccactttataaaattctatgaagaactataaacacataaagtgggagacagttttacattgtttacacattttcagattcttccaaactccgatccgcaagctttcttgagtgactcatttccgctttccggaaccgatagtaagcatatcgaagcttctcaggccgtcatcacgcccaagccttgcagataacttagtttcttgcaccggttgaatcttttgggcactgcttgaaaaaagtttacttgagcggttctcactcagctcacctgatgagccaggttggctgctagacatcactgccatctttgtagcaatctcatttcgggttttttcagacacttgctgtgcattgcaacaaacatcaaaatgattctcatgattgataccaaccggaaaactttaaagtcatctacacaacagaaagatagcaaacaccactaccatttttgaagatcatagaaaaatggcttcgggcgaatgccatgacttggtacatttcgtct

SEQ ID NO: 75515 - DNA, 567 bp, Arabidopsis thaliana landsberg
ctctatcagggcgacgcgatcgcgctaacaccgacttcgcgaacgtcgcggacgtgcaaatcctgaagggttcgcatggcaccctgtacgggcgtaatgctaccggcggcgcgatcctgatcaacaccaaggaaccgtcgaagaccttcaccggttcgttcgaagccggctacgcgcagtacaacgagaagacctttggcggctatatctccggtccgctcaccgaacacctgcgctacagcctcgccggttataaccgcagcagcgacggcttcatcaactacagcgacccggtgaccggcggcccgagcgatcgtccgatggtgccgaaccgtcagcagaacattcaggcgaagttggcggccgacctcggcgacgatttcaccgcgaccctcggctacacgtataacctctacgacgatggccgtggccttgtgttcacgccggtcgcctatatcccgagcacatcgccgccggtgccgctgcgctccggctcaccgtatttctataaatccgcagacaacgatccaaccaccgtcgacttcggtcacgagggcatgctgaaac

SEQ ID NO: 75516 - DNA, 455 bp, Arabidopsis thaliana landsberg
cacagaccaacacactgtcataactgttgcattaaattgttcatgagcatttttaaaatcatgcctaagagtgtgtgtctataaagcgaaaacaactggattaaactccaaaaacgacaagggcatgagaaagagagagaaggagcaaacattatagcattaaagaaggaaggagtacatatcaaaagtgtggtgttagtgtaataaactctgtggagtaaatattgcaagatggtctccatgcattcaagtttcaaaccccaagttctacccaccaatgaaaatatctttaatgactctctctattggtgtctggaattgcattcatgatattaagttggtgtgtcatggctatggaaacacgacatctttggaggttgagaaatatctctatccaagtctatcttcacccaaggctgccattattccctactttatgaccgtaagactgagtc

SEQ ID NO: 75517 - DNA, 580 bp, Arabidopsis thaliana landsberg
  unsure (1)..(580): unsure at all n locations
ggaaaaacccctanaacgattttactcatttcaanggaccgaccctaatgctcattcgtttgttatttaatgaagagggccacgcccccccctnnnnnnnnnnnnnnnnnnnnnnnnnnnnnnnnnnnnnnnnnnnnnnnnnnnnnnnnnnnnnnnnnnnnnnnnnnnnnnnnnnnnnnnnnnnnnnnnnnnnnnnnnnnnnnnnnnnnnnnnnnnnnnnnnnnnnnnnnnnnnnnnnnnnnnnnnnnnnnnnnnnnnnnnnnnnnnnnnnnnnnnnnnnnnnnnnnnnnnnnnnnnnnnnnnnnnnnnnnnnnnnnnnnnnnnnnnnnnnnnnnnnnnnnnnnnnnnnnnnnnnnnnnnnnnnnnnnnnnnnnnnnnnnnnnnnnnnnnnnnnnnnnnnnnnnnnnnnnnnnnnnnnnnnnnnnnnnnnnnnnnnnnnnnnnnnnnnnnnnnnnnnnnnnnnnnnnnnnnnnnnnnnnnnnnnnnnnnnnnnnnnnnnnnnnnnnnnnnnnnnnnnnnnnnnnnnnnnnnnnnnnnnnnnnnnnnnnnnnnnnnnnnnnnnnnnnnnnnnnnnnnnnnn

SEQ ID NO: 75518 - DNA, 200 bp, Arabidopsis thaliana landsberg
accaaccaaaaacacataagtcacactaaatacaacgatcataaataaaaaacatccaaaaaaaacaaacgaacaagaaaactacacatacaagaaatacattactaaaaacaaaacaagaaaaaaagtgaagccagaaaaccaaaaaaaacccaaatgaaaaacaccaaaaaccaacccatactcaaaatacaaataac

SEQ ID NO: 75519 - DNA, 286 bp, Arabidopsis thaliana landsberg
tcccaggagagtgggatccatgttaagtgtgatcacatgaacaacgccattgatgtgacttataaaaaactcccaaacttccttttatccgaacgtctcaaatatgtaaaacttggttaccattacctaatctcgaatgccgtctacattctcatactccccgtcggcctcctcgccgaaacctactgctcctttagtctcaccgatctcacactcttatacaaccaccttctcaaattccacttcctctcttgcactttcttcgccgctcttcttatctttttaa

SEQ ID NO: 75520 - DNA, 701 bp, Arabidopsis thaliana landsberg
ggaaaatgtgattgcagaacaataaattaaattgataatgtttaaaattaatgttgtatgatacttaattttaagtaaaactttggatttaatctttttcgctaacgtagctcccaagttaacgacaatatatggtcaacaaatttaaagttgccaaagcaatctaaggttatatatattattggtagttaattctcatatctagcgaaaaccataaaacaataatcattcttaagaaagcttcaacttcgtcactttcattaactatttatgttttaactgtttcaaatcaaactgataatgataggttggatttttaagtagacaattcggattccaaatgccaaatggtatgtaggtacataaacaatatagagaaagagtaggtcaccgatagaaagcacgaccaaaagcgtcgatgtcaaagcacgactaaagatacaagtagacgagtcaattacaataaaaagaaacccctggacgacggagcggttgaactacttaacaagtcagtcctaattcggatgataagcaaattaagcaaaagactcggttctcttttttctttttagggccacttttatttagggtaataaataactattatccttatgatcacaagatttatttatttttcttactaaaacttttgtttataaattagtttgtaaacaatttttgagacacgaaaataacataac

SEQ ID NO: 75521 - DNA, 246 bp, Arabidopsis thaliana landsberg
aaacaggaaattttacagaatatatgaaaaagaaccaaaatttaaatttgggcaaaagtgtaaattcaagtagggcctgggatggctgcaaaaagcaacgtttgaggcgtctgttacgatgttaatggctaaaaaacgacagaagagacatacactacgcacagcctccgtacgtacactcacgcaacaacattctatgtatgtctctttttctcacacaccatacattgttatatcaccaaacct

SEQ ID NO: 75522 - DNA, 728 bp, Arabidopsis thaliana landsberg
gggcttttacaaagtttatctagaccaatcatatgaataagtttttttttttacttcatcttttttcttttcgctgtaaagacacattcgaaactttatagagtgagtgaaataggattgattctgtagtttcacctttgtgaatcatacgtttccaaagatataaagtaaaaatgcaacaagaagagaattcactcaaattctattaaaagtaattttttgtaagcatcacctaaagcaaagcatctgcttctctcttttttttttttttttcctgcacgcatctggttctcttatcccattccacttgaccttctttattcttctaatcctttccacttacataaattcaggttttttgaaacaatacataagtaaatatttaaggaaatgaagcaagaaacaaccaaaaataaaataatttaataggtatatttacgaaaaagctgacaaataagactttattgagtatatacatcgatcttgaattacgttttaactagtttttctgggattttgagcataatatacatcaaaactcggtttgctaagtttatgaatatttgttctccgcacatatacatgatacacaaagtaagaatctgctcttgttttcttctagctataaaattaattccgaagtcaactatcaacctcaaacttgtgtaattaacctatacaaccaattcatcacttgagattaaaaaagttcgtagcaaaaccaaaca

SEQ ID NO: 75523 - DNA, 592 bp, Arabidopsis thaliana landsberg
  unsure (1)..(592): unsure at all n locations
aagcgcatccgtcctcttctacgattgccgccagccgcatgtatggctgcataaccgaccgcccctatccgctcgcggccgcggtcgaattcatnnnnnnnnnnnnnnnnnnnnnnnnnnnnnnnnnnnnnnnnnnnnnnnngcgccgcggccgcgaaagcgcgcataaggnnnnnnnnnnnnnnnnnnnnnnnnnnnnnnnnnnnnnnnttttctcccgcgccttccagctgatggtggaagacggctcgctcgacgcgctgcgcattctctcggatgcctccgccgtgatcgcgcagggcgaagtgatgcagctcggcaccgcgcgcaatcttgaaaccaatatgagccagtatctcgatgtgatcagcgcgaagaccgccgcgctctttgccgccgcctgcgaaatcggcccggtgatggcgaacgcgaaggcggaagatgctgccgcgatgtgcgaatacggcatgaatctcggtatcgccttccagatcatcgacgaccttctcgattacggcaccggcggccacgccgagcttggcaagaacacgggcgacgatttccgtgaaggcaagatgaccgcgccggtcgt

SEQ ID NO: 75524 - DNA, 373 bp, Arabidopsis thaliana landsberg
aaataaaccataaagctaaaacagtacaaatactcatcttacgtaatatactaaaatttgatattttgaaatagccaaataaactataacagacaactgagatggcatattgccgtgcaacagacaagtatttacctaaggtacatgttattacatgacaacaagacgaaactatttccgaattctaataaattaaaagacctaatagtcggagcgggatctaaactacttttaattttataataggtgagaggtataacctacaaatgtgcttccttacaataaacaagagaattaactgggctattgtggaggttctacaaagaggggctaaatagcattgtcaggtaatatctatgttgaaggacataaa

SEQ ID NO: 75525 - DNA, 332 bp, Arabidopsis thaliana landsberg
ccctcgctcccctaaacctttttcacatttttcctaaccaatgaccaaaagagcctgtgcaagcctttaaacgactcccctgaaacaaagataatctctaactaacctaaatgatggacattgctcagtccttcataaaaatgatatctcgtacatagaccacactacatactcagccgctatcctaaagtttccacgcttgggatccatccctgtgaaataactaaaatttattccttgccaacaactggacgctctatattccttaaaccctttgagccaaatgctttaaagaaaatgaaaattcatggacagacaccattatcttcttc

SEQ ID NO: 75526 - DNA, 546 bp, Arabidopsis thaliana landsberg
  unsure (1)..(546): unsure at all n locations
aaacagcttgtacactccgcgaaccttcgattacgatatcggatgtgatcagtttgatctcgaattctcatacatagacgaaacacggccacttgttcagactaatgggtcgtgcgctactctttttatttcatcaggtgggaatcctctgccactctaccaattattgaatagaacaacattgagcaaagggcgatacagtatcaatcttcctgccatctcggattattccagtggttctttcgttgagtttacaattgaggtgtggtacgactacattcaaacgaggtgccgcgacattggccgtaccatcagcacaatcacctacccacgtgatggattgacatctataccatcgacatcagttacaaagtgtgtattcccagacggtgtgggttctgnnnnnnnnnnnnnnnnnnnnngattcatgtccacgagcttccagcagtttcgaagcgtcttcgctgcaatattggacgagcatgatgaactgacccaagctatggaagtagccatggatcgtggtgcagaggacttaacctcatc

SEQ ID NO: 75527 - DNA, 552 bp, Arabidopsis thaliana landsberg
gttaaaatgtaggggtttaatgtgtaatcgttcagtatccggtgtgccattggcgtcagttaggatcatcggattaaaaggaccgtgcctttatacatcttgggatggttatccagatcaataagctttatcatatagatataagtccctaggtccgaatcccgattattatacctcccattccagccgcggctgatgtcggtggtatggaatacgcggtttccccaccggttatagatgtcgaacgagaccagcttctgtccgtgaacattgagaatgcgaaaaacatcattcatgccatcgccatttggcgtaaaagcgttgggtataaatatcaccggcaggcagttattggagatgatgatggaagctgaagaagtaccacattcattagaggctttcacccattatagcccgggaaaagataccttgaggctgtccgcgtacgatccggaagaccattggtattgcggatagccctttcgaggagccagggttaagatttgtcccataatgaggcaggtatcctcgggtagatggacatttggcggc

SEQ ID NO: 75528 - DNA, 428 bp, Arabidopsis thaliana landsberg
  unsure (1)..(428): unsure at all n locations
tgaaagaacgaacccgggaanaaaaanaaagccangaanngacaaaagaaacncacccaaattacgtttgaccccagaaaacgggacaaancgccaaggcgaagccggnagaccaaccaaaacaaagggaaaacgnagaaacanagggagaaacaagaccacccaaaccgcaagganncgaaccgaagccacgcgcacagcaaccaaaccacagggccccgaccaaacagcanaggagcccagaagaaggggggcggacccaaccaacacgaacgagaaaacacacacaggcccccgcgaagncaaggagggccganccaaacaaagagaccgcagaaagcaaaaacacggcggggggaaagaaacccagaacaaaggcgcgaacanaaacggggacgccaaaacanccacncaagaccccaaagagg

SEQ ID NO: 75529 - DNA, 412 bp, Arabidopsis thaliana landsberg
  unsure (1)..(412): unsure at all n locations
atctataattaagtacctggttcgccttaccaatgggtaagctgaaatatatgaaataaagcatctgagcaaacagcgtgtgcgaacggttgacgaacaactgtttatacagtatggagtaggttgtgctcttatggcccgatctatttgggagcgtatgagtgttaatgataatgaggtgttgaccccaatagaacttattaacgcacgtacactggtatcagatattaactcannnnnnnnnnnnnnnnnnnnnnnnnnnnnnnnnnnnnnnnnnnnnnnnnnnnnnnnnnnnnnnnnnnnnnnnnnnnnnnnnnnnnnnnnnnnnnnnnnnnnnnnnnnnnnnnnnnnnnnnnnnnnnnnnnnnnnnnnnnnnnnnnnnnnnnnnnnnnnnnnnnnnnnnnnnnnnnnt

SEQ ID NO: 75530 - DNA, 741 bp, Arabidopsis thaliana landsberg
  unsure (1)..(741): unsure at all n locations
cttgcccggcttgcctgtggtggtagccgccttgaccgacgcggagcagcctttgcggttgcagccttcgccttggacaccgccggtggcaccgaggccacatcctggccggcagccgcagccttggccttgccggcagcatcctgcttcggccggttcagcgcgacggtcaggccgaagctgtacggcatgcgcgaggaattgtgcgtgttctcggtcttgctcaggtcggcctggcccatccagggcgatgcctcgatattgcgtatgtaatcggccacgctggcgttggactgggccacgccgctcagcgtcatcgactggccgctctgcttgagtgcagtgaggcgggcactggttgggatggtcttcaccagttcgtcgaacaggtggaccatctgcgaacggttggcctgcaactgctcgatgatctgcttgcgcgccagcaggcgcgagcgcactttctcgaggtcgtcgatcttggcgatcttcacgtcgacctgcttgatctcgccctgcaggtaggcattgcgctcgttctggttgtcgatgcgcatgcccatccagaacgaccacaccagcacgcacaggatgccggccacgaaagccgcccncaactgcatgaagaactcgcgttcgcgctgcttgcggcgctcggcgcgccacgggagtanggtgatatgtgccatcaatcgtaactcctcaacgcgagtccgaccgcgatcaataacgccggcgcat

SEQ ID NO: 75531 - DNA, 645 bp, Arabidopsis thaliana landsberg
gactcacttaaaccacgttctatatacatttacgtggtatattcttatttttagctattctttgtctgtgtaccatatacggtaaacttttggcttgcagtttgtaacaaatgttacacattataacatgtgaaattataataatttttatggatcaaattattcgagtgttgaccttttttttctttcttaaatctagcatggagaggatactttaacgctatgatcgctatttatattcagacaaacaacttgttggccgagacgtttcacaaagtgtaagtcttaaatatgtctcttttagctagttaatgttgtatttttgttgtagtcactaatgtttatcatacaccaatgttgtaggaaaattgggttctaaaacattctaaaatcaaggcaggagttgaggtacttgagaataacaaaaagtatatatatgttataatttcaaatgtacaaatgatcgcacattttatttttcaaatttatatatgtgcccaatgttcaattaagatcgtgctaaataaatatcccaagtaaaacatatttttaccaaaagaatgttgtcccaaatttaactaaaaattttttggggttcgcacgataacaaaactttttaaaagttatttcaaacttttttttacc

SEQ ID NO: 75532 - DNA, 440 bp, Arabidopsis thaliana landsberg
atggcatttaacgaaaccatcatggcgaagatgggggactggataacgggcaagccgttctgaagtatgtcgaaatcagcggggaattgcgcgctgggtgagaagcgctgcgtaataagtatcaacaagccccggatggcgtcttctatcctgtttcggggtctgcgacacaggaacaggcacagaaatgggccaaggccttggggttgcccgattcatgtgtgcaggctgatggccagggtggttatcgagtgatgatggaccagacaccgctggatgcaatgatcgcagcagcccccaacggtaccgtgatgagctataccgcgaaattccagacttggcaaaccggatttaatagccaggaaggcgatgggtagaaccagctacagttattcactaccaaagtatggagcgccaactcgtgccacgagaatttcaac

SEQ ID NO: 75533 - DNA, 289 bp, Arabidopsis thaliana landsberg
ggcgaaaccttttgaagacaagctttgctcacagtccctcaaactgcttggtacctccctccctctctctctgtctctgtctctctctctctctctctctctctctccctctcactctctctctccctttaactaccaactagagtaacttttgctcaacaagcaataacgagagcttatcaatatactgccttgtttccacagaaatctcaaaaaacatgaccctatgcatattcccacacaaatattgatactgataagacaccatgctgagaaacaatctcaacaa

SEQ ID NO: 75534 - DNA, 472 bp, Arabidopsis thaliana landsberg
attccctgtctcctatgtgggtttccagaaattactattacaattcttcttcagatgaaatctcagtaagaaatattacattttaggatgcagtgtaaagtaaagaaaccaatagtgatagttgacttgtcgtcttctcgagtcattttaccaactttttaacgcagataacaaaatatcaataaaagtaaatagaaagagttcatatactttgttgacccaaaaacgaattttccctaaaactaaatatcaactcactaataattccatatgtaagcagtaagctcctataatggaggtggaattctcttggcagcgaaaatgaatttcgtcgattgatcgcggaaacttcttccttgcgaatatcataattgtagttttgtgttgttgggatggtctatgactgactgattatctctacaaaataaagacttttgtatgggtgtagactccggtaacgctttgtggatag

SEQ ID NO: 75535 - DNA, 583 bp, Arabidopsis thaliana landsberg
  unsure (1)..(583): unsure at all n locations
catgttggaactctccatcacgtccgcgacagcaggtgcaggtggcttaactagcaattgcactaaataagnnnnnnnnnnnnnnnnnnnnnnnnnnnnnnnnnnnnnnnnnnnnnaactggcatttcgcgttccgtgcaccatttgaccatcagatgtaaagctgactacatcgttggaactaccaggtacatccaggtcggcgtccgggctccagccctctggatagtacgcctgcgctatgataacttcagggagttgggatcgatcagcgctgagcacgccgagcggctgggacgacgaaagctgaaaccgaacaaaagcgcctggaacgggaactctgccagtagcgtcaggggcgctcgcaaaagcctgcccacgaagctttgtgaccacactgtccgagtcagtgtcacggcatgacctataannnnnnnnnnnnnnnnnnnnnnnnnnnnnnntgggccccgatattgtcagccattgcccacctgtgtcaggagtaactggtggagtgatttccttcacttgagaatctgcagaacggatagnttggttgtaactcaacaagagcgcgcgaatg

SEQ ID NO: 75536 - DNA, 524 bp, Arabidopsis thaliana landsberg
  unsure (1)..(524): unsure at all n locations
ttttggggggtttcagtttagaaaccatatatgaagttattctttctggaattcaatctagacgtatagtcaagaaggaaattataaaacgacattaacgtagggattttggtcggataggttcggattatatatagaacactccaatggcacaataatatcattgaaacctttttttaaagtaaaagcgattctataagtaatgcatgtacacacaaaaagactttaaattacaaaatgattttattatgaacacttttgagtaaaaaaaaaaaaaaccagtcactaagaaccaaagcgccggccactggactggcatatatatattcttcaatcttcatcacccttattcggagtcaaaccaccgtttttatacttggaagaaacctagggattgcggttttcgatcacaggttatggacgaacaagagtcgcggcacgttcttgtagatgtcgtaagctcttttccatgctaacttggaccatttcagctagcatctactttgccttaccggatngatcat

SEQ ID NO: 75537 - DNA, 121 bp, Arabidopsis thaliana landsberg
  unsure (1)..(121): unsure at all n locations
tagcttgtctagatacattacaaagcatattcatactgtactacttctaacctacttagcatttttgttttggcanaacaccacacaaaacagtccacttaacatagaacacatggcccat

SEQ ID NO: 75538 - DNA, 296 bp, Arabidopsis thaliana landsberg
ccgatccattctgatatatggccagtattcatccggactatcaattcactctacatagatatacctgaggaagtcagcagaagatgtattttgtagttgaaatccatgcaacttcattattcaatagtgtctgcatcaaatattccggctattgcacatcttggatcttaaaaaaaaagttgatttggattgaattccacaggcggttttggtttgagtcggttcagagtggatattctgcctctaaccggtgggcttaattgtcttttccgtttattgaatcccttggacgttag

SEQ ID NO: 75539 - DNA, 387 bp, Arabidopsis thaliana landsberg
  unsure (1)..(387): unsure at all n locations
nnnnnnnnnnnnnnnnnnnnnnnnnnnnnnnnnnnnnnnnnnnnnnnnnnnnnnnnnnnnnnnnnnnnnnnnnnnnnnnnnnnnnnnnnnnnnnnnnnnnnnnnnnnnnnnnnnnnnnnnnnnnnnnnnnnnnnnnnnnnnnnnnnnnnnnnnnnnnnnnnnnnnnnnnnnnnnnnnnnnnnnnnnnnnnnnnnnnnnnnnnnnnnnnnnnnnnnnnnnnnnnnnnggagagtgattaagagcgggagtttaaccacaaaacgatatacataccaaagagaaagactaggagaacatccaattatgaaccatgaaatataccatctcaggatcgcgggatctcaccttgaagacaatgaacacaggatccgtagagcctgaattcat

SEQ ID NO: 75540 - DNA, 404 bp, Arabidopsis thaliana landsberg
gccgatgtcataccttttcttctctcatcttaaaaatatagactattgttatgaaacttatttagtcaagtaaactttcgttatgctaagtctaaagtgacaaaaaatttaaacaggattcaaataatttggcaaaaaaattgcatagtaagtaaccaattaaattattctaaaaataacgctttattttaaacttggaaacaaattatctagtattcgaaatgctcaaacaaagaagtaaaccactgaagtttaaactcttaaataaaaactgaaacatctttcttagtaatgcaaactcttctttgaaacgaagtagattatttttgtggaaaatcatcttccacgctattcccagtctctttgacaatatgatcttcaatgctctgaatgcatactctttt

SEQ ID NO: 75541 - DNA, 248 bp, Arabidopsis thaliana landsberg
catctttcttttgtttgttcttgacgcattcgtgatgctatttttttatcttgttgcttaaaaataaccagggaagggaaattttgtaagtatttaacgcctctccccacacatacttaaacttgtgccttctcaaaaacatataacacgtcttaagacttttaacctattaaagttccactgcaattcttcctattggcaacccctatataataccttattcctatattcttatcttcccctcatcc

SEQ ID NO: 75542 - DNA, 230 bp, Arabidopsis thaliana landsberg
tgtatcttggcctcgtcggccttgtcgccgatgaacagtaccaccacacccttgaacgaacccggggaggcattctttgacgcggtcaccagcagttgcgcggtggtcgcggagttcggctccggtcactgtaaccatgttgcccggcagcacggtggcggtgacggtgtcgttgaggctgttctggacgcgaccgatcgcaccctggttcttgggatacttgcccgacg

SEQ ID NO: 75543 - DNA, 549 bp, Arabidopsis thaliana landsberg
  unsure (1)..(549): unsure at all n locations
atataaattcaaactggacaaaccattaaataaaattcgaagaaaataaattttgttaaaacaataataataaaaaaagctggttggcgccttattttaaatgactgaaaatgacaagatactatatgttttcacaacttcgaaatgcgattgtaacacaaaattatatgcatttgagtgttggtctcgttgtcgcgacaaatgaatcttttgcccatgagcttacaccaattcgagtgttagcgatcgagtaacgccacaagaaagggtgaaaacccctattttctcatttctcttcagtagcaagaaatgttaaaatagaaagcatgttgagagaatgaagtagcaaacaaaaaagtgagtttttgccgacgacaaatataaaatggtggaagagtaaatattcaattttgagagggtaataatgtaatcaataacatgctagtttagaatttagacaaatactccaaaaagaatgtctccaactcaagagttggttagaattaaagtgtncaaacacacaaatacncccaattttatactatttat

SEQ ID NO: 75544 - DNA, 445 bp, Arabidopsis thaliana landsberg
tgttgcggggcccacccttctctctcttctctctctaaaatctctcactttcctaaacagagagacttcttatgagttgtctcctcctcctcctgctcttccttcctcatcccagaaatttccgatttcactttcacatctccctctctcttacaactctctatccgtagtttcagcttcgacctagaatttcttttcttgtctgttccaggtttgaactaattacttctctcttatgtctgctgttgagtatttctagatcgaattcgtgtttttgttttttcttaccttttttttttttgtgaattttcgcgggaatagattttgatctatcctaagattgtgggtaaacgacaactctgattgcaccaattagctcagctcaaaagtgccatgtgaatattttgagagtgcaaagatctatctctaatgataatgcgcttta

SEQ ID NO: 75545 - DNA, 144 bp, Arabidopsis thaliana landsberg
  unsure (1)..(144): unsure at all n locations
gacagcaaaagcgcgagcgcagagccaagaacggccacaaggggaaaaaaaaaaggagcacccaacaacggancagcacagaccaagaacaacaagagcagcccgaacaggggggggggacagaagaaaaaaaccgaacgagcc

SEQ ID NO: 75546 - DNA, 565 bp, Arabidopsis thaliana landsberg
  unsure (1)..(565): unsure at all n locations
tgttctttctttttggtgttttatcttcactttctcatatcttgttgtttagtttcaacgggtatcaatgaagcgttaggcatttctattgttgaatgatcgatcatgtgatcaggagaagcccgtttgtgtagattaattaaattgtatgtgaggaaaatgaagatcattaattacttatttcgtttcttatgaattgtgtaattttcattattcatttaccatttgacatagtatatgatcattaatcaagtattttctagtgaactatgtatttttgttttcaataataactttacaaaattatttgactttccttttgtcgaaacaatttggcttttgccatggttcagtgaactagccgtggtgtttcttgctctaaattagcggcgataacgttggtccgagttggataaagtcgtatgcttgtacgtagtatttctacattctcaagtaatgaattattttaaagtatatagaaatagtaacggaatagaacacctgatgcaattttccaaaaagaacattatcatagccatctcanatcaattccttggcactatgt

SEQ ID NO: 75547 - DNA, 512 bp, Arabidopsis thaliana landsberg
aaaatttacgccaaaagaacacgaaatttacatgcgctgtaacaaaaaagttacccaatcattaaagcaagaatcgaagagaaaaattatttaaaaagcaaaaagaaaacagtaagaaaaaggaaagggaataatggaacaaaaatgaaaaaaaattggaaggatgaaattaatcgaaagcagctcatccgattcccctgaggcgattatggtgtctcctccttctcactctcgctcttagtagaagtctttcttctccgatcgccgactaacctacggagctttcttcggcggtctctcctctctgttttctacttgaggtttctctcttctcttactttttttattctttgagcatatctctcttctcttactttactcaccaaatttctaggaatactttttctcctgagatttgggcttttaatttagcttaattcttctgttaagtagaaatatatcatggcgaatctatgaaaatatttcttctgttaaggagacattgaaaattt

SEQ ID NO: 75548 - DNA, 534 bp, Arabidopsis thaliana landsberg
  unsure (1)..(534): unsure at all n locations
gatctggagccctggccaccgcaatcccgaaggcctgaccttcgatccgcgcactggcctgttgtgggaaagcgaacatggccccaccggcggcgacgaagtgaatgtgatcgagaaaggccataattacggctggggcgaaatctcgatgggcctgcagccgggcatcaccaaacagcatcaggaagggatggaagaccccatcacctattactcgccgtccatcggccccagcggcatgagcttctatcatgtcggcaatcgctatccggggtggaagaacagcctgttcctgtcggcgctggccggacaaaggctgatccgctacgaggtgaaagatcgcaagatcacacacgaggaagcggtgttccgcggcttcgggcgggtgcgcgacgtcatcacgggaccggannnnnnnnnnnnnnnnnnnnnnnnnnactcccagagcctggccaattcgcccggcatgggtggtccgcctgctgccgcagaaataaccggcggcatgaaaaagcgccgcgcgggacatttctc

SEQ ID NO: 75549 - DNA, 155 bp, Arabidopsis thaliana landsberg
ttgattggcttgaagctatctactggattacagcaaagtacggtagaactgtatacttatgagcatagaatttttgtttttttatgcacatggtttcatgatgaaatccaagttttctaatgacatttaaacacaaataaaacctgattgctaat

SEQ ID NO: 75550 - DNA, 381 bp, Arabidopsis thaliana landsberg
  unsure (1)..(381): unsure at all n locations
caaaccctcagaccatcgggccaaacatccaaaactttaaaaaaaaanacaacaccncaggcgcaagacaaaagcaaaacggccgggggagggacggcccgagaggccaccagcgccggaaacacngaagccaagagcacagccgcaganggcaggagcagcacagaggccgccccacgggggcccaggagaggcgaagacancggacagccaggaaacaaaggcaagaacagaaacgggncaggcaatgaaacaagcaaaccagaaaacacgaaaacaagcgaacccacccccgacgacaaccaaacaaagggggagcgacgacaatgaagccgccncaagagaaaagcgncccaacggacacgaaaaaaaccccggaag

SEQ ID NO: 75551 - DNA, 359 bp, Arabidopsis thaliana landsberg
aaactattttataaaaaaaaaaacagagagaaaaactatacataaatgtaaaccaaatatatatggttgtgaaatataaaggcggagctggtatatggtgggtaaacgactaaacgtcgatgaactggtttatatggcgaatgttattattgatttgtcggcgacacgtcactggcgtaattgccgtgttaaaccatgaaattatcttcttgctgagcttgttattaatatatgtccacacaagtcccaattgtcgaccttggcaatacatatacaactctgagtctatctgacttggtcaagtatgttgttttcattcttaagcgcacaactaggcctttagcctggagcattggtca

SEQ ID NO: 75552 - DNA, 536 bp, Arabidopsis thaliana landsberg
tctccctgcacgtggatgccgccgacgcccatggccatgtgcgcccgtagttcgtgtacaacgccggcggctgtcacggacaggacgtgtcgccggccatttcgtggacatcgccgcccaagggtacggctggctacgccctgacggtttatgaccccgatgcccaaggcggctggtggcattgggtggtagtggacattccgccggtcacccacgccattgcgcaacacgggctcttgccgccgggagcttacgcgctgaccaacagcttcggtcatgcgcgctgggacgggccctgcccacccaagagtgatccgccacatcattacgtgttcacgctgtacgcgctggatacgccggcattgggtttggacgcccatgccacgcgcggcgcacaagcccaggccgccatcgagaagcatgccatcggcaagggacgcgttaccttcacctatggacgtccgtagccgccactggcattgatcgtaggagcgcgcctgcgcgcgatggcctgatgcgggcgcacggtcagatct

SEQ ID NO: 75553 - DNA, 532 bp, Arabidopsis thaliana landsberg
acgtagcagttgatcgtgacctgcttgccaagctcgaccttgggctggatgtaataggtggagatgtagggtacgtggttgatatcggtgtcaggcttggcgatcgcggctgaggcggccgtcgcacttccgggagttcccggggcggcggttccgggggcgggggcggcttggacgctcgccaaggtgacaacacaaaacagcaggctgacgatggcgaggagggggcggaactggcgcatgtcatggttcctgtttttcgggatcgtcggagggggttgggcgatacctgatccggacaactcaatagcttaatcgattatttaggtcgtggtcaagagggctacgcatgaacgttgcatcgagtcccgcagccattgagctttggcaaaaagaaaaaccgccaggggggcttgacaaagccccaagttgctgtattcttgttgaaagtacgtattttcatggcggggcgtcgcattgtcaccagcgagagccaagatgaaaatcattactcagcggcagatcgccgact

SEQ ID NO: 75554 - DNA, 595 bp, Arabidopsis thaliana landsberg
  unsure (1)..(595): unsure at all n locations
gatgactgaatattaattatcatagggtaaaggagctacgaatatatttcctagtatttattgcattctctagttcaattttgaaatgtctctttaaatttggggagatgaatatctctctctctttttaagtataatcttcaaattttcgttacttgtgtagctggaaatcgctttctaattcatttctgttttggtaaaaactgttgtaagtcgtaactgcctgaagttgaaacatgacgaaaacgttaataaaaaggaaaataaataaaacgcaaaagaaaaatctgaccgataatacaacgtttttttatctagtttcacatcaataaattaaaacagcgttttaaaacaacttttcttttgtttttaataaaatcaatgtttcgttttaaaaaaaacattttaagtttatagtgtaagaagaattggagaataaatgctctcaagcatttaaatagaaatcaagattaacaaggaataattccaaatgaaacagtggtcaaacttattntagccacattccccactctaggacgaccttaatatatgcattaattactaaaaaagttacttctttgaatgcgtgatttaa

SEQ ID NO: 75555 - DNA, 565 bp, Arabidopsis thaliana landsberg
  unsure (1)..(565): unsure at all n locations
cgttttctctctttttttttctctcttccttttcggtttcgaggcacgaagtataacgggttatnnnnnnnnnnnnnnnnnnnnnnnnnnctctataccccagatacaaagacctgacatgctttcttccttctataaaagttgtccaaacgccctatccatgcatgcccgccgatgttatgaaacaaggcccctctctctactaggtacctgctgcctgctctttagttctcttctgcaacgtcatctggcgttgtcgcgctcccgctcgtcttccaccttggcgggcccgcgtgcggcctcgccagcggccccgacgttcgcaggcctgccggccgtcccccgctccttgtgctccttctccgagggctgccgcgcctcgcgctcgcggacctcagtgcgccactggatgcccttggccatcaccagaaagaagatgggcaggccggcgaagtacagggtggcgatgacggtgtatgcccaccccgtgccgaggcggtcgatcatgggctcgatgatggcgctgaagacggcgccgagcacacagcgggttaagctgttggcg

SEQ ID NO: 75556 - DNA, 509 bp, Arabidopsis thaliana landsberg
  unsure (1)..(509): unsure at all n locations
cccgagcccatccagcgatgagcacaggctccttttcctacagacctccgctaattgatttttcttcttttccctttctcctctttttctagcaacctctctccaggtattcctacctaaccataacttttcctcaggtacaagacccgtggaaaggcctgtacgcttattatgtgtaccatatttcctctttgctcctactctctctccccgctttacttctgatagcttgtcctgaatatcatccagaaaccgccctgccttaaccacttgataaccatgcgaaaaggaacacaagggcttttaacattagaaaaaattcaagggcaaacacattccactttacttctgatagactggcttgaatttccctagaaagttcaagatcagacttacctcggaaagctgtactcactggaactcttgtcccccnnnnnnnnnnnnnnnnnnnnnnnnnnnnnnnnnnnnnnnnnnnnnnnnnnnnnnnnnnnnncctttattaccgcgac

SEQ ID NO: 75557 - DNA, 152 bp, Arabidopsis thaliana landsberg
tcgttgtttcattcatccagaccaacgattgagaaaatcattagagaagatgaatcatccaattctcctcttgtcctcgttccaaaaactacatcggtacgttaaatttttctcaagaacagagtcaacaagagttgtttttctcttcttct

SEQ ID NO: 75558 - DNA, 533 bp, Arabidopsis thaliana landsberg
  unsure (1)..(533): unsure at all n locations
cacactcagcaacaggatcctgcctgcgccgtcccatgtgctgcgtaatgctgatgcggtggagcaggcgatgctgctcaatacggcacgcaagctgttcgatctgcctgacgacgaaccttagcggcgctgccgcggttcggcgccttcgcagcccgcttacgtcttggctgcgtactcctaattcttgaatacatgaaagcctctctccttcagaagcnnnnnnnnnnnnnnnnnnnnnnngaagaactcgcgcacgaactgggtgacgccagcgtcatttccgacaacgaaaaattccgtcgcctgtcgcaggaatacgcacagctcggtcacgtggccgagaactacaccgtgcatcgagacgcgacgcatgcactcgccgatctcgaggcactgcagcgcgacagcgaccctgaaatgcgggcgatggccgatgccgagtggccggacgtgcgcgctcgcatcgatgcgctggaagccgaactgcagggttttctcgtgcccaaggatccgctcgacaacaccatgtg

SEQ ID NO: 75559 - DNA, 602 bp, Arabidopsis thaliana landsberg
tccgtgtccatgaccaggcgagaacgcaacaggttggtacctagatgtcactgtatgaattagggatgctcgctgcacctcgtactttagcctgacgattgcatccatgttgaggctgtttgtctcgtccaagatgtgcgaagagttcaaacaaaaaaccacaactcacgagcacgcaagcgcaataaacaattgggcaacgcgcgtctcagtgcacgaggaagcgctttatttatttttggtttcaattacagcagctggtgaaagtagactgattgagtgggcgcattttcgctgttttaccgccgacaaagaaatgaaagagactgatgtacagtgtacatatttattacaatccctcatcttgtgttttggggtggggatgcattgcttgtagtcgccagcatagcgtgcggttcgtcgaatttattggatattgtatgccctgctgtttgtcttgctgtcgtttgagaagtgcttgcatgcggcagatactgaataacatctccagtccatcggggcgtgagatgataatggatcgactagttgaaggctttatgaaagccatggaagtttttaccaggtgtgtctctcatagtctc

SEQ ID NO: 75560 - DNA, 521 bp, Arabidopsis thaliana landsberg
acacacaccctggtgcgtgagtgacttaaatatatttgtcatttgaaggttttttttctttggcaagttggctaataggctattcctaagtcacatcctaacttattccatagactagataatatacaaacatgataggaagcaaaactttaagcttaataagaagtgctcgatgtcatagctagccaatattgtcttcttgctgactgaacttgatcatctttgcttctctctcgtttactttgtattggagtcattacaaggagagttatatgtatcaaatcgcaaagagacatatgcgacaacgatcagaaaacaataattttacattatgcaaaacgcagatgcatcacatttttattaattcttcattaaaggttcaataccgatatgataaaaaaaagaagcacatggacaagaactcttgccgtggccgtcaagtcaaaccaaaaagctggaaaacgacacgagtttctgtttctcctcctctctatttgttggctcagcttttctaaattcct

SEQ ID NO: 75561 - DNA, 596 bp, Arabidopsis thaliana landsberg
  unsure (1)..(596): unsure at all n locations
gtgggcgcataaaatgcatcataagcatcttgacaaggaagtcttcgagagcttcggaatgctgatcgtagccaaaaaatactggaacaagatccgcgaagatgaaaagcagcaacaacagcaatgaaccctcaaaaacccattatgattatatcatagcgggagnnnnnnnnnnnnnnnnnnnnnnnnnnnnnnnnnnnntgtcggatgttttttttcatgacaggagtatactggtgatagaccattccgcaaaaaaccaggacgaccgtacctggtgcttctgggaaaaagagaatgggatctttgaagatattgttgcgcatcaatggtcatatgcgcaattcctttccgatacgttttcatcgaagctgctgctttctccctacaaatataaaatgatcaggagcgccgatttgtaccggtctgtgcgggaaagaagccgttccttcccgaatattgaatggctgcaggaggcggttgtttctgtcggtaaccatgaagacaaagccagtgtgcagctgccatcaacaaagattacttctgattatgtgtttaacagtattctttttgatacccggtcagcaaaacagatc

SEQ ID NO: 75562 - DNA, 308 bp, Arabidopsis thaliana landsberg
ggcgcataaaaaggatgataagcatcacgacaaggaaatggttagagctagagaatgctgatcgtggggggggattattgtgacaagcccacataaccccaaaaggagaaacagcagtagagaaccctcgaaaaccgattacaaaagaatcataccgggagcagggtgcgcaggctatagacaaagaaagcgcatgaggtccagagttgtccttaatgacaggagtctacaggggatagaccattgcagatagaaccaggacgaccgggcgtggcgctgaaggtgaagagagaatgggaaatatgaag

SEQ ID NO: 75563 - DNA, 466 bp, Arabidopsis thaliana landsberg
  unsure (1)..(466): unsure at all n locations
cgcnnnnnnnnnnnnnnnnnnnnnnnnnnnnnnnnnnnnnnnnnnnnnnnnnnnnnnnnnnnnnnnnnnnnnnnnnnnnnnnnnnnnnnnnnnnnnnnnnnnnnnnnnnnnnnnnnnnnnnnnnnnnnnnnnnnnnnnnnnnnnnnnntatgccgcattctgcttataatttttctttatttgcatgctggacctcaataagagaaacggggagtgcaacatttaccactgttaagaccccagatttggctgcatttattaaggattctatttgctgctgcgcaagtattatgaaaacttgttcattcactttagtctttctttgggattttgaaccctattttcttgagcattagtgactacacaggggatgatccattacccattttatgtgtcaaaattgcttagcttctgctgacatttcaatggcgtgatgtctgtttactgttattattcacaaggattt

SEQ ID NO: 75564 - DNA, 162 bp, Arabidopsis thaliana landsberg
tcaaacaatttcttttttttgagtgcccaaaattcaacgattgagctactccattcggatagcatcctttttctgaatctaatatattcgagatagtgatcaaattcggctgttaagatgcaatatgattttactaatcatatatataaacagattttaagt

SEQ ID NO: 75565 - DNA, 155 bp, Arabidopsis thaliana landsberg
ggggaatcgaggcttttacctctcaaatatcccccgctccatcttctgcctttcccggaccttttctcgttcaatatagtctctatccctgtcctttacacgaaccaattttaccctttccctctctcgaaccttctgcttctcgagcctatcca

SEQ ID NO: 75566 - DNA, 345 bp, Arabidopsis thaliana landsberg
cagctgatacactgaacgtgtgtggtgagttgtggttcccggactgacaggaccatcccatttgccgaatgttgcaatgctcttgaggcagtgccaaacgaatgcctttgcaacacgtttcgcattgcctctaggcttccctctcgctgcaacattcctacactttcatgcagttgatatggatcctcatattaattctagacgctatatctttgtaagaacatacaatataacgtttcaaatacatccatatatagtttcatatgtttaataaatgtatctaaaagcttttttttttggtatttaacacgaaaagcatgtatgggaagtaaaggagatggatat

SEQ ID NO: 75567 - DNA, 159 bp, Arabidopsis thaliana landsberg
tttttgtaatgaattacgttagcacagtggacatgtatgaactatttttcaaatttttaattgatgagtaatattcttgatataataatattgactgctaacaaatcggtaagctcaattttgctttgcggatatcctataacacaccggtaagctcaa

SEQ ID NO: 75568 - DNA, 356 bp, Arabidopsis thaliana landsberg
cgaaacactccatgaaatgaatcatgttcatacccaaactcgcaaaaagatcaatattatatttgataaaacttttggatcgcagcaatatgatgaaagaacgatacatgacacttgtggttaaagtgaaacagagagaagcgagatcgaaccatatgtattcggcgatgattttcccggtggcatcggtgaggttgaggttaacgagatctgagagcagagacatggcggcgtcggagagaaaataatcagtgtgtttagggaaagagaagacgatcaatacaacttctctcctgagagtgtgtgattatagagaaagagctttgattttttttttcctctccttaaataattta

SEQ ID NO: 75569 - DNA, 505 bp, Arabidopsis thaliana landsberg
caatctagttggttattagtgcatcgacgaatacgaaaatatcattgttttatctgacgactcttaagtcctctttatggtttgaaaataacaacatggctacatgaggacgaaagttaaatactaaaatcattcgttcatattgttttatcattgttcagcaaatttaatatgctgaaaaaattagtttcaataattatgaaagaaaaagaaaatgagtgagttttgaaagaaaggtagttaaattaagaaacactcttactttaaattggcatcatagatgggtggatttacataaaagctagtttgtgaagtccttgttagaaaaagatatagtggttgttactctatctctcatctccatttaattttacattattgcttgtatcataaaacactgatttaaactcgccactaactctaacttaaccataaaaactttcataaactaaaaacctttttaatctattttagacttgaaattagccagtaatatttacctatg

SEQ ID NO: 75570 - DNA, 472 bp, Arabidopsis thaliana landsberg
atccattatttcttctttggtctgttgctttcttgttatttgtttgtttagcatgcgcacactacatagcacattctcttgtttggcatgaagtagcatgaaacaaagaaagagaatataaacctttttggtcactaataactatgtccaacaaatttcttttgaggagacttttaatctcttcaacgtggattccattatatagtttacaatagtcaaattcgcaattaaggcctagcattgaaaaaaaaacattgatatggtgggatcgacgtggcttttatgtgaatcctatgtgaatttatttgttcacaagattgtccaagaacagtcccatcaactcttttgtttggcccttttttcgtatggttgggtatatacaccattctgataagggaatttattggaccgatttaatgtggaacacatatttatcccattccaatagcacctttaaaaacctaaggttttt

SEQ ID NO: 75571 - DNA, 730 bp, Arabidopsis thaliana landsberg
gataccttgtttttgtgaagaaagtcttaacgcacagcctcattggagtttctaatgttgttttgttatttattcctccatttttttgcatgagttccatctagatcatttctctttcttattttgtccacatacattgtcaaattgcagaaagtatgtctcagctacagatgcgctgacatggatagggagataccagctttgatgggtgtgtcaaaagctattttagaaaacgtcatatttgtgcatcaggatgagtctaactggccactgcaagatccttctactttgaaaaagaagtttgatgatattttctcagccaccaggtagtttctggctcaccaccaacatttctcttaaatcatcagttccttgctgtattttgttgtagaagaaaccgaatcccagaaaatgtaacatgtgtgtttaacatgaaacagatatacaaaggctctggaagttattaagaaacttcacaaggatcaagctcaggagataaaaactttcaagttaaaattggaaaatctgcagaccttgaaagacgcagcttataaggtatgttagactttaacttgtttgacattgatttttcttttcttttcagtatccgaccctggtctctcacgcataatttttttttttgttaagttaaaggaacaaaattaacactaacggcgattgttttaaattcttaaaggaattattgagttttgtattcataaggaatgca

SEQ ID NO: 75572 - DNA, 396 bp, Arabidopsis thaliana landsberg
taaggtcgatatcaacgaggcaaagatttcttgctgagctgaagtagaggccactaaatctgagaaagtcgtcgccgtggggcctggatcagtgaaggaccagccgtcaatcgtaagccaaacctccagtcctggctgctttgctttgagcccagtgacatctttatataaggatcctacagtcgagtccatttccgcaatccggtatgtagttggatctatgtatgcaaaagcataatttaaatgggtgtaatagcctaagggaatctcggtgggcgacattgctattccgatcaacacgtgttgcttatcaatttagagaaagactcacattgacaaggtcttttttagactccattctttgtagtacccaaatgggtgcgtgaatactagctg

SEQ ID NO: 75573 - DNA, 442 bp, Arabidopsis thaliana landsberg
cgactgcgacgatggccgcaagcagaagcatcagggcgccgccgtccacgcgcagcgaccagcgcgatctctgtaatgcgcccgccatgccggcggcggcgaacacggcccccgtgcgccattgcacgaggcccgcccgggcgtatgagacgaggttgacgagcgccgttgcggaaatcgcagccgctgtggttccgatcgcgacatgcgcatcgccgaccttgacgaaataaagcaacaagggcacggacaacgtgccggccccgccgccgacaagacccagcgcgaagccgatcgacaagccggacaggcaggcaagcgcgacttgcgtctgtaatgtcatcgcgatcgacatgatggtgttctctcagggtgcacggtctccaccgtccggcgtgcgcgtccattgtgcgctgcgtccggtgcggttggaggtaatgtg

SEQ ID NO: 75574 - DNA, 511 bp, Arabidopsis thaliana landsberg
ataagaattttcgtgagcgtgcatgttatgacgcaatctccgacaggcagatcggcaatgctgacaccattattgaagatcacgtcctgtcgactatgccgatgactggagtggctagcaaatcgatagctgttacacatcgatcggagtatcgcgagcggccatcaaccagaattcgagatcctattgctgcgactgggcctctcactgcgttattgcgtttgcaacggtggtgagctgacctggtggcagacaaagaaaggtgcccgccagatcggtgatctggcgagtcattcctggtcggtgtaacccaatgatgcagcagagggctgactggagtgttggacagaatcagctctttgaaaggaattcttctcagtgactcgcaccagcccaaacaaagtagttcgataacagagtaacttgtactagttagcccgcggtatactcctaagaaaccaagagactttccgactgccgattcgttttactgtatgaggacacttccatg

SEQ ID NO: 75575 - DNA, 732 bp, Arabidopsis thaliana landsberg
ggccgcgcgctcgacggtgtcaacggtccgctgatgcactcgttgtactccaactggaagggcaccggtccgtacgccggtggcggcaacaacggcaacccgctgtacaagcagctcgcctacctggccagtaccgccggatcggtgtggggctatcacgaccagcgcggcgcctacagccgggtttccgcgggtggtggctccgagacgctcggtgcgctgttccggccgttcccgcagcagatgcacaagctgggcatcccggctccgctgggccagaacggtccgccggcctaccagggcaagccgggtgtcctgggggacaagcagtcgcccaacgactacgacaagccgctggcgcagctgccggtgccggacgctcccaagacaccgaagaacccgctgctctcgccgttcgactccaagggaggagaccgatgagtcaacccaaggaatcgcggctggctcacacgtggaactcgatcaaggccgaacccggattcatccgcaacctcgtggtgatcttcctagcgttgatcgtcgcggtgctgtccggggcctggatggtgggtaacgccagcttcatcccgccgttcggtcgtaagaccatctacgtggagttcgccgaggcgccggccacccagccggcgaccacccacaaggttcagatcgccggggtaccgatcggccagatcgtcggcagccgggtgacgccggacgggcacgcgaagc

SEQ ID NO: 75576 - DNA, 641 bp, Arabidopsis thaliana landsberg
taactgccttgtccctctggaaagatgtgctggccaactcggtcaagctgaaggcttgatctgtcggcccgacaggccgccattctgatgcggatttatcttgaacccggtccgcacaccgtgcggggcctcgccggcgccctcaatctcggcaagccggcggtcagccgcgcgcttgacgccctgacggcgctggattttgtccgtcgccgcaaggacgagcaggacctgcgcaacgtgctggtccagcgcacatcgcagggcgccgattacctctcggagttcggcgaccgcatctgccagtgcgagcagcagatcggcgggcatccgtcgcatctgcaggccgatgtggcccacagcgccgcggcctagatggcgtcagacccccgactgacgccagctcggggcgatatcgcggcatcccacctgaagggtcaggtcgaggcgaaaaccttcgtcgatggcgtgcgccttcaggtggcccaaagtcatgccgccctgcgcgccgccccggaggactgagccgaacaggtcaatcaagcgctcttcggcgaaaccttcatggcctacgaccaagccaatggctgggcgtggggccagctcgaagccgacggttatgtcggctggatggcgcttgcggc

SEQ ID NO: 75577 - DNA, 251 bp, Arabidopsis thaliana landsberg
atatattgcgccaaatgcccaaatataatatatcaattaaaacttatttcctttacatcaccaacaaacctaaataaaatgagataaaaattggctgactaaaaaaaatccaaaacaaagatctataaaggtatatatagtcgtaaacacatttcaataacaaaggcctcattacaatatttataagtgacgttttgcatttacaaagaaattctggattaataattaattaaagcaattatcccattgat

SEQ ID NO: 75578 - DNA, 371 bp, Arabidopsis thaliana landsberg
aacacagttcgatcatagaagattatataatgaagcataaatatgaatataaaagattcataagaaccgaagaaaactgtttctctagcggttaccatagtatggaggacgagacatgttgttctgaggttgatatgactgtgattgctctctcggtcttgcatactctgcgaatatgacccaaccgtcaagaaactgcagagaagcacagagaggagattagccgtttggtaattgtcagtgtaaatctctcttaatagattatgatatggtaatcgagaaatggatattagaatgaatagtcccttcccgaccattccagctatgccgttagcagaatcttctaaagggcatatctaacaaatccaaac

SEQ ID NO: 75579 - DNA, 437 bp, Arabidopsis thaliana landsberg
aagcacaagacgatgcgcttcctgccgctaacgcggaagcggcggttgacgatggtgatgtcttcccagatttcggcggagcggaagccggcattccagaccgtcgaatcgatccaggaatcgatcttcagcagaagatgtttgctcttcttcggctgcttttccggagtttcaggatcctgcacgttgctcttcccgcccgatcgcgcttgacggctggccccccaggcgtgagagcaacagcctaacttggcattgcgctcttcgataaacgaagcatgctgaatgtatgattgatttgcccgacgataacaagagacgcagtcggtctcacgcgaatttgcggaacggctgctgcagacacgaaatgatggaagatacgcccttctggaagcgcaagacgctgaccgagatgaccaaagaggaatggcagagca

SEQ ID NO: 75580 - DNA, 611 bp, Arabidopsis thaliana landsberg
tctcttacgagaaccaggttgaaacccgatttcatcagctttaccagtttattatcagcatgtggtcaagtttgtttaacagatgaagggtggaaatatttcaaaatgatgtcagaggaatatgggataaaaccaaggttggaacattattcttgcatggtaaaccttcttggacgcgcaggcaagttgcaagaagcatatgatctgataaaagagatgccttttgagccagactcctgcgtctggggagctttgttaaattcttgcaggcttcaaaacaatgtagatttagctgaaatcgcagcagaaaagcttttccatttagaacccgaaaacccagggaattacgttctcttgtccaatatatatgccgctaaaggcatgtggacagaagtagacagtattagaaacaagatggagagtctgggactgaagaagaacccgggatgcagctggattcaagtgaagaacagagtgtacacgcttctggctggtgacaagtcgcatccgcagatagatcaaattacagagaagatggatgagattagcaaagagatgaggaaatcaggtcaccgcccaatttagattttgctctgcatgatgtggaggag

SEQ ID NO: 75581 - DNA, 641 bp, Arabidopsis thaliana landsberg
acaaccttcaaacgccctgagtttctggcgggtaaataaagttcaagccatgttgcgcgccctgttacccgctgttttttacgtgttaagcctggccacgccagccttggcccacaccgtggccacaggccccttgccgttgggggatggtaaaataagcacccacccgcagcgcggctatacctacagctgccagacacattttcacggcggcggtgcattccataacggcccgtggattgtgggcgatgtgtggtaccccaaccggaaaatagccgttgaaggccaggtcagctggccagacagccgcatcagcatcaccgccacaaggcaaagcctcgtcatcaacgcgaatggcctgccccagaacaaaaccggcattttccccattgcctacactgacccggcctatgcctatgaccataaccccaacaccatcagcacccaaaacatacagctggccctgccctctgacccgcagattgcccctgccccggcttgcgtaaacatggggcttatcggcatcaccaccaccggcgttgccctattcaacgcactggatgcccaaggccgcgacgcttccgcccacgaggtgcaggacagctgcaacggccacccccagcagcaaggcgaataccact

SEQ ID NO: 75582 - DNA, 409 bp, Arabidopsis thaliana landsberg
  unsure (1)..(409): unsure at all n locations
aaaccgcgcagcttcgtcccggtggtgacggcggtgctcgtctcgctcgcctggcgccccctgctgctcggcgtgggcccgctctttcctttcgccgcggcgggcttgcccggcctcggcacggtgctcggtctgggcgccgttatcggccttctcgtcgctctcgaagccgccctgctctcggttctgctctaccggatnnnnnnnnnnnnnnnnnnnctgcccgtccactggatgtggtggccgacgatcggcggagcggtcgacggcctggggggtcttgtcgacgcgcatgtgctaggggcgggctattcgaacattcagcacctcctggacggcggcttcacggtccggatcgttctggcgctgctgctggtgaaaggggcggtgtggctgtacgcgcttggat

SEQ ID NO: 75583 - DNA, 383 bp, Arabidopsis thaliana landsberg
atagcgctagaaaggtaatcgaaaactactctgtaactaaacctaataatagcggttggtcatagatactaataaatgtaatatacacaattaatactaagtctttttaaatatatatatttgcttcagcttggatatgctttaaatatttcttaaagaatatataaacgcgacaattgtggacactacaacgaaaggtgatgtgatatagagaaacgaacaaatatgtgctttctacaaaacggaaccgagtagacattgcgtagagaaataaaacaacatgactgccttatggggcagaaacaaaaaatgatacggtacacgataagaaaacaacagaggttatgctaaatacttaactcgttccatatatcattattatt

SEQ ID NO: 75584 - DNA, 370 bp, Arabidopsis thaliana landsberg
tgttatcatttgtccttccaccatgcccactttctagtcttatggtggatagacgtttataccctgatcggtcttctggaattaccagagaggatgaaatatgcctttcaacgactctagaatggcttatgacaccatacagcggacaacaacatgttactgtctctcacatttacgctttcttggatgtatctactgacttttctgttggtatagcttaagaaagtagtgacatgacttatatcaactgagatatcaaaaaggggtgacgcatatcgctgggatatgggccaaccatgttatttatgtgtgtctcccagctcaaaaagtgccataaaatagtgcataccattatcatatatatatctag

SEQ ID NO: 75585 - DNA, 438 bp, Arabidopsis thaliana landsberg
  unsure (1)..(438): unsure at all n locations
ttaagacagccacacagtcacccaacagcagcggtagcagcagcttttgcccgatttcatagacagcgaaacaaaggttttggcggttcacagatcagagtgaaagccaaagtgtctgcacagagagctgccactgctcaataaccagaatattatcccaaagactgaggaagcgatctcacaatcgacaaatgcttgcttgcaaccagcagcagcaatcgattgagcccgagaacacaaagaaaagttctaaacaaaaagctgcctattnnnnnnnnnnnnnnnnnnnnnnnnnnnnnnnnnggagaaaagaaaactgcgaattcaaacacgaagaaaattagcggacagagggtccaacctattggacaaatggagaagccccagcaagaaaagatcaaaataatttaaaacaggactttaaaactacccactttt

SEQ ID NO: 75586 - DNA, 114 bp, Arabidopsis thaliana landsberg
atgatcataatactcctcaaaaatcgaagctgttgatcattggctgaacaatatcaccatttttgttcaataaaataccaaagtggatgattgactcattccatactagaaaga

SEQ ID NO: 75587 - DNA, 614 bp, Arabidopsis thaliana landsberg
ttgcttctctaaacatggtacatgctgaagattttcgctcttgctaagtatatttggctttaggcgtgctcaggacaaagaagcacactttttatttttataacaagtacagcatgatctatgttatgagttagctgtagagtagtgacgaagcaaacggctaaaagcacacacaagtaattaggagtggtacacaccgctagtactctatcacgccgcttcagagctcatgttttttgtattttaaaaccatttattttactctattgctattgataactacaaagatcgagaactacaaagccgtactagccagtctataacaaaaaattgaattgaaaatatgtgtacgattcaatggatgatcttttgcaattgcacgactcttttagttgccgcttcataagtaaaattagtttcaggttaataattccacgactttctagttaatacttcaaaatttttaccaagccctgatttttttttttttttttaatattattgaagagtgttaatctgttcaagaaatgccgacattttttagaatgtgtgtttaggacttgtcaaaaccagctgggagataaaataaaataaaattgagagattatagaaaa

SEQ ID NO: 75588 - DNA, 362 bp, Arabidopsis thaliana landsberg
ccgatgaataaattaaataatcctgtctaataagttcttcttttttcttggataaatacttgtttgaagtatatacagagacactgtctttcgacttggtctttgctatggccgttacttcgcttctcgataccgttttccgacgtacaaagaagaagtctactgagcttataagctgtaagaattcatgtctcttcttcatcaaaccttttcctcacatctgtcacaaaacacacagaactatgtttaattctacttgtctctactagatactgccgctctcgaattcgactcggacaccattaaagctgcaacacatgagtcctcacaactggttggccgcggcggacttggttctgtta

SEQ ID NO: 75589 - DNA, 409 bp, Arabidopsis thaliana landsberg
aacttaatggtctggaaggcaaagaaaaaagaagtatttgtcctggaagccagtcccaaaccgtttttggaagatccggcagcgacaagtggaggaaagcctgaaagaacaccctggaattactttaatcagcaaaacctgaaactgattcaaatggatggggtttcagtaaagaaatcaaatgcggccttaaaaatggatatgtccacgaattcattcaccggaagcaatgggtgcaaccgcatttcgggaagtatgaaaacgaccaggaatacggtgtctttttcagatattatttctacgaaaatgatgtgtacggatgaactggttgcccataccgagcgtcgtttcatggagattctgtgaagcgagggattacctgttgattatacacaacaggaatttaaca

SEQ ID NO: 75590 - DNA, 155 bp, Arabidopsis thaliana landsberg
cggtcactctctctacgatcatcttttacttttttcgaagcgtcttttttttttgagattcttttttcttatcttgttgcgccgcatcgtgaattaatctgaagattaagttcttaagatccattttttctgcttcattgtctcttaaactcttt

SEQ ID NO: 75591 - DNA, 589 bp, Arabidopsis thaliana landsberg
gatgctccttggggcctccacaaagctcctcaggaaggcatggagagccatgggccaggagacagcacacagcgggcctctgctggctgtgcctcagatgggccccaagtggatagggctgttttctaaaatatgggtgatccaaaagaaaaatgggtggtttgattttagaagcgccaaagaacattgaactaggttagagaaagcaaatatagaagaaaggcattagaagaatcagtcaataaatataatggactacctactgtgtgatagattgtttcaggcacttaaatacaatatagcaggagcttaccttctcttagtacaagagataacaactagtaaaaaacatagttaaaggaggattaggaagatggcttagtcaatatagtacttgatgtgagaatataaggacttgagttcagcagaggacccaagttcagttttcagttcctatataattacccataactccagcttccagaaatctgttacattctgccaggctccatgagcacacacccttatatacatacacacatgcacacatatacaatttttaaaaaaaaataagtcttaaaaaataatg

SEQ ID NO: 75592 - DNA, 502 bp, Arabidopsis thaliana landsberg
gacaatactcacctactgaaaaaacctttaaaatcttcaagaatgttgagaattcaagtattaattaattccaatattgttaaaaatattttgagtgaattctcttcgtaagaaatatatatagaacttaattataatttaatattgtttggtttaaaggaaaaaatatatgtaaagaggcttattaatataatcttatcaatgtaattaaaaatattattttttttctatcttctcacaaagatgctgttgcatccaaaaaattgtattcatttaaaataaacgaaagtcgatttttccaaccatttccctatttctttaggaataattggcccgacaatcgttttcacaatgagacttcaaaatatctttgcaatgtaaccttttaaaacctattaagactaggttgtttttgttttaataaaagagaagaatattgtcaaattttgaagtcaataaattttattgtttgagatccttttatgatacttcttgggggttg

SEQ ID NO: 75593 - DNA, 565 bp, Arabidopsis thaliana landsberg
  unsure (1)..(565): unsure at all n locations
tttaccttctggccggctactccaatacattgcagtttaatcgattcatcattcagtttccttggaatgccgaatatcgaacgtggaacgccgatttttgaagtattcacacagtatgtcattcgtcattccttgcctgccttgtccggtaagcaaattcagcattccttattcagctctcttggaattccgaatatcgaacaccaattccagaagtatccacacttcgtcattcaatgtcgtttagttaggcactatcattgcgcatttttaaaatgtcaccccttcgggtagggtgtccaatccaatgttcccaaaatcatactgctctcctcaagcatttagtccgtagttgcacgaggttttgtgttagattgtcctctacccaagcatttatttgactcatacgcttatcttccagtgctgccttaaagttgaattttctatttttagcactattgcaaagcgtcgtataaatcggcataaaaaggataaatgatgtgacaccatttaatttatcgggtgatttacgagctntatatttgccaaagagagattcataatg

SEQ ID NO: 75594 - DNA, 602 bp, Arabidopsis thaliana landsberg
aaataccctccaccttctagtgattaactttttttttttttttggggcaaaacctgttatgcaaaattttggttttcgatcgtctatacatgttcctgtgcaaaattttggagcacagttaaaaaaaaatatactagaatttgatttgcaattttcatctttctaagaataatataattctctatttaagactcgtctttactaatcattcactacactttattctgctgttatgttttctttttttgaccatgcagtgcaataaacctgacagttacttctggtaactaaaacatcatcatcgtcctcacatgtgaaccttacacattcccatgatgttctgaataatgtaattgactaattgtaatgcaaggcaagacatctctcctttgtctctctcaccataaaaattaaagaaaacaaataaaaacacttaaaaaacctttcactacctaacacttgataactctatctcttcttcttctcttattaccttccaccagatctcactccccacatttcaaagttttctccctttttgtcgaattccttctcttactcatataaaacccaaaacttaataaaatctcttaaattatcta

SEQ ID NO: 75595 - DNA, 381 bp, Arabidopsis thaliana landsberg
ctaactgtctgcgataggtcctgaatttttgtgaatggccttttttttgcgggcggaacctctatattttgggatcagaactgatgtagctccgttagcacatcaagtacttggagcttggctaatgcaagaaagtttacaagccagcgatctgcatgcaatcgcatggtatagaatacgagatcaccgtgtgctgcacagtgtacaattgcaactataaccttaaggtgaataacttacattaatggtcttaccatcgagagaattggcttccctctcatatgaataaaactctcaaatgccaggtgggagtgggtatgatagcagctacgtgcacatagcctgatgaaagagggacctgagctagatgtgcatacatct

SEQ ID NO: 75596 - DNA, 588 bp, Arabidopsis thaliana landsberg
  unsure (1)..(588): unsure at all n locations
aaacttttaatccgaaactctatataattattaaaaataatgtggtgaaatgtcgacatttatatatggctaagatcacttataatttacaataattgcaatcattctagctagagtcatatactgatttatctttgttcgttggatctcacataagtgatatttactaacacccattgataaggtaggtagctagattgaacccaatctttatagatgtcaaacaacttaaaaatgagtgctagctacatatagaactattagtgactttgtggccaaccactgggttgattttttctttttgtaaatgttatatatcaatatcggtgagtaatctttaatcccgtacgtaaacagaaaatgcagctgaatgacgaattgcttttagtaaaatgatagtgaattccctaattattcaacactataagtaaatatcgttggtacacatgcaatgatgcagatttaccaagaaagtaatacatattaatatagatgctgcaaatccaggaaatgcataacgcgaaaaaatgtcgtaaatacaccgaanacaaaaggaaaacaaattcgtaaaatagcaaacatgatatg

SEQ ID NO: 75597 - DNA, 423 bp, Arabidopsis thaliana landsberg
atatatatgatgagtttaaatgctaccggcttaaatcggattcaaaccaaaccggtcctattaacttatgggtcgaactatcgtcatgtgaagcgattgaaatggattcaaatccaagagacatgcagtacgtgctttactttctaatattcaataattcagaatgaggattatatttacattataaaaattgcttatgctgtactaataaatgacattctaatcgtttacttacttacattactgttagagagttgtcttgagaacaataatcaacatttgtttataatagtgcaaacacatttattgatgaacagacaattatagcatctgcgaatatatgttcaaaagaccacacgctttttgaaacgacctgaaaaattcgcttgcaccagacagagcaagcgcaccgaatccatcttg

SEQ ID NO: 75598 - DNA, 495 bp, Arabidopsis thaliana landsberg
  unsure (1)..(495): unsure at all n locations
gtgatcatgtgtagcctcaactcccactcagcttgaattgctaccacactagacattacatttcaactgctgtgagtgcttgaaatttttgttagaccttaccatgatcacgctgaggactctccaagattcaagtaaaaaccggattttctacggtgaaagcggagagcatcctcgtttgcttatagcttcatcaaaccggatccaccttcttcagaatcttctagtggaaatgtgaagagagtatttttagtaattgtcatatatagctatcaaaacgaaaattatagtactcttacgtacaagacctagctcaacaatcggattagatgttgttgggtagattttacgtaattagtagttaggactagagcgtagggttttgcataatttaggttgcattaatttgaagaaatggactgccttgatccagagaacgttctaagattagaagaggcanagtcctaattaatttcttatttgaaaacatgtagt

SEQ ID NO: 75599 - DNA, 137 bp, Arabidopsis thaliana landsberg
  unsure (1)..(137): unsure at all n locations
gacaccgacaccaaggggaacccgcggaacaaggaaaagcaagaccgaagggaacaagggggaaaccagaaacaagcggangggaaacacaaccaggaccaggacagaagcagccgcaccaggacagaagcagaaga

SEQ ID NO: 75600 - DNA, 479 bp, Arabidopsis thaliana landsberg
  unsure (1)..(479): unsure at all n locations
gactttttgttgnnnnnnnnnnnnnnnnnnnnnnnnnnnnnngcccattggtgactcctttaacctacggttatgcggatggtttgatgttggctggctctactacgtacatcaaggagctccagaatcgtctatacttgctgtaccatatcttcatccaaggacaaggacgtttcacacgtgaaaacgcattgcgtttgtgggattgcttgtacgagcacgctctcaactttggtgaggccgaagaggccgctgaatggttcaaggcagctgctgcacctggatctgcggcaattcccccgtctctcgccgatcagctcttccaggcacgattcactcaattagactgggtcaatgtcactcctggcctctatacctgcttcgagcgctactttatccattcaaacgtagtcatgcagaacatgaacctcattcaaccgaaagctgggcagaatgccaaccctgcggacctcgatttc

SEQ ID NO: 75601 - DNA, 200 bp, Arabidopsis thaliana landsberg
tttgtatagtttgtcaattcttctctttattgtagagattagcatttgtatgagattgttttacttggctgctatctctgtgacaaaagttctggtgatttagcgatgaggttagactatgtccttgcctgctggcccagagggactctcactcccctgaacatcttcatcagctaatagagatacatacaaacaccctt

SEQ ID NO: 75602 - DNA, 1989 bp, Arabidopsis thaliana landsberg
atatcctaaagagaatccagtacttcttggtcctgaatacattaacagatttttttcaaaactatgaagatttagcataacaacgacacacatttgatatgaatgagactcaatccagtgacctatataatatatgattgaaaaaataaacatgcaagtagattagcttgccctattttccgagtaatttattgaattccttgctccaacgggaagtgaattattcttttgcatctattgcgactaagcatttatgatcattccaatctaaaaatcgttaatgctacatgaatccattaccaaaaaaagaaaactcgaatccaatctcaatgggttcatctttcggatcgtcgtaacttgaaaccgaaatctaccaagaaacccctaagccaaatctagcagagagatctcaattcaatgaaaccagttaattccgtagtcggatacaaccaaaacccacgtgaaatacaagaattgctaaattaacacgaacaagataatctctagaattcaaattatgcgaacatctgacgatgcacagagaaagagagagagagagaggttttttatttgccttggctccgtagacgcgaggaccatggtaagcgagaacacgctcgccctccgagaagagtctgccgtcgttggacggtgaggcgccaccgctcgccgtatctccgtcactcgccgtctcttccttcgacgagcttcccattgtcaccgaaagcgagagcgagaggcaaagatcttcacatcacaaggcacccctttaaccgtctagataaatgaatctacgacaactgctgaatgactgaatcgttgcgaatagtttttcaattgagtcccttaactttcacaatagttcgattaaatctcttaaaccttttaaatatactcgtcgcccatttataaagcattgtctttttaaaaaaatttatgcctttattggtcgttgagcagttggactcatgtttcactttggacactgatgtttattaactattattacattcaaataaatataaaaaaattgattaatacattttatttgtatacttttcaagtaactttatttcactaacaaaacaataatcctaaatatagaaaaatgagacaacaattattgtttttgccattcttcttcctatgtatcgatcagaaacatgagacatgtataatattttccactaatgaaactgaaacaaaaaaatgaaataattttctcgacctagatgggtatgggcactttaaccggcccggtttgaactaaagattgaaacattagtggcccggtccgcttgggcttggacctgagtgcttaacaaatcgaaacgtatccttcctgtccacgaccttatgaccctcgcctggacttggacctgagtctttgatcgaaccaagtgataagccatcgaataaactagccacgaacttctcctcggtctttgttagaccaagcggacgactctcgacaagaaccgaaccaatcaacatgaagaacagaatcgaactcagaacgtttttgttcatcatcatgtttaagaacaatttaactctgtttataaaaaatatggttttctttctctttggcagataatgaattttgttgtgagtgttttgtgagttgagtatgtgactatatagtagtgttcgtggagatgcaaagtttgaatttttattcttgactaagtttgaattgaaaagaatgtgatcattgaaattagttagtatgctgcttcctgggaaaataccaacttgtttcttgagcattcaattttgtgtgtatttattgaacacaaaatagtgaaagccatcaatgaagaaaaggataaggaattgaatattagaaataaagaatttaatatcgtagaccaaacatgaagtttcattgtttggagcagacggcagctaaatatagaggtagatttgtagttgtgtagaccaaaaataatgcttgaatttcaaactcgcaacgtatataaagtcacg

SEQ ID NO: 75603 - DNA, 556 bp, Arabidopsis thaliana landsberg
cgggtactaactcattccatgccgtccgggatcgattctgcctttctcctattcgggcggacagaggtggggccgggtggactggtcccaatactgcgaccgcgcgccgacggaatacgagcttcgtagttggacgcgctggccggacgctggcctgtgtgtggcgctcgggatcaacaacgtcatcgcgatcgacgtggacactgatgacgacgcgatgatttcggcgctcgctgccgtcatcccgcacagtacggtccataagcgcggcgaaaagggcttcacggtgttttaccgcggcagtcgtgccatcatcccgcgccacttcgacatcaacgagtctcagcgtcgttgacctgcttggctacggcacgcatacagttattacgtcgaccgtgcatacggacacccagcgcccctatgcctggctgacggacgacacgctggagaacacgcacccacatgatttaccacttctgcctgacgacatcgcggaccagattgcggacgcgcttgcgccgttcggctattttgagcccacccgtgttacccgcgt

SEQ ID NO: 75604 - DNA, 433 bp, Arabidopsis thaliana landsberg
  unsure (1)..(433): unsure at all n locations
acgctaacgaacacaaagcacagtcataccggcctcaaacctttaaccaagccacnncnngangcgcaaagccggagagggagaagccaaagaccccacgaagcccccggnnccgaaaaggagaacaagaaagcacggacggacggnncgggaccccggggagggncnagngagacanagncaaacagacacangacagcnagacanagngcacaccgaacgccaaccaagangcgacncgcgncccgaagaaccaaaccacagcggagcccaaacacgaaaccncaacccgacacccgaaaacccaaaaccgaaaagccaaccccgaaaaccgaaccnccaacccgaaagccnaaacccgaaaccgaaaacccgaaaccangaacacagaaaccgaaaaccnaaaccagagagccaaaacnnnaaaacccaa

SEQ ID NO: 75605 - DNA, 467 bp, Arabidopsis thaliana landsberg
tcattaaaactttgtttggtaaggccgattagattttttgaaataaatgcagtgctgtatggattgaaatagatttttttgaaagaaatgaggtgatgaatttatggttgtaattgtaaataaataaatatattggcttttatttatataccgttgaatttattctaacttggatgaaccatgagtggtgaagcacgcacagaggcacatgccattgagacccacgagacagaggcgttggattaaaaatatatgattttcaactctatcttagacttactaaacattaatacgttacttgatttaaactaaatttaatactgcctcgaaaaaattgtctcgaacatgtcactttttttccagacataaaaatacaaaaaacatcaaaatccacattttcaattttgacaataaaaggaaacaagaacggtagagcaagcaataaggtcagcgtaaacgggtgacat

SEQ ID NO: 75606 - DNA, 548 bp, Arabidopsis thaliana landsberg
caaatgcgggcatcgccacgcggaacggcacatcggcacgactggcatagggcttgccaccggccaaccgggtgaacaattgcaggtcggcatcgcgcgtctgatcaagcatgaaacgcttgaaaggcgccgccgccgccggcacggcctgctcggcagtcaactggccgctcatgtacggcttcacaccgtcctggtaagcccgattgaacaccggcgacatcacgaacagggtaaggaacagcgccaggccaagcagtacctggttgggcggggtgctctgggtgcccagcgcctgacgcagaaagccgagcacgatgatgattcgggtgaacgacgtcatcagcagcaatagcgcaggcaacagggtgagcgctgtcatcagcgccaacacctgcaatgacaacgtccagttctgaacccctgcagcaccgttgtgcacgctcagcacgggaatgcccggcatactcggcgttacggggttgccccaggccagcaacggcacgcacagcagtaacagcagacatgaccaccgcacggtcttcatc

SEQ ID NO: 75607 - DNA, 329 bp, Arabidopsis thaliana landsberg
acgtgacttcgctcagcctacgaatggagaaagtgaattaattgagggcgctccggcagtatatagaggacctcgcgcgggagaagtagccatagagacgaaaggacacactgtagaacgtaatatatttactaccttgggtccagattgtattatgaaacccatggggccttacaaggaaaggtaatggcctaccctatctatgtggacgcgagacgttagataagacaaagccattgccaatcctactatccatacgaaactaacgagtgtgaattaagagaactgatagaggggaaaacgaggaactatcatatgagtcacttata

SEQ ID NO: 75608 - DNA, 482 bp, Arabidopsis thaliana landsberg
aacgacagagtgcatttagtttaaacaaacagcaatgtaataatgggataatattagatcatttctgggccattatatagtcccacggcctgaaaaaacatatacatgttgggaaggtccaattcctgactttattcatatccacagcgtattatttaattccaaacaaacaacaacaacaaatcgtttttatgcctcgtacagatccaagtatcccctcattttttatggtaaaaatttatctccacaggcaaataaataaatttaattgacccttatacggagagaaggggaaaaaatatattggattttaatagaaagaaatcaaacatgttttttgtaccttatatatgcaaaatgcagaggatgagaggaatgaatcacatcactcgtcttcgtttgccgtgaaaatgaaagtgaaaggagcgaacttgaaaccatctccttcgtagaatttgttctgaaactcaacccagtgaaga

SEQ ID NO: 75609 - DNA, 560 bp, Arabidopsis thaliana landsberg
ctcaccaactacttaaaacattttcgagatgtgacaagaagaagaactcatcttgggcattgggcaagtatgattagtatctaccttaaaatttaactttacaacgtggaatgtgatcggatgttgactaatttgtcataattaactgattaattattttgtttattaagtacttgcaattgtgaacttattgaaaagactataggataagacttaattaaaaattcagtctagtggtagtccagttaacaccttacacacaaagagattaaattatttcattatattacatactgatgaggaactgtttagtcttaagaacctatcaaccaagctctaactttgagtgacaattttctggttcaaccttgttcatccagttcatccaatctttaatgggttattggttggatggcttttgaccgtaaactcgaattttattctaaaattttccaaatgctatgttgaatatggaacccacatcacatattggtttaagcgtacaaatcttttcttttattccaagaaatttcgccgattttctttaatattattaccca

SEQ ID NO: 75610 - DNA, 486 bp, Arabidopsis thaliana landsberg
  unsure (1)..(486): unsure at all n locations
cgaaaacaaactggatttgatgttcagttcgttttttgaggacatcggctctgaaagctctttgcatttcgattttttgcttaactgggatgcccaaaaaagtaagttggaatgggcgtcagcacaattcagaacgtacgttcaaattttacccggggccgatgccgcgcaggtagcaaccaggattaatcgcgtcgtnnnnnnnnnnnnnnnnnnnnnnnnnnnnnncaaaacgcaggttgggttacaacccgataaagaccaatacctgtacgcgacttttgtcgacggcaaacccactgccggaaggatcgaatatgtgcgcatctttacgggtgtagccgccttcatattgttgatcgcctgtatcaacttcatggaattgtccactgcccgctcggtcaagcgtgccaaagaagtgggcgtacggaaggtactgagttctgggcggatcgacctgctcattcaattttatgcagaagcgct

SEQ ID NO: 75611 - DNA, 577 bp, Arabidopsis thaliana landsberg
  unsure (1)..(577): unsure at all n locations
tttattgattttcttgattggtttgtattcttacaactatataattttttctattgacggtttaaggtgcaagccagtaggactttccataaaatcaatgttcttcttagccattacgtgaaagttctacatgtaatattgactcttgaacagtatgaacaaaaatcaattaccaaatatatcaatataaaatataaatttcaccaaaccaaagtctaaaaaccgaagaccattttgtctgaaatcgaagagaaaacgcgttccggaatttcgctttctatcactctcagtatctctgtcgtcttctctttaacacatttgactacgtgtcaactgcttcatgggccattcttttgttcatcaacaacgatatattattttgtactatatcaaaatgaacgtgaaaaagaagcaacacanaaaccactcaacgtaacttataagtacatcagttttagattaattaacgtatatgattgctaaatatggattgttcgtttgtttaccaattaaccaggagatcaaagattgtttttgaatctaaatgaatgttataaacaatcaatcttttattttt

SEQ ID NO: 75612 - DNA, 422 bp, Arabidopsis thaliana landsberg
  unsure (1)..(422): unsure at all n locations
gaaatgaaatgctattgtttcccagngnggtatctcaccagacaactttcaaggcaatccttatctgtctagtttcttcaatatcgtcacaaccagcgccgataaagacagcaaggtatagttaatatgttcctatacaccgattatacaaattccacaagctgacaatttcaatgaagggataaatttatcttttttctttccagacttttgtttcaactattcgatcaaaacgataccctgtgaccgccttccaatggcatccagaggtattacacacaagttaacttgtgtctctcattagtcttctcaatcctttgttaacttatatcttttactatgctatatgctttataatggatatatgtttctaaaaagatcctttaaatatactctgcagaaaaatgcattcgatgggatca

SEQ ID NO: 75613 - DNA, 259 bp, Arabidopsis thaliana landsberg
ttcattactgtctcctcaaatgaacaagaatggtttgttcttgccattacatagacagagtttgactttggtaactaaatacctgttaagcatttggatatctctttatgaaatgcaaaaataagattgccaaacattgaggtttcattcgtaagctgtttcaggcccactacttagcacctagatcaggattttgcaaaatagtaaaaaatatctttgaacgatagaggagctcttgcagccaacacccttttttttt

SEQ ID NO: 75614 - DNA, 376 bp, Arabidopsis thaliana landsberg
ccttatggcggatgctgcttatgtgagaactaccgtaaatgaaaagcataaattaaatgcgctgttctatgacgacccatcgatggtcacacaacttatcattggagagttactaaaagataatcatggcagatctgatatgaattattgcaaatactaagtccggattgccagtatataatgagactgaggcaagctcgaccataaacaaagtattgcgtctaaggacgcaacataatggtaaaggaggaaacatattggtcagtcacaccaaaaaaaaaaaatggagaagaaagagaaatggagagagtgaaagttcaaagagacagagaagcagagattcgggatcccttcgaaaccgaaggtgctacaaaac

SEQ ID NO: 75615 - DNA, 190 bp, Arabidopsis thaliana landsberg
aggtatgaactgggaaccttggcggatttgaagaaggaaatctggattcaactcaggaggtactggagatccaattgatgactgggggccaaggggacgaggccgaaactcaagcctgggtcaatttggggaacgctgaatccgatgctgaagatacacagctggaggtatgggtgtgcgcatactacat

SEQ ID NO: 75616 - DNA, 453 bp, Arabidopsis thaliana landsberg
ccattccttatttttcttccgcatcatagctttctcaaagtatactttttttatcattaatgcgttaatcatatataacaataaatctggtatctataaatgatttttctgaggcagcaatgaaatatataaaagtagcttaagttttgtatattactttttaggagatgtattgtcgagaaaaaacctataagggactcactaagaaaagcagaagcaatcgaactatataatataacgtaaatacgagtaaaatgtaactaattacatatatcagtttgtgtcaaagtcattattaaatttacagattcaacacattttaatcaaaaaagtgaagctttttgtagtatctatattgtacacgtgtgtacagaaccaaccttgatttttagtcgcaacgcttatttattttattttattggattaaagacctaatattacaatattttacga

SEQ ID NO: 75617 - DNA, 458 bp, Arabidopsis thaliana landsberg
  unsure (1)..(458): unsure at all n locations
aaaaaaagaagcaatcnnnnnnnnnnnnnnnnnnnnnnnnnnnnnnnnnnnnnnnnnnnnnncctttaattaaaaacaaagaaatcattgagtgagagaggatatactgtacgtatattattagaaaatgattatttttcccctatccagtaaattcttctgaatctcttataattcaatttgtttccaaataacattctctctttaacacagccgcctttgtgaccgtccgatcttaaatcagcgtttccggttcatttgacggcaactctctctctctctctctctctagagaattgatgaagaagagcatctatcttttttgtttttgaaaattaacaaaccaaccttttttcaaacccgtaaggggagtttttttggaaaccccccccttggggtttttttttttttccccgggggggtttttttgggaggggggttttttggggggggttctt

SEQ ID NO: 75618 - DNA, 540 bp, Arabidopsis thaliana landsberg
aaaactgttgagccaccctgatacagcccgaagagggaattctacgcggcctttggtatgcgctagccatagcttgtacgattctctggtataatcacccgggtggttttacatcaagagaacctttgaaaatcatattgattttagtagcaataggtattggtacgctggcgggttggttgacggccaatcgtgtacaaatgaccaaaatgcctgaattagtatcactatttaatggtatgggaggggcttgtgcagccttgattggcattatggaatacgaacataatataggtaaaacaggcgctctggcaacgattatagccggaatgattataggctcggtctctttcagcggaagtatcattgcttttctgaaactgaatgaaaccatgaaaaaacctatcagacttccgtcttataatattctgaatacaatagtaatggtagccttaattgctttcggggtatacatcgtttatgcgcagccagagcatatgttattgccgattttactttttgctgctgctttagtctatg

SEQ ID NO: 75619 - DNA, 161 bp, Arabidopsis thaliana landsberg
ctaattgtcttcttttttcccttaaaacccaaaaaaatgaagatttaatttaccaaatgagtagatatgtgtcgggtataacatttttgggagaagagggaacggctggaaaaaagaaagagtcagtgctcccacccccccgacatggccccccccccccc

SEQ ID NO: 75620 - DNA, 454 bp, Arabidopsis thaliana landsberg
attatcatttgcccaaactacaaagtccgtttattcatgctcaagattcatcagaattcaacttgttagtacattgatcgtttccaaaaatgtcttacgtcgaattagacatatgtacttaaatcttatttaggttttgatcttcttctttttttcagttaaaagggttattgatcacttctcactctctttctatggaataagatgaactgatgaagtacaaacaccaaatacttaagttttatatgtgaaaatgattgaccccattagattcgtagtcaccgatcaagaaaaaaatgatggtcgaaaatagaatctaaaatgtggaagatgacaaaaactgtctccacccaaaaaaaaaacacaagctagatcagtcatacagctaagcatatctatattctaacagaggtcctaaattgtatcagaagaagagttttgtgtggcgtcaaga

SEQ ID NO: 75621 - DNA, 646 bp, Arabidopsis thaliana landsberg
atacccgtacgagaagattattgtttagatttggattagagctaggttttttttgtttcaataggaaatgtctgttgctgttgttgctttaagcccgattcatagaggatcggcgtttgctgttggtggtttcggacaatcgacgacgacgcattactctgttaaatcggttttggtgttccttagtgtttctggttctacgatgcctatgttcatcttggagtctgattctattgctgaggttaaacttaggatccagacttgtaatggttttagggttagaagacagaaacttgttttcagtggtcgagagcttgcgaggaatgcgtcacgtgtgaaggactatggtgtgactggtgggagtgttttgcatttggtgcttaagctctatgatcctttccttgttactgtgattactacttgcggcaaggtctttcagtttcatgtggatcgtcgtagaaatgttgggtatttgaagaaacggatctctaaagagggtagaggttttcctgaggttgatgatcaagagatcttgtttaaaggagagaagcttgatgacaacagaatcattgatgggatttgtaaagatggaaactctgtgatccatttgctggttaagaaatcggtggaagacactgttgaaaag

SEQ ID NO: 75622 - DNA, 428 bp, Arabidopsis thaliana landsberg
ggaccaaggggcttcatctattattatgaaatttatatagtgaaccaaatcactcggcggcaggggacaatttaagagcctgttttcatcaccaatagcttaaagtggagaccgatgacagctctaccatttacctctatccctttctatacacagaccgggtgaacttaataaaatcactacacattggctcgtccaccagatgaatgcaattgatatgcattatgagtctatctactactacacgcattgcatctcctcatcatgctctacactatcacctattgcagaccctggagtcccaacataacccagtgaggcacacttacgaacagctgactttatgtcaagctgtacattggatccttcatgatgtaaacaatggggatgggcttatcttattctatcaagactcagagcaggagacc

SEQ ID NO: 75623 - DNA, 362 bp, Arabidopsis thaliana landsberg
cccatttttttattttttgtccttcacctttacactaccgcaattggcaattaaaaaaagcactttttctctataattagtactcaccaccattttacctaaaaaaagttcttaatatctcttatatctcatcaacctgaagaaacaaatattctcttttcttttttatcgagaattttaccacaatatcaagaaaattccttgcttttccatttacgaattataaattgaattcaattccaattacatctacttaataactcttagcacattgccatcgatatgttattgcttactcctgaatcagaaaatgaaactattcaaaaaaatttctgcactttttcaatctttttccattgaat

SEQ ID NO: 75624 - DNA, 483 bp, Arabidopsis thaliana landsberg
gtaattaatgtatacgtacctagcggattaacttagttttgccgaccttatgtgccgcctattgatttgtattagcacaataactatattagaatttgaatgtaaatttttgaatatgtatacaccaaaactaagtaaatatacaacatacactgcatgtaaaaattactaataattgagctgcaagataaaaatcattttggtataacttttgttgatttcaattggctttaataaattttcgatatcttgctcaattcatcttgacaagaaaaaagtttactcttacaccaacaaacgaagagtgttaaaaaataaaaaaatgaaaaaacgaatagttatgaagatttttatatgaaaattcaatttttattacaaccaacataagaaaaatcatttaaattaactggttaaacaatagtattcttatatatcataagcgtattggaaaataaacataaattaaacatgggtactataact

SEQ ID NO: 75625 - DNA, 387 bp, Arabidopsis thaliana landsberg
gccggctcctttgtactatacttgacagaatcttttgttccgtctgcagtcctatatagattgggagggtgatttagcatttattcctaataccctaaaggggatatcctcccggtctatattcaagacgacgacgacctatcaaggccaacagcaatggatcgggccaattaatctccggtcgggtcatttctttaggaattacgcggagatctgtctctctgtcagctgactcgacattttcgagttcggtgggataatcgatcggactcaatggacgcgatcagtgacccacgccgtggaaccaacggagaccacagtgagggagacccagcaagagaatctggatgccacaactgtgagttcgctgcatggagctcccaaacc

SEQ ID NO: 75626 - DNA, 111 bp, Arabidopsis thaliana landsberg
ttgcatagacactgcactctagcgtaggttgagttagtactgcaacttttttatagatttcttgctgaaggactctcatggggaaccgaggacgcatccttgatggacgct

SEQ ID NO: 75627 - DNA, 255 bp, Arabidopsis thaliana landsberg
  unsure (1)..(255): unsure at all n locations
ctctctcttatcgcagtgaataatccatatcgaaagcatttgtttctcgacgaataattcgcgaagcaaccggaggcgggggagggaaagaagtacacgancaaaccgcaagccagagcgncggggaaaaaaaaggaacgggggaacacccggcgagagcagaggaacccgagaagaaagccgagaaaaagcacaagggacggggaaaacgcggagctaagcacgaggaggcagcagacccgcacgaaaaagcag

SEQ ID NO: 75628 - DNA, 392 bp, Arabidopsis thaliana landsberg
  unsure (1)..(392): unsure at all n locations
gaagaaccagcaaacnnaccgagaccagaacccacagggaagaaaaccgacccctggaaggaactttctctgcagcangnacagacaaaagcacgcggggagcggggaaaaaacaacccacccccaacgccgaagcaggagcaaccaggacagaaacaaagcacggggccgaaccccccccaggcgacaaggcaacagccacgaacagacaccgaccccccggaaaggacaaaagaacgggacccacnccgggacanacaacgcaccacagacagangancannacgccccaaccgggcganncnaccccaccccccagaaagaaaagaacccaaaccaaaagacccaacagcaaggcgagacacccacacaaaacnncnaccccgagcaca

SEQ ID NO: 75629 - DNA, 332 bp, Arabidopsis thaliana landsberg
ttcactatggtctcaagaaaaaccaggtgaggtaaggtacagcaggattagaattcgatggttttaatcagtttaggggctcagtttcaagggctgtaatcttaaagtaatcctggggtgattaaggcaggaaatattgcatgagacttttcgacctcccaataaaggaggcagttgggctatagctatatggaggcacacctggctttgattttgcgtctagaaaatggccaatattataaggggacatatttccagaaccatcttgccctatgacatccaaagcggcgggcaacagaacattcccggaatgtcagaaccctcaattccct

SEQ ID NO: 75630 - DNA, 543 bp, Arabidopsis thaliana landsberg
tggcctgatggggaaccagccagtcaatatcatcaccggtcaaatcatttttttccaataattcctgttttacatctgccataccggtaacagcaaatttaaagacatgtttgccttcctggtaaataaaatgctcttttgcggccactgtttcaatagaagccggacgcaaagaaccacctgctttcatatgcagatgtttggcgccagaaccgtcactatagagaatagagtccattatacccacatcttctggtgttggttctagcagcacggcacctgcaccatctccaaaaataatacaggttgttctgtcggtataatctacgatggcactcattttatctacccctacgacgatcacttttttatttctgccactctcaattaaagacgtacccagattcagggcatataacaagccgctgcaagcggcactgatatcaaaaccataagcatttttagcaccgactttatccccaatcagattggccgtagtcggacagatcatatcaggggttactgtcccacagatgatgcagt

SEQ ID NO: 75631 - DNA, 255 bp, Arabidopsis thaliana landsberg
ataaatgatgcaagaaaattgcttggacactgattcccatcaagaatgcatgggatttcaattggcggtggagcagatatctaagacgatggcgatgggagtagttgtaggtctggtgacgatagtagctttaggagtaatggctactttgaaactgtgaggagtagagagacaggaggacagagacggaagacggagaaggtcagctgtcatgaggtttgatggaggaccaaaaagtccataagttgtgcccta

SEQ ID NO: 75632 - DNA, 384 bp, Arabidopsis thaliana landsberg
tatctagaatatcggtgtgtgtttacatttcgctattggtgccatgattggtgtcaaatttggaggggctgtagcaggaaacatagggaaaagcgacgccaatgtcaccgcggcactgatcttcatctatgtagacggtttcgcctggacatggggaccgctgggatggcaggatcctagtgagatatctccgctagagatcctgtcaccagctcaagcccttaacgattcagacaacatgttcttcacattacttgcggctcagctctgcctgactatgctactgacacatgaaattccgactattcttcttgttagacttctttgttggatcttgacaatatgatctaccagatgcgcctgagcatgacttgccgtctctag

SEQ ID NO: 75633 - DNA, 533 bp, Arabidopsis thaliana landsberg
atctttatggatgcacttgcaagatatttactaaatgtctaattattcaatagttttaacgaacaaagagagaagaggtcaagataattgaaatatcagaaaggtggttaaacaattaaaggattgatctttatggtgtatgcaaatagatcaacagatgcacgtaacctaccacaaatctgggtggcacagcgatagcttaattacgtctagggagagaattagaaaacctcattttcgaaaccttaaaaggaaataaattgtctttattctttactaacttttagagaggataagaattaacctagatttatttgatgccctatcactatccgtatctaaaaaccctatgctatcgagaaattataaaaaagaataatgatttttgaaaaggaaatatctcacaaatcaattcaactttatgaatgatgccggaaatgtggaacacatacagaacaaatcagttcgaacgtagaaactgtgggtctacacgttttagagaactggtgtcgattaatagcattagcaactag

SEQ ID NO: 75634 - DNA, 471 bp, Arabidopsis thaliana landsberg
ttatcataattctagaggcccattctttgctggttttggtaaccttttctactttttggttctgttggtgaaattaatgtaagacaacactaaatgctggcttttgtttggttttcacgaagcccctgcgtgttggccattttctttctctcgcctcttgtgagcggagcgcttatggccatcttgtttccattggtaaacgacttttcttgttgctttttgagtgtcttgtatgctgtatcttaacaaaaccagtattattaacagaatgtatgcagtttggcctaactgctacaggatcaggacctgaaaaattgattggggccccgagaagaacgtggaaatgtgcaggtctaggaaagctttcaatattatatattgctgacactctctcgtaagcccatttctctcttcatctcatgatgttaaagcttcatatcggtaaatggttactgggccctatcaaaatat

SEQ ID NO: 75635 - DNA, 129 bp, Arabidopsis thaliana landsberg
cgtgttttgtattggggtcattaattgtacatattgtgccattatgatctttggttgtttttacggttttgaaaaatcagcgaccaataggttaggtgaatacaaaggaaagactaacaacgattggaa

SEQ ID NO: 75636 - DNA, 118 bp, Arabidopsis thaliana landsberg
attgaaagcttacaatgtttccggcgatttcttctctgtgctggctctgacttctgatctaacttctttaaatttctttgccatgtccaaaataatgcaatctgtggggtttcatatc

SEQ ID NO: 75637 - DNA, 174 bp, Arabidopsis thaliana landsberg
gaataacgacattcattctatttcgagccgttgcattggtacgtgtaacgacattaaatcatattatccgatcatttttttttttccaattttttgttaagcgtatgccgcagaggcggaacccctatttagtaatataaggccccgagtacagattcctgcatattatgtaag

SEQ ID NO: 75638 - DNA, 270 bp, Arabidopsis thaliana landsberg
  unsure (1)..(270): unsure at all n locations
gacaggggaaccacccgaggaggaacacaaaacaaagacggcgccaacacacccccaaccgaacggggaaccgaaacaggacccaaagccaggccggagaaccacgcaaagcgaccaaaaaaaagacagggagcaagacaccgacgacccaacaagaacaancaaacagcgagagagcgcgacggacacccgcgaaacacngcgacgcacgggcaaacgaggagcccaacccaacggaaccaaagcccgcgggaccgccacacacagcga

SEQ ID NO: 75639 - DNA, 500 bp, Arabidopsis thaliana landsberg
aaggatggcatttactgttgcgtacaataggtttactgactatatgataatttagcggactctactttttatagcattctgagtaatacacgagaccttgcttcttattgcatactgtactactactaacatttgtttgtgtatgtcaaagttagatatagtaacgaccaatcgcgagacagttgtattctgcattcaatcgccaagttgctcgcaatgtctgtgcatgactttgaaagccgtagcgctactaacgatgcaatagtacccaaaatagaaaacaccttacatcttgtttttattcaaaatcagatcgaattattatatgctctagcagttgtctctgttaccaaataccaatgcatgtgtgaaccatgagagtgatcatatgtatgtctaggtcacctgaatcttttcaattgataaaacctatatgtatgaccaaaatgaatatcctactatataaagtgggaagtgcatgttaaatataaccttatttt

SEQ ID NO: 75640 - DNA, 552 bp, Arabidopsis thaliana landsberg
atattccaactttttttcttactacaacatattcctcaaaacgtctcataaattaactactttttgtaataacacctggaatgaggaggaaccaactagttcactgttatatggtattcttgattaccttagaaattccagcaataatacatataagacgtttgtttgacaaaaacaaaaacacaaaaaccaaaaaccaaaaacaaaaacaaggtgtgtattatagcaacgatacgccataatcaaattgtagcatacatcacttaaactatatgcaagaactagtaagaaaagggaagcaagtgtgcagattaaacaaacatatgttcatatttgctaaaagagcttcttttggtagcgactggcattctggcaagttcggagcatgacatttgaatcttgggtttcccaagcaaattggtaataccgacgtctttaacgttcttctttagcaaattagtttctcgttggtttttccaaaactcaataactcttatttttccttttgctcatcactcattcatgaatcatgatcatagtagaatataatct

SEQ ID NO: 75641 - DNA, 390 bp, Arabidopsis thaliana landsberg
atcggagagcgcgacgtttcggctgacggcgatttccttcagttcgttccagattgcgtcctcgaggctcacgctggtcttgtgacccgcaatgacgatggatcgtttgacaacttgggatttcattcgtggtctcccgtatccagtcggtgttggtcgagcttcacattcgcttttttcttttcggcttccgtcagcgaacgctcgcttttggaagttccgtaaagggcacgctgcaaggctgcttcatccgcatcttgccgacgttgcttgcgcttgcgttggagcctgaggttgacgacatcgcccatgcttgggtttttcctgccgctctggtcctggctcccgttcggggctcgatggttcccgtggttggagttgcagtaatgt

SEQ ID NO: 75642 - DNA, 391 bp, Arabidopsis thaliana landsberg
  unsure (1)..(391): unsure at all n locations
nnnnnnnnnnnnnnnnnnnnnnnnnnnnnnnnnnnnnnnnnnnnnnnnnnnnnnnnnnnnnnnnnnnnnnnnnnnnnnnnnnnnnnnnnnnnnnnnnnnnnnnnnnnnnnnnnnnnnnnnnnnnnnnnnnnnnnnnnnnnnngcatcgagcgcagttaaagcataattcgcacgaaacactgattatggacattgacataacctattacactgaataaagagaactattactgaatgtgtgctacagatatctgccaatctattgcaatgcttatatattgaacgatagccgtatgcatatatcataacacctatagagaggatgaaaacatccgaaaaaccaactctatatcataacttctggaaacgcacatgatcagcaaggattctg

SEQ ID NO: 75643 - DNA, 157 bp, Arabidopsis thaliana landsberg
  unsure (1)..(157): unsure at all n locations
ccaaccaacaaaaacacaacaaaaacaaaccagacccaacaacacccgaacgcngaaccggagagccaaacagncccaaagacaaacaggcgcacgcaaccggcaaggaacaagaacagagcnacaccaccgaaccaagaagaacccaacaccaacc

SEQ ID NO: 75644 - DNA, 315 bp, Arabidopsis thaliana landsberg
accatgtaattgcattagtcgaatagctttcatagttaattgtaaacaaatgaatgacagtactttttgacgtgtgtattttaaacaatttactaatggtgggtttgttcctaagtgtacatcatctgttacaaatccaatatagatgacaaacgaccaaatatatgtaaacattttgggatactttttgtgccctttctctgttaggataagcaccaggtccatatatcgattactgacaaaaaaataaagcaaaaagagaggagttttaatatttggtaggattaattaaaccaatagatgatctagcgtatg

SEQ ID NO: 75645 - DNA, 247 bp, Arabidopsis thaliana landsberg
tacaagtaaccgccccatttttcccacattcccacaagaaacccgtcaaagttaaccaaactaacattcttaaattagacaaacaagccccgactatcatcacgtacatcccctaataactgaaagatagtgtagtattcatccagcatgacctacaacacttctatcatcaccatatacccaacttaataactaaaatataatcttccaactatctaccaatctcgctaaaaaaaaaacgacaatc

SEQ ID NO: 75646 - DNA, 595 bp, Arabidopsis thaliana landsberg
gtttagtcgtaacaaacacatttgttgatcaaaaatatgtaatgttacattcactttaccgctcaccaagttcttttatcactaactcttcctataaatttggcatacatatttgctgaggatgaatatttcactaaataggatacaaatgcgaatatatatgactttctgtaaaaaataattcattctatttattgaggtcaatacatttcctaaatagaaatcttacccaatatggtatatataatatatatacgtaacacataagttgcggtggctataacaaaactttgtttaatttcaagagaggggatagttcgttactactaacattttaaggtacattttacacgttttgatattttcttgtaactcatctacaaaagttaaacaataactaaagagattcttcgtttcgatatatggatataaatcagagcagctagtagcacagggacacgagagatcttaaacccgacatttaccttaaataaaggtcaaatgtatggccgctgagaaatgaaactcgacctttgccacgttttaaggaaataaacattttggaaatgcttgaaccattgaatattgcctaaaa

SEQ ID NO: 75647 - DNA, 573 bp, Arabidopsis thaliana landsberg
atggattaggccaagtctctcttgatctcttctcttaaatgtgttaccaaaacgtgaagctagaccatgtgaccttggcagcaatccttacagcttgtagccacaccggtttaatacaagagggactcgagttgcttaatttaatggaaccggtttacaaaatccaacctcgaatggaacattacgcagctgcagttgatctcttaggcagagcagggctcgtgaacaaagcgaaagagttaatcgaatcaatgccgttgaatcctgatccaatggtattgaaaactttccttggagtttgcagggcttgtggagagatcgaaatggctactcaagtggctaaccatttgctagagattgaaccataagatcattttacgtatgtttcgttgtctcatatgtatagcgatctcaagaaatgggaagagaaagctagtgtgaagaagatgatgaaggagagaggtgtaaagaaagttccaggttggagctggattgagattagaaatcaagttaaggcctttaatgctgacgatcgatcaaatcctctgtgtcaagagatatatatgatgatta

SEQ ID NO: 75648 - DNA, 547 bp, Arabidopsis thaliana landsberg
  unsure (1)..(547): unsure at all n locations
gcgaccggctannnnnnnnnnnnnnnnnnnnnnnnnnnnnnnnnnnnnnnnnnnnnnnnnnnnnnnnnnnnnnnnnnnnnnnnnnnnnnnnnnnnacaacttgaagcattgtcggcggggcaactggatttcgcgctgcttcgcccgcatgccgaacacggcgaactggagacgatcgaactgctgcgcgaagggctggtgctggcgattcccgagccggacgcaacatcctggcccgagcgtccggtgcccggggacttgagtggccggcccttcctgcagtattccccctttgaggcgaggtattttcataacctggtcgaccggattctcgatcaagctggggccactccggatgtcgtcgagtacgttgcgcaaatccacaccatgcttgcgctggtccagtccggcatcggcgtcgcgctcatcccggaagcggccatgcgcctgcattttgaaggcaccgttctgcgccgctttggcaccgagtccctcagccggtggtgacggtgtgttcctatcgcaaggacaacgacaatccgatgct

SEQ ID NO: 75649 - DNA, 400 bp, Arabidopsis thaliana landsberg
  unsure (1)..(400): unsure at all n locations
aaaagtttgtaaattttttgattaaaatctaagatgatgtaaaaaagaaaagaatgtaaataatgtttttgtccgaaatttattgttacagtcgttttccgctgaattaaattcgaatttggtactttgccaagaaaatcgggtaattattttaacgtttttagaaaaaatgactcagacagtgaaaacaaagtttcctttttgtctgtttctgtcttttatttttgactacagtagtaggcacacacacattctcttctattttggcgaatttcgccttttgtgcattctctctctctctctcccggagtctcaggctttctcttaacnnnnnnnnnnnnnnnnnnnnnnnnnnnnnnnnnnnnnnttgatagaacccagatcaaatctgttgacattt

SEQ ID NO: 75650 - DNA, 562 bp, Arabidopsis thaliana landsberg
  unsure (1)..(562): unsure at all n locations
caaaagtagctaagcagctcaaagtaccataagataagtgacttaaactcgtgttaatttgttgtgtttaacagaacttaaaggtgtgcctgtggagatggtggcgaagttagttccagaacatgcgaggaagcaatgtccgtggctcagtttgtgatttgttctcacctgcaaacacgaaaactagagcaaagcagtcgagatattcatctcttctcttctctctccttctctgtattaatattattataatgatcatatctcaatctgatgatttagtaaccctttgtttgttgtatgagtagagaaagagtgaatcatttgtgggggttatgatattgtataagccaacaaagattattttttaaagagagtttggtgttttctgtctcattacaccatcatatattttatagaagcagacgagatataccaatccattgtgggaagtgagtcggaacacanaagcaaaatgacgtcaaggaacagagaacctaaacaatggaagaaagactttntgttttgtcttttctggccattgtgtttcccaacagctcaagaa

SEQ ID NO: 75651 - DNA, 306 bp, Arabidopsis thaliana landsberg
  unsure (1)..(306): unsure at all n locations
gaagctgnggcgtgtcatggagtgttatttggagggttctttaggccacacatctttaggtataaatgggcattgctatgagtcactaccgaggcaacagaccatagggttttgccacaccatctagacggggaccatacaagcgtacctctgagacatgctgttgttgccccagtctcataaaaaccttacagcttataccttgcatgatcgggccttccacgtgctccagccggacacaaaaggcgtagaagttaaagtgaggcaactcacagccatggatctgcgcctgagaggaatctaagt

SEQ ID NO: 75652 - DNA, 532 bp, Arabidopsis thaliana landsberg
tggaaatggcgcgagaagcccgaggccatgaccatgtacttcttgggcacgcagtttgcaccatgtatgtgccgccgacccggaactcctcgtcgatggccacccgcttgccgcccagcgccgtcagccgcgccgcccgcacgccgccagaaccggcgccgatgacgaagaggtcgtagtcgtattctgtcatccgcggctccgcgagatcagaccggacggcggtccgaacctcctgcaatctgaacagtccgatcccacgaccgggccgcgaaacctgaaagcgacttagggggcccttgtcgcggcgacaacccgcgatctccaaactctcgtttcagaagtcgcgcgtgacgccgaactccacccgctcgcgagaatatctgcccagcacgacattggatgtcgaacggctcgcgctcagttggatgaatggaaagacgttgcgaaaggcccagtctcgcttggacacccgcaggccgacaccaatctctcggtcgtgccggcgcacgccgaaagcgatcgacggacg

SEQ ID NO: 75653 - DNA, 566 bp, Arabidopsis thaliana landsberg
  unsure (1)..(566): unsure at all n locations
ggcggttccctttgcctcagcagcgtaacgagcattcccgtttgcttcaaccctacggtaggcggttgggtttacgggagcagcgtaacgagcatccccgaaggcttcaaccctacggtaggcggttcccttgacctccgcagcgtaacgagcatccccgaaggcttcaaccctacggtaggcggttcccttgacctccgcagcgtaacgagcatccccgaaggcttcaaccctacggtaggcggttcccttgacctccgcagcgtaacgagcatccccgaaggcttcaaccctacggtaggcggttcccttgacctcagcagcgtaacgagcatccccgaaggcttcaaccctacggtaggcggttcccttgacctccgcagcgtaacgagcatccccgaaggcttcaaccctacggtaggcggttccctttacctccgcagcgtaacgagcattctcgaaggcttcaaccctacggtaggcggttcccttgacctcagcagcgtaacgagcatcccccgaaggcttaaccctacngtaggcggttcccttgacctcagcagcgt

SEQ ID NO: 75654 - DNA, 419 bp, Arabidopsis thaliana landsberg
aactcgaaaaacattgtataaataataattacaattcagggcaattttgcttaagatctaaacaaatgcaaggtagtatgaatgtaagttgcaaccaattgcaatgaaacaaacaaaatttaacatatttcttcaaattactattatatattttttttaaactttagaatgtaaagacattaaattgtaaacaaataacaatttttttcctgttttatcatctagttttaggagtttgtcttacatttgaagattaaaaaaaatatccaaaaattaaaagcactatcatatagcaatctcgcattgttttgtactcattgcacaataattttagttattgtgcctttagtaatagataaacgatccaatttataactacgtcgctgtagaaatataacatcccaactgggttctgattc

SEQ ID NO: 75655 - DNA, 246 bp, Arabidopsis thaliana landsberg
  unsure (1)..(246): unsure at all n locations
gcccacccgccaagggggganattgcaanctagacccacgagccccgacgcacgaaaaananccgaaaacaaggcccgaaagagcaaancnggggccgnaanacagcacaaaacacgaaaacgcgcgaaaaaanacgnaaagggcaaaaaccggagncgacaaaaagncaagggaaaagnnccanngncaggcgnccnncgacggagggcgcccaaagggccanccgaaaagggaacacangccaa

SEQ ID NO: 75656 - DNA, 540 bp, Arabidopsis thaliana landsberg
attttccacccatttaaactattatccaaattctacttagattatttacagattttatcattagttttaaacttttaatacacatatatcacacaaaataaaaaaaatatataataaaaaagcaaataattaggcaactaatctccatatttatattttaacaattaatcactagagctttgtttattttatattaataatctgttttttaaataattaaaaagccatattcttatcttatattaatatttttaataaatatttatttttttatataaatctttagtctgatgggtaaataatatttacaattatgtatatgtttatatttaaatgataaaatatattatacttaagatttggaacactataaaatcttaacttgaactatcaaatccatctttgctaaaaaaatttggatttcttatattgaataacaaagaaatattattttatactaaaaatctcgacattcttaaaacatacaaaactttgcaacatttttgaaacaaacatccacttttttattacattgaagct

SEQ ID NO: 75657 - DNA, 621 bp, Arabidopsis thaliana landsberg
  unsure (1)..(621): unsure at all n locations
gctggcggtaccaaatgcaacggcaactccaatgatcgtcgtaatgttgtacgacgcgatgatactgtaccattcaatcgtggcgatcgacctgttactgatgctcctgctgatgccgcagcaccaccattgttggcttgtaatgtcaatgcaactgatgatacaccaagtgtttgtgcacgattccacataggtggagcattaggtgaacgtggtgatgtggcagcactacgtggcgatggcggccatgcattgttagtcgagttaccacctcgaggactgactggtgtcacaaaatatgatgatttaccagacttcaatggtggtggcatcacttgtgattgtaccatcactacagtttgtcgaccattaccaccatcttgtactttaccacgtcccatcaaatacaagatttgactcaaacatatgagaacgcatagcatttgtgcgccagatgctgcgagataacccacccaacttgattgaattgtacccaggatcgctgttaccgcangtactaacacatcacaacactaatgaatatcgaactgagctggtgtgtctgacgtcacttcttaccaatgatagccaacaaaagcgtttgaacaaataccatatgaa

SEQ ID NO: 75658 - DNA, 195 bp, Arabidopsis thaliana landsberg
ggttgcctgtactgacagctttttgatccttatcctccttaaggacatttttgttgagcttgcaacgcgtccgacggggtgcccggctgaccgtcttttacttgtcataagatgatagaggagcgccctcctaggcattggattggtgacgcgtgcggtctttttgggagatgcgctagtcagaatgttactccg

SEQ ID NO: 75659 - DNA, 267 bp, Arabidopsis thaliana landsberg
  unsure (1)..(267): unsure at all n locations
tttgggatttgaganatcaggaaaattgaatacaagccctctattctaactggactaaatgcttcaccaatggccatcggaaaggtccaacgtattttattactctgataaaaaaaggaactctcctgaaaggatacgagattcatcccatctacaggctatatacccgtgaccgaaaaccatattagacattagaagagataaccctttagcggtcagaccaattaccatcgattcgatagacattcaacattctccagatgaact

SEQ ID NO: 75660 - DNA, 416 bp, Arabidopsis thaliana landsberg
gcgccgacggccctggtggccagcagcactttcgaaccgtctggcagcttgcgcactatgtcatagagaaggtgcgcgggaacggcggtggggccggcctgctcgacctgcgcgggcgtcatctcagagatctcgaggtcgaggtcggtcgccttgatgtctgggctcgcgccttccgcgcacagaagcgcgttggagaggatcggcatcgcgttagaccgatccaccaggcgatgtacgaagctcaacgactttctgagattggaccgctcgagcgtgaagcgcatgaacttgatccgattgctaccggtggcacgccggaaaccggcgcggcatgtgccgtgaagttccggcaagcgccggatggatgtgaacagccctaatggcccaagtccaagcaggatcgccagggctta

SEQ ID NO: 75661 - DNA, 397 bp, Arabidopsis thaliana landsberg
  unsure (1)..(397): unsure at all n locations
gaaataaatcaaatagtaccattaatagttgaccaaaaaatggaatagtatataaattttactatcttgttcataaaaaagatgtgattttaacacctttccttttaatatgcaaaaagaaaagaaaagatctctaagaaaagcatatatttttatattcttattttaaaatttttaaagtttgaccccaaaaataacagatctggctcaaagtgttcgatctaactttgttgattgaatatttattattaagatgtaaaagaaggaaaaaactattggcatataaaaataaaaataaactatttatttatttttttctagtttgggttttagtggaaaacnggggttcccttaattttttaccccctcacccgagaaaggtcacccgttatcatgc

SEQ ID NO: 75662 - DNA, 606 bp, Arabidopsis thaliana landsberg
tgttagtataatttgagtcaatgtaatgtagaattgactgatacgaacggatgttgaattagtaattatttttgtagagttgtatttgtaaaaagtcaaatgtatttgtacctacgtaaatagtgcaagccagtgagttttggaagctataaaacaattcgtcgcttttggtctcaaagttatcggagaatgtctacttctagtctcctgatttcgtagtttgcctcaatttttgtataggagagaccctacttttaccttaatagacatgagattagccagtcgtgcactagattcattcaataacaatttttttttttttttgtgtggaatatattctttcagattctcaaattgtttgggtttatagaaattgtgttgggtttggcccaataaaaacccaatgataattctcaacatcaattttcatttattctcgtctaattttgatagtatacttttaagacacaaaagtattacatttgctcaaacatgttaaaatgctacttttatatatttttgaaaactatgatacattacatatacgtaggagaaaacaagattttcatttcttaaaattttatgtttgttataagagaatgatgc

SEQ ID NO: 75663 - DNA, 499 bp, Arabidopsis thaliana landsberg
gtattaacccataataaaaaaattgctctccaccaaacatttttattatggggttggtgcatcacataaccacacagctaaactaaactaacgtatgaacatacacatataattgaatttgcatggaatatgaacaaaacaacgtaaactctgttttattatatttgtagtttcagaaaaaaaaaatttacaaaataattgttgtttttcatttatttatttaaaaattaaatgtattaaataaattttttactaattatattttacaaaataattgttgttttcaaatttttattagttgaattaggtgtagttaatgatgtttttataaaaaaaaaaaattttaaataaatttttttttttttttaatttatgtaaacaaaccttaaattataaatataatgaaacaaatagagtatgtgacgacgaacataataaccattattaattctctataccactattagatgtgtgggactatgttggtctctacttcatg

SEQ ID NO: 75664 - DNA, 459 bp, Arabidopsis thaliana landsberg
  unsure (1)..(459): unsure at all n locations
aaccgaatccccnnnnnnnnnnnnnnnnnnnnnnnnnnnnnnnnnnnnnnnnnnnntttgaggaacacacattttgaaataaggagagaggggttttggcaacggcaggtatacataacattaggaatggggtacagagttgacataatggggttcctccgattaatgacaatctgtagttattcctccttgggtatttgggttttttgtgtgttattaagagaattaataataggtatcactgcaggacaccaggagggtcactcaaggacattctcactaatagctattaacttattaaatgaagcagagtctcactgcaagagctgagcactcattagcagcttggatgtgcatccttgtaattgcccacnnnnnnnnnnnnnnnnnnnnnnnnnnnnnnnnnnnnnnnnnnnnntgagagcacacagaaggcatgtgttctcgtggcgtgagaaa

SEQ ID NO: 75665 - DNA, 549 bp, Arabidopsis thaliana landsberg
tataacttcttagactgttttcatactttatcgtttatattttatgttgtaaagtaattaagagtttgaattaagagttacataattaagattagatgaatttatctaaaagttgtatgcaaatttatatatccaatcaaaaaaaaaaatggagagtaaacaaaaacctaacaattaatggttaagtacttgtgaaaatgataaaattattaattaaatatatagtttcataacagctagaaataactttcccttaatataattattttcttccatttccataatgatcttcttcttgttcattctatatacatatatgagcgtttcatatataatcttttactaattcgattgtgattttgattttgggcaatggaagatatacttggagaagaaaatcaaatcacgaaaatatattgatcagtgccttgaaggaaaccaaagttgacaactccaaaaatccatttcgttattaatatctaactgagtgatcatagtccatcatgcataacaatgtaccatccaaacatgtttgagagccatcatatg

SEQ ID NO: 75666 - DNA, 646 bp, Arabidopsis thaliana landsberg
ttcatttttgtatacccagatcataagagcatttccaattcatttgatgtttcacaagtctttcttgatttataattggttgagttggttctttttaagaaaagataaatttttatcccatttccaaaaaaataattactgagatgggactcaagtagactgatgatgggagctgcgattatgagaaatggaaagatgataaaggatttttggagtagattgctgaaaagagatggaaatatttgcataaggaaattgatgactgacattgaagatgttaagaagtggagtgagaagaaggacataatccgttttgtgtatatttgtgtgatagctgggttggtcatggctacgagtgaaacgaaaaagatagatcatttatatatcaagatggtaatggatcttcataacgttcgtaattatccttggggtcttaaagcttatgataatctactaaattgtatcatgaaagcaatatatgctctgaagaaaaccaaaagctatgttctggatggattctcatatacacttcagatatgggtgatggaagcaattccagacattggatcattgttgggagaaaagattagcactgaattcaatgaaggtccttggtgttctaattgggaaagggtgctgccaaaag

SEQ ID NO: 75667 - DNA, 545 bp, Arabidopsis thaliana landsberg
gatgaaaaatcctactctacatcgggttgataaatttattagagattctacaactttattcacaatttattgtatggtgggttataaatataccaaaggagtcagtagacagtagccttgttctccttggtttgagaaacactgggataagtggcaatttttttgtttaagggaaaaaaatcttcaaaatattgttattggaaaaggtgactttgagctttggccctgaacttcctcttaatgactcgtattgtggtagatttaagggcttgatgaaatttatttggctagatggaagcataaaccaattaggttatcgaattgtgaaggcacggaagtgtgtatggcttattgaattggatctggtttgctcttaaactgtagtccaaaatcagtctttatttggttttgacaaaaagatttgaattgataagccacgaagagctgtaagattttttttaattttttttttggataccgttaatgctaaattgttttaaaagtaaaaatgttgggaaatggaaattgctcttgctcttctgata

SEQ ID NO: 75668 - DNA, 328 bp, Arabidopsis thaliana landsberg
  unsure (1)..(328): unsure at all n locations
acgatgcatcgacgtggccatcctttgggagttgcctgnatgcggctgatgcccgcaagattgggggaatcgtcggcgttatgtgccgcgcccactacctggaggcgcacggcacccccgaagcaccgaaagacctgccagccacaactgcatgtgtgcccagaacgatgcagcgttcggcatctggcggctcagccgtggcaagcagagtgagtcggaaaggtgcatggcagctcagaccaacgtggcgaggtggccctgactgggcgctggacggcaggggattctgctgcgcgccgagtggaacctgtccgaccatttgcgcagc

SEQ ID NO: 75669 - DNA, 462 bp, Arabidopsis thaliana landsberg
cctcgcactcattctgaacggcgagatgttcgcgtccgagatcgtctttatcctgatcggcagcatcggtatcgtgcgcgcggggccaatcaccacgctcgcggctctctggctcgtccgtccgtccgtggacgggacgcgtggtagaatgcatgcgcattaacgcacatcgtatgaatacctcgcttcccgaaaccttagtcatcgcgagccgcccggtccgctatgcggccacggccgcactcggcgtcctcgcgctcttccttctcgtcctcacctggcacgcggccttcggccgacacgagggcgatccgctcagcaccatcacggtggagggcgagggcacctcggccgcagcgcctgacatcgcgcagatcacctataccgtgatcgaatcggcgtccacggtggcaagcgctcaggacagcgccaccaagaggagcgatgccgctctcgacgcgc

SEQ ID NO: 75670 - DNA, 545 bp, Arabidopsis thaliana landsberg
  unsure (1)..(545): unsure at all n locations
ccaagactgtaactactaactagtgagctgcatgtttttttggtggtttagattaaaaaacttgttaggtgaaactgggaggggttttaactttagttagatgctgacacctcataaagaatagatcatcttcagttcttgcgctgacacatcaccccatcaactttttttgtttatttgtatgtatgcttaaagatatatctcctttttaatataaacttcaaatttatcacgacaggaggatggggaggaggaagttaaggttgtggaagtgtcgtcgaggggtcttcccgggaaaaagaatgtactaaagaagtcgagagaaagttccggcaagccgggaggcaccaacaagaagccgttttagtttttcacttcaactaataatatttgacggagaaattcttccttacattntcatctatttagtgtaagatctaagagaatagcttcatatttgtatcgtataattcctgaagattgcaactcctacgagtcctttattttttttctttaagacaataactaaagagagacgtgaatca

SEQ ID NO: 75671 - DNA, 452 bp, Arabidopsis thaliana landsberg
tttattttatttgtgggcctcacgttttgtttatgttattttatttacatgctattcctactaatatgtgaccaattctaaacgccactaagatcagggaagacacagaccatggggttctagtcgttacacacagagatccgagtcaatacttgatcgctaagcaagtagagagttatgatgcctattattaactacatgaatctgaatgtatggaattcttcaagcagtatatatttaaaattttcaagattgaccatatcaaagaacgtgaaatagcggacattagaaacttaattcattttcattcatagatgtgtgaataccaggtcaagttttctaacaatacttggtcatagaataaaaagactgatatccgattgccttgtgcaatggtcactagactatggatctaatataatagaaaattgagatatttgcatttggtaata

SEQ ID NO: 75672 - DNA, 447 bp, Arabidopsis thaliana landsberg
aaagataattttaaaagaaatattatattgatagttttatttttctccacaaaaacgttatctccagttcaccacatagagagcatggaaaggacaattgggagacgtggacgcactttaagcccatcactagatttcccttatatcttttgatctcttcacttccacaacacaaaacacatcactgatccttctctcatcctcagtaacacatcacaaagaatggctcaaaccatgctgcttacttcaggcgtcaccgccggccattttttgaggaacaagagccctttggctcagcccaaagttcaccatctcttcctctctggaaactctccggttgctctaccatctaggagacaatcattcgttcctctcgctctcttcaaacccaaaaccaaagctgctcctaaaaaggttttcacatactctttacttgtcccacaagga
